United States Patent Application Publication US 2005/0228172 A9 - sequence listing, part 25

SEQ ID NO: 80328 - DNA, 1511 bp, Homo sapiens
aaataaagccttttttgtaggacaatctctgttttaagaaatgagattatttcatattgttgtccatgagaaaatattactagactgagagattcttcttatttaattctccctccaacgccatccttcccttgcaatgaacgcccaatcaccgttactttttttctcactatttaaaaacctctctcttgcccacagagttgcttttttaaaagatccctctcttttcctagatgctcttctttcctcttttctctgccctcaccctggccacaccctcctgcctgggtccatccggtcctacctcttgacaatgctaatttcctcttctcagtttggctactaaattttacactatgccataaacaggctacttgtgatgcctctggttattcgtaatgcatagccaaaaatacactaagtgccaccactccttaattcactgatttctagccagaagcagggagagaggaaaaatatcagtgctttactttaaagccattgtcttccattggttttcattaaagggacaggagaattatatgtaaaatgtaataatcttcaggttttcctgagcgttttaacaagccacgttcaggcagtagggttggaaagtgatgagggaaaacgacaagggtgttgaaagtccctaaacgggatcctgtaatttctagaaaagaaatggttctgcaaacaggagacatgattacataggcttaattaacagttcaaagtattggggaggacttatcatggtagcacgcatgtttctcgttctttaatgagtaaatgacccatttgagtgcatgagcacatatcagaagcacatggcgatgaagaagtgtggtggtggtagatctgatcaaaggttttcaaaactgactccaagtatttgatgaagaagattaacatggagacaatttaccaaacaaatacagcataaagagccaagagaccttctaagggacttcaaggctccagcttgcccacataaagaatatcattaaacagaaagaaaacaaagaccagaataaatatcttgtatactgagtccatagagtaacagaactgtcgattgatgattttttttttgctttattttttaatatacacacyagaggatgttttcagtttttaaatgcaaaacaaagcaatgcagttgacctgggttctaactgggtaactctcttaagtgttctaaaagatttctggaccagaattggttaattagtgctttgtgttgcactgtgttacatatgacctaaccagagataaaaaggtttaaaggtctcttgtaaccctgcaatgccatttgtaacacaaaaataaccccttttcattactggcatgccactgtagcacgcaggttattttttcccttcactgcaataagggcagctttcgcatcagaagaattcttggcaaattaatgcgctacctcttgggctaattaaattagaaaggatcaaaaatacagagcggcttttgtggtggacacaatgtcgtgcttc

SEQ ID NO: 80329 - DNA, 985 bp, Homo sapiens
cttccactgtttataaattttaatgcaaaatattttccattctctataagccttctctgtctttaccagcctatttttttcctctgaaagttctatgcttgatcacgaacctgaaactcagcccacattgctccctctgcctggagtgcccagctctgcccttactttcgtagatcatatctacctaaattttgtattcattttaaatatttcctccatgtgaaatatttcctgacatcttcaggtagacttaacttctttgttctttgwactcccattaagatttctatcataacaccatatttatcatccaacctggggcactttagaaagtgaaagtatgctagcaaaaattacattaatcccataagtttaaattggaattgtcctgagaaaattggaatgtgtggttcctttatttgtaacttttatgtatgtgtttacacgactatcttctcctattaagattggcattgatagttgccatatttaccattttacctccaatttctagcatacttcctggttggttgagtgatgagtaaatgcacattgagctcataacaagcatcaaaaggaaaaataaattacaggggtctaggctcactgtggatcaggttggtgaggttttgtttttgtttttcttttttgcagttcctattctgttcatccactttctcgccctttccctctactttggcatagtacacattctgctcattctttctcattctgttttgttatttgctcttgggcttagatcaggagttgaaaaagatataaccagagataactcataaatgtcaaataaaaatgttttctcttgagggattttataacattgagtattttcttacttttgttctcctttgccaagtattttggaagatcaaagatgttttcctcaaaattgctttacctaaacgtctttgttgcttcagttgctttaaagtaaaattgtctaaaatctgctattgatcttggt

SEQ ID NO: 80330 - DNA, 935 bp, Homo sapiens
ttcctctgcccataatgttcttctctcagatattggcatggcttactcctccacatccttcagcttttacttaaaagtcactctcggggaacatttttctggccaacctgtctaaaatcttaacatgcccttccccacccttagctattagcacttcataattcataatcccttctctgcttcatttttttagccttagcccttattttaactgccagatattctacctttgtcgcccgtatttgaatgctagttccataggtgttttgtttgatactgtatccctagcatctagaagagtacctgacacatagcaggcattcaagacatgctagttatttaatgagtgtatttttaattcctggggtcccgcaatcctctcaatttacttctaatattttctgcagttatctccttcacattttccaacctctttttttgctcacatgaacatgtgtcagttttatgtgaccaaataaagtgttctgyttttaccttaatattgtatttactgttactcaggaggttgaggcaggagaatcgcttgaacccaggaggaggaggttgcggtgaaccaagattgtgccatgattgcactccagcctgggcaacaagagcaaaactctgtctcaaaaaaaaaatgtatttactgttaacaacttttactattaaaatggtagccttcactttttttagtgcttcctgtgtgacaattacactcacaaccaacctctaatataatgttatttccccattttatagattaggaaagttatctttgaataagctacctgaggtcatgtttagtgaccatcttttggttctgcttggtttgtccccaaagctgacaagcttcatccatcaatcatgttctgccctattataccaataccataccacatgcaattaattgctgcatctttgaaacactttca

SEQ ID NO: 80331 - DNA, 929 bp, Homo sapiens
ttctattgaggtgaaactattgtggacagggtaaatccacttaaatatttccacatcaagaaagcacaagaacttaaaagaacttaagagtctaccactgaagcaaaatgacctggcatagatcgttttttcccctcattagttaatacattctgtttaattggagtatcrtgctctttgatttaggctgcattttgtgcattaatgggtattaaaaatctcaggtgaatctcttccagaacttagtagacactcaagaagattaaaagccgaataggaaggaatggggcacaaaagcaaggatagggtaaagaaaaatggttcaaggcaattgctccagaagcctgagtttaattttattggagatattccttttagtgtgctgggagctagccttcatctaaagggcagtcattgaatgatgattgggccacttattgctatttttccttatgaaagtcttttgctgaaattagggaaaacatttgcttttcacaagagaggtatgttatttcttgaaacctttgcagaaataaaacataagtagcctgacattaacaaacggagtttctttcctctctgagcttctgctttaccatggatgcctttaaaaatgggcccatgtttttaaataaaacacactcattttctagtataccatgaacacctttaaaaatgggccaatgtttttaaataacacacacacacacacacattttcttgtcacttattaattagtttaacaaatactttagtaccccttctgggcctggcactgagtcaggccctgaaatcaggggtgagcaagcagacttgtggctctgacggaatgaaaatctgcgactgcactctgattaaatgttcttgtcccgggttactcacaagcccacacttgtatttgttttcttcctattcatgttaaaatttcc

SEQ ID NO: 80332 - DNA, 1961 bp, Homo sapiens
gtttctttcttcctcagcacttcattatttcctaagaagaaggacgttttctcatgtaaccacgtatcaaccacatatggtatagttatcaaattcaaatattgatacaatatttttgtcttatctacagtccctatttcaattttgtaaattgtcccagtaatgtcctttactgcaattttaaaaataaagtttaaggccaagcacggtggctcatgcctttaatctcagcacttagggaggccaagtcaggaggatggcttgaggccaggagttcaagaccatcctaggcagcatagtgagaccttgtctctacaaaaatacataaatgaagtttaaggggaagacattctatgactcagaatgaggtgttgcctgatgaaagataaaaaatcaaggatttggtctaggattatgtgttgtactgattgccacatctcttcagtcttccttaatctgcaacagattgtcagtcttttttgtttgttttctttttcatgacattgacatttttgaagaacatagtttagttattagaatgacttaatctgggattgtctgatatttcttcacaattagattgactgaaggttttattgtgtacagagagggggagggggctcagttcttggcaatttcctcatagcagccagactgggtcgcagctcctcctgctgcttcttgacatggacgtgtgttcccacccttttcttggtgaacttgagggcccgtttggtgcttggagtccttgagcagctccatggcatgcagctcgtaagggtgagagccacacacctcttggatcatgtcccttggattttgtatgcttggtgaggcgcctgcagtggtggctgtgctgtgccccgctcaccttcttggttgccctggtggaggccatgggccatagggtagcgcaaagtcctggctgctgctctccagggtagctgtgggaagggcccagccacttggaactctaggattcacagctagatctaaactatgcatttttgtctggaatactatgcaagtgatgtgctagtaataataaccatggttccatagctgtaatatgactatatgcataacacaataagccagagtgcttcatcttttagtctcccacatcgcagcttatccaagttgaatcctattcgtttttaaagatcagcccaagttctacctattmgccagctccctgcagccaacacagagttctccttttctgaagtactcaatcacttgtctaattcacacatttagctactgcttaataataggtctctgtgcattgcttattatcattgcataagtagacatctcattttcctgtccttgaaggcagaagctctgtttattttattctcttgaatactccatagttcccactcagtgtaaattttcagtaactacaagctgttgcttaagagagcttaatgatttgggtttctctgatagtggtgattagtgtagaagtgtggttgaaacaacaggatcacctgtgcacatccatagtgaatctctccttggctcacacaggatttttaatctctgtttttttttttttggagacagtctcgctctgttgcgcaggctgcagtgcagtggcacaatctgggctcactgcaacctctgcctcccaggttcaagcgattctactgcctcagcctcccaagtagctgggattacaggcacacgccaccatgcctgttagaaactaagacacaaacacataccttagcctggctaattttttgtattttagtagagatggggtttcactgtgttgcccaggctggtctccacctctggagctcagacgatctgcctgcttcggcctcccaaagttctgggattacaggagtgagccatcgtgcctggctaatctctattattaagaaaattctaatgaatccatatacggccgtgcattgcttaatgacagggatacattctgagaaatg

SEQ ID NO: 80333 - DNA, 564 bp, Homo sapiens
tttttattaaaataattgtaatttaatacatgtaacatgcactgtctgtaccaagagaggggcagaaagtcaagactggsttgtcttgggaagaaaatgtcaaaatgtgctttagatagggagggctaattggcttccaaattaaaatactcaagaaattagtctacactgccaggccattatctcttactagggaacaatgggagacagaacatatgtgctgtggttgaaaagggcagaagttatattcgtttttaattagaaaaattgcaatggccctataaattatagaatatgcaactttccttggagtcccaagaagatgctgggtttgctcttcacataatcagtccaaaaacaccaacagtgccacgtatggaagaatgctcagcctgactctgattctctgaagagaatctcatcaacccatttgctactctgctgtaagagtctagcaggctatatagacaaagtaaatacaaccgatggaatgttgttagacttgaataagattttaattcaataatatgtgattttctcatctacaaaaaggtttaaagttat

SEQ ID NO: 80334 - DNA, 717 bp, Homo sapiens
gatccctcagtgccctggggatttggtttcatttctctcagcctctgaattgtcttggctttaaccagggtaccacagatgtctgctgagcaggaaggctgccacatcacacatgattcacaagcttctgtgtccatttggagctgccaacygaatggaagcctgggggatcagttccctaaaacctcatccctgtccttcccagctatggtggtgctgattgcagcatgagggcccctgaaccaatagcggttcttccagttgtcagggaccattccacacacagactggcctgcgtgctgggccagcctgctctccccatggctgacatgtggccaatgatacttcgctgaaggtgcgtggggctctcaccccttatgtctctgttgggaatcgcttcattgcaagacctaatcactgggcctttgctatatctcagattaaaactaaaaatttagttggaagaggcctatagaaaagtagagagagtatgcatgagagtgtgtgtgtgcatgtgtgtgtgcgtgtgtatgcatgcgcgtgcatatgcaggtactatgggctacatcattgtgtcctctcaaaattcctttttttttttttttttttgagacggagtctcactctgtcacccaggctggagtgcagcagcgtgatctcgcctcactgcaatctccgcctcccaggttctcctgcctcagcctccagagtaagctg

SEQ ID NO: 80335 - DNA, 655 bp, Homo sapiens
ctgggtgctcttcttcctgcctggggcgggtctggaggtggggccagggagcctcttgccagcaggggtgaggttacactgagcctgctccaatgtcctgcaacagcaccaagatattgacatataaggaagagcacttgggagctggctggtaggccttcaaggggctttcctcttcacttgaacttgttgtggttttttttcctttttcctcatactctgaggggtgcagtygtagccagctttgcacagggctttctgcaaagtttcccacctgaagtcccttcttcaggcaggggtctgcattgcacagccagttagttttctgtccctggttttcttttgatcaggccagtgaaaaacttactctacacattgagtttaaaaaaaaaaagcaattaaaaagtgcccttgattctatttggacacatgtgcacagtgttttattcttctctgcctcccatgcaatggtgggggatagtcggtgcatgattaggaggttaaaccatattaactgggatttcctggtgttgtcctttacagtggaatgggtagagcttcagcatctccttccagaacttccagaagtgtctggccagctcttgtcctccccctgccaagatgttctgctgcaggctgttccctgagagttgca

SEQ ID NO: 80336 - DNA, 655 bp, Homo sapiens
ctgggtgctcttcttcctgcctggggcgggtctggaggtggggccagggagcctcttgccagcaggggtgaggttacactgagcctgctccaatgtcctgcaacagcaccaagatattgacatataaggaagagcacttgggagctggctggtaggccttcaaggggctttcctcttcacttgaacttgttgtggttttttttcctttttcctcatactctgaggggtgcagttgtagccagctttgcacagggctttctgcaaagtttcccacctgaagtcccttcttcaggcaggggtctgcattgcacagccagttagttttctgtccctggttttcttttgatcaggccagtgaaaaacttactctacacattgagtttaaaaaaaaaaagcaattaaaaagtgcccttgattctatttggacacatgtgcacagtgttttattcttctctgcctcccatgcaatggtgggggatagtcggtgcatgattaggaggttaaaccatattaactgggatttcctggtgttgtcctttacagtggaatgggtagagcttcagcatctccttccagaacttccagaagtgtctggccagctcttgtcctcccmctgccaagatgttctgctgcaggctgttccctgagagttgca

SEQ ID NO: 80337 - DNA, 829 bp, Homo sapiens
agaaggatcagtctgttaaagcacagtctttttttttttttttgacrgagtctcgctctgtcgcccaggctggagtgtagtggcatgatctctgctcactactctggggactacaggtgcccgccaccacacccagctaattttttgtattttagtagagacggggtttcactgtgtttgccagggtggtctcaatctcctgacctcgtgatctgcccacctcggcctcccaaagtgctgggattacaggcgtgagccaccgtccccggcctaaagcacagtcttaatgtcaccccagatgacaatgaactcagaatttagccatttttattaggaacaaatggaaaaacaccttctggcatctgtctccgtttgtcacctgaaaactagggaaaaccgtgtttgaaataaaaatgttaagcagtctctggtggtttccgtagtgggatgtaactgttacaatgataaatcgttatttttctgtgatacacatttttgtcttgccctagaaagtgcagctctgaagccttggtgctgtctgaacccctaagggtgtaccaattcctaaacaaaaaaggagaaaggaggcacttttattaaataaattacatccactactttccagctctgtgcagaattgtctcttgcttttctcattctcgaagcttgtgagtacttctcattatgcagcaggaagtcctctttctggttcttaataaagtgactaataatttagaatgttcatattaagagcaggttgtaattataattagaatatataataatgtggatttctgcctattggggattaatttcagactcctctcaa

SEQ ID NO: 80338 - DNA, 829 bp, Homo sapiens
agaaggatcagtctgttaaagcacagtctttttttttttttttgacggagtctcgctctgtcgcccaggctggagtgyagtggcatgatctctgctcactactctggggactacaggtgcccgccaccacacccagctaattttttgtattttagtagagacggggtttcactgtgtttgccagggtggtctcaatctcctgacctcgtgatctgcccacctcggcctcccaaagtgctgggattacaggcgtgagccaccgtccccggcctaaagcacagtcttaatgtcaccccagatgacaatgaactcagaatttagccatttttattaggaacaaatggaaaaacaccttctggcatctgtctccgtttgtcacctgaaaactagggaaaaccgtgtttgaaataaaaatgttaagcagtctctggtggtttccgtagtgggatgtaactgttacaatgataaatcgttatttttctgtgatacacatttttgtcttgccctagaaagtgcagctctgaagccttggtgctgtctgaacccctaagggtgtaccaattcctaaacaaaaaaggagaaaggaggcacttttattaaataaattacatccactactttccagctctgtgcagaattgtctcttgcttttctcattctcgaagcttgtgagtacttctcattatgcagcaggaagtcctctttctggttcttaataaagtgactaataatttagaatgttcatattaagagcaggttgtaattataattagaatatataataatgtggatttctgcctattggggattaatttcagactcctctcaa

SEQ ID NO: 80339 - DNA, 829 bp, Homo sapiens
agaaggatcagtctgttaaagcacagtctttttttttttttttgacggagtctcgctctgtcgcccaggctggagtgtagtggcatgatctctgctcactactctggggactacaggtgcccgccaccacacccagctaattttttgtattttagtagagacggggtttcactgtgtttgccagggtggtctcaatctcctgacctcgtgatctgcccacctcggcctcccaaagtgctgggattacaggcgtgagccaccrtccccggcctaaagcacagtcttaatgtcaccccagatgacaatgaactcagaatttagccatttttattaggaacaaatggaaaaacaccttctggcatctgtctccgtttgtcacctgaaaactagggaaaaccgtgtttgaaataaaaatgttaagcagtctctggtggtttccgtagtgggatgtaactgttacaatgataaatcgttatttttctgtgatacacatttttgtcttgccctagaaagtgcagctctgaagccttggtgctgtctgaacccctaagggtgtaccaattcctaaacaaaaaaggagaaaggaggcacttttattaaataaattacatccactactttccagctctgtgcagaattgtctcttgcttttctcattctcgaagcttgtgagtacttctcattatgcagcaggaagtcctctttctggttcttaataaagtgactaataatttagaatgttcatattaagagcaggttgtaattataattagaatatataataatgtggatttctgcctattggggattaatttcagactcctctcaa

SEQ ID NO: 80340 - DNA, 829 bp, Homo sapiens
agaaggatcagtctgttaaagcacagtctttttttttttttttgacggagtctcgctctgtcgcccaggctggagtgtagtggcatgatctctgctcactactctggggactacaggtgcccgccaccacacccagctaattttttgtattttagtagagacggggtttcactgtgtttgccagggtggtctcaatctcctgacctcgtgatctgcccacctcggcctcccaaagtgctgggattacaggcgtgagccaccgyccccggcctaaagcacagtcttaatgtcaccccagatgacaatgaactcagaatttagccatttttattaggaacaaatggaaaaacaccttctggcatctgtctccgtttgtcacctgaaaactagggaaaaccgtgtttgaaataaaaatgttaagcagtctctggtggtttccgtagtgggatgtaactgttacaatgataaatcgttatttttctgtgatacacatttttgtcttgccctagaaagtgcagctctgaagccttggtgctgtctgaacccctaagggtgtaccaattcctaaacaaaaaaggagaaaggaggcacttttattaaataaattacatccactactttccagctctgtgcagaattgtctcttgcttttctcattctcgaagcttgtgagtacttctcattatgcagcaggaagtcctctttctggttcttaataaagtgactaataatttagaatgttcatattaagagcaggttgtaattataattagaatatataataatgtggatttctgcctattggggattaatttcagactcctctcaa

SEQ ID NO: 80341 - DNA, 2185 bp, Homo sapiens
agcaaaatattgatatctcaatgttgtaaacggtcttgatgattaaaaaagaacattctttccattgttatatatcttaaaaagtgtattagaatgaggacagtggcatgtagtggcagctccccattccctcttagcttttagcaatatctataggagagtagattatttgggggagaattgagacttataatttaacttgggctagattaaaagttgtctgttttttgtctccctcctgcttaaatgtcgtatcaaaaaatcttcttaagaatattcagtaattcagacattacattaattcacattctccatctcagcttgtgatccaagtgaggttttttgacaactttctctctgggagtatattttaaacataagcatgtgattcaacagcacttgaccctgaagttgtgatttagtgctttaattggaagctctagcttgtaagcattatggaaaggctgtttagtgtgttatgggaatgatcacaatttctaaatgtgaactcaagtggaagtgtggggaaaaacagggactccttgttgtttatcacatacgtgggagcatggaaaatgaaatgaggaactctgaaccatgaacagcaggaacgtgcagggatgctgggctgcagggaggctgagcacctggttgggagaatgaacatcagcacagaaagcagggcaccctgtgcactaagaacacacacaagtgctccaaggcctaggctggggaaggaaccagggcatggtccagttttacagtctgctaagaaagagatcaccacagaccttaagtccagactgtaagccttgttttgaccaatttgctagacagatatcttccagacacatactggaaaaatgctacctcaagtgatgatccagccggaaacacttcttgtataagtggggtgtgtcaacggtccccagggtcacccccaggattgatgattcactaggagaactcacaggacttgacatatacttatactcatggctatgatttattacagcaaaatcatatgtaaaaaatacatatatacacacacatgcatctctgtctctctcacacgcacatgcacacacacacacgtgcacacacacacacacacacacacacaaaattcaaggtcagcaaaggaaaaagacacatgggctgaagtccagaggaaaccagaagcaagtttccaagagtcctctctcaatggagtcatgcaggacatgcttaattcctccaacaacaaattgtgagaatacctgtgaaatgtttaccagggaagctcagcagagactccgtgtccatggtttttattgggggctggtcatgtagacaccctctgcctagcacatatcaatgcagactttcagaagaaagcacatgttcagcataaaccacattatgtgctcaattggtttaggcacagtgagccacccttatcagtcaaggaatggtgggaatcttcccaaacccaagttcccagatgaaatctcaggctagcagtctcaggcctttcatgttaactttattttgcacatggtgccataagataaagcatatgcccatcctgattggcattagtgctcttccctcttcaaggtcaaatcactagaataaataaaaagcaggaataagtaaatgacaatgtcaatgacactgacagtgggagagaagccatcagatgactgagtatttttattactttctggagaatgcaaagcatggaatgaaattgacaggccaacctgctacagcctgaatgtttatgtctttccatgattaatgtgtcaaaacctaccaagatgatggtataggaggtggggcctttgagaggtgattaggtcacgatcackctgccctcatgggtggggttagtgccttatcaaagagtgcttccttgcctcttacaccatatgcagactcagcaagaaagtgccatctgtgaacaaggaagtgagccctcagcagacactgaatctaccactactttgatcttggacttcccagactccagaactgtgagaaatcaatttctgttgtttataagccactcagtttatggtattttgttatagcagcctgagctaagacacaagttgagtggacacagctggaggtggggttgtttcttctggatgaccgtggagagacactgggtcacaaggattgagagcaggagagggat

SEQ ID NO: 80342 - DNA, 1522 bp, Homo sapiens
tccagcagggactgctgcccctcccagtgacagcgtgttgccctcacccgccaccgctcaggccagctgcttcctctgcctcactgaccacccgcccagtccctacgtccctggaccagcccctccacgcatcaggctcttaccttcgcctcccgcgcagtcagaggaggcagctccgtctcactgtaaggcaacccaggcagagctgaggaactgcacggggcctggagcggcccagcctgggtgccgacccccagaaaggactggctctgtccctttccagctcagggctcagcccaggagaaggcacagggaagggaggacaagggccttcctgtggggctgactcccaggaggggcaggacctgggagaagaaggagtgtagggacagcctggccggggttactggggcccctggcgtggggggcggtcaggctgcccagtgggctcgaccgtcctggactcgaggtggtgctttctgctggagctgagaaaggttagccctgagatgggatgggggccgcccagggtggcgaccgggccctgacaggagtccctcagggagtgaccacatccccccgccagggtcaagggagcctgccctgagacctgcccggtgtactctggctgcaccaggggcccaccccacttgacagccccaaggcccttgcaggttctgacctcccagcatccacctgcctctccctgcacccgagccacacaccctgcgtttcagaagtggcacggctcgtcagctccctcccgccctacctccccagggatcctctgtctctccatcctgtgatccctgagggatgggctcctggctgggctcctcttacccggccccagatcccttcccagcaccagacccaggtctttagcygcgagccctgctgcctccctggcctcaccgtgagatgcccagaacggggccctgcccatcttctcccccgttctcctagggctacagcccccattgtcaccatgccttttcccctcacgggacagtgagggctgtagctctaggggaatgggggagaacaggggcaggtgggccctcagagacctgctggacaacagccctgaggctgggccaggcgtcccctcaccctgtggccataacccttgcatctcaccggggttgtctccaagtagacagggccagaccctcaggctgccccgctcctcttgtgctcacttgccgacagaactgctgagcgcccaggggcctgacctagcccagtctccattcccaccggctccctagatgggccccacacctctggcctaacaacctcgggctggacctgcaggggagtcagggaggagttctgtccctggaaaggaggttgacccgacctggtgagacatgtcctgcgtcagaaaggcctttctaaaagcaaacccattcctgagctgagacaggtgctttaggggtgaggggagtgcagaggactcactgtacaatccccaaatgatcgacgttgttgttgtagcttcgaaaaggcttaggcccct

SEQ ID NO: 80343 - DNA, 705 bp, Homo sapiens
cctctagctagaatatccaagggtcatggagagaaatacccagttaaaatatcagaaatgaaaaagtgataccattagagacactaaaaagaccattaggtaatagtattagcttttgtattctgagatccaatagcagcagtcacttccctccaccrctatgtgtatcccaggaccaccctgggcggggagggctggggttagggagcagccatggatgctctgatgctggccctgggcctcgggggtgacagtgatgaggaactgggtgcacacatgagtggggcagccgggcctggccagagaagcagcacacacgtgcacagacgtgtttacccacatacacatgtgcacgcacgtgcacaaacacattgcaggcaggcatgttgacgcctcaggcagcggaggaccctgactctgggcgctgctgacccgggcaaggccccactgtgattcgtgccatgacctcagaatgtcactggtgcttagcacctgtctgctctctggcctgcctcagtggtctacagcagttacacacaggcagtggtatctgtgagcagctctgtggactcaaaggttttctccctgagaggcatgacccaggccagctgattcatcagaatcaggtgagcgtgacctgctctcttccctccaggcggacttgggggcagtggctacggtgcgggcggtgttggcctctgtggg

SEQ ID NO: 80344 - DNA, 862 bp, Homo sapiens
gtctcaccaggtcgggtcaacctcctttccagggacagaactcctccctgactcccctgcaggtccagcccgaggttgttaggccagaggtgtggggcccatctagggagccggtgggaatggagactgggctaggtcaggcccctgggcgctcagcagttctgtcggcaagtgagcacaagaggagcggggcagcctgagggtctggccctgtctacttggagacaaacccggtgagatgcaagggttatggccacagggtgaggggackcctggcccagcctcagggctgttgtccagcaggtctctgagggcccacctgcccctgttctcccccattcccctagagctacagccctcactgtcccgtgaggggaaaaggcatggtgacaatgggggctgtagccctaggagaacggggggaagatgggcagggccccgttctgggcatctcacggtgaggccagggaggcagcagggctcgcggctaaagacctgggtctggtgctgggaagggatctggggccgggtaagaggagcccagccaggagcccatccctcagggatcacaggatggagagacagaggatccctggggaggtagggcgggagggagctgatgagccgtgccacttctgaaacgcagggtgtgtggctcgggtgcagggagaggcaggtggatgctgggaggtcagaatctgcaagggccttggggctgtcaagtggggtgggcccctggtgcagccagagtacaccgggcaggtctcagggcaggctcccttgaccctggtggggggatgtggtcactccctgagggactcctgtcagggcccggtcgcccaccctgggcggcccccatccc

SEQ ID NO: 80345 - DNA, 862 bp, Homo sapiens
gtctcaccaggtcgggtcaacctcctttccagggacagaactcctccctgactcccctgcaggtccagcccgaggttgttaggccagaggtgtggggcccatctagggagccggtgggaatggagactgggctaggtcaggcccctgggcgctcagcagttctgtcggcaagtgagcacaagaggagcggggcagcctgagggtctggccctgtctacttggagacaaacccggtgagatgcaagggttatggccacagggtgaggggactcctggcccagcctcagggctgttgtscagcaggtctctgagggcccacctgcccctgttctcccccattcccctagagctacagccctcactgtcccgtgaggggaaaaggcatggtgacaatgggggctgtagccctaggagaacggggggaagatgggcagggccccgttctgggcatctcacggtgaggccagggaggcagcagggctcgcggctaaagacctgggtctggtgctgggaagggatctggggccgggtaagaggagcccagccaggagcccatccctcagggatcacaggatggagagacagaggatccctggggaggtagggcgggagggagctgatgagccgtgccacttctgaaacgcagggtgtgtggctcgggtgcagggagaggcaggtggatgctgggaggtcagaatctgcaagggccttggggctgtcaagtggggtgggcccctggtgcagccagagtacaccgggcaggtctcagggcaggctcccttgaccctggtggggggatgtggtcactccctgagggactcctgtcagggcccggtcgcccaccctgggcggcccccatccc

SEQ ID NO: 80346 - DNA, 862 bp, Homo sapiens
gtctcaccaggtcgggtcaacctcctttccagggacagaactcctccctgactcccctgcaggtccagcccgaggttgttaggccagaggtgtggggcccatctagggagccggtgggaatggagactgggctaggtcaggcccctgggcgctcagcagttctgtcggcaagtgagcacaagaggagcggggcagcctgagggtctggccctgtctacttggagacaaacccggtgagatgcaagggttatggccacagggtgaggggactcctggcccagcctcagggctgttgtccagcaggtctctgagggcccacctgcccctgttctcccccattcccctagagctacagccctcactgtcccgtgaggggaaaaggcatggtgacaatgggggctgtagccctaggagaacggggggaagatgggcagggccccgttctgggcatctcacggtgaggccagggaggcagcagggctcgcrgctaaagacctgggtctggtgctgggaagggatctggggccgggtaagaggagcccagccaggagcccatccctcagggatcacaggatggagagacagaggatccctggggaggtagggcgggagggagctgatgagccgtgccacttctgaaacgcagggtgtgtggctcgggtgcagggagaggcaggtggatgctgggaggtcagaatctgcaagggccttggggctgtcaagtggggtgggcccctggtgcagccagagtacaccgggcaggtctcagggcaggctcccttgaccctggtggggggatgtggtcactccctgagggactcctgtcagggcccggtcgcccaccctgggcggcccccatccc

SEQ ID NO: 80347 - DNA, 1180 bp, Homo sapiens
tagatgcattttgctgagggacagaagccagacccaataagctaccacmgtaggattcccattcctaggccattctggaaaaggccaaaccacagggactgagaagcagtctgggtggccaggggctgacggatcggggagaggctggttgcataggggccaccctggagacttggaggatgaaggagtcgccccaggaggggctggagcggtggccgggagactctgcacatcggtttggaaccgtggaggaactgtacacccacagactgaactggcgtgtgtgcaaactgaaaaaaaaaatcattcagagtgaaaaggatcaggcaagtcactgtacaactgggctatttgcatgtcacagatgtggattttactgaaacatttcttcaagagtctcaggccctgaagagctcactgcttatctggtgaaacatctgaacctgaaatgggatttgctgttaggctttgtagacaaagtgaaattaacaacatctgcacaaaacaaaccaaagccccctttctctgtttcctaggcagcgggaactactccacatcctcctggcatatgaggagtataacccggtgagtattcccggcagtgaggttcccgggccatatttccatattgacaggagtgggtgtctggtgggggtgtcgttgcttcttttaaagttagtatttgtgacccaccaggatataggaggtaggatgtcagctcaccgctggcataaacctccaaggaagggggtggtctcaaggggtcaagctgagacacaaaggagtcagggcctggactcctggtgtcacctgggcctgaccaccacttctcagaacaagaaatgacgccctcctcctggggctgccccaaagcccaggagcttggcagcatcgcacacaggatggtgctatcagcagacattttggacaaggtgctgaagtgcctgatggacttggctcttgtcatgaaatgaatgtgcatcctgaggaagcctctttttcagaggaagcctctccttcagaggaagcctctccagtcacctctgccctctccaatgacatgagtcctcccaggtgacctcagccctcccaggtgatgtccttccatggtgactctggctcttgcaggaggtgggctactgcagggacctgagccacatcgccgccttgttcctcctct

SEQ ID NO: 80348 - DNA, 631 bp, Homo sapiens
aggacccgacttgagagggctcagggaagcctcaagccctgggcaagcccctctctccaggagccacatccccactcaaatgagtgccccccatgaggagcttcaagaccttgtctgacccagcgtcctggagggctcagscgaccctcatggggaaggtcactgactctggagactgaagccccagtgtgcgcagctcgagccaccagccccagcctggaaggaccaggttctttcacacctgctgtccccacagatctctctcgggctcaccctgcgcctgtgggacgtgtatctggtagaaggcgaacaggcgttgatgccgataacaagaatcgcctttaaggttcagcagagtaagtctacgtgtgcccagcggggcctggggagccctggggtcagaccccgactggcccgagggcagcttcctcacactgtcctcatgatcctctgttctggcccagagggaggtctggccaggtgggctgggcaggacactgtgacaccgagcccatcccccacatgacccagatgaaagtcgagagtgtggtgagcacttccctgtccggatcgccccccagccacagtctcctgtgtatatctggacacctggggtggccacaaaaggatc

SEQ ID NO: 80349 - DNA, 631 bp, Homo sapiens
aggacccgacttgagagggctcagggaagcctcaagccctgggcaagcccctctctccaggagccacatccccactcaaatgagtgccccccatgaggagcttcaagaccttgtctgacccagcgtcctggagggctcaggcgaccctcatggggaaggtcactgactctggagactgaagccccagtgtgcgcagctcgagccaccagccccagcctggaaggaccaggttctttcacacctgctgtccccacagatctctctcgggctcaccctgcgcctgtgggacgtgtatctggtagaaggcgaacaggcgttgatgccgataacaagaatcgcctttaaggttcagcagagtaagtctacgtgtgcccagcggggcctggggagccctggggtcagaccccgactggcccgagggcagcttcctcacactgtcctcatgatcckctgttctggcccagagggaggtctggccaggtgggctgggcaggacactgtgacaccgagcccatcccccacatgacccagatgaaagtcgagagtgtggtgagcacttccctgtccggatcgccccccagccacagtctcctgtgtatatctggacacctggggtggccacaaaaggatc

SEQ ID NO: 80350 - DNA, 631 bp, Homo sapiens
aggacccgacttgagagggctcagggaagcctcaagccctgggcaagcccctctctccaggagccacatccccactcaaatgagtgccccccatgaggagcttcaagaccttgtctgacccagcgtcctggagggctcaggcgaccctcatggggaaggtcactgactctggagactgaagccccagtgtgcgcagctcgagccaccagccccagcctggaaggaccaggttctttcacacctgctgtccccacagatctctctcgggctcaccctgcgcctgtgggacgtgtatctggtagaaggcgaacaggcgttgatgccgataacaagaatcgcctttaaggttcagcagagtaagtctacgtgtgcccagcggggcctggggagccctggggtcagaccccgactggcccgagggcagcttcctcacactgtcctcatgatcctctgttctggcccagagggaggtcyggccaggtgggctgggcaggacactgtgacaccgagcccatcccccacatgacccagatgaaagtcgagagtgtggtgagcacttccctgtccggatcgccccccagccacagtctcctgtgtatatctggacacctggggtggccacaaaaggatc

SEQ ID NO: 80351 - DNA, 631 bp, Homo sapiens
aggacccgacttgagagggctcagggaagcctcaagccctgggcaagcccctctctccaggagccacatccccactcaaatgagtgccccccatgaggagcttcaagaccttgtctgacccagcgtcctggagggctcaggcgaccctcatggggaaggtcactgactctggagactgaagccccagtgtgcgcagctcgagccaccagccccagcctggaaggaccaggttctttcacacctgctgtccccacagatctctctcgggctcaccctgcgcctgtgggacgtgtatctggtagaaggcgaacaggcgttgatgccgataacaagaatcgcctttaaggttcagcagagtaagtctacgtgtgcccagcggggcctggggagccctggggtcagaccccgactggcccgagggcagcttcctcacactgtcctcatgatcctctgttctggcccagagggaggtctggccaggtgggctgggcaggacactgtgacaccgagcccatcccycacatgacccagatgaaagtcgagagtgtggtgagcacttccctgtccggatcgccccccagccacagtctcctgtgtatatctggacacctggggtggccacaaaaggatc

SEQ ID NO: 80352 - DNA, 631 bp, Homo sapiens
aggacccgacttgagagggctcagggaagcctcaagccctgggcaagcccctctctccaggagccacatccccactcaaatgagtgccccccatgaggagcttcaagaccttgtctgacccagcgtcctggagggctcaggcgaccctcatggggaaggtcactgactctggagactgaagccccagtgtgcgcagctcgagccaccagccccagcctggaaggaccaggttctttcacacctgctgtccccacagatctctctcgggctcaccctgcgcctgtgggacgtgtatctggtagaaggcgaacaggcgttgatgccgataacaagaatcgcctttaaggttcagcagagtaagtctacgtgtgcccagcggggcctggggagccctggggtcagaccccgactggcccgagggcagcttcctcacactgtcctcatgatcctctgttctggcccagagggaggtctggccaggtgggctgggcaggacactgtgacaccgagcccatcccccacatgacccagatgaaagtcgagagtgtggtgagcacttccctgtccggatcgccccccagccacagtctcctgtgtrtatctggacacctggggtggccacaaaaggatc

SEQ ID NO: 80353 - DNA, 771 bp, Homo sapiens
ggatccacaggagagcatcattgatgctggggacaatttaaacatatagaaacccacagggctaccttagacagggcacagggcacagcacccggggatgcagagtggaaagttcaccactacagcctggaattgcctctgtgatgccttcttcatgacacttggctgccttcgtggctggaaggctgaggcccagatcccaacatggccacaggctagcagcttgcttcaccttcctgaactgcaatttctccatctgagcctctcycctaagaggagtgtgcagggtcacttagcccatatgggccagaaaccccacacggtgccaggcacacagtagggcctcggcagatgctgcccccttctgtctccaccaccctcctggggctccctcctgaaacagcctccctcagcgccttgagtcttgcaccctaacagcctcttgcacgcagtgagagggaggcccccaggccagctgtctctgttcagaaagacctgggggtctccttgaccatgggctcagggctcagaccccaacacaaacaagccccgtgtgctgaagagaagcaagtcctttagctgaggtccaaaggctgtgagtcctgcatgagcctgaagtggtgcaggtgcctggtcacactggaggtgtagagcttggggatctgaatgtgctgtttgcctcggacatcaaacatctcacagactgcctggaagaaggtggagcagactggggttaatggtcagcagcagcagcatccccaccactggggc

SEQ ID NO: 80354 - DNA, 771 bp, Homo sapiens
ggatccacaggagagcatcattgatgctggggacaatttaaacatatagaaacccacagggctaccttagacagggcacagggcacagcacccggggatgcagagtggaaagttcaccactacagcctggaattgcctctgtgatgccttcttcatgacacttggctgccttcgtggctggaaggctgaggcccagatcccaacatggccacaggctagcagcttgcttcaccttcctgaactgcaatttctccatctgagcctctctcctaagaggagtgtgcagggtcacttagcccatatgggccagaaaccccacacggtgccaggcacacagtagggcctyggcagatgctgcccccttctgtctccaccaccctcctggggctccctcctgaaacagcctccctcagcgccttgagtcttgcaccctaacagcctcttgcacgcagtgagagggaggcccccaggccagctgtctctgttcagaaagacctgggggtctccttgaccatgggctcagggctcagaccccaacacaaacaagccccgtgtgctgaagagaagcaagtcctttagctgaggtccaaaggctgtgagtcctgcatgagcctgaagtggtgcaggtgcctggtcacactggaggtgtagagcttggggatctgaatgtgctgtttgcctcggacatcaaacatctcacagactgcctggaagaaggtggagcagactggggttaatggtcagcagcagcagcatccccaccactggggc

SEQ ID NO: 80355 - DNA, 714 bp, Homo sapiens
ggatccggtcaattctttgtgatgggggctgtcctgcacctggcaggatgtttagcagcttctctggcctccacccactggatgccagrggaatgcagaagaggcttgttcattctcccatttaatcctcaggacaatatctgacataaatgttacgtcttttattttataaatgaagaaaatgagactcagaaaggtttaagtgagttacttaagaacacacagacagcaagaggtagaactggaaaccgaacacaggtgtccacatgggacaacaaaaaagttcacgttccatcttcttttgagtctctcatttcaataattaccattgtgtggatatgagctgaagtacaggaaacctggggctgaactctcctcccatcaggcctaggagccccagaccagaaccccagcccaaggtctcccagtcaggcccgctggcgtgagctggcatctacactagcatggtctcccaaagctgcagggatgccagtctcgccgctgatgaagaaaatgaagggcatttgcttctcatgcaggctgtcgggatttaacacagattccttttcttgctctcttctcccatagcacaaaactgggtggtccatccccctcccagtgtcccaaggctttgttgcgtgttctctttaatttctcccactcttgtggtgtaccctaccctcatctccctggcaacctttctgctgtatcctc

SEQ ID NO: 80356 - DNA, 714 bp, Homo sapiens
ggatccggtcaattctttgtgatgggggctgtcctgcacctggcaggatgtttagcagcttctctggcctccacccactggatgccagaggaatgcagaagaggcttgttcattctcccatttaatcctcaggacaatatctgacataaatgttacgtcttttattttataaatgaagaaaatgagactcagaaaggtttaagtgagttacttaagaacacacagacagcaagaggtagaactggaaaccgaacacaggtgtccacatgggacaacaaaaaagttcacgttccatcttcttttgagtctctcatttcaataattaccattgtgtggatatgagctgaagtacaggaaacctggggctgaactctcctcccatcaggcctaggagccccagaccagaaccccagcccaaggtctcccagtcaggcccgctggcgtgagctggcatctacactagcatggtytcccaaagctgcagggatgccagtctcgccgctgatgaagaaaatgaagggcatttgcttctcatgcaggctgtcgggatttaacacagattccttttcttgctctcttctcccatagcacaaaactgggtggtccatccccctcccagtgtcccaaggctttgttgcgtgttctctttaatttctcccactcttgtggtgtaccctaccctcatctccctggcaacctttctgctgtatcctc

SEQ ID NO: 80357 - DNA, 536 bp, Homo sapiens
tgccctcaaggagctcagagtctagtggagtcttgggtaggtaagtgcctgacatcagcaaggtagcagccaggtgtggggcctgccagcrtcaagggagccatagtagacactgcagcttgaccttccagccatatggctcctggaacaggtttgaaggtaagaagtgggcaaaacagttgactgctctgggcttttttcttgcttatttttaaactttttttttctcttattaaaaaaaaggtatatcaatacaatggaataaagcaagttacacaaaaatataatacttttcaatgtttttaaagtatgtaggggaaaaaacctatgatattctctaaaatattggttatttctgggtagtatgattatggatttttatgctccttttgcttatctctattttccaatttttttttttttttttttttgagatggagtctcaccctgtcatccaggctggagtgtagtggcttgatcttggctcactgcaatctctgcctcccaggttcatgctattctcctgcctcagcctc

SEQ ID NO: 80358 - DNA, 649 bp, Homo sapiens
tggagtgcacaagtgctggaaccagctggccacttcggtgctggcaggagcgatcttcactcacttggaccaccccttgcaggagggagcacacaggtgagtgggtgcaggatctggggagagtgcttttgggcgccggcaggagcaaactctgtgtgggctccacagcagcatctaggcaggagggttcctgtggcccctgaagccccagagggcgtgttacggtgttcttttagctcttctgtccatggatggcttaagcattaacagctcagtggaccctctgccttttcacatgaggcggctgccttccaccagcgagggcaaagggccagtgtgacagccttttgtatctgcactcgtagctcccaggctctagtccagcatccaggaaaaatgaagttgcatgaatgaattgaaggatggtaaatgcggggattttacggctgattaaagtggccctcagtggctctcagtgggaatgggagctgaaaaggggtcagaggggtgtaagtgatcytcccctgaagtccggccatctccagctgattcttctccaaagttacgctgtcagaccgtccctctgaagtcaagccatttctctctgacattcagccagagtgcctgatgtccagctccttctttctga

SEQ ID NO: 80359 - DNA, 778 bp, Homo sapiens
gttccccatgtaagacagtttcttggatttagaacagaggtatacttaggaaagacaaaataagcaagaggtaattgacaaatagggtaatgtttagatgaagaatttcctcttctttcagtttcagattagaggtgtaaacagtcattttgtgaaagcagaagagagggagagaggaagaccacctgttagggtcgacatgggagccacagtgaagaaggccactattcctactcctgcatacagaaaacagaaatgaagggcaagaagcacccacacccagcgaaggacagaggaggatcagatgaggttccttggctcagccagctgtacacagcaggctgataccacaattggttttcatmtttcccatcaaaagacaagaatgttttgctctaagaaacttctacaaagcagtttagtggctatagcaaaacataagcaacagaagaaactgttttgttacaaacatttttcttgaaagcatacaccaatggctagataaataaaaatggtactttttctaacagaacatatggccgtcaatatcatggcctgttttcttgctgtttggctcttcgactaccataagaaactttataaaaatgaaatctctaccttctccaccctcaaccatgatgaacaaaaaaacttaagaagtattttcaagttattctgctatgtgctgaaaaggccctattattcaccaggcaaggaaagatcatctattttgaggttctcctgtctgtggcttaaaatactaccttgatcatggcat

SEQ ID NO: 80360 - DNA, 632 bp, Homo sapiens
ttactgataaccataaagtcgggtcaaaattctggggagggcaaactacagagaatatgtcttctaaaacgcattcattacacaggtgcaagagttgggtattggatgttacatattcatgatgtatcactttagtttttttcgtctcattataagaaaagtgggkatacattattacagagaagattatccaactggaataaatactgaatccacagattaggtagactaagaaaaagaaaatttgtacaaatcctcagccaataaacatattttatttttacaacccattaccaccagagctcaccgctcaacttttaattccctagactcatccactcatcctttataaagaatatatttatatttgctcctcaaatttcacttcttgcttttccactgagcataaagcaaagataaaaatacaaattgtaaagtcaagcccagaagtctactcttaatactgcattcaaatagtatctttggaaaatataggccataagaagcaacaagcatttgaggggaaaaagaagtaaatcttaaagcatctaaaacacctccgaagtattgtcagtacaaacctggtaatagaaagtgacgaagaaccagtgagtgacatgatttaccttggg

SEQ ID NO: 80361 - DNA, 603 bp, Homo sapiens
taattgagaagggaaagacgagggggaggagcaagtattctgttttggaaggtgtgagmggtctttagatatgcaagtagtggaagcagggcgcggtggttcacgcctgtaatcccagcactttggaaagccaagacaggcggatcactggaggtcaggagtttgagaccagcctaatcaacatggcgaaaccccatctctactaagaatacaaaaaattagctgggagtggtggtgcgcgcctgcaatcccagctatccgggagcctgaggcatgagaatcgcttgaacccgggagttggacgttgcagtgagctgagaccaccgtgccattgaacttcagcctgggcaacaagagtgaaactccatctcaaaaaaaaaaaaaaatatatatatatatatatatatatatatatatatatgtgtgtgtatatatatatatatatatatgtgtgtatatatatatgtgtgtatatctatatatatatgtgtgtatatatatatatgcaagtagtgacatgtttcaataggttgcacaaggcggaggggtgtggaggggcatattgtttccttttattaacaaatgatgccttatttgatattg

SEQ ID NO: 80362 - DNA, 603 bp, Homo sapiens
taattgagaagggaaagacgagggggaggagcaagtattctgttttggaaggtgtgagaggtctttagatatgcaagtagtggaagcagggcgcggtggttcacgcctgtaatcccagcactttggaaagccaagacaggcggatcactggaggtcaggagtttgagaccagcctaatcaacatggcgaaaccccatctctactaagaatacaaaaaattagctgggagtggtggtgcgcgcctgcaatcccagctatccgggagcctgaggcatgagaatcgcttgaacccgggagttggacgttgcagtgagctgagaccaccgtgcyattgaacttcagcctgggcaacaagagtgaaactccatctcaaaaaaaaaaaaaaatatatatatatatatatatatatatatatatatatgtgtgtgtatatatatatatatatatatgtgtgtatatatatatgtgtgtatatctatatatatatgtgtgtatatatatatatgcaagtagtgacatgtttcaataggttgcacaaggcggaggggtgtggaggggcatattgtttccttttattaacaaatgatgccttatttgatattg

SEQ ID NO: 80363 - DNA, 603 bp, Homo sapiens
taattgagaagggaaagacgagggggaggagcaagtattctgttttggaaggtgtgagaggtctttagatatgcaagtagtggaagcagggcgcggtggttcacgcctgtaatcccagcactttggaaagccaagacaggcggatcactggaggtcaggagtttgagaccagcctaatcaacatggcgaaaccccatctctactaagaatacaaaaaattagctgggagtggtggtgcgcgcctgcaatcccagctatccgggagcctgaggcatgagaatcgcttgaacccgggagttggacgttgcagtgagctgagaccaccgtgccattgaacttcagcctgggcaacaagagtgaaactccatctcaaaaaaaaaaaaaaawatatatatatatatatatatatatatatatatatgtgtgtgtatatatatatatatatatatgtgtgtatatatatatgtgtgtatatctatatatatatgtgtgtatatatatatatgcaagtagtgacatgtttcaataggttgcacaaggcggaggggtgtggaggggcatattgtttccttttattaacaaatgatgccttatttgatattg

SEQ ID NO: 80364 - DNA, 603 bp, Homo sapiens
taattgagaagggaaagacgagggggaggagcaagtattctgttttggaaggtgtgagaggtctttagatatgcaagtagtggaagcagggcgcggtggttcacgcctgtaatcccagcactttggaaagccaagacaggcggatcactggaggtcaggagtttgagaccagcctaatcaacatggcgaaaccccatctctactaagaatacaaaaaattagctgggagtggtggtgcgcgcctgcaatcccagctatccgggagcctgaggcatgagaatcgcttgaacccgggagttggacgttgcagtgagctgagaccaccgtgccattgaacttcagcctgggcaacaagagtgaaactccatctcaaaaaaaaaaaaaaatatatatatatatatatatatatatatatatatatgtgtgtgtatatatatatatatatatatgtgtgtatatmtatatgtgtgtatatctatatatatatgtgtgtatatatatatatgcaagtagtgacatgtttcaataggttgcacaaggcggaggggtgtggaggggcatattgtttccttttattaacaaatgatgccttatttgatattg

SEQ ID NO: 80365 - DNA, 1503 bp, Homo sapiens
caaactatttctgtgcattttcagcaaactgaagtatcgcttgttattttatatgcgaaattattacacttatttatactcaaagcactcatattaactccaagttttatactattgtgttgaaaaggggaatttttacttcaagatgtgctgtatgatgtgcatttgaatgatatatgcatttaaacttactgagtatgcatcttccttctcatgaagggttccagggtttcaggtttatcttaaatcatatttgtattctgttatagtaaaaatacaataacttattttacttatagtaaaaataagtgtagtgtagctttctacttgatactttattgccttggggtatataaatcatgtcatctgaagtagtagaaattatgtttttccaactactatctaggaatatgttttcttttataatgcaataacaatttcaagatgatgcttgtcactcctttcactattattagctagcacatggttcagaactttcacacacattgtggcttttagacttctaacttttttctttttttgacatggagtctcgctctgttgcccaggctggagtgcaatggtgctatctcrtctcactgcaacctctgcctcctgggttcaagcgattctcctgcttcaacctcccaagtagctgggattacaggcacctgccaccacgaccagctaatgtttttgtatttttagtagagacagactttcactgtcttggccaggacggtctcgatctcttgacctcataatcctccctcctcggcctcctaaagtgctgggattacaggcttgagccaccgcgcccggccctagactcctggcttttaagtaaatcagagatacatgtttacatgaggacttgttgcttatctctacttagaaaagcactacatttttcttgactatttatgggaatcatattgaaatgttattttactagaaattaggaatgacctctttaaaatgttttcagatgttaatattaaaagattaaaaacccattttcaaccatgaaagctatagcttactcattggcaaatgacaaaaattctgaaaatcaaatattttatattcattgattactaattattgaaatgtgagctatgtcctcatttgatattagtaatcagttatcagctagtaattctttgaagttcctggctatttgttaacttcatttattcaaacacatttattacattgtcaggagtatgtctagaagtcttattttctgcattctgtgcctatttctgctaatgacagcaaccccaatgtaatgataccagtgccctgaacttttattaacacataaaacatttgttaaagataaccttccataaaattgcactgaagattataatagaaaaatgagatagtcctacagatttgaaagtaagggtcaactaccaggtagccatatttagtaaagtgttcttcagtaacacaacagataaaacatgttaaaatattgtacattaagtgcttaaa

SEQ ID NO: 80366 - DNA, 1503 bp, Homo sapiens
caaactatttctgtgcattttcagcaaactgaagtatcgcttgttattttatatgcgaaattattacacttatttatactcaaagcactcatattaactccaagttttatactattgtgttgaaaaggggaatttttacttcaagatgtgctgtatgatgtgcatttgaatgatatatgcatttaaacttactgagtatgcatcttccttctcatgaagggttccagggtttcaggtttatcttaaatcatatttgtattctgttatagtaaaaatacaataacttattttacttatagtaaaaataagtgtagtgtagctttctacttgatactttattgccttggggtatataaatcatgtcatctgaagtagtagaaattatgtttttccaactactatctaggaatatgttttcttttataatgcaataacaatttcaagatgatgcttgtcactcctttcactattattagctagcacatggttcagaactttcacacacattgtggcttttagacttctaacttttttctttttttgacatggagtctcgctctgttgcccaggctggagtgcaatggtgctatctcgtctcactgcaacctctgcctcctgggttcaagcgattctcctgcttcaacctcccaagtagctgggattacaggcacctgccaccackaccagctaatgtttttgtatttttagtagagacagactttcactgtcttggccaggacggtctcgatctcttgacctcataatcctccctcctcggcctcctaaagtgctgggattacaggcttgagccaccgcgcccggccctagactcctggcttttaagtaaatcagagatacatgtttacatgaggacttgttgcttatctctacttagaaaagcactacatttttcttgactatttatgggaatcatattgaaatgttattttactagaaattaggaatgacctctttaaaatgttttcagatgttaatattaaaagattaaaaacccattttcaaccatgaaagctatagcttactcattggcaaatgacaaaaattctgaaaatcaaatattttatattcattgattactaattattgaaatgtgagctatgtcctcatttgatattagtaatcagttatcagctagtaattctttgaagttcctggctatttgttaacttcatttattcaaacacatttattacattgtcaggagtatgtctagaagtcttattttctgcattctgtgcctatttctgctaatgacagcaaccccaatgtaatgataccagtgccctgaacttttattaacacataaaacatttgttaaagataaccttccataaaattgcactgaagattataatagaaaaatgagatagtcctacagatttgaaagtaagggtcaactaccaggtagccatatttagtaaagtgttcttcagtaacacaacagataaaacatgttaaaatattgtacattaagtgcttaaa

SEQ ID NO: 80367 - DNA, 1503 bp, Homo sapiens
caaactatttctgtgcattttcagcaaactgaagtatcgcttgttattttatatgcgaaattattacacttatttatactcaaagcactcatattaactccaagttttatactattgtgttgaaaaggggaatttttacttcaagatgtgctgtatgatgtgcatttgaatgatatatgcatttaaacttactgagtatgcatcttccttctcatgaagggttccagggtttcaggtttatcttaaatcatatttgtattctgttatagtaaaaatacaataacttattttacttatagtaaaaataagtgtagtgtagctttctacttgatactttattgccttggggtatataaatcatgtcatctgaagtagtagaaattatgtttttccaactactatctaggaatatgttttcttttataatgcaataacaatttcaagatgatgcttgtcactcctttcactattattagctagcacatggttcagaactttcacacacattgtggcttttagacttctaacttttttctttttttgacatggagtctcgctctgttgcccaggctggagtgcaatggtgctatctcgtctcactgcaacctctgcctcctgggttcaagcgattctcctgcttcaacctcccaagtagctgggattacaggcacctgccaccacgaccagctaatgtttttgtatttttagtagagacagactttcactgtcttggccaggacggtctcgatctcttgacctcataatcctccctcctcggcctcctaaagtgctgggattacaggcttgagccaccgcgcccggccctagactcctggcttttaagtaaatcagagatacatgtttacatgaggacttgttgcttatctctacttagaaaagcactacatttttcttgactatttatgggaatcatattgaaatgttattttactagaaattaggaatgacctctttaaaatgttttcagatgttaatattaaaagattaaaaacccattttcaaccatgaaagctatagcttactcattggcaaatgacaaaaattctgaaaatcaaatattttatattcattgattactaattattgaaatgtgagctatgtcctcatttgatattagtaatcarttatcagctagtaattctttgaagttcctggctatttgttaacttcatttattcaaacacatttattacattgtcaggagtatgtctagaagtcttattttctgcattctgtgcctatttctgctaatgacagcaaccccaatgtaatgataccagtgccctgaacttttattaacacataaaacatttgttaaagataaccttccataaaattgcactgaagattataatagaaaaatgagatagtcctacagatttgaaagtaagggtcaactaccaggtagccatatttagtaaagtgttcttcagtaacacaacagataaaacatgttaaaatattgtacattaagtgcttaaa

SEQ ID NO: 80368 - DNA, 711 bp, Homo sapiens
tggtgccagagactcacaggggtacatctttgcatttcaggggtctgtactcaccctgtgtctggcaggatgggctggtcattggtagagtcaccctcaattctgggtaaagccacttccctctgcctctgaaacacaacagagtggccaggctttgggaaggtgtgttagtccatttctatgtcactataaaggaatacctgaggctgggtaatttataaagaaaagatacttaactggctcatgattctgcaggctgtacaggaagcatggtgccagtgtctgctacttgtgagggcccaaggaaacttccagtcatggtggtgtcacatactgagagcctgaacaagagagcgagaaggtggaggtcccgactcttaaacaaccatatcctaagtgaactgagtgagaactcacttattactaaggggatggtgtcaaaccattcaygagggatctgcccccataatccaatcacctcccaccaggctccacctccaacgctggcaatcacatttcaacatgaaatttggagggaacacacaggcaaactatatcaaaaggggccttgaaagctatgcccaggctgctcagctctcatagtttattgctgctcttagatggagcccagagtggagctcaggatggagtcagtggggtccaaaatctttttgaaattctgcatctgtgagtttccgggtgtaattcagg

SEQ ID NO: 80369 - DNA, 904 bp, Homo sapiens
aaacacacatttcatacacatgttaatatctgctattctgcaagcaagtattttctgtacagtgtctaaatatctactccaatcgaaaaagtgcttaaacacttyaatatgcctcttttcaaccaaaaagaaaaacagttgctatgatcatgtttcaacatattttaaatctacacataatcactgccaatttataatatcttctctgcagatgctaatttcctatatagcattttttatcccctttaactaccgaaaatgtaattgttcagtattataattaatgtttttcattgctattacatgtctgaacgttgttagaattttttgttaatctttttattaatggaatgctcttcagtacaatgtgtaatactcttcttctctgacactgttataagttatttcaaagattttccatacacttgttttaaatagaattttcaaatctttcaggctagtttaagtcagtagaataggctctagagaaaagaaaatgctgtagagcagaaatgtgatttaaatgtaagtgtaaataagaaagtatcaatttggctaatgagaaatatacccatatatataaaatatataatggatatatcaatcaatagacatttcaaaatgagattatccactgaactattttaaaatattaatttaaaaagtggtcaaatcgctatactaacaaaataaaaaaattttttataaggtaacaagataaacaatatgtgtatttattttggccaagagacaagttgttatctggaaaatcatgacatgttgtatattatcaaaattactatcaatatcaagcagctctactattgactctcttagcagaactagaaattattattatgactctattccattaccatgaatattcaagaaactatttaaaatg

SEQ ID NO: 80370 - DNA, 904 bp, Homo sapiens
aaacacacatttcatacacatgttaatatctgctattctgcaagcaagtattttctgtacagtgtctaaatatctactccaatcgaaaaagtgcttaaacactttaatatgcctcttttcaaccaaaaagaaaaacagttgctatgaycatgtttcaacatattttaaatctacacataatcactgccaatttataatatcttctctgcagatgctaatttcctatatagcattttttatcccctttaactaccgaaaatgtaattgttcagtattataattaatgtttttcattgctattacatgtctgaacgttgttagaattttttgttaatctttttattaatggaatgctcttcagtacaatgtgtaatactcttcttctctgacactgttataagttatttcaaagattttccatacacttgttttaaatagaattttcaaatctttcaggctagtttaagtcagtagaataggctctagagaaaagaaaatgctgtagagcagaaatgtgatttaaatgtaagtgtaaataagaaagtatcaatttggctaatgagaaatatacccatatatataaaatatataatggatatatcaatcaatagacatttcaaaatgagattatccactgaactattttaaaatattaatttaaaaagtggtcaaatcgctatactaacaaaataaaaaaattttttataaggtaacaagataaacaatatgtgtatttattttggccaagagacaagttgttatctggaaaatcatgacatgttgtatattatcaaaattactatcaatatcaagcagctctactattgactctcttagcagaactagaaattattattatgactctattccattaccatgaatattcaagaaactatttaaaatg

SEQ ID NO: 80371 - DNA, 904 bp, Homo sapiens
aaacacacatttcatacacatgttaatatctgctattctgcaagcaagtattttctgtacagtgtctaaatatctactccaatcgaaaaagtgcttaaacactttaatatgcctcttttcaaccaaaaagaaaaacagttgctatgatcatgtttcaacatattttaaatctacacataatcactgccaatttataatatcttctctgcagatgctaatttcctatatagcattttttatcccctttaactaccgaaaatgtaattgttcagtattataattaatgtttttcattgctattacatgtctgaacgttgttagaattttttgttaatctttttattaatggaatgctcttcagtacaatgtgtaatactcttcttctctgacactgttataagttatttcaaagattttccatacacttgttttaaatagaattttcaaatctttcaggctagtttaagtcagtagaataggctctagagaaaagaaaatgctgtagagcagaaatgtgatttaaatgtaagtgtaaataagaaagtatcaatttggctaatgagaaatatacccatatatataaaatatataatggatatatcaatcaatagacatttcaaaatgagattatccactgaactattttaaaatattaatttaaaaagtggtcaaatcgctatactaacaaaataaaaaaattttttataaggtaacaagataaacaatatgtgtatttattttggccaagagacaagttgttatctggaaaatcatgacatgttgtatattatcaaaattactatcaatatcaagcagctctactattgactctcttagcagaactagaaattattattatgactctattccattaccakgaatattcaagaaactatttaaaatg

SEQ ID NO: 80372 - DNA, 1258 bp, Homo sapiens
tactcactccactacacagtatattcagcagctgagaccaaaacttttaccagagttttccaatcatgcagaatcatctcataaccatttcccagagcctcaaccatcccgagtaaaggatgaatgtacaccattttcgcagatacttttttttgactccttaaagacagtgacaggcaagctttcatgctgtctcctgttattttgaacaatggcagggaatgcaccaaaaagcgcctcagggtctccctaagtccctcctggaggcatctctctagtagggaagtttgtcgaggggatgcggccacccagtcatatagatagatgttcgctggctggaggtcttatccaagaaccgtctcttgggtggcctccaatctcctcaaggtgggtgggagatgctgttgcctgaacggggccaatgaatgaaggtcttcttaagggtggaggaaaagagggcaatggcttttctcttgggggaggaaaaggctctggtccgtcctcatcattgcgagaaaaagtctcttctttatgctgcactgaagggaataaagtggggggaggagcccctccctgttgttctggttcctgtgtttcctttccctgtaaatcttctgaattcccttcaggtgaagaaaatgggcgatctgactgactacgatctggaatataaagagggtacaacgcagagcgtaccagactccaggtggtttggtaaaattgcccygctcaaatcctcttttcaggcagcatcccacctgctcccataactctaatgttccttgatcagggaaccaagggcattcctgccaaattaaaagcacaagcttatgcaaagctccagactctaccgtgaactggatagccttaagtaattgttgcactgttttaaaaaatactttctgctttttggtcaactcctagcccatggtaacccaacccctagtattatacgggttggtcctgtcctgaaaacgggtcgggactgtcccttaccggtattccccgaagactggtgagtcatcctactccatgcgtttaacttaaaggcaatcatgtcagggtcaccacttgcaggttggtctgcagtgaacaccgagaaataagtattcagacaattatagctgaatggggtgaggagcaactcctccaagggagtgctgcgagcaatgaggaaaaagacggccgtccacctgagcctgagctaaagcatctacaaagatggatctaaaaagatccgtctgccacgtatttattg

SEQ ID NO: 80373 - DNA, 626 bp, Homo sapiens
ctaaaagccttctctctcccttgagttcctatattttgttcttttgcatttatgtgtttgacacattccactttatatttttattttcactcccacaataggtgaggtctgtgtgtgaataggaattttttcatctgtgtgcctctaagtgcacctagcttgaagctctgaatgttaaacccaaacaygtcttttgatgatagctgagaatgacttaattctcatattattgacaaagtacaattgataatatacatcatatcccataatgacaaatgactaggtattcaaacctacaggctgggaagagttcaaacttttcttctggatcacaggggaaaacctcagggagtttttctacacttggaacatgattctgttaccatataaagtaggaagcaatgaactcaaaagaaagatgtttatcctgatatatctttctcattcctgaaggaatgttttcaccctatggctttgccttggggtgaaacaatgtcaaatgatttaacgcaaatggaaaatgccaaccttttaggttggtttctaaatcctttacatagttacacgtgggagctacatatagatgagctggttggttggccagctggctggtattcagccattaa

SEQ ID NO: 80374 - DNA, 827 bp, Homo sapiens
gatcaggagctgctccaactcaaaaatcactaattcacactaaatttaacttgcaaacacaactttctttccttcccttattcttcccttatttaaaatgcccaccacaacccttaacatcagtggactctgtgccctctcccttggcccttctttccctcaacagatcacctacttcactcccagccacttagaatcccgtrcccatcatttaatcactcctgcccaaaacctaaactatcagtctctttagttgtccctttactcttgtttgggaaacctcaacctctgagaaagccagctgcttgttttctctaagtctgctctcagacaactgggcccttagagaaggtggcaccagagagcacagagtccattacttacttgggatcagcatcctcaggggaccttcaacatccatctccagacctactatttctcttatcaccaccctccctgaaaaggctattttaaagctatgacgctcccaccacttcacctactctcctccttcacagataaagagaatggaagttctgagaaaggaaagacaaactttcctccacataaagccatctgctacttctgcccaatggttataacaggacaggttcctccattcctgtccctccacttgggctcaggatcccatccccatcctcccttcttcagggtcattagctaatggactatcccttattgctcctaaattttcaacatcttatcccctctgggtctttcctgtttccacctgaatagggtcacggtatctcattttgaaaacaagaccctcctcatcccttggccccttttcacaactatcctca

SEQ ID NO: 80375 - DNA, 1053 bp, Homo sapiens
ttcatgaatattcacagcttatcctataatcattaaacatgtatacttagccaactcatttggcataaattcctgttccattcttccctccctcgaagtgcctgctttcagtttctgccagaggccacacttcccagcctgtcaagatagccaacctgcaggctgcataagaaatcaacctttcctcttcaaatttaggagcctcgggattcttcagttaacaccaacatgccatcaatgttgagaaccactgccagagaggacagaatctaaaagctctggaaattgaaaacactggaatgactcaacaaagtacagcctgctcagccaccccttaaaccatccctcttacgtgaccctgggagactgtcttaatgaaggggacaccagcatctttgaagagctctaaggtggctatccttataggccagagatgacagtgagaaatactaacaatggaatttggttctctgaccacagtggaaatcatgagatctgggattagtaaaggccagtagcagcccttatctgcacagacaaggtgggcaaaactgccacagtgagtcaaagggcaatgtggtgatcagaatattctgacccacaagaatcaacggtaaattgagcatcaggtgtctgtctcctaagttgatgcttgatatttaataagaaaatttctagatttactgagcagaaacctaactcaagtcccataaagaattcacagcttyttacccagatcccagatctaacctgcttcatagacctagagctccccaagtaacctagagagaggttccttgaaacccttgcaaagtggccatagttccaaaacactttccttccccagggagtcttcagcatttatcatgtgactgagcactgaagaaatggaattacccagaccctttcaagtgccaccacagtccaatactcaagaacttacctagatcaggtgctacctggagtcttagcccaaatccatctcacatctgttcagtgggcctatacacccatccttggcttaaaaaaaaaaaaaaaaaaaaaaaaaactat

SEQ ID NO: 80376 - DNA, 1053 bp, Homo sapiens
ttcatgaatattcacagcttatcctataatcattaaacatgtatacttagccaactcatttggcataaattcctgttccattcttccctccctcgaagtgcctgctttcagtttctgccagaggccacacttcccagcctgtcaagatagccaacctgcaggctgcataagaaatcaacctttcctcttcaaatttaggagcctcgggattcttcagttaacaccaacatgccatcaatgttgagaaccactgccagagaggacagaatctaaaagctctggaaattgaaaacactggaatgactcaacaaagtacagcctgctcagccaccccttaaaccatccctcttacgtgaccctgggagactgtcttaatgaaggggacaccagcatctttgaagagctctaaggtggctatccttataggccagagatgacagtgagaaatactaacaatggaatttggttctctgaccacagtggaaatcatgagatctgggattagtaaaggccagtagcagcccttatctgcacagacaaggtgggcaaaactgccacagtgagtcaaagggcaatgtggtgatcagaatattctgacccacaagaatcaacggtaaattgagcatcaggtgtctgtctcctaagttgatgcttgatatttaataagaaaatttctagatttactgagcagaaacctaactcaagtcccataaagaattcacagcttcttacccagatcccagatctaacctgcttcatagacctagagctccccaagtaacctagagagaggttccttgaaacccttgcaaagtggccatagttccaaaacactttccttccccagggagtcttcagcatttatcatgtgactgagcactgaaraaatggaattacccagaccctttcaagtgccaccacagtccaatactcaagaacttacctagatcaggtgctacctggagtcttagcccaaatccatctcacatctgttcagtgggcctatacacccatccttggcttaaaaaaaaaaaaaaaaaaaaaaaaaactat

SEQ ID NO: 80377 - DNA, 515 bp, Homo sapiens
agagaaacaggccaaacaaggaagggccagtccgagaagaggagaaatcagagaagagaggatcagcaaagccaaaagaggcaaggatataaaagtcttgcagcattaaaaggaatgactttttaaaaagaaatcctcagaacaaacaatggaagagagacgtctgaagaaaagcaacaaactcagaaattttttttttctctagccttaaatggrttttttcataacatatctttcatctatctattcctgtgccttgaacccagaaatggccctatggacccaagaggaacccaaactcaagcgccacctaaaaacatgggatttgccatatctctctctattaatggcagtcacaagtgagcactctgcagccaaaacttaaaatacttgtttcccatttcaaatgtttcagaaagctcatttgctaaaccgaaaataatgatcccttcccagattcatgatacactcaattccacaccatttaaaatatttcagagttctctttattttaa

SEQ ID NO: 80378 - DNA, 862 bp, Homo sapiens
tgtccagtgaatttattaaagttccaaagtcggtcgcgcgcagtggctcacgcctgtaatctcaacacttcgggaggccgaggcgtgtggatcacgaggtcaggagctggagactagcctgaccaacatggtgaaaccccgtctctactaaaaatacaaaaattagccaggcawggtggcacgtggctgtaatcctcgctactcaggaggctgaggcaggagaattgcttgaacctgggaggcagaggttgcagtgagccgagatggcgccacggcactccagcctgggcgaaagagtgagactccttctcaaaaaaagaaaaaaaaaaaagagttgctaagtcatactcaactttctgctcttgtcagacaattaaggggtctttgaatacttcagccctaataattttcttcctaaggtacacattgcagtgcttatctaattttaaatatctttttgtttcaacacctgattttttatttagatctatctgtatgtttacagtatattttgttctgtgttcattctttgatttcagaacttcaacctttctgaagcatgttttcagtttctctttagtttctttagtggaattctgctggtggcattttgttttttgtctctaaatatgttatttagccataggttgatgaatatttttcttggttgagaatttcagaatgacattattattcttaacaaataatattgtttattttacctttcattctttcctatttcaatatgattaaagataatttgatttttctagtgctaattgaaatatttttcccttactgattctttactatttctctaggagatacatagttgtaggtttatctccattgtagcttgctt

SEQ ID NO: 80379 - DNA, 862 bp, Homo sapiens
tgtccagtgaatttattaaagttccaaagtcggtcgcgcgcagtggctcacgcctgtaatctcaacacttcgggaggccgaggcgtgtggatcacgaggtcaggagctggagactagcctgaccaacatggtgaaaccccgtctctactaaaaatacaaaaattagccaggcatggtggcacgyggctgtaatcctcgctactcaggaggctgaggcaggagaattgcttgaacctgggaggcagaggttgcagtgagccgagatggcgccacggcactccagcctgggcgaaagagtgagactccttctcaaaaaaagaaaaaaaaaaaagagttgctaagtcatactcaactttctgctcttgtcagacaattaaggggtctttgaatacttcagccctaataattttcttcctaaggtacacattgcagtgcttatctaattttaaatatctttttgtttcaacacctgattttttatttagatctatctgtatgtttacagtatattttgttctgtgttcattctttgatttcagaacttcaacctttctgaagcatgttttcagtttctctttagtttctttagtggaattctgctggtggcattttgttttttgtctctaaatatgttatttagccataggttgatgaatatttttcttggttgagaatttcagaatgacattattattcttaacaaataatattgtttattttacctttcattctttcctatttcaatatgattaaagataatttgatttttctagtgctaattgaaatatttttcccttactgattctttactatttctctaggagatacatagttgtaggtttatctccattgtagcttgctt

SEQ ID NO: 80380 - DNA, 1416 bp, Homo sapiens
tccttctcaaatctgcctggtcattttttaaaatgtttttttgctttcattgagttgtattaaatttttactatatgcccaacaattctaattaagtctttattggtttgattttgctgagtctcttttcttttgtctttattttctttacttgtacaatggtaataatctagtaataacaccaactaaatcacatgattgttttatgaattgagataatgaatatattgcataatatctggtacatagtaaatgtacatgcaatccattataataattagaaataatgaaatataatgtatgattattaggaaatgtaccagagccacaaattttattgagcgatataaaagacaactagagaaaacaaagaaatatgacatagctggatggaaacagtaataataatgttgtgtgttcatcttggactaaatcatgtctcatacaatttcaataaaattccaattaaatttatttttgaaacatggcaaatacattgtaaatttaatgtaaaagaacaaacagggccaggctcagtggctcaacctgtaatcccagcactttgggaggctgaggcgggcatatcacgaggtcaggagatggagaccatcctggctaacacggtgaaacctcatctgtactataatacaaaaattagccgggcgtggttgcaggcgcctgtagtcccagctactcgggagtctgaggcagcagaatggcgtgaacccaggaggaggaacctgtggtgagtggagatcatgccactgcactccagcttgggcgacagagcgagattccatctcaaaaataaaataaaatgtaaaaagaaaaaatttgtgtcttgtttcctcattaatgttggttgaaagcatgtttgcacttgtctttgacttgtgttttattaacatcgattggcatattaaaagtccctctgagcttaccttgtctaaaaaaagataagaaaaagggactgtgggaaggactatgaggcagagggctggtgtgagcacatgctgggcaggaggaaagaggtaatgaccaggaccagggaaatccccaaaaccagcaagtcagggagccaaatgaaagcctttcattccgtatcggccacctaaccccattgacactccaagtgaacattctcttttagagatactcattgtcctgttttctctgtaatcttgtaaaggaatctgatttctcccattagcctttcacaggactaaaatttcacattagaatgctattctttagaaggcatcttcttagattaggctgcaaggagattsaggaagttactgtctgtcacttatgccccacagggacattaattcaccagagctttggtgggggagtagaggagctcctttcaagcaggactggatgctgcacagagtgtaaagggggcagaaggat

SEQ ID NO: 80381 - DNA, 772 bp, Homo sapiens
  misc_feature (1)...(772): n = A,T,C or G
ctggnnnnnnnnnnnnnnnnnnnnnnnnnnnnnnnnnnnnnnnnnnnnnnnnnnnnnnnnnnnnnnnnnnnnnnnnnnnnnnnnnnnnnnnnnnnnnnnnnnnnactaggtcattagggatgctggcactgagcctcattttagcccctctcccctgcacagcatgtgcctcagtcacaccactaatttgtcacctgcagtgcttggccctttgcctcatacgcccttccactgcaaccttctcaacctagcaaatctaactcacrgtcccaggctcagttcatctcctctaaggagcctcctctagtctgcaggcagttactcttcgctctccgctacccccatctccctatttcgtgcattaagtgctgggtgacacaattatcacagatgtttttaatgaagatgtgcactatttttttttactacagatcttaacaatcggagagatttctgtgaatgtgcagtagtctaatccagggtttctcaacctcaacactatcaacattttgggtgggataattcttcactgtgggaggctgtcctgtacatataggatgtttagcagcgtccctgacctctacccactgaatgccagtagcacctcccaatgtgacaacaaaatctctccagatattgccaaatgtcccctagggggaaaatcacctctagttgagaacgactggtctaattcttagccatattggagttcctaatgaaagtcagaaatactttttctagaatcacatacataggaagctaaccttctgcc

SEQ ID NO: 80382 - DNA, 570 bp, Homo sapiens
tcaaatatgacttttgattaaattaaatatgacaaaattaaaaatgactttgaacaattgtatgtcattacatttgaacataattgtagaaatattcacccttgtgtgataccaaaattgacaaattaaaactcctaagaaagaaatataatcatagctcactactttacctatatagtgaactaaatttacatggtcaagataatgtaaataaataaaaataaatggaaaagtttagtttattgattttcaacttttaaagtgattctatatataaagcacataaaattatccttggattatagaactgaataaaatgttatcaccctaacaatgtataatgcagtgtaacttgaatggaaggtagaaaagagaagacgggaaggaaagacrtcaaaaaagataaagatgctaatatctttattttatacattaaggatagtcatttataatggaacatgaaataaagttttaaataatttcttaaacctagaaaaataccagtaaaagagctataaagtattaaatatttattactttattatagtatttaataaagtaattattata

SEQ ID NO: 80383 - DNA, 1582 bp, Homo sapiens
aactcccacttatgagtgagaatatgcagtgtttggttttctgttcctgtgttagtttgctgagaatgatggtttccaactttatctgtgtccctgcaaaggacatgaactcatccttctttatggctgcatagtatttcatggtgtatatgtgccacattttctttaaccagtccatcattgatgggcatttgggttagtcccaagtctttgctattgtgaatagtgctaaagacacatgacaaatactttctctggagatcaggaacaagaagagaatgtctgtcatcaccacttctattcaaaactgtactaaaggaacttgtcagttcaatgggacaaaagaaggaagtctttagaattgttttcagaaattttgatttaaaaatttttttagtacccagaaaaacttgaaatatgtgtcaatttagcaaggaagttttatataaagactatatattgtaattttataacctagcaacagagaagtttatttcaaaaaacaccatttcagtatttttaaaaacaaatacccaataataaagttatttaaaatgagcaactaaacacaagagtaagataaaaaaaaaaacaaaaagaaattgagatataccatgttcataatttgtaaaattctataatataaatatatagatattttcaaattaatctgtaaaatcaatgcatcccaattttttaaatttccatcaggattttttgcagaaatttggtagacaatttaaaaatgtatatgaatatgcaggatcaagaagagctgaaaaatcatttggggaagaaaagcttcattgttgaaactatctataccaaaatcgattataaagctacagtaattaagactgtgatatttttgtatgaatagagaaactggttaaggaatagaacaaagagtgtagaaatgcaataggaaaatcaaatgcaaaggaggaaaatgtggccttttaaataactggtactggatcaattggatagctacctggaaaatggtgtgtcttcatctcacattacaccttgccccctctgcaccctggcaaaaagtaaagctttcattaaaaagaaaagaatacctaggaggacatctttatgaacttaaagtaggcaactatttctttaacagaatatgaaatgtgctgattataaaagaaaaaaatgatcaactaaactatatagtaattaagaacttcttttaaactgagaccatcaagagagtagagaggcaaggcacaacatgtgaaaaaatatttgtctatgcaaaaagctgtttatccagaatatttatttatttatttatttatttatttatttatttatttatttatttatttttgagacagagtctcactctgttgccagrctggagttcagtggtgcaatcacagctcactgcaacctccacctcctgggttcaagcagaatatttattttaaaaatacacacaaggtacaaatgagaagtgaaaaatacgtgtacagacattccatagaagagaatattcaaatagcccataaatacaggaaaacatgctcaacttcaacagtcatcaggcaaatttaaacttcagcaa

SEQ ID NO: 80384 - DNA, 735 bp, Homo sapiens
cagcacaatttgcagttgcaaaatatcgaactagctcaaatgaccatcaatcaactagtggataaagaaaaaaaawatatatatatataccgcattttctttatccactagttgatatatgtatatatatgtgtgtatatatatatatatgagtactacagccataaaaaggaatgaaataatggcattcacagcaacctgaatggaattgaagagtatcattctaagtgaagtatctcaggaatagaaaaacaaacatcatatgtaggcgtaagtgggagctaagctgtgaggatgcaaaggcataagaatgatacagtgggcattggggattcggggaaagggtgggtgtaggtgagggataaaagactacacattgggtactgtgtacactgctcaggtgatgggtgcaacaaaatctcagaaatcacaactaaagaacttattcatgtaatcaaacaccacttgatccctaaaaacctattaaaattaaaaataaattttaaaaaaaggaaaattgaagtttgtcaacataaaaagacagagtatagtacaataagtgtaataaaatagcaaacaaatccagaatgttaacaaaccctgatatagactatgttttaaaaatgaataaaatgcaggtgaccttgaatgacaacaattaaaaaaaaaaacaaacctatgttcttatttctaggactaaagtattggagtgttaaatggtattaggttgtcaat

SEQ ID NO: 80385 - DNA, 531 bp, Homo sapiens
cagacatgtagctaaaacccatggagtgttgaaactctttattatttccccatttcatggagtatctagtgttataggcagagagagcagttaatgccagccctaaggtaagagcaggccttgtaagcttgaagaacagaaaggatttcagtataaacagaggggtttgagtgaggataagaacagaaatagatgaggcaactttttttcatactgttctctcctctggttccatttaattggcccgaggataaacatctgagccagaaacagagttttgttctaggatttttcaaacaagaccttgtgagacttatattctccaatgatgatgctgtaagacagaagatacaggagtttcaggcaactatgtctgtctaatgggaaccatattgaggaacatgaagaagctgcacgtcacatatcataggyaatcttattaacccaaagaaatcggtattttctagaaaagtttcaatcctcagttgaattccctaaagcccagctgcaaccctgcccttttagagtttt

SEQ ID NO: 80386 - DNA, 1838 bp, Homo sapiens
aactttttataaataactcctctaaatgggtaaaaatttattatttttaaaaataaatacaagggtatcaacataaagaaccatttgctccttatgtagaacattcccctcaacatcagaaagcaatcaaacacacatctttctcactttaagaawgttttcatgtgtgcaaatcaattcaaatgagctattaatgtaatatttaatagagccattaaaatgtgaattatcttgaagtgattgtattacttttccagtgttttcccaatacagttgcagccacaaggacaagatatgtatgtgaaggtaactattgttcccagaaacacaagctttgatagaaagaatcataaaataaaactacacaacatatatccttctaaaataactccgtaggagaacaggttcatttttactttgatctactgttattatgagaaagtggattgaggtgacagtgtgcagtgctgattcagacctaattcagcagtatggagtaaagtaatacactgcaaagacattgcttagtaatagtagaaaatagagtcaagaagaatcttgaaaagtgtacagatgtagtccttgacactatgttatgtagccttctaacaacacccacatagttttccttcctttctctgatcacttttagtgttagtagtcataaataggatttgattatatttcaaatcgcatttcttaaactatttcattgtttcaatcttgtcttcccaaataaggttgaaaccagcaagagtagcagtgtgcacacatgtgtatgtatgtgtagttttttcccaaccctaatctacagagtttttacacatattcacacactcacaccacatatgtatttctaaaaatcacagtcacattttcgtgaattataaaattttgacactgccttttatttacttttctcttcgcttctttaactttctgcccttatacttgctaaaacttgtgtcttaatcagaatgccaagatcatgcatatcaccataacaaataagaaaatcaaagcttactgaattttcagtgtaattagggtaaaaataccataatactctgtgttttttataaaatagccattgaggtcagctcacatagaatcataccagaagtatcagtaagggggcaaactaatttattggtgtagctctgtatttcaatggcttaatagatactttaacagcccgttatactacagagtggtatcaacatgcagggcatatgtgcttgtttaccttacactgatacagaaaactcacatatcttgtgaatttaatctctaaaaccagtaaaatgattttacggtgttgaaatgacttgtcaaaaattgaaattttgtgtagaaacttttcccttgtctaacatcaatttattagctgatatgttttcccgactacattgttttttaatactgaggggacccattttatcaatacagcttaaagatggttccataaccaaatatctatatttttatctaattgctgcccagaggcttcagtggtagacgtgttagcaagggaacaaagaacattaaagatatgttctggaggagataattatgtaagacagaggggatttgggcaaaaaataacaacatgaaacagaagtgccagttgaaattcaggaaaagcgttagatgaattcacgaagaggaggaaatgtctgcttccagtaggtatccaagggagttttattggggtgatgatgtttgctgtaagtaatataagccatgatgtggtgaatcgcaagtaaagaaaacttcatttaacaatatagtacagacgtggcaaatcatggaggaatgattagttcaatgactttcag

SEQ ID NO: 80387 - DNA, 1838 bp, Homo sapiens
aactttttataaataactcctctaaatgggtaaaaatttattatttttaaaaataaatacaagggtatcaacataaagaaccatttgctccttatgtagaacattcccctcaacatcagaaagcaatcaaacacacatctttctcactttaagaaagttttcatgtgtgcaaatcaattcaaatgagctattaatgtaatatttaatagagccattaaaatgtgaattatcttgaagtgattgtattacttttccagtgttttcccaatayagttgcagccacaaggacaagatatgtatgtgaaggtaactattgttcccagaaacacaagctttgatagaaagaatcataaaataaaactacacaacatatatccttctaaaataactccgtaggagaacaggttcatttttactttgatctactgttattatgagaaagtggattgaggtgacagtgtgcagtgctgattcagacctaattcagcagtatggagtaaagtaatacactgcaaagacattgcttagtaatagtagaaaatagagtcaagaagaatcttgaaaagtgtacagatgtagtccttgacactatgttatgtagccttctaacaacacccacatagttttccttcctttctctgatcacttttagtgttagtagtcataaataggatttgattatatttcaaatcgcatttcttaaactatttcattgtttcaatcttgtcttcccaaataaggttgaaaccagcaagagtagcagtgtgcacacatgtgtatgtatgtgtagttttttcccaaccctaatctacagagtttttacacatattcacacactcacaccacatatgtatttctaaaaatcacagtcacattttcgtgaattataaaattttgacactgccttttatttacttttctcttcgcttctttaactttctgcccttatacttgctaaaacttgtgtcttaatcagaatgccaagatcatgcatatcaccataacaaataagaaaatcaaagcttactgaattttcagtgtaattagggtaaaaataccataatactctgtgttttttataaaatagccattgaggtcagctcacatagaatcataccagaagtatcagtaagggggcaaactaatttattggtgtagctctgtatttcaatggcttaatagatactttaacagcccgttatactacagagtggtatcaacatgcagggcatatgtgcttgtttaccttacactgatacagaaaactcacatatcttgtgaatttaatctctaaaaccagtaaaatgattttacggtgttgaaatgacttgtcaaaaattgaaattttgtgtagaaacttttcccttgtctaacatcaatttattagctgatatgttttcccgactacattgttttttaatactgaggggacccattttatcaatacagcttaaagatggttccataaccaaatatctatatttttatctaattgctgcccagaggcttcagtggtagacgtgttagcaagggaacaaagaacattaaagatatgttctggaggagataattatgtaagacagaggggatttgggcaaaaaataacaacatgaaacagaagtgccagttgaaattcaggaaaagcgttagatgaattcacgaagaggaggaaatgtctgcttccagtaggtatccaagggagttttattggggtgatgatgtttgctgtaagtaatataagccatgatgtggtgaatcgcaagtaaagaaaacttcatttaacaatatagtacagacgtggcaaatcatggaggaatgattagttcaatgactttcag

SEQ ID NO: 80388 - DNA, 1838 bp, Homo sapiens
aactttttataaataactcctctaaatgggtaaaaatttattatttttaaaaataaatacaagggtatcaacataaagaaccatttgctccttatgtagaacattcccctcaacatcagaaagcaatcaaacacacatctttctcactttaagaaagttttcatgtgtgcaaatcaattcaaatgagctattaatgtaatatttaatagagccattaaaatgtgaattatcttgaagtgattgtattacttttccagtgttttcccaatacagttgcagccacaaggacaagatatgtatgtgaaggtaactattgttcycagaaacacaagctttgatagaaagaatcataaaataaaactacacaacatatatccttctaaaataactccgtaggagaacaggttcatttttactttgatctactgttattatgagaaagtggattgaggtgacagtgtgcagtgctgattcagacctaattcagcagtatggagtaaagtaatacactgcaaagacattgcttagtaatagtagaaaatagagtcaagaagaatcttgaaaagtgtacagatgtagtccttgacactatgttatgtagccttctaacaacacccacatagttttccttcctttctctgatcacttttagtgttagtagtcataaataggatttgattatatttcaaatcgcatttcttaaactatttcattgtttcaatcttgtcttcccaaataaggttgaaaccagcaagagtagcagtgtgcacacatgtgtatgtatgtgtagttttttcccaaccctaatctacagagtttttacacatattcacacactcacaccacatatgtatttctaaaaatcacagtcacattttcgtgaattataaaattttgacactgccttttatttacttttctcttcgcttctttaactttctgcccttatacttgctaaaacttgtgtcttaatcagaatgccaagatcatgcatatcaccataacaaataagaaaatcaaagcttactgaattttcagtgtaattagggtaaaaataccataatactctgtgttttttataaaatagccattgaggtcagctcacatagaatcataccagaagtatcagtaagggggcaaactaatttattggtgtagctctgtatttcaatggcttaatagatactttaacagcccgttatactacagagtggtatcaacatgcagggcatatgtgcttgtttaccttacactgatacagaaaactcacatatcttgtgaatttaatctctaaaaccagtaaaatgattttacggtgttgaaatgacttgtcaaaaattgaaattttgtgtagaaacttttcccttgtctaacatcaatttattagctgatatgttttcccgactacattgttttttaatactgaggggacccattttatcaatacagcttaaagatggttccataaccaaatatctatatttttatctaattgctgcccagaggcttcagtggtagacgtgttagcaagggaacaaagaacattaaagatatgttctggaggagataattatgtaagacagaggggatttgggcaaaaaataacaacatgaaacagaagtgccagttgaaattcaggaaaagcgttagatgaattcacgaagaggaggaaatgtctgcttccagtaggtatccaagggagttttattggggtgatgatgtttgctgtaagtaatataagccatgatgtggtgaatcgcaagtaaagaaaacttcatttaacaatatagtacagacgtggcaaatcatggaggaatgattagttcaatgactttcag

SEQ ID NO: 80389 - DNA, 1838 bp, Homo sapiens
aactttttataaataactcctctaaatgggtaaaaatttattatttttaaaaataaatacaagggtatcaacataaagaaccatttgctccttatgtagaacattcccctcaacatcagaaagcaatcaaacacacatctttctcactttaagaaagttttcatgtgtgcaaatcaattcaaatgagctattaatgtaatatttaatagagccattaaaatgtgaattatcttgaagtgattgtattacttttccagtgttttcccaatacagttgcagccacaaggacaagatatgtatgtgaaggtaactattgttcccagaaacacaagctttgatagaaagaatcataaaataaaactacacaacatatatccttctaaaataactccgtaggagaacaggttcatttttactttgatctactgttattatgagaaagtggatygaggtgacagtgtgcagtgctgattcagacctaattcagcagtatggagtaaagtaatacactgcaaagacattgcttagtaatagtagaaaatagagtcaagaagaatcttgaaaagtgtacagatgtagtccttgacactatgttatgtagccttctaacaacacccacatagttttccttcctttctctgatcacttttagtgttagtagtcataaataggatttgattatatttcaaatcgcatttcttaaactatttcattgtttcaatcttgtcttcccaaataaggttgaaaccagcaagagtagcagtgtgcacacatgtgtatgtatgtgtagttttttcccaaccctaatctacagagtttttacacatattcacacactcacaccacatatgtatttctaaaaatcacagtcacattttcgtgaattataaaattttgacactgccttttatttacttttctcttcgcttctttaactttctgcccttatacttgctaaaacttgtgtcttaatcagaatgccaagatcatgcatatcaccataacaaataagaaaatcaaagcttactgaattttcagtgtaattagggtaaaaataccataatactctgtgttttttataaaatagccattgaggtcagctcacatagaatcataccagaagtatcagtaagggggcaaactaatttattggtgtagctctgtatttcaatggcttaatagatactttaacagcccgttatactacagagtggtatcaacatgcagggcatatgtgcttgtttaccttacactgatacagaaaactcacatatcttgtgaatttaatctctaaaaccagtaaaatgattttacggtgttgaaatgacttgtcaaaaattgaaattttgtgtagaaacttttcccttgtctaacatcaatttattagctgatatgttttcccgactacattgttttttaatactgaggggacccattttatcaatacagcttaaagatggttccataaccaaatatctatatttttatctaattgctgcccagaggcttcagtggtagacgtgttagcaagggaacaaagaacattaaagatatgttctggaggagataattatgtaagacagaggggatttgggcaaaaaataacaacatgaaacagaagtgccagttgaaattcaggaaaagcgttagatgaattcacgaagaggaggaaatgtctgcttccagtaggtatccaagggagttttattggggtgatgatgtttgctgtaagtaatataagccatgatgtggtgaatcgcaagtaaagaaaacttcatttaacaatatagtacagacgtggcaaatcatggaggaatgattagttcaatgactttcag

SEQ ID NO: 80390 - DNA, 1838 bp, Homo sapiens
aactttttataaataactcctctaaatgggtaaaaatttattatttttaaaaataaatacaagggtatcaacataaagaaccatttgctccttatgtagaacattcccctcaacatcagaaagcaatcaaacacacatctttctcactttaagaaagttttcatgtgtgcaaatcaattcaaatgagctattaatgtaatatttaatagagccattaaaatgtgaattatcttgaagtgattgtattacttttccagtgttttcccaatacagttgcagccacaaggacaagatatgtatgtgaaggtaactattgttcccagaaacacaagctttgatagaaagaatcataaaataaaactacacaacatatatccttctaaaataactccgtaggagaacaggttcatttttactttgatctactgttattatgagaaagtggattgaggtgasagtgtgcagtgctgattcagacctaattcagcagtatggagtaaagtaatacactgcaaagacattgcttagtaatagtagaaaatagagtcaagaagaatcttgaaaagtgtacagatgtagtccttgacactatgttatgtagccttctaacaacacccacatagttttccttcctttctctgatcacttttagtgttagtagtcataaataggatttgattatatttcaaatcgcatttcttaaactatttcattgtttcaatcttgtcttcccaaataaggttgaaaccagcaagagtagcagtgtgcacacatgtgtatgtatgtgtagttttttcccaaccctaatctacagagtttttacacatattcacacactcacaccacatatgtatttctaaaaatcacagtcacattttcgtgaattataaaattttgacactgccttttatttacttttctcttcgcttctttaactttctgcccttatacttgctaaaacttgtgtcttaatcagaatgccaagatcatgcatatcaccataacaaataagaaaatcaaagcttactgaattttcagtgtaattagggtaaaaataccataatactctgtgttttttataaaatagccattgaggtcagctcacatagaatcataccagaagtatcagtaagggggcaaactaatttattggtgtagctctgtatttcaatggcttaatagatactttaacagcccgttatactacagagtggtatcaacatgcagggcatatgtgcttgtttaccttacactgatacagaaaactcacatatcttgtgaatttaatctctaaaaccagtaaaatgattttacggtgttgaaatgacttgtcaaaaattgaaattttgtgtagaaacttttcccttgtctaacatcaatttattagctgatatgttttcccgactacattgttttttaatactgaggggacccattttatcaatacagcttaaagatggttccataaccaaatatctatatttttatctaattgctgcccagaggcttcagtggtagacgtgttagcaagggaacaaagaacattaaagatatgttctggaggagataattatgtaagacagaggggatttgggcaaaaaataacaacatgaaacagaagtgccagttgaaattcaggaaaagcgttagatgaattcacgaagaggaggaaatgtctgcttccagtaggtatccaagggagttttattggggtgatgatgtttgctgtaagtaatataagccatgatgtggtgaatcgcaagtaaagaaaacttcatttaacaatatagtacagacgtggcaaatcatggaggaatgattagttcaatgactttcag

SEQ ID NO: 80391 - DNA, 1838 bp, Homo sapiens
aactttttataaataactcctctaaatgggtaaaaatttattatttttaaaaataaatacaagggtatcaacataaagaaccatttgctccttatgtagaacattcccctcaacatcagaaagcaatcaaacacacatctttctcactttaagaaagttttcatgtgtgcaaatcaattcaaatgagctattaatgtaatatttaatagagccattaaaatgtgaattatcttgaagtgattgtattacttttccagtgttttcccaatacagttgcagccacaaggacaagatatgtatgtgaaggtaactattgttcccagaaacacaagctttgatagaaagaatcataaaataaaactacacaacatatatccttctaaaataactccgtaggagaacaggttcatttttactttgatctactgttattatgagaaagtggattgaggtgacartgtgcagtgctgattcagacctaattcagcagtatggagtaaagtaatacactgcaaagacattgcttagtaatagtagaaaatagagtcaagaagaatcttgaaaagtgtacagatgtagtccttgacactatgttatgtagccttctaacaacacccacatagttttccttcctttctctgatcacttttagtgttagtagtcataaataggatttgattatatttcaaatcgcatttcttaaactatttcattgtttcaatcttgtcttcccaaataaggttgaaaccagcaagagtagcagtgtgcacacatgtgtatgtatgtgtagttttttcccaaccctaatctacagagtttttacacatattcacacactcacaccacatatgtatttctaaaaatcacagtcacattttcgtgaattataaaattttgacactgccttttatttacttttctcttcgcttctttaactttctgcccttatacttgctaaaacttgtgtcttaatcagaatgccaagatcatgcatatcaccataacaaataagaaaatcaaagcttactgaattttcagtgtaattagggtaaaaataccataatactctgtgttttttataaaatagccattgaggtcagctcacatagaatcataccagaagtatcagtaagggggcaaactaatttattggtgtagctctgtatttcaatggcttaatagatactttaacagcccgttatactacagagtggtatcaacatgcagggcatatgtgcttgtttaccttacactgatacagaaaactcacatatcttgtgaatttaatctctaaaaccagtaaaatgattttacggtgttgaaatgacttgtcaaaaattgaaattttgtgtagaaacttttcccttgtctaacatcaatttattagctgatatgttttcccgactacattgttttttaatactgaggggacccattttatcaatacagcttaaagatggttccataaccaaatatctatatttttatctaattgctgcccagaggcttcagtggtagacgtgttagcaagggaacaaagaacattaaagatatgttctggaggagataattatgtaagacagaggggatttgggcaaaaaataacaacatgaaacagaagtgccagttgaaattcaggaaaagcgttagatgaattcacgaagaggaggaaatgtctgcttccagtaggtatccaagggagttttattggggtgatgatgtttgctgtaagtaatataagccatgatgtggtgaatcgcaagtaaagaaaacttcatttaacaatatagtacagacgtggcaaatcatggaggaatgattagttcaatgactttcag

SEQ ID NO: 80392 - DNA, 1154 bp, Homo sapiens
ttcttcatgttatagatgtataaccactccaycacatcaaaagcccagggattgcactgtagaaagtctcattatcagcactagctttctgagtgtacttttggacaagaaaaagtatttatgttttattaactactaagattgtcatgttttagacatttcaaagagacaatgctactgctttttgttcccagtgactgaaatgtggaaagctttcgtatttgttattgtgtaatgtgccattatctcccatgaaagcttcaggcctgtgtgacacacagctaaaactgggcatttgtttctactctgcttattcttttacaacacgtgtagagagttaaaagagaaagtggtatctgttgaaagtataccctgaagaattcttagttttttcagtttaaaaaaaagaaaaaagaaaaaccaaacagaataccaaacctccaagatgaaattaaaacattttcatttttaaatagccccagatatcacttagcaagaatcagagaacaaatagagtttctttgcatcacagttaggccaatatgcttcagtgaactgtctctccaaagctcttttgtagggacaagcgattataagctatggcgagtatttacacaagaagaacctctttactttgtttatacatcttttttcttccgtttttaaccaatgtacaaatataagcagaaaaaaatgggtgtaaccaggagacactgaagaagattttaatttggtacattataaacctgatatgagcaaataatgtaaggtaattactcttcaacttttactaataatttgcccacaataaggacagaaagaactgctttccttggcacttatcaaactgtctagtttttgtgcttggaccctcgtgttaagtgggatagaaacacattcagaggataaggataagggaacatgtaactctcatattcagagtcattgagagaactgcagatagattagagaagatatgattgctatcttcaaatactttaagagttgtcatggagaagagggattaaacacattatgtatagccttccaaagcattagagccaggagaaatgagtagaagccatagggagctaagcttcagctaaatataagaaaaatgttgagtccaaatagtctgaggaaggaacagattg

SEQ ID NO: 80393 - DNA, 1154 bp, Homo sapiens
ttcttcatgttatagatgtataaccactccaccacatcaaaagcccagggattgcactgtagaaagtctcattatcagcactagctttctgagtgtacttttggacaagaaaaagtatttatgtttyattaactactaagattgtcatgttttagacatttcaaagagacaatgctactgctttttgttcccagtgactgaaatgtggaaagctttcgtatttgttattgtgtaatgtgccattatctcccatgaaagcttcaggcctgtgtgacacacagctaaaactgggcatttgtttctactctgcttattcttttacaacacgtgtagagagttaaaagagaaagtggtatctgttgaaagtataccctgaagaattcttagttttttcagtttaaaaaaaagaaaaaagaaaaaccaaacagaataccaaacctccaagatgaaattaaaacattttcatttttaaatagccccagatatcacttagcaagaatcagagaacaaatagagtttctttgcatcacagttaggccaatatgcttcagtgaactgtctctccaaagctcttttgtagggacaagcgattataagctatggcgagtatttacacaagaagaacctctttactttgtttatacatcttttttcttccgtttttaaccaatgtacaaatataagcagaaaaaaatgggtgtaaccaggagacactgaagaagattttaatttggtacattataaacctgatatgagcaaataatgtaaggtaattactcttcaacttttactaataatttgcccacaataaggacagaaagaactgctttccttggcacttatcaaactgtctagtttttgtgcttggaccctcgtgttaagtgggatagaaacacattcagaggataaggataagggaacatgtaactctcatattcagagtcattgagagaactgcagatagattagagaagatatgattgctatcttcaaatactttaagagttgtcatggagaagagggattaaacacattatgtatagccttccaaagcattagagccaggagaaatgagtagaagccatagggagctaagcttcagctaaatataagaaaaatgttgagtccaaatagtctgaggaaggaacagattg

SEQ ID NO: 80394 - DNA, 656 bp, Homo sapiens
atattctgcattatggctaagagctgagggcatttgcatgggatgggagtcaagggcaccgaaatctagggggcaaggtaggggggagccttcttgggtaggcagggatgggggagccagtgcaaaagggagggaattacttctaggatagggatgggatcctgcggggccgtttggagagaaggttctgatgccagcattgatctgagaagaggcagaggaggtggtggtgcagtgaggagagccacctcgccgcctcccacaggctgctcagtgagcctccggttcccattctttcccccatttccctcttcccttctcattcatcctattgacaatctcacatggggcttttttggaccacgtgttttattccctgtcaccagccaagcaccctattatattaatttattktcctttccggtaacttgtcgccttcctgtaaactctccctttcccttgctggctttgtccattgccaaaccctagctaccggcctgccctcctgcctgctgtgcccctggcctggctagagtgagcaaagatctcctaggaccctcctggcgttcaccccctcgagggctgcttctggggccctccctctccctgtgtcagttccccatggagagcctgtcttggatctcacacagctgggg

SEQ ID NO: 80395 - DNA, 791 bp, Homo sapiens
gcatgaattttaggtagaaaaagttacatatactcctttctatatggtagattttttgtttggcaacctgattagtattataaagacatctttgcttttttttttttttttccccaagacagagtcttgctctgtttccagtctggagtgcagtggtgcgatctctgctcattgcaacctccgcttcctgggttcaagtgattctcctgcatcagtctcccgaatagctgggactacaggcatgcgccaccatacccagctaattttcttttttttttttttgagacagagtctcrctctgtcgcccaggctggaatgcagtggtgtaatctcagctcaccacaacctctgcctcctgggttcaagcgattctcctgcctcagcctcccaagtagctgggactgcatgcgcacactgccacgcccagctaatttttcgtattttagtagagatggggtttcaccgagttgcccaagctggtcttgagctgctgagctcaggcaatccacccaccttggcctcccaaagtgctaggattacaggcgtgagccaccgcgcccagccctgtttttgaactttaaattaatggagctaaatagtgtgtactcttgtatctagctgcttttttttttttttttttttttttttttgagacggagtcttgctctgtcacccaggctggagtgcagtggcgcaatcttggcccactgcaacctctgcctccctggttcaaacgattctcctgcctcagtctcccaagtagctgtgattacaggcacacatgctaccac

SEQ ID NO: 80396 - DNA, 736 bp, Homo sapiens
ctttgattttggatacacagaataatggtctttttgttacactgataaagccaaatgccacatccagataaaggagaggctgatctttccataattatctcaaccaagtccaataacaaggtgttatctgagatgggctgtgtcagacaatattaattgtttcctggtgtctctttttacctttgttttcagtgttagagcaacaaacaaaccaatcctagttcttagctaagtctccattctctagctcctagtgtgctcaattgtcgtcccatgtgtatgtttgactggtgaggagaagctatacatgaattgccttgtgcagttccaggcagttcccctaaaggatggcaatgggtccttaacccccatgttccacctctatgacagcccactgctatgactaggtagatcagctcaaatcactttatgtacagcatgctttgattacctctagccytcctaggtacctatttatttgtttgctctaattttctgtgccatgtattctctcttcaactttggaatcttatttatccttaaagtcccagcataagccctacctccttcaaaaatctttggctaatgctatggtctaaatatgtttgtccccagccttcccaattcatatgttaaacctaatcacctaggcaatgttattagaagatggtgcctttgaaggtgattaggtcatgaggttctcccccataaatggaattaatatccctgtaaaaga

SEQ ID NO: 80397 - DNA, 965 bp, Homo sapiens
tgaagcattgaagatctctcttaacaggtaaatattatacctgagtccccacagaagcacatcctaagacaaatattcaagtgtaaatttttacctagggttaatcctaggtgacactgatagaagggtagggaagcaagatagggaagaatgaaaacgtggtatcagagggatagtattaaaaagtcaccactggggcaactggagctcatccctctgaaaaactcaggaaaataaaaatagaatgtatgcttcagagtcttcctagaaaaattgagggggctgtgtgttcatacaccagttctttccaattactcactggggtttgctctcagggagaagatggcacacaaatatgtggcattttcagatcattgtatgtacagacagtgtgggtcttggaagacagagaggaagcctcagggaaaaggatgcaggtgctgacagtcaaaatagtacagaattgactggaatggtaaggatcaaggaaatatgggcaacacttgacttggtacaagccagtaccagtcattaatgtcatctatagaatcaattaacaaaatggaaaaaaacccatatatcccatatatatatatatatatatatatatatatatatatatatatatatatatatgttttgtgtgagtgtgtttggagaaggaaaaatatcaggaaatttaacttaggagataaaataatccatccctaaaaggcgtgtgtgtgtttgtgtgtctgtgtgtgtgtgtgtgtgtgtgtgtgtgtgtatgttttcttttcctaycaggaatatgaggggatggcagatgggatagagacacattgttaagcagaagaaagtaccgtgaagttactgtgatctcagggcagaacagaaactgcaatgctaaatcagaattagagagaggctgggtgcagtggctcatgcctgtaatcccagcactttgtgcagctgaggtggggtgg

SEQ ID NO: 80398 - DNA, 965 bp, Homo sapiens
tgaagcattgaagatctctcttaacaggtaaatattatacctgagtccccacagaagcacatcctaagacaaatattcaagtgtaaatttttacctagggttaatcctaggtgacactgatagaagggtagggaagcaagatagggaagaatgaaaacgtggtatcagagggatagtattaaaaagtcaccactggggcaactggagctcatccctctgaaaaactcaggaaaataaaaatagaatgtatgcttcagagtcttcctagaaaaattgagggggctgtgtgttcatacaccagttctttccaattactcactggggtttgctctcagggagaagatggcacacaaatatgtggcattttcagatcattgtatgtacagacagtgtgggtcttggaagacagagaggaagcctcagggaaaaggatgcaggtgctgacagtcaaaatagtacagaattgactggaatggtaaggatcaaggaaatatgggcaacacttgacttggtacaagccagtaccagtcattaatgtcatctatagaatcaattaacaaaatggaaaaaaacccatatatcccatatatatatatatatatatatatatatatatatatatatatatatatatatgttttgtgtgagtgtgtttggagaaggaaaaatatcaggaaatttaacttaggagataaaataatccatccctaaaaggcgtgtgtgtgtttgtgtgtctgtgtgtgtgtgtgtgtgtgtgtgtgtgtgtatgttttcttttcctatcaggaatatgaggggatggcagatgggatagagacacattgttaagcagaagaaagtaccgtgaagttactgtgatctcagggcagaacagaaactgcaatgctaaatcagaattagagagaggctgggtgcagtggctcatgcctgtaatcccagcactttgkgcagctgaggtggggtgg

SEQ ID NO: 80399 - DNA, 701 bp, Homo sapiens
cttttgcaaatgttttatcagggaaaaaatttaacagtaagctaagctaacccaatctccatattgcctttctcttaattattcctgggctattgaggggtgggagagtccaagagaatcttaaattggaaacacgtattgtttctatttgctgggaagggtgggctcataagggtgacaggacaagggtttgataagaaatatctcytcaaatcagagatgcacccaggaacccaaagtctcttgtctgtgacaggtaatgaggtagggtagaggcatgaatgacgtcagcctggatctgagccatcaggctggagttgtcaaaccagaatgaagaaaacaataaaagcttaaccttagtaattaggagggatgggggaatataattttaaaaagcatttggaattggcaacaaattctttttaaactgacaatattgaaggtacagagaatgaattggagtctgaggtcagacactgactggatggggtaattttacagagaaatgctgaaatgaatctgaatctctctagaaggcttatggcctctgcattttcctcccatcttagaagcacctgagggcaggtttctagggggagaaagttgaaaaggacaacacctatgtgtaagccctgaaggggcttgaacaaaaaggcaaaagtcatgtctaccagagatcaagaagccaggaacttggaaga

SEQ ID NO: 80400 - DNA, 834 bp, Homo sapiens
gtacgcatgtgtacaggcctggaagtagaaagggctttgactccaaattcttacatgctagaaatgcctggcctgatctgattaacccagcatcattgctgtgtgctaagtaatctcyaacagtggccccaatagccactggataaactcccaattccctaatatagcattcacagtctttctgagttctacagtacagagtccagtacattttcaacctcatctgctaatggtcccactgctcaccttacattctgcacgcattgaaatacctgctgctttccaaatgcagcatgagttttcatctttgtactttccatctgcccataatgctttccaacctgcttctgcatagtggcttgtttgttctccaatccctgctcaaatactttagcctcagaaagttgagagaggcttggatcagggaaatctggctgcttctgagctggtttcaagaggaagtgccctcacccaacatccaatgtgtccactggcatttggggctcagattatttcccaaagaacatagaacagggatgcaaatcatttatctcctggattccaaagatttacctatggttagaagggcacagaggaaagaaaataatcaaaacttcgtctacttcccttcaaagtccaaagttataaaaggtctgatagactatagtgaccctgacccaggacacaggaaggactgggcagcccaaagaggagtctccaagagaagggtccaagggaagtccatggggcggagatgggcagtgagtgctggtttcctccctaatatgcagccattactaaaagctgtccagatcagaactcaggcactgtgaa

SEQ ID NO: 80401 - DNA, 834 bp, Homo sapiens
gtacgcatgtgtacaggcctggaagtagaaagggctttgactccaaattcttacatgctagaaatgcctggcctgatctgattaacccagcatcattgctgtgtgctaagtaatctctaacagtggccccaatagccactggataaactcccaattccctaatatagcattcacagtctttctgagttctacagtacagagtccagtacattttcaacctcatctgctaatggtcccactgctcaccttacattctgcacgcattgaaatacctgctgctttccaaatgcagcatgagttttcatctttgtactttccatctgcccataatgctttccaacctgcttctgcatagtggcttgtttgttctccaatccctgctcaaatactttagcctcagaaagttgagagaggcttggatcagggaaatctggctgcttctgagctggtttcaagaggaagtgccctcacccaacatccaatgtgtccactggcatttggggctcagattatttcccaaagaacatagaacagggatgcaaatcatttatctcctggattccaaagatttacctatggttagaagggcacagaggraagaaaataatcaaaacttcgtctacttcccttcaaagtccaaagttataaaaggtctgatagactatagtgaccctgacccaggacacaggaaggactgggcagcccaaagaggagtctccaagagaagggtccaagggaagtccatggggcggagatgggcagtgagtgctggtttcctccctaatatgcagccattactaaaagctgtccagatcagaactcaggcactgtgaa

SEQ ID NO: 80402 - DNA, 671 bp, Homo sapiens
gcccattacccagttccaaagtcgattccacattttcaaattatctttatagcagtaccctactctgccagtaccaattttctgtattagtcttttctcacactgctataaagaactgactgagactaggtgattaataaagaaaagaggtttaactgactcacagttctgcatggttgggtgacctcaggaaactcactatcatggcagaaggtgaaagggaagcaggcacatcttacatggtggcaagagagagaaagggaaagtgccagacacttaccaaactaccagatctcacgagaaattactcayggtcatgagaacagcaaggggaaaatccatccacatgatccaatcatttcccatcaggtccctctcttaacatatgaggattagattttgagatgagatttgggtgggggcacagagccaagccatataaatatcttcacaatatcttcagaaatttaaatccaaaacataataactctccattctaaaaaagagggagagagagagaaagaaaaaagacccaacagcaaaaagcaaaactttgtggattgggctcaatagtacagtggagttgacagaggataaaatcactgaacttgagggcatatcaatagaccaagcttgtttaacctgtggcctgcaggctgcatgtggcccag

SEQ ID NO: 80403 - DNA, 671 bp, Homo sapiens
gcccattacccagttccaaagtcgattccacattttcaaattatctttatagcagtaccctactctgccagtaccaattttctgtattagtcttttctcacactgctataaagaactgactgagactaggtgattaataaagaaaagaggtttaactgactcacagttctgcatggttgggtgacctcaggaaactcactatcatggcagaaggtgaaagggaagcaggcacatcttacatggtggcaagagagagaaagggaaagtgccagacacttaccaaactaccagatctcacgagaaattactcacggtcatgagaacagcaaggggaaaatccatccacatgatccaatcatttcccatcaggtccctctcttaacatatgaggattagawtttgagatgagatttgggtgggggcacagagccaagccatataaatatcttcacaatatcttcagaaatttaaatccaaaacataataactctccattctaaaaaagagggagagagagagaaagaaaaaagacccaacagcaaaaagcaaaactttgtggattgggctcaatagtacagtggagttgacagaggataaaatcactgaacttgagggcatatcaatagaccaagcttgtttaacctgtggcctgcaggctgcatgtggcccag

SEQ ID NO: 80404 - DNA, 605 bp, Homo sapiens
agagagaggaggcagcttcctctcagtcacatgacctgggcatgtctgagccaggactagggcaggcttcctaatgccctggatgtttctccaccacctccaatgagttttattgaagtcactaggaggaagtaggagcagcagctgcttccttcagctacagatcctgaagtctagaagtattcagatgcctcagagcctcagagggtgccttgcatttaataaatgctcaaaaactgcctgcaggttgactgagtcactaaaccactgaattaaatactcttaagtgattaggtaacatcattaattgtgttggtattattgaaattctgttccccaccacctagaacttttatatcccctaataataggaaggatgytggcctctgtactctggaaggcaaaaacaaatatagctcctgtaagaggcaggtacatcaaaggcaaagtagcaaacaaaagctaaagattgttaatgctgacccagcctcgtcctgaccaggtgggtgccaatcacccacagtcactagagtggcaggatttgcctgcatgcagtacacaggcattgcttacgtaacacactgggatgctgctattttgccttt

SEQ ID NO: 80405 - DNA, 1161 bp, Homo sapiens
  misc_feature (1)...(1161): n = A,T,C or G
aggagctacaacactgtaattatgatggaatcttgacccacccccatccttaagaaatgatacatcaatttctcccttctttgaggaaaaagcttgacatcttcaggaaacaaaaattttctgcttctctatattgtaaaatgtacagggtcaagttctatggagaatgcctgtgctagtcccatcggcccatttcctggttcatagatgacaccttcttgctatgccctcacatggtagaagggcgaaagagcacccttggcctactttataagaacactaatcctactcatgaagacttccctcatgacctaatgccctccctagaagtcccacctcctaataccatggccttggggattaggatgtcagcatatgaattttgggagtgatacaaaaattcaggccatagcacaattcattaattaatttaggacttaagaaattaagagaaattagaaacaaaataatacaaaattatcagaaagaatctatggaggttgaaaaatgtaactaatagtgtctcattctctattagtaatgtgttattctcatttatactgttgaaaaccgtttacagaaatatttaatatgattctctgcctagagaatgagaagcttgcatctttagatcaaagatgaagcaaacaagagtttcctattgtgtgcagttttagaatttcttgcctcatggcttcatggcaggttgcagtttttcaatccttgtttgcaaaatcttgaacccatcatagtgtacttggaaataatatgcatacatcgtaattttcctgtatataattagaatttttactgggktagaacttttcaagtacctcctttgagaatttccaggaatgattattaaccttttcttcctacaaagataacttaaaattgagtttttgaaattctgaatcaggaaataataacaattatgatgtaaaatattctttccatttctgcttttttatgtaccatattaattaatcatttttacatntgtatttttccagatatttcagtcagcctgttactggncgttgtcagcttttgtggactggcctggtgggttgnctcactttttggctctggaaacttggggtgccatgctggaaagcaaacctgtgacttccaacatactacgctccacagagcatttca

SEQ ID NO: 80406 - DNA, 717 bp, Homo sapiens
caggggccccccccgcccggtgtgggaagaagccaggcctgacaggttttcctgaacagggccctgccaggaccccttgggggatccatctgcaaggagctgggcaaagttatggagttcagaaacactccttgaagcacagcagggcccttgggggccagaaagcaaggggatcactcaaggacccactcagtaaatctgactaagctcggggagggaaggatcctctgacttcaagagtgagcgctgggatcctcacacgagggcagcctgggaagtgggaagctgtggccagtatgggggtgggaaggaggagccaagccaaggagcagagaaggcagcgctgcagggcggggaagtgggaggggccccccgggcaagccagcggctkcggaagagatgtggaggaggctcacactctctgggcacttcttcagaatggttcagtgttttcttcccatccctgcgtgaaatctcttgaggttggctgggaggtggtgagctgccttttactgggggtatgcaagcagaggctgagagaacaagtatcagggaggctgctgagggggcctttgccctggtcaggcaggtggatctggtgactctggaggcacttccaactctacagtcctcccaacccctgcagctggtaaaggccaaccaggcaggtgtggagacaggcactctgagatgctgctggggtgggggctgaacagg

SEQ ID NO: 80407 - DNA, 1404 bp, Homo sapiens
ctttctcttttctttcgtaacagattacataacttgcccctggtcccacagctggttaggatcaggccaagtcagtctgaccttaggccgtgcctttcccactgctccctctgcccacaacaacggatgggggtccatcctctaggacatgctgtagacctgctgatctccagccctggcagaaatcaggctgcaggaggcactgtgatcccaggccttcctccctgcctggcttcctccaagttccctggctgtgtgggagccacaggtctctccctgacaggttggggtgatggtgaggtggaggggtgcccccaaagcagtaggcatgatgacaaggggtaaaacccaacaggggcccatgctcctctgctccttcctggggactgtgaagctcaaacagagccttgtgcccctccctcccgcaggccctctgagccctccccatgcatcagtcctccctctgtgttcccaaaacaccctgcacaaacggcttagtattttgtattctcttttgattgtgatcccggggagggggaaggctggcagaaaatcacttagcgcagcacctggcacatagtgagtgctcagcaagtgtgagccattgcgttgctgtggcttcagtgcgccatccacagtgtctgccgtggtgcccactctgagcagggccccgtcataagggaaacatattaacagcacagcagctacacgcacagggagcgctcactgtgttccgggcactgctctgagcacttttcacccattgactcctctaatcttctcatggcccttgtgctggacactcttcttatccccattgcacagaggaggaaactgaggcacagagaggctaagtgacttgccgagggtcacacagcttggacatgttccccagcagtcttgcttcagaggctgtgctgtcataaatatgtgcaaaaaaaggaagaaatgaacaagactcaggatgtggaggaggaaagaaaggcagggagctaatgttgactgagcatcctccatgtaccagcacatcactgatgtcttcagagacgtcaagggattcgcccagagtcacacaggagccaagggcatggctgggatttgagcctggggtgatttctaaatmccctcctccccaccttaatcccaccagctcaggcctcagagagccagcacagttcatcaagggccccctggacacccccagcagccttggaccacatagctgagtgggaggcaagacaaggaattactcagtgaggccactcattaccaacgcgtttggttctaaccagccataggtgaggagtttagaggaaggagcagagccaagtgggcgaccttgaataagcccattgcccttgccacacctcaatttccccttctgtgcagtggacccagcaatat

SEQ ID NO: 80408 - DNA, 638 bp, Homo sapiens
tagagtaactaatttaaaactcccttgcagaaaatggaggaaagcaaaactcatctcagtacttatccaggtggacatgatacagtgagaccttcctgctatcaacttggttttagtttgttggttggtccctggttctatcctgtgtggttgtcttccttattccttgcattcccctttctggaagctgcactatatttcatttcactttcttygagaagtcagaggcctaagacactcacaggctgtcatcggccagatttggatttttcaggggcaggacagttctcttttgctgggttgtgttgtgttgtatcatcctgatcaagcatggtgacaaaagatgcggaggtgcatctctccttctttctgcatccagttcatcttcctgtgatccagggcatgttcatatccttccatgactatggacacatttatctgacttctttaatcaagaaagaggctcaatgtctagagtgaggaggaccctcttgatttgggagtcaacatttatttccattgggcatgctcatttcttaagtcactgggaaaactgccaattttggatgaggcttggagtggaaactggctctgcaatcattccaggccactgtgaaaggtgctctctgcttggaaaa

SEQ ID NO: 80409 - DNA, 688 bp, Homo sapiens
ggatggccaatgtctaccagtctttaatacaaaggttaaattttggaaagctgattacacctgagaacaattagctaataattcccctgagtattttcatgaaatctatgtactggtagttcctttggctcaaggtgttctttatgaacaagacaaaaattaaatgactatatgtagtgttttgatgactcagtcagtggcatctttatacttactaaggttcacaatagtttaatttttcaattatgatagatgtatccatttttcttgaatgttattcagtctttaatgattgaattattttttatataatgattttttcatgttctccatcttctcattaggaaggctttctaatctccatttgctggtctctagtttggctcctaatacaatacattatgatttcatatacttcttatgccagagaccgaaagtccaagaaggcaagaaatcaagccttattcccttgttgtcaatgctttgtacttaataggttcttaatgcaaaatttcagaataaacaaaaatatgaaaaatacctttagaggcttcaaataatgrttatatatattttaatcctttaaagacattaatagtgattatagttttgctttttttatcctacacctattaagactccaattacctctttcatcaacacaccgcatgctgatatgattgataaa

SEQ ID NO: 80410 - DNA, 599 bp, Homo sapiens
ggatcctggggcttcaaaaggatctgcagaccacacttagacaagcgccgttcagaatcactttggggactcagagaacctaaatgactctcccggtgcaggagaacatgcrcacttcattccagaggattctgacgcttaccctgcttggtgcagaacttagcgagtgccccctgtttaagagaacagtacactaaaatctctaacaaaagtaaaaaagtagtttccctaagtacttagccagatacataaaagtatttttcaaattcctatctttgaatactgaactttcttaaagtgacactcaaaggcatgtgatgcatacctcaagcatgtgaactgggggttatgagtttgagcataaatatgagcctccaagttggcttctaaaatggatctacatatgttgggctgccaactccttgtaagggttctgtggctactgattccatatcttaatggctctatcggcattgtaaaaatactgaatcttatttactatcaattcgaagtaatattttaattatttaatagtttaatttgctagcacaaattataacctacttgagcataaagaacgttttagaaatattcttagt

SEQ ID NO: 80411 - DNA, 541 bp, Homo sapiens
aaaaaaaaaaaaaaagtttccatatgcataataatttgtctcctctattgctttacctaatttattccaagtgcccctttcataaatttgatgaaaagttgcttactctatttttatgtagggaagttcttcattttcccagtgtaccagtgcgatttcatagggctgaatttcatgtttttctaraactttcatcacatgcttcatctagaagaaaaggaagattaatctgaaatcataactgactccctcagttcaagtatgttatgattttaatgcttataacagtcttcattacacttacaggcattatttctgttgcatgtttttaaggaaaaggcaaatcaaatccattgtgatattaaagtaatcaggatgacatgttcatttgtttttacatttggaaaacacagatgagaatggagaagaaaatcaaggttatcattatcccacaacccaagggaaaatcactagtaatattataatttgtattctttaaatctctttaataatcccagcattttgggaggcagaggcgggt

SEQ ID NO: 80412 - DNA, 767 bp, Homo sapiens
tgcatttcagctttctccaaaatgcaaaacaggtcccacttatccaactgctttattttgtcccaaacccactgacatctctaattcatagtctccctcagctctctttctctttggagagagagcgggagagagagcgagagagccagcgagagccagcgagagccagcgagagcgagagccagcgagagcgaacgagcgagagcgagcgcgctgtatagatacatggatatataatgatgtttttaaagtaggtttttattagggaagggagatgtttctttagtttytttcttgctctcttcttgtcttcttttgtagtaatagtagttttattttctcttttccagtttatatagttttttttttttctctgaaggtcagacagggctgagaataaactaagaaagagagacacctggggtgtaacatgtaaggaggcacatgctgtcaagtcctgaccctgctcttcatgaccctgagaaagaatgcctcctcataccttacaacctagctatctcctgcctttcttaccctcctcctgactctgctgagggcatttccttgtctacagtgcagttaaagtagagaaccaaacagaaaatcatagatagcattactggtctcagaagtcagatgatggaattggagcctgccagcgtagctaagtgaatggagtttaagaaagtttaagaaagaaaggagtcacagaggaggacctacaaaatctgcatgcaaacttcccacaaattctttgtggaccctga

SEQ ID NO: 80413 - DNA, 736 bp, Homo sapiens
ggctgtggtttatgttttttctccagctcttcatcttcgtgtgggcatagaggtccactataaaaatgtgtggcccttcattatctaggacagtgtgggttttctgaagagttctaaactagagctaagttatggaaaatgtttcatatcaaaatggatgaaatatacaagccaaagttatggcatctactttcccattccatgcatactttcatagttttcattttggaagattttgaatatgttataagaaaatccttgggaatttaaactgagtagactactaytatagtgtacagtcactcagattactatgttttgttgcgtatgaatgttagggcacaaatggaaaaattcacctgttgctaaaagtggcacattttcagagacctctattgtggtaggctgttctttaataatgaccacagcaattgctcttatcccacatgtccttttgtaatgtggctgtgccattcctcccaccttgggtctatttcccctcattctgagctggtcctgtggtttgctttgaccagcagaatgtggtgacagtgatgctgtgtgttggctgggcccagagcttcagagatcacatggcttctgtttttgccttgagcctccatgtttttgccttgagccccgggtattctgttggagagaggccaatggaggagcactgaggcatacctgccaacagataggaccagggccccaaacatgtaggtgaggccctttt

SEQ ID NO: 80414 - DNA, 1160 bp, Homo sapiens
cttcagatacatgtattaaatatgtgatattatattcccctattctacagatgaagaaactgaggcagtgaagttaagagacttcttgaaggttacacagctagtaaatagtacagctgggattctaacccaggtattatgattctaaagcctgtactattaagcactatgccatactacccctgcagacaaggagaattaccaggtctaatataacaaatgactgatagctaccatttgagttattactatgtgccagacattgagttaagggctttctgcttatttcattgaatccttataaaaacaaaaatcgttgaggtagttccaactacacctattttatacatcagataactgactcagaatgttgaaataatctgtctattgttacgggtagtggcaggctgagattctaaccctggttgttctgtttcaatgtctctattcttgatcaccgcataatattacaatgttctggaatactacttttagagttggaactcatcctacatattttgtacctcaaaagactcttgataggtttcaggagaaaaagatggagctggaaaaggttataacatgccgaaggagttaccaatatggagttctcctatcaaattcatgtgtaatgttaattagatgatttagctattccacaacgtatacatatttcaaaacaacatgttgtccatgataactatatgcaatatttgtcagttaaaaataaatatgtcaaaatacaaaaaaatgccaacacgggaaataatgatcagatgccatattttaaaaattatataaaaatttgaattttccaaagaaaaataattcaacaatatgtgaggattactaagcagataattcataacaataacagtagtaataattattgaatttaaggtgtcactcaggaatttgagagaattaacattctctccttatacacaggcatctcctaaactgaytgaagttagttattccataaacacaagtttagcaatgtttttatacagggtttgaagaacaactagtttactaaataaaaatctaaaatattttcctctgcttaattccaaatggtggtcccatcagatccaatttaaaatacactggcagagatcagcatgtaagctggcactaggccggctcaggagtcaagg

SEQ ID NO: 80415 - DNA, 727 bp, Homo sapiens
aaaatccacctcaatttcatggcctaagtagacagtaacaagaagaaagaatatagaaaataggcaacagaaaagagaaaacaaaagaaccaatgaaacacaaaagccaaatgaaaaaagatcaatactatactagtgtagtataactaataaattgaaagttatcttggaaatcttttagccccactctgttgacaataagacacaaaagagcactgtaggagattggagggctggggtgcagtggataagaactgattaaacctttcaaacctaatctgagcaggagtttaggactgcctgcccaagagatgtaccctgagaaatggcaggcctatagtttcctatatttgaaattcaaagaagcgacattgggccctgggtttgctgagagtgtaaatttatcaaatattattcaatttatttttctaaattcctcagttgtctcaatgagtgtttccaattgcaargcatctcagagatgttttcttgcctcagaattttctttattgactctcaatttgagaaatgcaaatatattttaaataaaatttaagtactgttttgttatagtgcttttttatataggcctttttgtatcgaaaataaatttctatgggaagcagataaattccaaagtcatataccagttcggttttgggtaatccatcagaaacagtgcaatgagataaaagagatgatcctacttacatgttctccttaatgg

SEQ ID NO: 80416 - DNA, 689 bp, Homo sapiens
agacacacgtatatgcaaacgctatgtacgacaatttctcttcatatgtttttctgggagccaagcaaatttttctttccttttttctttttcagttatttattttatattatgttattctattttktttaatttttaagttcaagggtacatgtgtaggtttgttacataggtgaacttgtgtcatggaagtttgttgtgcaaattattttatcgcccaggtattaaacctagtatccattagttatttttttaatcctctccctcctcccaccctccaccctctagcaggcccccaagtgtgttgttcccctctatttgtccatgtgttcaagcaaacttttcaccctgaggtttgaaagatgcctgacctttcaagtgctattcttattgttgcttagagagggcgatgtgatgcaacatcaatcccacttttgctgccagttaatctggcattcttcaatttcccaacatgtccccatgagatatggagaatttagaatctgctgtctattcaggagacccattacagcagaaccagaaatgaattcatggatcatttattcctagttacctgtaaatgtccacataacaatgtgatgaaaagcaccatatttggacccaagtaaaggttacctatgtaagtaattacttcctacttcaaagctagcataatgacaatcaatatg

SEQ ID NO: 80417 - DNA, 689 bp, Homo sapiens
agacacacgtatatgcaaacgctatgtacgacaatttctcttcatatgtttttctgggagccaagcaaatttttctttccttttttctttttcagttatttattttatattatgttattctattttgtttaatttttaagttcaagggtacatgtgtaggtttgttacataggtgaacttgtgtcatggaagtttgttgkgcaaattattttatcgcccaggtattaaacctagtatccattagttatttttttaatcctctccctcctcccaccctccaccctctagcaggcccccaagtgtgttgttcccctctatttgtccatgtgttcaagcaaacttttcaccctgaggtttgaaagatgcctgacctttcaagtgctattcttattgttgcttagagagggcgatgtgatgcaacatcaatcccacttttgctgccagttaatctggcattcttcaatttcccaacatgtccccatgagatatggagaatttagaatctgctgtctattcaggagacccattacagcagaaccagaaatgaattcatggatcatttattcctagttacctgtaaatgtccacataacaatgtgatgaaaagcaccatatttggacccaagtaaaggttacctatgtaagtaattacttcctacttcaaagctagcataatgacaatcaatatg

SEQ ID NO: 80418 - DNA, 689 bp, Homo sapiens
agacacacgtatatgcaaacgctatgtacgacaatttctcttcatatgtttttctgggagccaagcaaatttttctttccttttttctttttcagttatttattttatattatgttattctattttgtttaatttttaagttcaagggtacatgtgtaggtttgttacataggtgaacttgtgtcatggaagtttgttgtgcaaattattttatcgcccaggtattaaacctagtatccattagttatttttttaatcctctccctcctcccaccctccaccctctagcaggcccccaagtgtgttgttcccctctatttgtccatgtgttcaagcaaacttttcaccctgaggtttgaaagatgcctgacctttcaagtgctaytcttattgttgcttagagagggcgatgtgatgcaacatcaatcccacttttgctgccagttaatctggcattcttcaatttcccaacatgtccccatgagatatggagaatttagaatctgctgtctattcaggagacccattacagcagaaccagaaatgaattcatggatcatttattcctagttacctgtaaatgtccacataacaatgtgatgaaaagcaccatatttggacccaagtaaaggttacctatgtaagtaattacttcctacttcaaagctagcataatgacaatcaatatg

SEQ ID NO: 80419 - DNA, 689 bp, Homo sapiens
agacacacgtatatgcaaacgctatgtacgacaatttctcttcatatgtttttctgggagccaagcaaatttttctttccttttttctttttcagttatttattttatattatgttattctattttgtttaatttttaagttcaagggtacatgtgtaggtttgttacataggtgaacttgtgtcatggaagtttgttgtgcaaattattttatcgcccaggtattaaacctagtatccattagttatttttttaatcctctccctcctcccaccctccaccctctagcaggcccccaagtgtgttgttcccctctatttgtccatgtgttcaagcaaacttttcaccctgaggtttgaaagatgcctgacctttcaagtgctattcttattgttgcttagagagggcgatgtgatgcaacatcaatcccacttttgctgccagttaatctggcattcttcaatttcccaacatgtccccatgagatatggagaatttagaatctgctgtctattcaggagacccattacagcagaaccagaaatgaattcatggatcatttattcctagttacctgtaaatgtccacataacaatgtgatgaaaagcaccatatttggacccaagtaaaggttacctaygtaagtaattacttcctacttcaaagctagcataatgacaatcaatatg

SEQ ID NO: 80420 - DNA, 689 bp, Homo sapiens
agacacacgtatatgcaaacgctatgtacgacaatttctcttcatatgtttttctgggagccaagcaaatttttctttccttttttctttttcagttatttattttatattatgttattctattttgtttaatttttaagttcaagggtacatgtgtaggtttgttacataggtgaacttgtgtcatggaagtttgttgtgcaaattattttatcgcccaggtattaaacctagtatccattagttatttttttaatcctctccctcctcccaccctccaccctctagcaggcccccaagtgtgttgttcccctctatttgtccatgtgttcaagcaaacttttcaccctgaggtttgaaagatgcctgacctttcaagtgctattcttattgttgcttagagagggcgatgtgatgcaacatcaatcccacttttgctgccagttaatctggcattcttcaatttcccaacatgtccccatgagatatggagaatttagaatctgctgtctattcaggagacccattacagcagaaccagaaatgaattcatggatcatttattcctagttacctgtaaatgtccacataacaatgtgatgaaaagcaccatatttggacccaagtaaaggttacctatgtaagtaattacttcctrcttcaaagctagcataatgacaatcaatatg

SEQ ID NO: 80421 - DNA, 1140 bp, Homo sapiens
gatgcacatagtcagtgctcaatcatcttggtggtggtggtggtgggtcgtcaaagttaccatcccactgcctcccacagagctggagccaatcaacgtctatttacttccttcttactttttctctttggttcatagtcaaagattataccatatacctggcaagccattacaggaatagaggacccaccagaaaacctaaatgacatggtgagaattaatcagctagaaaagtttctaaccaaaacaaaaaaataaaaatatgtatttttctaagaaccacccattatttattaacatacatgatgaacatataggaaaataataaaatataaatagactatgagagaatgtgccatgattaccagaaaaccccaaataaaaatttcattgaaaataataattattttwaaaatagttactcctctcaccaccacaaaagaaaaaaaaataaacctacactttcagtatagtactttgctctttaaggaaaatataagagtcataattaagtaatcataatttttgaaaggcataatctattctaagttcaaatccattaatttcaaaataacaattcttatagttttatgtatcttattcataatgacaacatatttgacaaccattattttatactctaaaaccacagtcattgatatttaatctaaatcattatagcaaaagaacagtaaagtgattctagaattcaaatgtctttaaagtttggattagctgtcttcaagggagaaaacaaagccccaatttatttatggaaatattgcctttgtaaaggtcaagggtgaatccccacagaatcagttgttcagctagccccagaaattgtttttacccttttaactttctcattctgagccacaatgggactgggtcataggacaaaaaggcactaacgaggactgtctctatagtttcatagaagaagagagatggatgacttggcagggcagctgtgacattatgagcattagccaaacaactttgtggactgttttcaggagaggaagaggtacagttctctggaaataaaaacctcagatttgcctgagtatacgtggtctcacctgctttctcctgacattctagcatttgaatttgttcatgcagcagtaatatgat

SEQ ID NO: 80422 - DNA, 1140 bp, Homo sapiens
gatgcacatagtcagtgctcaatcatcttggtggtggtggtggtgggtcgtcaaagttaccatcccactgcctcccacagagctggagccaatcaacgtctatttacttccttcttactttttctctttggttcatagtcaaagattataccatatacctggcaagccattacaggaatagaggacccaccagaaaacctaaatgacatggtgagaattaatcagctagaaaagtttctaaccaaaacaaaaaaataaaaatatgtatttttctaagaaccacccattatttattaacatacatgatgaacatataggaaaataataaaatataaatagactatgagagaatgtgccatgattaccagaaaaccccaaataaaaatttcattgaaaataataattatttttaaaatagttactcctctcaccaccacaaaagaaaaaaaaataaacctacactttcagtatagtactttgctctttaaggaaaatataagagtcataattaagtaatcataatttttgaaaggcataatctattctaagttcaaatccattaatttcaaaataacaattcttwtagttttatgtatcttattcataatgacaacatatttgacaaccattattttatactctaaaaccacagtcattgatatttaatctaaatcattatagcaaaagaacagtaaagtgattctagaattcaaatgtctttaaagtttggattagctgtcttcaagggagaaaacaaagccccaatttatttatggaaatattgcctttgtaaaggtcaagggtgaatccccacagaatcagttgttcagctagccccagaaattgtttttacccttttaactttctcattctgagccacaatgggactgggtcataggacaaaaaggcactaacgaggactgtctctatagtttcatagaagaagagagatggatgacttggcagggcagctgtgacattatgagcattagccaaacaactttgtggactgttttcaggagaggaagaggtacagttctctggaaataaaaacctcagatttgcctgagtatacgtggtctcacctgctttctcctgacattctagcatttgaatttgttcatgcagcagtaatatgat

SEQ ID NO: 80423 - DNA, 667 bp, Homo sapiens
atctctctttcacccatttggaatgttgcttttcaggttccaggggaaaactcaatctcaaaagccgtaacccatcctgacctttgtgtcctggcacaacatcctagggtacctgtgtgaagatggatattggtcatgacatctgtcaagaaaaataataaaataatccaaatatcgagacctcaaaatagaaaattaatgaatttcagatacgtgaagttcttatttaaatcagatcagttttctttcccttcctttaaggaaagccaagttatatgaagcatatgatattaaggcttttaagttgaaaaatagtatatatttgcatagtactttataacatggttgtaaaatatgctacttgatttaaacattaaaaataactttgagataataaggacaaattttttaaagttattttcattttacasatctggaaaccaaggctcatacacttactttttttccaagatcacgtacattttgaagtgtaatattgtaactcaaggtcaagtattctgtctttaaattctatgctctgtccatcatttaacattgactcaaattcatcagtcagaaaataaactcatccttttagttctctgccagttttggtgaccttcccatgaccctgctggcaatgaattaggctatagaaagtaccaca

SEQ ID NO: 80424 - DNA, 1090 bp, Homo sapiens
atcctgaaaatatttctcaggagaccactttgtatacatttattagaaatggatattctagtagatctgtcagctcatctcatgtattcccttgaarcatcctcttaactggaattttggaagtttttgcatgaagacagatagagatagtgggggggagagagagagagagagagaatgcattcgtatttatctttgtgtatgttgaactaagcagggcacaaggcagaaatctttaacattttatttttcttcttaaaatttatatttttcaaactttcacttctgtttcctgtacaaagtatgaaaaatttcaaaatacaaaaatctgaagattggcagtattaaaatagaaccatttaaaataaaaaaagaagtcttcaaaatatggaagcatcacatttgaaatatggattgttttttcatgatttagaaacttggtatttttagctgggcatagtggcacatgcctgtagtcccaactacttctgaggctgatacaggaggatcacttgggcccaggagtacaaagctacagtaagccatgattgtgccactgcattccagcctgggcaacaaagcaaaaccccaaacccggactctgaaacaaaacataacaaaacaaaaacaacaaaaacaaaagcccttgatattttaaaaaattatattttaattcttttatgtttccaaaacagtaaatagaaaagaagcagtagctgctttgaatccaaatacatgaattttaaaggattgtcataaaattatctgacccaaagttatagaaacagttatgcaaagtttctatatgtgaacattaaacagtagtttgacttaatggaaacttttaatatcgacttttgtgacaaaatacagtttattatgtggagccaaagatagctcatctacctgattatcctgtttcatggggattccttcaaataacttaagtccactacgtccttaaattttcactgatactagcctactataagtcattactgcctcaaagaaccaatttttcatactttattatttcattattttttatttttgatacatagtatttgtagatgttaatggggtacatgtg

SEQ ID NO: 80425 - DNA, 445 bp, Homo sapiens
tctgtctttactaatgttttcagaaggggaagttattctcaggttttttattacctcttggaaaaktaaattcttacatctctgttatcaaaccaatgctaaaaggccaagcctattactttggaaacaaagtttcttcttcttgacatttgccatcattctgataatttctaataatgaatcctaatttatttatttatcctgatccttcttcttattttcaggaaataaaaagttcaaagatagtcaggactttatcattttagttgcgttaattcttcacatctaatcagaaactgctcaactacaaattattgatttcagcttttccagtctctatcttcaatattctatcatattccatcattctaattccatcatagtccaatattccattatgctattacttcaagtgaatcaattttttatcttcattgagattccc

SEQ ID NO: 80426 - DNA, 445 bp, Homo sapiens
tctgtctttactaatgttttcagaaggggaagttattctcaggttttttattacctcttggaaaattaaattcttacatctctgttatcaaaccaatgctaaaaggccaagcctattactttggaaacaaagtttcttcttcttgacatttgccatcattctgataatttctaataatgaatcctaatttatttatttatcctgatccttcttcttattttcaggaaataaaaagttcaaagatagtcaggactttatcatyttagttgcgttaattcttcacatctaatcagaaactgctcaactacaaattattgatttcagcttttccagtctctatcttcaatattctatcatattccatcattctaattccatcatagtccaatattccattatgctattacttcaagtgaatcaattttttatcttcattgagattccc

SEQ ID NO: 80427 - DNA, 568 bp, Homo sapiens
aactgatacaccaaccccctcttcaccttctgccatgactttaagctttctgaggccctcatcaaaagcagatgctggtactagaattgttgtacaacctgcagactgcgagcctataaaacctcttttctttaacaattacccagtctctgatatttctttatagcattgcaagaacagactgacacagaaaattgataccaaaacgattataattgtctaggctattamaatcagaagcagaggctggtggttactgtgaatgaattctgcaggttctgcgggttgggaatgtactaaagtgtttagtaaagcattcttaagattgtggatttttctcattatgtgttagaggttttcaaatctgccctgccaccttttttataaacaaagtttcattggaatgcagccatattctttcatggaagtattggctatgactgcatttatgctacaacagagttacatgtttgtgacaaagactgtatcctccataaagcctaagatatttattatctggccctgacagaaacagtcagcaatctcttccatatataatgggaagtta

SEQ ID NO: 80428 - DNA, 568 bp, Homo sapiens
aactgatacaccaaccccctcttcaccttctgccatgactttaagctttctgaggccctcatcaaaagcagatgctggtactagaattgttgtacaacctgcagactgcgagcctataaaacctcttttctttaacaattacccagtctctgatatttctttatagcattgcaagaacagactgacacagaaaattgataccaaaacgattataattgtctaggctattacaatcagaagcagaggctggtggttactgtgaatgaattctgcaggttctgcgggttgggaatgtactaaagtgtttagtaaagcattcttaagattgtggatttttctcattatgtgttagaggttttcaaatctgccctgccaccttttttataaacaaagtttcattggaatgcagccatattctttcatggaagtattggctatgactgcatttatgctacaacagagttacatgtttgtgacaaagactgtatcctccataaagcctaagayatttattatctggccctgacagaaacagtcagcaatctcttccatatataatgggaagtta

SEQ ID NO: 80429 - DNA, 739 bp, Homo sapiens
atgattaaagaatcaacaaataggctgggtgcagtggctcatgcctgtaatccaagaactttggaaggctaaagcaagtggatcacttgaggccaggagtacgagaccagcctggccaacatggtaaaaccccgtctctactaaaaatacaaaaattagccaggcctggtggcatgcacctgtagtcccagctacttgggagattgaggcacgagaattgcttgaactggggaagcagaggttgcagtgagctgagatggtgccactgcactccagcctgggtgacagagtgagactccatctcaaaaaaataaaaataaaaataaaaaaataaagaatcaacaaatagatggcaaaatggaaacattttagaatgtgaaatcaacaagacttagccatctcccctgcttaacatcttagccagccccctgccagctacggaggaggtgcataatggggtggtggggagtctggccttagctctatactgggcatcgtacttacatttttaagcctttgtttcatcaactttaaagtggaaataagaagtttctacctcaatggatgagttaatatatatgcaaactatataaaagagtgtctgacagactccattttgctatttatatttttgctattgttaccactgctattgtatagyaagccccttgacaggacatgcaagccctggcttatcactctaggctctttgcacactcaccctgcggtcatactgaaa

SEQ ID NO: 80430 - DNA, 739 bp, Homo sapiens
atgattaaagaatcaacaaataggctgggtgcagtggctcatgcctgtaatccaagaactttggaaggctaaagcaagtggatcacttgaggccaggagtacgagaccagcctggccaacatggtaaaaccccgtctctactaaaaatacaaaaattagccaggcctggtggcatgcacctgtagtcccagctacttgggagattgaggcacgagaattgcttgaactggggaagcagaggttgcagtgagctgagatggtgccactgcactccagcctgggtgacagagtgagactccatctcaaaaaaataaaaataaaaataaaaaaataaagaatcaacaaatagatggcaaaatggaaacattttagaatgtgaaatcaacaagacttagccatctcccctgcttaacatcttagccagccccctgccagctacggaggaggtgcataatggggtggtggggagtctggccttagctctatactgggcatcgtacttacatttttaagcctttgtttcatcaactttaaagtggaaataagaagtttctacctcaatggatgagttaatatatatgcaaactatataaaagagtgtctgacagactccattttgctatttatatttttgctattgttaccactgctattgtatagtaagccccttgacaggacatgcaagccctggcttatcactctaggctctttscacactcaccctgcggtcatactgaaa

SEQ ID NO: 80431 - DNA, 681 bp, Homo sapiens
gaaccatggtaaacagaggaacatttaagtgacaccaagggaatgcaatcagcaaaacttaggtgctaggagaatttacaggataaacagcctagtttcttcaacaaatgaattgcaatgagagagagaggagagaaaaagagagagatggatggaacaggaacctgtaggttaacagagacctaaggaaaatatcaaccagttgcaaaatgtggagcttttttttattttgattcaaacaaacttggggaaaaaagacattaatcagataattggatatttgaagactagagatctgatgatattaaggaattactgttaacttttttaagtatttagggttatgtttaaaaaagagtccttatcttttatattgaattatttacagatgaaattacttaagtcttggttttgcttcaaaataatacatataggaggacagaaagtaggcaagaatataaatgaaacaatattagccaggtgttgataacttgaaactaggtggaaaaatgggaggtggttatgacactggtctttgactttttgtgtgtacttgaaattttccactacaaaaacttttttgttttggttttaaaggaatacaaarggagagagaaaggggaaaacaaaactccaggttctgcagaaagacaggaaggaaatctaacagaatgcctgagt

SEQ ID NO: 80432 - DNA, 681 bp, Homo sapiens
gaaccatggtaaacagaggaacatttaagtgacaccaagggaatgcaatcagcaaaacttaggtgctaggagaatttacaggataaacagcctagtttcttcaacaaatgaattgcaatgagagagagaggagagaaaaagagagagatggatggaacaggaacctgtaggttaacagagacctaaggaaaatatcaaccagttgcaaaatgtggagcttttttttattttgattcaaacaaacttggggaaaaaagacattaatcagataattggatatttgaagactagagatctgatgatattaaggaattactgttaacttttttaagtatttagggttatgtttaaaaaagagtccttatcttttatattgaattatttacagatgaaattacttaagtcttggttttgcttcaaaataatacatataggaggacagaaagtaggcaagaatataaatgaaacaatattagccaggtgttgataacttgaaactaggtggaaaaatgggaggtggttatgacactggtctttgactttttgtgtgtacttgaaattttccactacaaaaacttttttgttttggttttaaaggaatacaaagggagagagaaaggggaaaacaaaackccaggttctgcagaaagacaggaaggaaatctaacagaatgcctgagt

SEQ ID NO: 80433 - DNA, 1388 bp, Homo sapiens
agttcctttaaatgagccgaggtcatggtggttcggaggtaagaatgatttttttttatgatcttccagttgcagactgtgtaacggtgcttcttcagctttgactggcatttcatagcaaaatcttgggcagattttaatattgtactgggggtggactaatctaagaactaatattgcagaacccaacttgcagaaaaggaaattacaagaaatgtttatcttcactcttgtgaaggaattmctttttccaaaacggagttggatgtgctctgtttgataccaagtgaagatggtccttaaagacgcccatcgtctggagggttttcctgtcattgttttaatgctatctttgctcctttaaaggtcgtgaaaggctgatttcttattttgctttagaactttggcaaatatgaagtatgtaattccacttcatcaccctttcccctgctcccaccactctccttttttcttcttctttttttttttaaattttaaatactggagtttctttatggatgtagaaaagacagagagagggcaggaactgtgtcagtaagcaacacagaaatgctttttgatttataattgttcatcgtttcatcagcaagatgtgtttggggccttccctgtttttgtgaacacttggcaacaaaaattccgtggtgtcctagagctcattagcagcccatctgaaaggatcctttgatgtgggtccctgctttgcctccagaaagaagaaggaaaattgaattttgtcctccagtctagtttgtggtgaggattctatgtgatcagaattcagcagttcaagatagaaacctcggaaatgccatttttggggacggcttccaattaattaataaaacttttatgatttgtcagaggaagtcctacatccttattaaagggaaggttttttttctttgctgccttgtaatgtggttatggcaaactcattaagtccaactccatgtggccatttttcttccttgatgggtagatgttgatggtggaggggaggaatatctgggtaaaaaacaaaggaaattatctcatccagtagactgcaaaactcctggggatagaaggaagtctgtagaggaagtgggcaggattgggtagagaagagaaacatcaaagaaattaaatatatcacaataggaactggaatagtacccttttgctataatgtaacaacataatagtgtagccttagaaatgagtccattgtctctaaatcggtcctatctaaaggtatctaatgtccgaaggagtgaaaaggaatataatcttatccaaatgcagtcctgtgacctggattctcagagtgacattatggtgacctaaggcctcattataaatgatcctgttctgaagattcaggc

SEQ ID NO: 80434 - DNA, 1388 bp, Homo sapiens
agttcctttaaatgagccgaggtcatggtggttcggaggtaagaatgatttttttttatgatcttccagttgcagactgtgtaacggtgcttcttcagctttgactggcatttcatagcaaaatcttgggcagattttaatattgtactgggggtggactaatctaagaactaatattgcagaacccaacttgcagaaaaggaaattacaagaaatgtttatcttcactcttgtgaaggaattactttttccaaaacggagttggatgtgctctgtttgataccaagtgaagatggtccttaaagacgcccatcgtctggagggttttcctgtcattgttttaatgctatctttgctcctttaaaggtcgtgaaaggctgatttcttattttgctttagaactttggcaaatatgaagtatgtaattccacttcatcaccctttcccctgctcccaccactctccttttttcttcttctttttttttttaaattttaaatactggagtttctttatggatgtagaaaagacagagagagggcaggaactgtgtcagtaagcaacacagaaatgctttttgatttataattgttcatcgtttcatcagcaagatgtgtttggggccttccctgtttttgtgaacacttggcaacaaaaattccgtggtgtcctagagctcattagcagcccatctgaaaggatcctttgatgtgggtccctgctttgcctccagaaagaagaaggaaaattgaattttgtcctccagtctagtttgtggtgaggattctatgtgatcagaattcagcagttcaagatagaaacctcggaaatgccatttttggggacggcttccaattaattaataaaacttttatgatttgtcagaggaagtcctacatccttattaaagggaaggttttttttctttsctgccttgtaatgtggttatggcaaactcattaagtccaactccatgtggccatttttcttccttgatgggtagatgttgatggtggaggggaggaatatctgggtaaaaaacaaaggaaattatctcatccagtagactgcaaaactcctggggatagaaggaagtctgtagaggaagtgggcaggattgggtagagaagagaaacatcaaagaaattaaatatatcacaataggaactggaatagtacccttttgctataatgtaacaacataatagtgtagccttagaaatgagtccattgtctctaaatcggtcctatctaaaggtatctaatgtccgaaggagtgaaaaggaatataatcttatccaaatgcagtcctgtgacctggattctcagagtgacattatggtgacctaaggcctcattataaatgatcctgttctgaagattcaggc

SEQ ID NO: 80435 - DNA, 1388 bp, Homo sapiens
agttcctttaaatgagccgaggtcatggtggttcggaggtaagaatgatttttttttatgatcttccagttgcagactgtgtaacggtgcttcttcagctttgactggcatttcatagcaaaatcttgggcagattttaatattgtactgggggtggactaatctaagaactaatattgcagaacccaacttgcagaaaaggaaattacaagaaatgtttatcttcactcttgtgaaggaattactttttccaaaacggagttggatgtgctctgtttgataccaagtgaagatggtccttaaagacgcccatcgtctggagggttttcctgtcattgttttaatgctatctttgctcctttaaaggtcgtgaaaggctgatttcttattttgctttagaactttggcaaatatgaagtatgtaattccacttcatcaccctttcccctgctcccaccactctccttttttcttcttctttttttttttaaattttaaatactggagtttctttatggatgtagaaaagacagagagagggcaggaactgtgtcagtaagcaacacagaaatgctttttgatttataattgttcatcgtttcatcagcaagatgtgtttggggccttccctgtttttgtgaacacttggcaacaaaaattccgtggtgtcctagagctcattagcagcccatctgaaaggatcctttgatgtgggtccctgctttgcctccagaaagaagaaggaaaattgaattttgtcctccagtctagtttgtggtgaggattctatgtgatcagaattcagcagttcaagatagaaacctcggaaatgccatttttggggacggcttccaattaattaataaaacttttatgatttgtcagaggaagtcctacatccttattaaagggaaggttttttttctttgctgccttgtaatgtggtwatggcaaactcattaagtccaactccatgtggccatttttcttccttgatgggtagatgttgatggtggaggggaggaatatctgggtaaaaaacaaaggaaattatctcatccagtagactgcaaaactcctggggatagaaggaagtctgtagaggaagtgggcaggattgggtagagaagagaaacatcaaagaaattaaatatatcacaataggaactggaatagtacccttttgctataatgtaacaacataatagtgtagccttagaaatgagtccattgtctctaaatcggtcctatctaaaggtatctaatgtccgaaggagtgaaaaggaatataatcttatccaaatgcagtcctgtgacctggattctcagagtgacattatggtgacctaaggcctcattataaatgatcctgttctgaagattcaggc

SEQ ID NO: 80436 - DNA, 711 bp, Homo sapiens
aggcggcaggcatgaggcctttgggcatctccggggtctcccagggggcctgtggccaggacgcgagggcagttgagttggaatgaccgcgtggctcagaggcagtgacgcggccactgggaccctgctggctctaggcattaagtgctccggacggcagagcggcatgcgtcgtgtctttgaaggccggtctcaggaggtgctggcgcaggtggcctttctggcagatgacatggagaccaggagtcaccagggttctagatgcccccagcttctgtgacatcgccctgctacattctgtcccaggagctgccagctgcctgggcctgtggccaatggatcattcctaggtctgtgatttgccggtacccgggcaagctttgagataacttcttgaaggctcagggyatctttggacccaaggaggcccagggatgcttcaaaagggctgccggcccccagcagtgcagattcagccctcactgtgcgaagacgctaccagcatcagcttctggaggttcctagcaacacactgtagaaggttcaatgttacccttgtctgagactccaagagtgacccagacttgttcaagccacgcccccctacaatgagatcagtgcttaaaacccaaattcctgaccccctgtcaccatccctcactctgctccagccacacagatctccttgctgttcctccaacacaccaggca

SEQ ID NO: 80437 - DNA, 442 bp, Homo sapiens
tgttgtgggcagaggagggagggcacctgtctcaggtttaaccacaagtgctctggtggctgtaggggagtctcttgtccctttttgccgtgcgaccttggacaggttcttctctttctctgactccagagcccctctccccacgtgctgacaactygggccccaccaccggagcagcctctgggatctgtgatatcttcagcaccctgcatcgggggtgattatttgtaagctcaaaccgtccccatcccggcagcttttcagacagtaatgaaatcacctaatcttgtgattggaggcttcacgggcacgtcctcaccagcgagtgcctctccccagggaggaaattctcagggctcaggcaacagaaaaattgcttccttgcctttctccttccccctgccaccaggagcttaagcaaaatcgctcactccctggagag

SEQ ID NO: 80438 - DNA, 2115 bp, Homo sapiens
gtcctcagacccgggcaagaagggccgtgatcctccccgtggggcaatgctcctcagaggcaaaggacatgcccactcagaggmcacacaccatgcttggcactggggatcccagaatctcttgcccaaaaggctccaagcccctgctcccctagcgatggggtctgagaggaggctaagggattgtgaacaaagcgggaacatgtggcctcagggggccgcacgcggatccctgaaatcccctgcattacaggtacagcccgggatacaaggagagggaccaggttgggggcagcagggctcctctcccggccccagcacattctcaaacagaactctgaggagtccaagaaatctaaattcaaacttagcattccaagtcatcatgaaggtcagagtggagatttgcttattgaatagttagtttgtacgattactcataaactttcagacatggccctctgtgtgtcccccagtcctgccctgtgaatgttcatgtgtgcctgggcaaggaggcatgtgtgctcctctgagttcaggcagcacctagagaagcgcagccccttccgaacccccacaaatgtcctaagaaaagcacctgtgacattgaggggccaggagagctgtcacgtgagggtcagctgaggggactaaagacattcagccaagaggagagaaggttcaggagtggcactctagttgtattttgttcttggaaagatgatgaaagaaaaaggaggacttactcatttattccaagcgctcagagagtagactaggtccacagtgtgactcagggaggcaggagggctcactgaaaaaatgacccatctaacaaaaggtggggaaggtggggaagtggtagaagaacaaaacagggagtgaagcacggtgggaagtcatgagggctttctgctggaggaagtccaactgtgcgaggtgcatgatctttgaaattttgcaggggtgatttcagccacagatggaggtctggggccagctgatgatcaagctcatcctgccccgagagtctctctgagtctgcctggggaaagcatgttgcaagtccctcacagacaagcctcccctggtccctgacattatgcatctgaaactctttccattttccaggaagggtaaatcaaggcacagggcagggaagtcacatgggtacctggttaccagcttgtcccgctccgtgtcagaggggcctgcagtgtgctcctgctggtcatgctctcctccacttttttgcaggttggcagggtctctggggtgggtgacagttctcacatggatagttctctatgaatgccagaagctagagtccggtgtctggcatttggcagggcctgggaagccaggggagccaaagggaggtcttttttcctgtgggaactcattccagttgccagcagagtgaggagcaaagccatggcacttggctttctggtggttactcctggcaaccttgtcgtggccttggacatggacccggtctgccccagggtttctgtttctccatctgtagaacaagggtgaacttctgccctggctggccatagagccggccggaccaggaagcgtgctgtcctccttgagagggccaagcagtcaccagagtaaagacaagtgagaatcagggcctgccgcctcccaggagaggcccaattagagcagcgagtggttcccaccagaggctctggccggccctcaaagctagccgcgtgggcaggcagcagcaggctgtgtgattaacgatggcagctcgggccgcccactgggcctggcctcaggaacttccaatgagcacacatagtgccaaggggaaagagggccagctccctttcttctgcagcgaagggaggagggagccggccgagggagcacccggcaaccagagggcaaacccaaacaaagggccacgcttttgagggctcctgagacctcggcacaggcctccccgggggcctcagagaggggtggcatcagggatccagagttcagctcactccacaggccccatcaatacatcccaagaaggctcagccctcttccaagcccagggccacgatgcaaacaagaaactgctccatcctcaaggaaacagagtct

SEQ ID NO: 80439 - DNA, 712 bp, Homo sapiens
aggatagctctaagaattaaaggagttaatatatgtaaagcacttcaaacactacctggcatatagtaaacatcacagaaatattgtttttcatttgtttgtttgtttgttttgagacggagtctcgctctgtaacccaggctggagtgcagtggcacgatctcagctcactgcaacctccacctcccaggttcaagtgattctcctgcctcagcctcccgagtagctgggattacaggtgcctaccatcacacccagctaatttttcatattttcagtagagacagggtttcatcatgttggccaggctggtctcgaactcctgacctcaggtgatctgccagccttggcctcccaaagtgctaggattacaggcgtgagccaccacgcctggccaagtgtttgttaaatgaaaaataaagtagtttccagtagaracatatactctgaagaacctgagtgggagggagtgtcgggggaggtgtggggtgaggagagccacatcagggaaggtaaaaattagactgcttttggcttcaagtaataagaaacctggaaactgggcagctccagaactgaccatttcagggactcacggacatctgtgaagaaccaggcactttgctgctctctgttctgttaccttcagccttggcctcaggctggtgcccctcgtagccacaagatggctgccactgtgccaaggattata

SEQ ID NO: 80440 - DNA, 1524 bp, Homo sapiens
agctttacctgctcctctcacaccctctgttccagccaactgcccctttcccaggcttaccaaagaccttaagcaccttcctcatgagaatcagttttccatactctaccatcaagtgtctaagtcactaagcctctgttgactgttgccctgagccaaatgctgtggacacagtaagtaagactcgaaccttccacaatgacctcatcatctaccaaggaagacagacctttctcaacagctatgtcataagggctgtggtggagatgcagggtgagtgctatagaagctgaaagatgtgatttattccaaatttacagagtcgggagggtagccgacttcagggagaatgtgccttttgtccagagccttttgaaggatgagtggggagtgggatttccataattggggggatgagcattccaggaagaggagcagcatgagcaaatcagagagggaagaaagtgcagcatgtcttgggaacacccggctgtctgaggcagatgcagcctgggcagtctggagggattcagggggagggaacactggactgctaagctgaggccacacataggagctgacgcgccatttagagcgcctaaagggcacttgtaaggaaggtatggaagaccttgaatgccagacagggaaatttggacttaagctgtagggagcagtggagagtccttggaggtgcaggaagggaaggagacaaggaacagaaggctttctggtgggcaaagaacttgaccttcgcctccttgataccaacttttggcacctgctctgcctgctctgcatgtcatgttcatttctgtggcaattccggtatctgaccatctggatggtgactaacacccacctattctgaccctatggcaggtgttatgtcccctggtggcctccggcatacaccagccctgcctactgctcagaggccagcaggcatgattttatagttgaattggttgccaacttttaaaaattaggggacatcacttaacctgggttttctggggctgtactttcacatcgcaagaagccgactggcagctgctccctttgggtagaacatgtaacctccagtttccaatgggggcacctctttttaatctctaggactgagaataaacagcaactgcccatttatcatttcaccaggctgcccgaaaggcctctgagtttgcaagccacagccacatttagcttagatgtatgscccccctagattccaggtccctccaggcccaggtgctaacccctttcccagatcccatagcctgcccacaagatccagcaccccacttattcccatatactctcaggcctgccagatggcactgctgaaagaaatgagaaggccccttaggggattaggcagcaagcctagaagaaatttaatatacctttactttcccttctatcacccgagagctctgtaaacgcgactgttcctgattccctactgtgtggcaggccttctaagcacagctcaagaaatgcagctgaatgagacaggatccc

SEQ ID NO: 80441 - DNA, 662 bp, Homo sapiens
atcaatttgtacagttaacacaattatcatagtggccctgaggtgacgtacatcctcagcttacaaagataacaggattaagagattaaagtaagacaggtgtaagaaattatgaaagtattatttgggaacgggtaaatgtccatgaaatcttcacaatttatgttcctctgccgcggctccagctggtccctccattcggggtccctgacttcccacaacagcctggcatgtctttaaatcattcaagtggagatatcaagtagacatctgggtatatgagacaagmgctcagaagagtagtccagggtaaagttacacatttgggagcaggactggttacataatttgtgggacccagtgcaaaatgaagataaatagcctcatgttaaaaaattattaataacttccagacgtcaagaggataacatcaaaccaagcacagagacctacaggtaactgcacaggtcacttgcccatgaagcctatatgcgatatttaatttggaaattgatcagattatttatggagagagagttatcaggagaaggaatggggaccccaaataggaccttgaaacctgtgtatatgctggtagtcacaatgagacaatactgtacgatcccacttatgtgagatacctagaatagtcaaatgcatag

SEQ ID NO: 80442 - DNA, 1447 bp, Homo sapiens
aggctggagtgcagtggtgcgatctcggcttactgcaacctccgcctcccaggttcatgccattctcctgcctcagcctcccgagtagctgggactgcaggtacctgccactgcgcctggctaattttttctacttttagtagacgggatttcactgtgttagctaggatggtctccatctcctgaccttgtgatctgcccacctcggcctcccaaagtgctgggattacaggcgtgagccaccgcgcccagccgaaaaataaactttcacatcatgttacccctggatacatttttgtggccatgcatctgcacgaatattcaatccctgctacaggcaagacactgagtgggacgttgcagggctaccaaggtgaggaggtcccaacccctgtcctcaaggagttgatgtaacacctacccaggattaatttcatttctctcagaggtcattaatccagtgtgatctgtttatggctgaagaggtagtttattattcaggtcttcactccctttcctgaaaaggctgtttattttgtttcatcactgtgcagtggcgaaatccagttccaaccaatacttaagctgggcatacattttacccaggagaaaactgaagggcgtgcaggagttcacagagctgtttgctgacccaagccatgaatctgtggagacctgggtcggtcttcagggttagtagggtctgtagggtctgtgaggatccgaggcagcctgcagacctactatcatcttctttttcttttttataattggcaatcatccttggctacccagtagcatcttttttttttttttttgagatagagtttcactcttgttgcccaggctggagtgccatggcgcgatctctgctcactgcaacctctgcctcctgggttcaaacgattcccctgcctcagcctcccgagtagctgggattacaggcatgcgccactacacccagctcattttgtatttttagtagagacagggtttttccatgttggtcaggtggtcttgaactcccgacctcaggtgatccgcccaccttagcctcccaaagtgctgggattataggcgtgagccactgtgcccagccccctggtagcatcttaaatcaagctttccttccctctgggtatcatggacatgaacaccttttatgtctctgcctcaagaggggaggaggcacagaggaacaaaaatccttgtgaattatgataattacatagtgtttaaatgaagggtggcaaggtgtgtaagtccataggtaaggkttcttttttctttttcttttcttttttttgagatggagtctcactctgtcacccaggctggagtgcagtggtgcaatcttggctcactgcaacctccgtctcccgggttcaagcgattctcctgccctcagcctctggagtagctgagattacaggcacgccatcacgcc

SEQ ID NO: 80443 - DNA, 511 bp, Homo sapiens
atcagtcccacctatctcctccattcgcatgactcagcgtcaccttctcattccatctggcattccctcttctcagaaaacggcccattacacattatccatccatcctagtttttgctttaaaatcctttgtgacatttaaacattcttaggatgaagaaaagctctctaacaatttctagttttaacctctctccagcttcaactcaatatgtggcacaaggccctctggacactgcccttctgtcatttcctcatatgtgtcacacacagttccagaagaagtttttttcatgttataagcattaatacgtgtgcacataaggaaaagccaaagatgaaagcattaagaagagtattaatactagcaattttgtaagggagcccagacttaagaagaactgtctaaaaacatagcagatacttaaaggagaaaacctcacaagtttcgcaaagttaaatttaatctgttcatagtagcaggaaaakcagttttccctcatgattttca

SEQ ID NO: 80444 - DNA, 468 bp, Homo sapiens
atacttcttctagatagggtccagaagaggaaaatatctttcaaacaaagaggaaaaaaatgtgttgtgtatgattttcacccccttgatctcacgtcaagcaaatcaacagwtgaaaggaactgctctaacaactcagactcaactagacaaattcacaaaacctaagtaggccacacctggcatgtgtttacagagaaagctacaggacaggacaggctagcagggcagtatcacgccaggcacacaacaggaggacatgcaatccaggagctattgtctttgcacctctccctactatcatcaccatcaccatatcattattcaggtaggtatgcaaagggcaaagaatccacaaacgatacaaaagttaccctgggttagacacacctgagttccactgagaaaccactatgattgattttttttttttttttttaaagacagagcctttctctgttgcccaga

SEQ ID NO: 80445 - DNA, 709 bp, Homo sapiens
atattggttggatgagtggttcagactgtttatcccaagttagggatagttagtctggttagactcaggatgrtaaggtcatagactcttacagacatgtttttacgttccaccttaagtatcatctctcagagaggcattccctgaatctcgcaaaccaaattaagtccccaattttctttctcatggcacctttaacttttccttccttccttcattgcactctccattatctgtcatccagtaattatctgtttaatgcctgtctccctgcagtctgttgccaccattcactaatatctactgggcagagaagtagttcatacttctccatcactgtgaagctagaaattctcatataattttctctaaggaaggaaaaataaatgtgaaagtgacgcgtggcttacagggagacacaagtagaactaacatgaaagtttcatcttctccaatggaggtgtctggcagcattcccggtggcagagccactcttgactctccctgaagaaggttgtcacccacccttggtgagcaagtacctgaatgggagataaacttttgttgtttgttttataggtggtatttgttaccacagcataagctaccttcacctgcctaatttattcctacctgggtgttaagctctttgagagtatgaaccaggactagtttgtcttcttgtatatctctagcaattaacaagtgc

SEQ ID NO: 80446 - DNA, 784 bp, Homo sapiens
ggcagtttccacaaaggagccgtatttgtgtcaccacaaagtctgacgacataacaaacgacaaatcataccttcactgagatcaggatgctggccagggggtgtattattctcctattggtgatggtaaaaataaaatcgcacgcgtggtgcctcataccaacagcatttacccacgttatagctctgcaggtcagaagttcagatgagtctcagtagattggatcctggtgcagacagacctgggcggcggcgggagacaccaaagaagagccacttcctcacccttcatggcttctgatggctgcccagactccttggctggtggccccatatcactcagacaacttgccttattagtctccatctcttactctgaccctactatttcccttctgtaaaaatgcttgtgatttctgtggatttacataaatcattcagaaaagttccatatatcaagatcattygcttaattccatattcaaagttcctttcactacctaaagcagcacatctacagattctataggttaagccacagtcttctttgaggggctcttttcagccctcacagaggactgagctcgctggctaaccagcatgactcacttgtgctccggaatcactcaacatgtttataatctccagacctgaatcactcgtcaatacatattcacaattgtaaatgttaagtttgtaattactgggaacctactttggtgtaaatataaatgccttaagacaaataaaagaaatgaagaaaatgggcctgaaataggatgca

SEQ ID NO: 80447 - DNA, 627 bp, Homo sapiens
tcaatcaggagtgttaatgaaactcgttaaacaacacttctttgactcacacmgaatttcagtaatcattttcttcttaaatatcatcagaaatagtttaaaaggacatttcattttgcaattgagtgtattatcctaacagaacaggagcattcaggatatgaaaaccagagcttgtctctagaaagtcatccagaatgagtcctattaggttacaataccctaaccacggcccaaagccacgcagcccaggtcagcagtgtgtctaaaccatacacatcaatttctgcttctgtccctaaacctgctcatcctccaagtgatccacgggttgctgtcaccacatcgccagggccatcttcgattctgcacatcctttcaagtccaaaagcaggctgaagctggcaactcaacttggaaggtcaccacagccactgctctgcccaagctctgtctcctggaggctggaattaccgtggcagccacttccctgctcttgggcttttgcttttgcccttgctagtgtattctccacacagaagccaaagacctccttcaaaaatatgtcaggcctgcagaagcagtggctcaggcctgcaatcccagcactttgggatgctgaggtgg

SEQ ID NO: 80448 - DNA, 627 bp, Homo sapiens
tcaatcaggagtgttaatgaaactcgttaaacaacacttctttgactcacaccgaatttcagtaatcattttcttcttaaatatcatcagaaatagtttaaaaggacatttcattttgcaattgagtgtattatcctaacagaacaggagcattcaggatatgaaaaccagagcttgtctctagaaagtcatccagaatgagtcctattaggttacaataccctaaccacggcccaaagccacgcagcccaggtcagcagtgtgtctaaaccatacacatcaatttctgcttctgtccctaaacctgctcatcctccaagtgatccacgggttgctgtcaccacatcgccagggccatcttcgattctgcacatcctttcaagtccaaaagcaggctgaagctggcaactcaacttggaaggtcaccacagccactgctctgcccaagctctgtctcctggaggctggaattaccgtggcagccrcttccctgctcttgggcttttgcttttgcccttgctagtgtattctccacacagaagccaaagacctccttcaaaaatatgtcaggcctgcagaagcagtggctcaggcctgcaatcccagcactttgggatgctgaggtgg

SEQ ID NO: 80449 - DNA, 1328 bp, Homo sapiens
ctcttctctcaggtctggctcctcaggcctctgaaaagcaggagctttcatctcagctctccctggagtggtcccctgtgggcttcctctccagcgccctctgctcattcctcatccccagcccggcccacaaccatcctcacagtagtgagtccacagctggccgatgagcccctgggagagatgtctttgtgtaggcgcagggtctccatggctgcccctggctgtgcagtcacctagcaccacgacacagagctgctttgctctcctgagcccaccagatggatttatttattgtttttatttgtatagcatatgagtaatattccaagtaacatcttttcaatgtgtctatctaacccttcgttacctacattgcatccattcactgaaacaacagttctcaatgaagtatagaagtcgcattctaagaaacatttacaaaattaatttaattttcatcagactgattttagaaagaaattacttgaaagccacgaaattggctttcctcagaatccaaggaaaagaatctaaggagtaattatttccaagcagaggtactggggttagtgcacccccagtttacaaacagaccctctgggccgggcgcgctggctcacacttgtaatcccagcactttgggaagccgaggcgggcagatcatctgaggtcaggagttcaagaccagcctgaccaacatggagaaaccccatctctactagaaatacaaaattagctgggtgtgatgccgcatgcctagtaatcccagctactcaggaggctgaggcacgagaattgcttgaacccaggaggcggaggttgcagtgagccaagattgtgccactgcactccagcctgggcaacaagagtgaaactccgtctcaacaaaaaaagaaagaaagaaagaaagaaagaaacagaccctctgccctgggtgcaggcctgcctgcctcccagatcccatctcccacttcccgycttagaccctgtgtgggacaccgggcaccgtccagggcaggcctccctctgcccgccagctccacacaattcaacaggcggcgtcaaggcagcacgaccttattccagacactgtgcacagcatgaagcttcactcacgtttgttactttgccttctctcaaatctacgtgactctagttcacctaaaatgtgactgtgccctgtgtctgagtcagcgtggattccactgtgcgctgtcgggaaggggcagtgaggcccgttgtcacccacaggcagtgaagtttcctgtagaggggagtctgtcatcctgagttcctgcagggtgagtacctgcggatgaggtcac

SEQ ID NO: 80450 - DNA, 1328 bp, Homo sapiens
ctcttctctcaggtctggctcctcaggcctctgaaaagcaggagctttcatctcagctctccctggagtggtcccctgtgggcttcctctccagcgccctctgctcattcctcatccccagcccggcccacaaccatcctcacagtagtgagtccacagctggccgatgagcccctgggagagatgtctttgtgtaggcgcagggtctccatggctgcccctggctgtgcagtcacctagcaccacgacacagagctgctttgctctcctgagcccaccagatggatttatttattgtttttatttgtatagcatatgagtaatattccaagtaacatcttttcaatgtgtctatctaacccttcgttacctacattgcatccattcactgaaacaacagttctcaatgaagtatagaagtcgcattctaagaaacatttacaaaattaatttaattttcatcagactgattttagaaagaaattacttgaaagccacgaaattggctttcctcagaatccaaggaaaagaatctaaggagtaattatttccaagcagaggtactggggttagtgcacccccagtttacaaacagaccctctgggccgggcgcgctggctcacacttgtaatcccagcactttgggaagccgaggcgggcagatcatctgaggtcaggagttcaagaccagcctgaccaacatggagaaaccccatctctactagaaatacaaaattagctgggtgtgatgccgcatgcctagtaatcccagctactcaggaggctgaggcacgagaattgcttgaacccaggaggcggaggttgcagtgagccaagattgtgccactgcactccagcctgggcaacaagagtgaaactccgtctcaacaaaaaaagaaagaaagaaagaaagaaagaaacagaccctctgccctgggtgcaggcctgcctgcctcccagatcccatctcccacttcccgccttagaccctgtgtgggacaccgggcaccgtccagggcaggcctccctctgcccgccagctccacacaattcaacaggcrgcgtcaaggcagcacgaccttattccagacactgtgcacagcatgaagcttcactcacgtttgttactttgccttctctcaaatctacgtgactctagttcacctaaaatgtgactgtgccctgtgtctgagtcagcgtggattccactgtgcgctgtcgggaaggggcagtgaggcccgttgtcacccacaggcagtgaagtttcctgtagaggggagtctgtcatcctgagttcctgcagggtgagtacctgcggatgaggtcac

SEQ ID NO: 80451 - DNA, 493 bp, Homo sapiens
ccattggttaaaaatacagtttcaggacttcatacttacatttagtataacttgatttatctttgcaattttcacagtcatatatgcattaaaattttagcctctyatatagaatacccatcagcaaaagagggcagaagccaagagatccaggaaataatgtatcccacttagaagagtaatgaggagaagtcccgagatggagctgggttatgttactaccacaccatttgcttacatggaaacagaaggatgaaaagttcccatagggagataatctggggagaaaggctttgatacgtttttgaggcactagaaatacttaaggattttataaagacaaatagttggagaagaatagaaaggcaattaaaaactccatgaaaaacaaaaagctatacaggcagagcaatgttattattatgctctacttagcttgataaatcactcttacagagaaagccttgtttttaatcatacagcaagatccttt

SEQ ID NO: 80452 - DNA, 541 bp, Homo sapiens
cggcgtggctgacatacgggcatcttggtggcagatttgtctagccagggatgtgtgcctgacaacagcatattccagatctccgtaggtagcgttctcaggagtggttaaaagctgggcatccctggaggatggtctgctctgggaactgacttgctccaggatgagctagatgcccggatgccctctcacctttctcagatggccagtgagccaaggttaaatgttaaatgtcaatatgtgcttgggcgtgacctggcccctgtttaatatgggagaacaatgggagtggagggtagaggtttgagatgagaagatagaggttgtgcrttgagaatcattgtatcagcacctcctgagcctacaaaaggatgggattgaaggaaatgagatggcccgagagcagttgtcctcctcgaaggctgccacctgggtgctttcaggcacaagaaagagaaaatcgaagtccagctggagtcagaagggctccacagcagactggcttcgggcgtgtcccaggcagggtccaggtggcatctgc

SEQ ID NO: 80453 - DNA, 542 bp, Homo sapiens
tgaacctcttattcattttaaagataatatgactaaaaactcaaaaatatgattaactaacttacaaatactggaggtatagcaggccttcaaatgaatccttaggtaattcagtcaaataattttcactgagaattctggaaaatgaaaaagttatttctaggttaaaatgcaaactacaactatttgctacacaggactatctcctgcatgtggaggaaagctgggtcatggtcatttcaagatggtgggatctgctctgctttcgttcaaaccttttcttccattttcctttttgtgttcatccctctccaccaccaccaccacacacacacaggcaagcgcacacacacatttgcaggcacacacacacacacaagcacacacacaggcaagcacacacacacaagcacacccacacacaagcacacacacaggcaagcacacacacacacaggcaagcacrcacacacaggcaagcacgcacacacacttgcaagcacacacacacatgcaagcacacacacacaagcacacacaca

SEQ ID NO: 80454 - DNA, 1023 bp, Homo sapiens
aacaaatctttgaagcaaatactgttatgagttcagtttcacagctgagaaaacagaggcacaaagtgttcgatattatgttcagaatttctccaggtagtatggagctgagtctggatttgaacccaggcagcttggagcaacatcctaactacagagcaattctatcattcttatcatctgagccagactgcagataaaaggagttccctgagcatgttttgactgatgcctatggtattagtccattctcatgctgctatgaagaaataactgagactgggtaatttataaagaaargagatttcattgactctcagttctgcatggctggggatgcctcaagaaacttacaatcatggtggaaggcacctcttcaaagggcagcaggaaagagaatgagtgccagcaggggaaatgccagacgcttataaaaccatcagatctcgtgagaactcactcactaccacgagaacagcataggggaaactgccccgtgatccaatcacttcccaccaggtccccccaacagcacatggggattatgggaactacaattcaagatgagatttaggtggggacacagccaaaccatatcagctaaaaatgataagctgccactatgaagaaatatcctcccatccactccaacccccacaacacacaaacacactcatacaagtaatattcatgttcacttcaaggcaagcatcaattttcttttggaaaatttttaaaaatcaaaatcacccaccttaattttcaagggaggaggatgaaaagctagaggcatgagatagatgggcccctggttgtattcagtgaaacacgtgcttctttgaagtgatcactgtacgaggacagtgagttgagccattcaagggtccaacacaagtgactatatgacaagctccttcccttgcaatacagaatgaggttagaactcttctattttccatttctctatatcccagaaacagatgacaagccctgaaccctcttgactcaagtgaaaaagatttg

SEQ ID NO: 80455 - DNA, 1023 bp, Homo sapiens
aacaaatctttgaagcaaatactgttatgagttcagtttcacagctgagaaaacagaggcacaaagtgttcgatattatgttcagaatttctccaggtagtatggagctgagtctggatttgaacccaggcagcttggagcaacatcctaactacagagcaattctatcattcttatcatctgagccagactgcagataaaaggagttccctgagcatgttttgactgatgcctatggtattagtccattctcatgctgctatgaagaaataactgagactgggtaatttataaagaaaggagatttcattgactctcagttctgcatggctggggatgcctcaagaaacttacaatcatggtggaaggcacctcttcaaagggcagcaggaaagagaatgagtgccagcaggggaaatgccagacgcttataaaaccatcagatctcgtgagaactcactcactaccacgagaacagcataggggaaactgccccgtgatccaatcacttcccaccaggtccccccaacagcacatggggattatgggaactacaattcaagatgagatttaggtggggacacagccaaaccatatcagctaaaaatgataagctgccactatgaagaaatatcctcccatccactccaacccccacaacacacaaacacactcatacaagtaatattcatgttcacttcaaggcaagcatcaattttcttttggaaaatttttaaaaatcaaaatcacccaccttaattttcaagggaggaggatgaaragctagaggcatgagatagatgggcccctggttgtattcagtgaaacacgtgcttctttgaagtgatcactgtacgaggacagtgagttgagccattcaagggtccaacacaagtgactatatgacaagctccttcccttgcaatacagaatgaggttagaactcttctattttccatttctctatatcccagaaacagatgacaagccctgaaccctcttgactcaagtgaaaaagatttg

SEQ ID NO: 80456 - DNA, 1023 bp, Homo sapiens
aacaaatctttgaagcaaatactgttatgagttcagtttcacagctgagaaaacagaggcacaaagtgttcgatattatgttcagaatttctccaggtagtatggagctgagtctggatttgaacccaggcagcttggagcaacatcctaactacagagcaattctatcattcttatcatctgagccagactgcagataaaaggagttccctgagcatgttttgactgatgcctatggtattagtccattctcatgctgctatgaagaaataactgagactgggtaatttataaagaaaggagatttcattgactctcagttctgcatggctggggatgcctcaagaaacttacaatcatggtggaaggcacctcttcaaagggcagcaggaaagagaatgagtgccagcaggggaaatgccagacgcttataaaaccatcagatctcgtgagaactcactcactaccacgagaacagcataggggaaactgccccgtgatccaatcacttcccaccaggtccccccaacagcacatggggattatgggaactacaattcaagatgagatttaggtggggacacagccaaaccatatcagctaaaaatgataagctgccactatgaagaaatatcctcccatccactccaacccccacaacacacaaacacactcatacaagtaatattcatgttcacttcaaggcaagcatcaattttcttttggaaaatttttaaaaatcaaaatcacccaccttaattttcaagggaggaggatgaaaagctagaggcatgagatagatgggcccctggttgtattcagtgaaacacgtgcttctttgaagtgatcactgtacgaggacagtgagttgagccattcaagggtccaacacaagtgactatatgacaagctccttcccttgcaatacagaatgaggttagaactcttctrttttccatttctctatatcccagaaacagatgacaagccctgaaccctcttgactcaagtgaaaaagatttg

SEQ ID NO: 80457 - DNA, 1023 bp, Homo sapiens
aacaaatctttgaagcaaatactgttatgagttcagtttcacagctgagaaaacagaggcacaaagtgttcgatattatgttcagaatttctccaggtagtatggagctgagtctggatttgaacccaggcagcttggagcaacatcctaactacagagcaattctatcattcttatcatctgagccagactgcagataaaaggagttccctgagcatgttttgactgatgcctatggtattagtccattctcatgctgctatgaagaaataactgagactgggtaatttataaagaaaggagatttcattgactctcagttctgcatggctggggatgcctcaagaaacttacaatcatggtggaaggcacctcttcaaagggcagcaggaaagagaatgagtgccagcaggggaaatgccagacgcttataaaaccatcagatctcgtgagaactcactcactaccacgagaacagcataggggaaactgccccgtgatccaatcacttcccaccaggtccccccaacagcacatggggattatgggaactacaattcaagatgagatttaggtggggacacagccaaaccatatcagctaaaaatgataagctgccactatgaagaaatatcctcccatccactccaacccccacaacacacaaacacactcatacaagtaatattcatgttcacttcaaggcaagcatcaattttcttttggaaaatttttaaaaatcaaaatcacccaccttaattttcaagggaggaggatgaaaagctagaggcatgagatagatgggcccctggttgtattcagtgaaacacgtgcttctttgaagtgatcactgtacgaggacagtgagttgagccattcaagggtccaacacaagtgactatatgacaagctccttcccttgcaatacagaatgaggttagaactcttctattttccatttctctatatcccagaaacagawgacaagccctgaaccctcttgactcaagtgaaaaagatttg

SEQ ID NO: 80458 - DNA, 856 bp, Homo sapiens
acatggcaacctgcgattgatagatcctattgatgacattctctccaggacatggtattaccagatggctttgaatatgtaagagctcagtgaagcattgctcacaggaaggtgagatctaatggaaaagttattcattttgaagaaacgacaagaggacacactccagccaatacatacatgactgactgggaaaattttggcaaaggactggtggcgagaggtccagtttcatgtatctgattgcctacatgacatcttcctttggatgtctgacaaacgcatcacatacttagggtgttttgatggtgaaaccccatctctactaaaaatacaaaaattagctgggcgtggtggcgtgcacktgtagtcccagctactcgggaggttgaggcaggagaatcgcttgaacctgggaggcggaggttgcagtgagccaagatcgtgccactgcactccagcctggtgtcagagcgagactctgtctcaaaaataaataaatacattaattaattttaaaaaaaagatgaactcctgagagtctcaccaaacctgttcctctggttgtcttccctatctcagttaatgccaatttcatctagttgctaagatgaaaatccttgaagtcaccttgcttcttttttttattattattatccaaattatccgtaagtaaaatcttttggatttactttcaaaatgagtcacgaatccagtcacttctgatgaacttcacaacactgccacactggttcaagctaccatcattccctcctggattatgacagcctcttaactattctccctgattctgtctttgcctcccttcagtgtttttctatgtcttagcaactgc

SEQ ID NO: 80459 - DNA, 856 bp, Homo sapiens
acatggcaacctgcgattgatagatcctattgatgacattctctccaggacatggtattaccagatggctttgaatatgtaagagctcagtgaagcattgctcacaggaaggtgagatctaatggaaaagttattcattttgaagaaacgacaagaggacacactccagccaatacatacatgactgactgggaaaattttggcaaaggactggtggcgagaggtccagtttcatgtatctgattgcctacatgacatcttcctttggatgtctgacaaacgcatcacatacttagggtgttttgatggtgaaaccccatctctactaaaaatacaaaaattagctgggcgtggtggcgtgcactygtagtcccagctactcgggaggttgaggcaggagaatcgcttgaacctgggaggcggaggttgcagtgagccaagatcgtgccactgcactccagcctggtgtcagagcgagactctgtctcaaaaataaataaatacattaattaattttaaaaaaaagatgaactcctgagagtctcaccaaacctgttcctctggttgtcttccctatctcagttaatgccaatttcatctagttgctaagatgaaaatccttgaagtcaccttgcttcttttttttattattattatccaaattatccgtaagtaaaatcttttggatttactttcaaaatgagtcacgaatccagtcacttctgatgaacttcacaacactgccacactggttcaagctaccatcattccctcctggattatgacagcctcttaactattctccctgattctgtctttgcctcccttcagtgtttttctatgtcttagcaactgc

SEQ ID NO: 80460 - DNA, 856 bp, Homo sapiens
acatggcaacctgcgattgatagatcctattgatgacattctctccaggacatggtattaccagatggctttgaatatgtaagagctcagtgaagcattgctcacaggaaggtgagatctaatggaaaagttattcattttgaagaaacgacaagaggacacactccagccaatacatacatgactgactgggaaaattttggcaaaggactggtggcgagaggtccagtttcatgtatctgattgcctacatgacatcttcctttggatgtctgacaaacgcatcacatacttagggtgttttgatggtgaaaccccatctctactaaaaatacaaaaattagctgggcgtggtggcgtgcacttstagtcccagctactcgggaggttgaggcaggagaatcgcttgaacctgggaggcggaggttgcagtgagccaagatcgtgccactgcactccagcctggtgtcagagcgagactctgtctcaaaaataaataaatacattaattaattttaaaaaaaagatgaactcctgagagtctcaccaaacctgttcctctggttgtcttccctatctcagttaatgccaatttcatctagttgctaagatgaaaatccttgaagtcaccttgcttcttttttttattattattatccaaattatccgtaagtaaaatcttttggatttactttcaaaatgagtcacgaatccagtcacttctgatgaacttcacaacactgccacactggttcaagctaccatcattccctcctggattatgacagcctcttaactattctccctgattctgtctttgcctcccttcagtgtttttctatgtcttagcaactgc

SEQ ID NO: 80461 - DNA, 856 bp, Homo sapiens
acatggcaacctgcgattgatagatcctattgatgacattctctccaggacatggtattaccagatggctttgaatatgtaagagctcagtgaagcattgctcacaggaaggtgagatctaatggaaaagttattcattttgaagaaacgacaagaggacacactccagccaatacatacatgactgactgggaaaattttggcaaaggactggtggcgagaggtccagtttcatgtatctgattgcctacatgacatcttcctttggatgtctgacaaacgcatcacatacttagggtgttttgatggtgaaaccccatctctactaaaaatacaaaaattagctgggcgtggtggcgtgcacttgtagtcccagctactcgggaggttgaggcaggagaatcgcttgaacctgggaggcggaggttgcagtgagccaagatcgtgccactgcactccagcctggtgtcagagcgagactctgtctcaaaaataaataaatacattaattaattttaaaaaaaagatgaactcctgagagtctcaccaaacctgttcctctggttgtcttccctatctcagttaatgccaatttcatctagttgctaagatgaaaatccttgaagtcaccttgcttcttttttttattattattatccaaattatccgtaagtaaaatcttttggatttactttcaaaatgagtcacgaatccagtcacttctsatgaacttcacaacactgccacactggttcaagctaccatcattccctcctggattatgacagcctcttaactattctccctgattctgtctttgcctcccttcagtgtttttctatgtcttagcaactgc

SEQ ID NO: 80462 - DNA, 856 bp, Homo sapiens
acatggcaacctgcgattgatagatcctattgatgacattctctccaggacatggtattaccagatggctttgaatatgtaagagctcagtgaagcattgctcacaggaaggtgagatctaatggaaaagttattcattttgaagaaacgacaagaggacacactccagccaatacatacatgactgactgggaaaattttggcaaaggactggtggcgagaggtccagtttcatgtatctgattgcctacatgacatcttcctttggatgtctgacaaacgcatcacatacttagggtgttttgatggtgaaaccccatctctactaaaaatacaaaaattagctgggcgtggtggcgtgcacttgtagtcccagctactcgggaggttgaggcaggagaatcgcttgaacctgggaggcggaggttgcagtgagccaagatcgtgccactgcactccagcctggtgtcagagcgagactctgtctcaaaaataaataaatacattaattaattttaaaaaaaagatgaactcctgagagtctcaccaaacctgttcctctggttgtcttccctatctcagttaatgccaatttcatctagttgctaagatgaaaatccttgaagtcaccttgcttcttttttttattattattatccaaattatccgtaagtaaaatcttttggatttactttcaaaatgagtcacgaatccagtcacttctgatgaacttcacaacackgccacactggttcaagctaccatcattccctcctggattatgacagcctcttaactattctccctgattctgtctttgcctcccttcagtgtttttctatgtcttagcaactgc

SEQ ID NO: 80463 - DNA, 526 bp, Homo sapiens
gccaggcgtggtggctcatgcctgtaatcccagcactttgggaggccaaggcaggcccaaggcaggcggatcacctgaggtcaggagttcgaaaccagcctggccaacatggtaaaaccctgtctctactaaaaacacaaaaaattagctaggcatgggggtgggcgcctgtaatcccagctacttggaaggctgaggcagaagaatcacttaaattcgggaggcagaggttgcagtgagcccagatygtgccacagtactccagcctgggcgacaaagcaagacttcatctcaaaaaaaaggctggatcacaggatcacaggataggcacaagccctgagggagctcccaaggaggagggacgcactagaccttcacccccatttcagcctgtgaagattcactttcgtctgaggttctgtagagggttgactagtgacccccaaaaagacatgtctaatacctaaccccaagaacccacgaatgtgaccttatttggaaaaagggtctttgcagatgtgattag

SEQ ID NO: 80464 - DNA, 1511 bp, Homo sapiens
cttgaaagtccactaggaggaagaatgaataaaaatagtgtaccattgtccatccatcaggatactaatggaccattgtgcattttgcaaaatagagaaatagtctctgcttttctgaagctctgctaagtaagtgaacatgtactttttataaggctgagatataggatgaaagagaagaagggtaataacaagaagagagtttttgctgtgcatttactttcataactgaacgtattgagaaaatgctgaatgtagaattcaagctcagcagatgtaacaaggcccaaaataacaatggcttaaacaaattagaagtttctttctctcttacttaatagctggagttgggtagttctgggtgttgtggaggtgcccagggtcagacacctgaagtctatagtttttctatacattattcaattctggtttctagtctatcatgatgaccatttatataagatacatttaaaaatctcacgcatattaagatgcatttaaaaatctcatcatcatttactaagagctaatggtcccttggaaataagtaaaaatgcacgagtgcagtcaactaaagggagattgggtatagtagggcctgggtaatctgtagacagcctgagcaattgcagcagggaattaggactgctgtgaatgatacggcaaatcatttcctatagggatttggtatcgcacaattgtaggagaagctgagaacacaaaggtctagaaggggacaattggggaaaaaggaaaaatttattaatcaaggcacagagggaagctggtgaagaagtatgtggaagactgcggtcttggcatctggtggtggccttctgaagcttctgcttggcagcagggcaggccggaggaaaagctggactcaaagcagagggaagcagagacgactcactgaatccggtagacaaactggaatccatgggaggaaactgcagcackcatgtctttcgccacatcactccagtgaggcaggcgacctgcagaaaaactgctgccttctcccagagcccagtctagtgcttggagaagttgtaggaggagatctggccaaactcgctgggccctcactccaacaaggggaaccagtgatcggcagcagggtgcacgagctgcggtggtggctagggcccggcaccaatgcctcaagcacagcactgtagggtcactttggccttccaaatcatgcaaatttctcttctttccaaccctaatccagagctacccaggggaagggaattctgggaaatgtccttctagcttagctaagtaacacagcacaaaatcatcacagtaacagactctggcctaagagagaatacacgtgactgtgggggaaaaaatttcaaaaggtcaagggccctaaattcagtccattgctgtgataaactttaaaaatcaaaatgttaattattcaaatatatgactagcttccattccatctaaaataagaggtgaggtcatttcattaaggtctcctcgccttctgtttc

SEQ ID NO: 80465 - DNA, 1511 bp, Homo sapiens
cttgaaagtccactaggaggaagaatgaataaaaatagtgtaccattgtccatccatcaggatactaatggaccattgtgcattttgcaaaatagagaaatagtctctgcttttctgaagctctgctaagtaagtgaacatgtactttttataaggctgagatataggatgaaagagaagaagggtaataacaagaagagagtttttgctgtgcatttactttcataactgaacgtattgagaaaatgctgaatgtagaattcaagctcagcagatgtaacaaggcccaaaataacaatggcttaaacaaattagaagtttctttctctcttacttaatagctggagttgggtagttctgggtgttgtggaggtgcccagggtcagacacctgaagtctatagtttttctatacattattcaattctggtttctagtctatcatgatgaccatttatataagatacatttaaaaatctcacgcatattaagatgcatttaaaaatctcatcatcatttactaagagctaatggtcccttggaaataagtaaaaatgcacgagtgcagtcaactaaagggagattgggtatagtagggcctgggtaatctgtagacagcctgagcaattgcagcagggaattaggactgctgtgaatgatacggcaaatcatttcctatagggatttggtatcgcacaattgtaggagaagctgagaacacaaaggtctagaaggggacaattggggaaaaaggaaaaatttattaatcaaggcacagagggaagctggtgaagaagtatgtggaagactgcggtcttggcatctggtggtggccttctgaagcttctgcttggcagcagggcaggccggaggaaaagctggactcaaagcagagggaagcagagacgactcactgaatccggtagacaaactggaatccatgggaggaaactgcagcactcatgtctttcgccacatcactccagtgaggcaggcgacctgcagaaaaactgctgccttctcccagagcccagtctagtgcttggagaagttgtaggaggagatctggccaaactcgctgggccctcactccaacaaggggaaccagtgatcggcagcagggtgcacgagctgcggtggtggctagggcccggcaccaatgcctcaagcacagcactgtagggtcactttggccttccaaatcatgcaaatttctcttctttccaaccctaatccagagctacccaggggaagggaattctgggaaatgtccttctagcttagctaagtaacacagcacaaaatcatcacagtaacagactctggcctaagagagaatacacgtgactgtgggggaaaaaatttcaaaaggtcaagggccctaaattcagtccattgctgtgataractttaaaaatcaaaatgttaattattcaaatatatgactagcttccattccatctaaaataagaggtgaggtcatttcattaaggtctcctcgccttctgtttc

SEQ ID NO: 80466 - DNA, 791 bp, Homo sapiens
agagatttaaccactggaattccacctcctgcctcctcctcctcttctgttgcctcctcctcttctgcatcttactttctttcctcttcatcacaacarcatagtgcagtgtgaaaagtgctggctctacattcagactgtctgggtttgaatccagatagtacatgcaaaacactgaatgctcaatatttactatttctagaattgccatcatccccactcccaatatgtgggtggggctgtgtcataccagacgtgctgttgtgtcgttggaattagccagggccccttccaatagaattgatgcgctagagccaaaaactctgatccagagaggcatacaacacatatgtagaattggatgaaatatgacaaactaatagtttactaaggccatggagaaaggaaaaagatcaaaaactaatgatgtagctaatggtgatggaagaaggattctggttagagaaagcttcaaccaatgaggaaaatatgggggcatgtgaatggttctaggttagggtacagtgaagccttggatacactgctccaataacagggaaatgctgagggtagtggatgagagaaatagagggtacctagaaaaagttctggaagccgatggtggatattagtaaagatatggggtgcattgagagtttattgcaaatagagagactgatccaaatgctaggtgacaaagataattattaggtaaaaggatggtgcattaggataaagcatgggtttgctacatgcttgtttcttatttttctgattagtattttcaaagg

SEQ ID NO: 80467 - DNA, 1830 bp, Homo sapiens
agttctggaacattgacttagtcactaactaccttggaaagaatgtaggtaggaaacctggattcactgttgtagaaaattctcagtatgccattttctcactcaaatgttccctggtttccttaagcaaaggaaagtgcgagtgtgcagcattggagaagcaggagaactttgatcacataatctctctagaccttgggttcttgcctggaacacgctggtctgttaccttgcagtgaaggtggctgggtggtggtgccctccctcattaagaagacctcagaggtgaatgggcagcaggcatgtgtgttttctttctgtctgcctggtccaggaagaagatggagagcaaaggctttgggaggggaaaaatgtcgcttatccaggggagttagagaagccaaatagcttgcaagactaggagcttcagtagaagctctcttacgttagctatgaaggaggcagggacatttcacgtctcttcctgagaaacaggaagacccagccccacagaaggctgacttgaccattataacccattagcctgttgcagagttgcagaacacaggtagctytttaggtactggtatttggctggtttgaacttaaaaattgaaaaaaaaaaaaaaaaaaaccaaaaggatcctctttttcctaattctaaaggtaatatacagtgattgcagacattttgtaaaatacagaaaaataggccaggcacggtggctcacacctgtaaccctggcactttgggagggtgaggcaggtcgatcccttgaggtcaggagttcgaaaccccgtctctgctaacaatgcaaaaattagctgggagtagtggcaggcgcctgtgatctcaactactcgggaggctgaggcgggagaatcgcttgaatctgggaggtggaggttgcagtgagcttagatcacgccactacactctagcctgggcaacaagagcaaaactttgtctcaaaaaaaaaacaacaacaacaacaaaaaaaaccagaagaatataaatcagataagaattacttggtatggaatcatccagaaattataacatatttaattttggaatattttcttcttttttaaataaagtaatgaataagtacttaaaatggatgggatcataatatatatattgtttgtagccttatagtttccctcttagtatattgtgagcactgacacatatccttacatgatttttaataattccacaaaataggtatataaatcacaactctatttggggttatttacattgtttacagctttggaattaaaaataatgcaatgggcaatggctggcaagctggccaaataggaacagttccagtctgcagctcccagtgagatcaacgcagaaggtgggtgatttctgcatttccaactgaggtacccggcccaactcattaggactggttagacagtgggtgcagcccatggagggtgagcagaagcaggatgaggcatcccctcacccaggaagcacaaggggttcaggaactccctcgcctagccaagggaagccatgaggcactgtgccatgagaaaccatgcattctggcccagatactatgcttttctcatggtctgtgcaacccacagaccaggagattccctcgggtccctacatgactagggcctagggtttcagcacaaaattgggtggccatgtgggcagacactgagctagctgcaggaggtttttttttttttctttcatacccagtggtgcctggaacgccagcaagacagaactgttcactcccctggaaagggggttgaagcctgggagccaagtgatctagctcagtggatccc

SEQ ID NO: 80468 - DNA, 620 bp, Homo sapiens
ccatctcagcactgatgtcactcctggccagttgtgtactgtgtgcttgggtatcgagtcatggtctgaagttcatcttcattgatcatctcatagtgaagttaattatttctgagactctgaagtcatggtctgttgtgagttcaatcaggatgaaactagaatcattaaagaatgagagggttactttcttcctgctgactggagagtgattttcaaacactccttagcagtagactcttttggtcaaacacacctttctgcagaattccaatataggaaataggtaaaagtagatgttctctggtacccctggtgtccaaccacagactttacccccagacacagcatgaagcctgctcaggaagagataccactgaccaaagtggaaaattcctctgcaaatttgtacgggaacagaacytgcttgcactgtggtagcacatggaaagaacctggcgacactgaggaatgtcataggaagcaattctatgaagcttatttctgtgtttactgcagggatgttgtcaaggatgtggttgatgacattccacagtgtttcctttatgatgatctgctgaagaaattttcctctcccctcaggatgatgattaaccaca

SEQ ID NO: 80469 - DNA, 564 bp, Homo sapiens
atgcacaagatgctattttactattaactcagacttttcttatgccagatggtgttggaggaaagcttttgttttcttgatgataggcatcttcttttaattttgccaaccagacacagttcctctcttttcagcatgcagagacacagcagccatcttttatacacctcttagatacagtaactggtttggcatttcctggtgactgtgagtctgacaattgctcagaatttcatcactgcttcagtcatgtgtagaagatgctcccagagataagcataagacccccatcagtagagttattttaggctcagctttacttaaacagcatcaaattctaattgggcctaccagacttaatttaaggagctagagtggaygaacaacgatgtactgtgacatccaaaatatcaacacaacgttatatgtaatcacaagtatgtatctgtgtgtgtgtgtgcatgtgatgtatatggtagaggggagggcgatgtgggtgcaggttggtgggctgaagacatctttaaccttgcttttgtactatatcagataggtcttggtact

SEQ ID NO: 80470 - DNA, 2083 bp, Homo sapiens
ccgctagggaacatacaactctcgcaaaattatgcagtgagactttgagtggtagctttggaataactagtacttccattttcgacatttggctattttaaacctagctttctctgataccaaatgcctgaagggttctacaaaaacatttaacatattttaaatgcagtagctttacaaatacttgataattttttacaaatacttgataatttaaattataaacttcagatacacttcataactccttcacagctctgaattccatactgtatctggttttgttttatatatcatctgaaatttaaagacactttcatcatgtttgaagtaaaataattaatgaaatgtacacaaacagtattctctaaggcatttctaaccaatcatcaaggatggcatacaacatgtttcttaaaagtgttatgatagcatattattctaaatttggttactcccagagagtctaaaggaacattaccaaaggatatagctcaatgagtatgcagccttaaataactgaataatttagttatgatttaacccaataaaatcactgtcctaaattaccatatactatgtggcttttctaccaagaagttctaaggtgcatgggataagtgtgaagaagcagtcttacgtacggcatattgtcccagacctctaagcccaatttgcccccaaattcagtacttaactctgatgaagtatactgaatccaaaatattgacatcctcattttaaaaatccccataacttaatatcaataagcacatatgatgagttatgagatagcaatctagtaattccaaggccaaattcttatagcaagctatgcatatttctaatgctgatactcactcctgtgttttgcatgcttgaccttgtgcagtaactcyttagtgcaaggtcaagcacctcactatgttgtttcaaaagaagaatccattaggcaaattgggcaaaaatttgttggaggaaacaaacagaagcagagtctgagaatggtctgaatggaggagtcatggttggagtcagagagcaatgagaaaacccagagatcatgaaaagggctgtgcctactctgatctaaataaaaagagatttcctgacttttaagaaaatctgcatttttaacaccattattttatcctcataatactacattctagattcttaaggaggaatgaacaatactcctctcccaattttcctatctgtataactcaccaacttgacataatatacatcaaggaattattttttcaaacagtaaattattgatccagtgaccaaaagaagttcctaaaagagtttaacattcacccaaggagtaatttgttatactggagaaccatggaagaactttctaaatcagtgtgatttacagaaatacatattttgtatttatattacatgagctgaaagtaccacgctggcaattcacagaagctgtctttataaacaaagtgaagtgtctcccatcaattcctgctaatgcacagtaatgagaagcaaatcactcaatcaccagcacagaaaaatagagtaccatggtccatattcaatagccccagaacaaattataaagggctaagtagggtggggtgaggctcagtattgggaggtttgtttttcatgaacagaaggtttcatcactatttggggtgccaactaaaacttgtgtggctgagaggcagagatcatttcctgtccagccactattctattctgcaattccatccatttcaggaacctctcctagcaagctgtgagcctttcttctcctggctatgatgtatcctagcgttgataacaaattgcagctctttcacaacccataatatcttttcaatgaccaaagcaaatccatactcatgtaagtgtgcctcttcctaggtagatgctgaagtaaggtacacacagttagttataccaaagtctcacctacacagttagaagccgccattattatctcctcagactgctccaaactcaacaacctcaataagttctgtttcccagtcaaccctctaattgcttttgttgttgttgttgttttatctcatttcctctggatccc

SEQ ID NO: 80471 - DNA, 2083 bp, Homo sapiens
ccgctagggaacatacaactctcgcaaaattatgcagtgagactttgagtggtagctttggaataactagtacttccattttcgacatttggctattttaaacctagctttctctgataccaaatgcctgaagggttctacaaaaacatttaacatattttaaatgcagtagctttacaaatacttgataattttttacaaatacttgataatttaaattataaacttcagatacacttcataactccttcacagctctgaattccatactgtatctggttttgttttatatatcatctgaaatttaaagacactttcatcatgtttgaagtaaaataattaatgaaatgtacacaaacagtattctctaaggcatttctaaccaatcatcaaggatggcatacaacatgtttcttaaaagtgttatgatagcatattattctaaatttggttactcccagagagtctaaaggaacattaccaaaggatatagctcaatgagtatgcagccttaaataactgaataatttagttatgatttaacccaataaaatcactgtcctaaattaccatatactatgtggcttttctaccaagaagttctaaggtgcatgggataagtgtgaagaagcagtcttacgtacggcatattgtcccagacctctaagcccaatttgcccccaaattcagtacttaactctgatgaagtatactgaatccaaaatattgacatcctcattttaaaaatccccataacttaatatcaataagcacatatgatgagttatgagatagcaatctagtaattccaaggccaaattcttatagcaagctatgcatatttctaatgctgatactcactcctgtgttttgcatgcttgaccttgtgcagtaactccttagtgcaaggtcaagcacctcactatgttgtttcaaaagaagaatccattaggcaaattgggcaaaaatttgttggaggaaacaaacagaagcagagtctgagaatggtctgaatggaggagtcatggttggagtcagagagcaatgagaaaacccagagatcatgaaaagggctgtgcctactctgatctaaataaaaagagatttcctgacttttaagaaaatctgcatttttaacaccattattttatcctcataatactacattctagattcttaaggaggaatgaacaatactcctctcccaattttcctatctgtataactcaccaacttgacataatatacatcaaggaattattttttcaaacagtaaattattgatccagtgaccaaaagaagttcctaaaagagtttaacattcacccaaggagtaatttgttatactggagaaccatggaagaactttctaaatcagtgtgatttacagaaatacatattttgtatttatattacatgagctgaaagtaccacgctggcaattcacagaagctgtctttataaacaaagtgaagtgtctcccatcaattcctgctaatgcacagtaatgagaagcaaatcactcaatcaccagcacagaaaaatagagtaccatggtccatattcaatagccccagaacaaattataaagggctaagtagggtggggtgaggctcagtattgggaggtttgtttttcatgaacagaaggtttcatcactatttggggtgccaactaaaacttgtgtggctgagaggcagagatcatttcctgtccagccactattctattctgcaattccatccatttcaggaacctctcctagcaagctgtgagcctttcttctcctggctatgatgtatcctagcgttgataacaaattgcagctctttcacaacccataatatcttttcaatgaccaaagcaaatccatactcatgtaagtgtgcctcttcctaggtrgatgctgaagtaaggtacacacagttagttataccaaagtctcacctacacagttagaagccgccattattatctcctcagactgctccaaactcaacaacctcaataagttctgtttcccagtcaaccctctaattgcttttgttgttgttgttgttttatctcatttcctctggatccc

SEQ ID NO: 80472 - DNA, 1281 bp, Homo sapiens
aattttcatatatatatatatatacatgcacatgggcaggcatgaatttttctctcgattggggattgcactgatcattcctttttgtagcctgcttttatcacttctcagcgtattgtgaagtgtccacatatggaggcctcatggcagaattgcacggctcttcagaacagaggctcaagtccctgcaggcctggatttcagaccctggctctatcactaatcagtcttgtaactgagcaagttactcacctctctgggccttggtttccgcattggtataacggagataatagtacctatccacgcaggtctgatgagaggactgagggagggcacataaaaagcttagaagaagacctggaacacagtgaatgctcaatgagcatcagacattaggattgctgttgttcctgacctcatggctgactccagcccccagccccacctcataccccacatcctgtagctggatcccagcctccactaagctctaacctgggtctcccagggtgaccttgggtcctctgactactgagctgtttggagggctgatgcccagtcaccttccaagtggcatccagtgggatttctgagaggttcttccctgggttctcagtgacgtgaggaatgagaggagttagaagatggggaaggaggagggaaaaggtgaagaaatagctatgatcgagccagaccctgcaaacctggccctggatcttctcaagtctccattgcccataggcctcctcccctgtgtccacacctggggtttccccctgagttggtatcacaggacgtgatgtggccccggggagagaacattagtgtggctgccctcacatggccaggatgggtgaggatcaagttataaccacccttccagggagctgctaagacttagggccatggcttggggctcctggtgctcactggccttgtgggggacccactgactttccagtgtagatgtggatgtgggaccagggttgctatggggcagtgggctcagctctgggctctgggatccacaggagatgaacaactaccggcgggccatgcagaagatggcagaggacatcctgtctctgcggagacaggccagcatcctggaaggagagaaccgcatactgaggagccgcctggcccagcaggaggaggaagaggggcagggcaaagccartgaggcccagaacacgggtgaggatgtgcaggccaccaagggcacccgggcttctgcctgggcccaggctccaggttgtgcaatagggtggctgggag

SEQ ID NO: 80473 - DNA, 433 bp, Homo sapiens
gggccagaggctcagctgaactcagggtggggcacgcaggatgttgatagccatgcttagctgctggtaggagaggcctccccgcaactcgagcttgaagctggcctagccagaaggtccagatgcctmcctggtcccctgcaacggcctccactgagcccacatcccatctcctggagtcgcacagttgctctgctccccttacccctgctggctccaggtctggctcatacattctgaggctgtcatgaatgccctcactgcccgcaataaaaccaccgcatcagacacacgggggtgggggatgggaggctcctgggctgaggtggtttttgctgttgcttttggcaggctgtcagacttctctgggccctgcctggctgtgggcttctgctgcagcctaggagggggctcgttggcacctggggttctg

SEQ ID NO: 80474 - DNA, 650 bp, Homo sapiens
aaggaggcctagaccatctttagccttgggagggaccatgggtaggggaagggaccagggtgatgggagctcagtgtcacaggagagcagaggtggggtgagaccacccgtcctgcctccaggcctgtgctacaggccccgtgcgccctgtccaggcagatcacggtcctgcctccagcctaggccacaagcctcctccccagccctgtgttgcggaaaaccacctcactgctgccaggctccaggccaccccagagcttcacaaagtgcttcagccatcaaaaccccagtaatccctgtgttcagctttgcctcttgaggcttgagcctcaaggcagttggtcctttcagagccccccacctcccctgcctgtcacccagcctcttttggcctcagttcctctcacacctcactctccccatccctgagagtcccccatgggaaccttctctacagcctgctcagccttgcccactgctcaggtaatggaaatccagggcccagacctcacagatgcaggtggcaatgaagggagggggcttcctgggggcagcactcycgctgctggcgggtaccctccctgctggctctctcaggatgccccctgaccacctcaggcccctcagagtcggtctcaaaattcaaattt

SEQ ID NO: 80475 - DNA, 574 bp, Homo sapiens
tccactcttggagcccttctgctttccccaccacaaaatcctcttccctgttgtctttgtctttccttcctgtgtcctttttcttctctggtcctgagtcagctttgactcagaaatgttatagctggaaagaggcttacagccaatgaggtcaagctctacatggaatagatggggamactgaagtccagagaggttgcttgggtcccttgaggtcacacagcctgtttgcccccagaacctgggcctcctgactccctgtaggtgcctccttccccctggcccaatctgctctcctgccccggctacatttggacacatcattgccagctcagcctagtggcttaatggagtattccacaatgatacgtgactgccacaggaaggcttcaagcctccaagtctttccctttccaagagacagacaaaccaaacttgaaagaaggaatatcagacatgatagatgttttggggcagatgaaaaggacaagcctccctcgtatttcccaacagagctggtctctggtggccttgcttcttctccgggtctggaaggggcccgtctccctggccc

SEQ ID NO: 80476 - DNA, 721 bp, Homo sapiens
ggccagtgggagtcattggaggggtctggaggccagagaggatgttccagttacctattgcaataacaaactaccccaaaatgttatcatttaaaacgataattttttcttttattatcacatctcatagctttgtgggtcaggaactcagccacggcacagcaggtctaagtcctcagctgggacgacctacgggcaggggcgggagcagccagggctgggtgggcctcgctctctcccatacacttagtttgggcttcctcacagtctcagggcagcaaggaattagcagctagcagggaagaattggggttactgcaagatgggtctcatcccaagcccctgtcctcaccactcagccccaacatcttccctggagctaacccaggatagaggccccaggttcaagattcactgagtgacttcaggcaaatctctgcacctctctggtcccaatatcagaacttstgagatgggggttccagggctagaggtcttggaaggctggctggaccacctggaggaaggacatgtgctcctggaactggggagagagacagctccgcacacaccttccccacaatatgagctgtgggccactcaggttggcctcatcccaccacaggctgaagctgagtgtctgtgggaggcggctgccctctgctgactgcaaaggcaaaccacatgcagatggcctgggcctgccagcgatggatcctgg

SEQ ID NO: 80477 - DNA, 721 bp, Homo sapiens
ggccagtgggagtcattggaggggtctggaggccagagaggatgttccagttacctattgcaataacaaactaccccaaaatgttatcatttaaaacgataattttttcttttattatcacatctcatagctttgtgggtcaggaactcagccacggcacagcaggtctaagtcctcagctgggacgacctacgggcaggggcgggagcagccagggctgggtgggcctcgctctctcccatacacttagtttgggcttcctcacagtctcagggcagcaaggaattagcagctagcagggaagaattggggttactgcaagatgggtctcatcccaagcccctgtcctcaccactcagccccaacatcttccctggagctaacccaggatagaggccccaggttcaagattcactgagtgacttcaggcaaatctctgcacctctctggtcccaatatcagaacttgtgagatgggggttccagggctagaggtcttggaaggctggctggaccacctggaggaaggacatgtgctcctggaactggggagagagacagctccgcacacaccttccccacaatatgagctgtgggccactcaggttggcctcatcccaccacaggctgaagctgagtgtctgtgggaggcggctgccctctgctgactgcaaaggcaaaccacatgcagatggcctgggcctgccagcgatggaycctgg

SEQ ID NO: 80478 - DNA, 679 bp, Homo sapiens
atccccatgggaaaaaagacaagggtggggagcaggcctggggtgaggcctgggaaccagggtcttcatctaccctgcagggcccccacaccatggyttgattttccacccacacctgccccccatgaccatcagttcctggagactcagaacctcagaatttttgttcagtgagaacttccctttgtcccagggttataaacacagctggtgtcagtggttgaaggatggttggcctgagaaccatccccagccagaccgaagccataaggattctttccagatgttctcccatctctgccacctggggcccctaaggtgttctcatgcctgaaacccccattcagactcaagaagcatgagttctcccccacaggcttcttctggaatcctgcataacagcctcagagggcattcatgggggagatttggggccatgaggcaggccagagggggccttcctggtgtcctcattgcatcctgcatgggctgtctcctctgcttactcctgagcatgggcagagcggctgacagcctcctcctccctccctggtcatcatgagcagccaggaggcttggtgatccctccagactttatgtagcttccctctccctagcctggcccccgtgggtcccagggtcacatgccacagggtctagcttgtagtggagtgaggga

SEQ ID NO: 80479 - DNA, 373 bp, Homo sapiens
aaatgattcactgagaagagatgataatctattttactagtgttatgtattactctgtttatcattttctctttttttttcagtaagtgactaaagagctttctgtagtttgctacattaaataattctttctattagtattattgtggtacaagatttaagctaatgagatagtcactcaaatcataatatatagagagattttacatgacatatactagagttagtatgggaaagygtgatcacgttttctggataatggaatttggcttttgtactgacagctctggacccagtaaagtatattctctttttctatatgataaaaaatcattgccatcactagatcataggtaaacactactgaatgctt

SEQ ID NO: 80480 - DNA, 1573 bp, Homo sapiens
tgcatgcaaaccgcactgtccactcctgcatcaagcctcagactatcagatctttggatgttgctacactcggtagaaggcacctggcagccrctgcgggactacagatgtgagcctcctcctttaaccgagtcaggtgtgccttgagaccaggtaggagattgttagatgctgtttgtttgtttgtttttcatttgttttcactgaatgttgcatgagactattttaaaaacgctttgagatactctttctcaaagaaagattattcataatccacccaagtctgcaaaattcacaacccacccctccgccattttataaactatgcaacatatttgatagtggtcaagtgagaaaaccaaaatcaaacatccaaaactggatattcgaaattgagtctgtatcactccaaagtcaaactatttccactacaaaaattgcctactcacaaacccaaatgtataactggttgccatatttgagtcatttgtagcattagtattcatcacatatacatgggttctgcatgagaatcacttaaaatagtttactttgaatttaacaacacttttttaaactgctacatttatgaaccaatataattatgttaacattaatataagtaatattgctaatattaatataagtaatattattaatattaatataagtaatgttagtaaatacaaaaataaaaaggtcatatttgattggacagacctagtttaagccccataaatttatttcaattcttaaacattaaaaaattatagttggagttaccatatgtctcttcaagttagataaataaagtttctttgaaagtcttccttaactgccagttctgctcattgaaatggctttatacacagtgatgaaaaggaataagaaccagtgaagcttccagataatggatactgaatgttaatacataaaagccaaatatgcaattactatttatgaaacaaacaaccccctaatatataataatattgagggttataataataataataatattagtctgttcttgcaacatgataaagaaatacctgaagctgggtaatttgtaaagaaaaaaggtttattggcttatggttgtgagggttgtacaagtgcagcacctgcatctgtttggcttcaggtgcgggcctcaggaagcttataatcatggtggaaagagaagcaagagcaggtgcatcacatggcaagagagagcaagggcagtggggaggtgccgcgcactttttaaacaactgaatctcaaatgaactcagagtgggaactcacttacaagaggagggcactaaaacattcatgagggattaacctccttgactcaaatacctctgaccagaccccacctctaacactgaggattacatttcaacatgagatgtggagagaacaaacatccagaccatatcaggtacttattttaatgttgatggttccaaattatattcaattttcttcagcaaaggaaatgatgtaaaattgttatgctaaacaaattgtgcaaatctgatttaaagtatgaaacaacatgttttaaattgttaaattcaattgt

SEQ ID NO: 80481 - DNA, 1573 bp, Homo sapiens
tgcatgcaaaccgcactgtccactcctgcatcaagcctcagactatcagatctttggatgttgctacactcggtagaaggcacctggcagccgctgcgggactacagatgtgagcctcctcctttaaccgagtcaggtgtgccttgagaccaggtaggagattgttagatgctgtttgtttgtttgtttttcatttgttttcactgaatgttgcatgagactattttaaaaacgctttgagatactctttctcaaagaaagattattcataatccacccaagtctgcaaaattcacaacccacccctccgccattttataaactatgcaacatatttgatagtkgtcaagtgagaaaaccaaaatcaaacatccaaaactggatattcgaaattgagtctgtatcactccaaagtcaaactatttccactacaaaaattgcctactcacaaacccaaatgtataactggttgccatatttgagtcatttgtagcattagtattcatcacatatacatgggttctgcatgagaatcacttaaaatagtttactttgaatttaacaacacttttttaaactgctacatttatgaaccaatataattatgttaacattaatataagtaatattgctaatattaatataagtaatattattaatattaatataagtaatgttagtaaatacaaaaataaaaaggtcatatttgattggacagacctagtttaagccccataaatttatttcaattcttaaacattaaaaaattatagttggagttaccatatgtctcttcaagttagataaataaagtttctttgaaagtcttccttaactgccagttctgctcattgaaatggctttatacacagtgatgaaaaggaataagaaccagtgaagcttccagataatggatactgaatgttaatacataaaagccaaatatgcaattactatttatgaaacaaacaaccccctaatatataataatattgagggttataataataataataatattagtctgttcttgcaacatgataaagaaatacctgaagctgggtaatttgtaaagaaaaaaggtttattggcttatggttgtgagggttgtacaagtgcagcacctgcatctgtttggcttcaggtgcgggcctcaggaagcttataatcatggtggaaagagaagcaagagcaggtgcatcacatggcaagagagagcaagggcagtggggaggtgccgcgcactttttaaacaactgaatctcaaatgaactcagagtgggaactcacttacaagaggagggcactaaaacattcatgagggattaacctccttgactcaaatacctctgaccagaccccacctctaacactgaggattacatttcaacatgagatgtggagagaacaaacatccagaccatatcaggtacttattttaatgttgatggttccaaattatattcaattttcttcagcaaaggaaatgatgtaaaattgttatgctaaacaaattgtgcaaatctgatttaaagtatgaaacaacatgttttaaattgttaaattcaattgt

SEQ ID NO: 80482 - DNA, 1573 bp, Homo sapiens
tgcatgcaaaccgcactgtccactcctgcatcaagcctcagactatcagatctttggatgttgctacactcggtagaaggcacctggcagccgctgcgggactacagatgtgagcctcctcctttaaccgagtcaggtgtgccttgagaccaggtaggagattgttagatgctgtttgtttgtttgtttttcatttgttttcactgaatgttgcatgagactattttaaaaacgctttgagatactctttctcaaagaaagattattcataatccacccaagtctgcaaaattcacaacccacccctccgccattttataaactatgcaacatatttgatagtggtcaagtgagaaaaccaaaatcaaacatccaaaactggatattcgaaattgagtctgtatcactccaaagtcaaactatttccactacaaaaattgcctactcacaaacccaaatgtataactggttgccatatttgagtcatttgtagcattagtattcatcacatatacatgggttctgcatgagaatcacttaaaatagtttactttgaatttaacaacacttttttaaactgctacatttatgaaccaatataattatgttaacattaatataagtaatattgctaatattaatataagtaatattattaatattaatataagtaatgttagtaaatacaaaaataaaaaggtcatatttgattggacagacctagtttaagccccataaatttatttcaattcttaaacattaaaaaattatagttggagttaccatatgtctcttcaagttagataaataaagtttctttgaaagtcttccttaactgccagttctgctcattgaaatggctttatacacagtgatgaaaaggaataagaaccagtgaagcttccagataatggatactgaatgttaatacataaaagccaaatatgcaattactatttatgaaacaaacaaccccctaatatataataatattgagggttataataataatamtaatattagtctgttcttgcaacatgataaagaaatacctgaagctgggtaatttgtaaagaaaaaaggtttattggcttatggttgtgagggttgtacaagtgcagcacctgcatctgtttggcttcaggtgcgggcctcaggaagcttataatcatggtggaaagagaagcaagagcaggtgcatcacatggcaagagagagcaagggcagtggggaggtgccgcgcactttttaaacaactgaatctcaaatgaactcagagtgggaactcacttacaagaggagggcactaaaacattcatgagggattaacctccttgactcaaatacctctgaccagaccccacctctaacactgaggattacatttcaacatgagatgtggagagaacaaacatccagaccatatcaggtacttattttaatgttgatggttccaaattatattcaattttcttcagcaaaggaaatgatgtaaaattgttatgctaaacaaattgtgcaaatctgatttaaagtatgaaacaacatgttttaaattgttaaattcaattgt

SEQ ID NO: 80483 - DNA, 1573 bp, Homo sapiens
tgcatgcaaaccgcactgtccactcctgcatcaagcctcagactatcagatctttggatgttgctacactcggtagaaggcacctggcagccgctgcgggactacagatgtgagcctcctcctttaaccgagtcaggtgtgccttgagaccaggtaggagattgttagatgctgtttgtttgtttgtttttcatttgttttcactgaatgttgcatgagactattttaaaaacgctttgagatactctttctcaaagaaagattattcataatccacccaagtctgcaaaattcacaacccacccctccgccattttataaactatgcaacatatttgatagtggtcaagtgagaaaaccaaaatcaaacatccaaaactggatattcgaaattgagtctgtatcactccaaagtcaaactatttccactacaaaaattgcctactcacaaacccaaatgtataactggttgccatatttgagtcatttgtagcattagtattcatcacatatacatgggttctgcatgagaatcacttaaaatagtttactttgaatttaacaacacttttttaaactgctacatttatgaaccaatataattatgttaacattaatataagtaatattgctaatattaatataagtaatattattaatattaatataagtaatgttagtaaatacaaaaataaaaaggtcatatttgattggacagacctagtttaagccccataaatttatttcaattcttaaacattaaaaaattatagttggagttaccatatgtctcttcaagttagataaataaagtttctttgaaagtcttccttaactgccagttctgctcattgaaatggctttatacacagtgatgaaaaggaataagaaccagtgaagcttccagataatggatactgaatgttaatacataaaagccaaatatgcaattactatttatgaaacaaacaaccccctaatatataataatattgagggttataataataataataatattagtctgttcttgcaacatgataaagaaatacctgaagctgggtaatttgtaaagaaaaaaggtttattggcttatggttgtgagggttgtacaagtgcrgcacctgcatctgtttggcttcaggtgcgggcctcaggaagcttataatcatggtggaaagagaagcaagagcaggtgcatcacatggcaagagagagcaagggcagtggggaggtgccgcgcactttttaaacaactgaatctcaaatgaactcagagtgggaactcacttacaagaggagggcactaaaacattcatgagggattaacctccttgactcaaatacctctgaccagaccccacctctaacactgaggattacatttcaacatgagatgtggagagaacaaacatccagaccatatcaggtacttattttaatgttgatggttccaaattatattcaattttcttcagcaaaggaaatgatgtaaaattgttatgctaaacaaattgtgcaaatctgatttaaagtatgaaacaacatgttttaaattgttaaattcaattgt

SEQ ID NO: 80484 - DNA, 1573 bp, Homo sapiens
tgcatgcaaaccgcactgtccactcctgcatcaagcctcagactatcagatctttggatgttgctacactcggtagaaggcacctggcagccgctgcgggactacagatgtgagcctcctcctttaaccgagtcaggtgtgccttgagaccaggtaggagattgttagatgctgtttgtttgtttgtttttcatttgttttcactgaatgttgcatgagactattttaaaaacgctttgagatactctttctcaaagaaagattattcataatccacccaagtctgcaaaattcacaacccacccctccgccattttataaactatgcaacatatttgatagtggtcaagtgagaaaaccaaaatcaaacatccaaaactggatattcgaaattgagtctgtatcactccaaagtcaaactatttccactacaaaaattgcctactcacaaacccaaatgtataactggttgccatatttgagtcatttgtagcattagtattcatcacatatacatgggttctgcatgagaatcacttaaaatagtttactttgaatttaacaacacttttttaaactgctacatttatgaaccaatataattatgttaacattaatataagtaatattgctaatattaatataagtaatattattaatattaatataagtaatgttagtaaatacaaaaataaaaaggtcatatttgattggacagacctagtttaagccccataaatttatttcaattcttaaacattaaaaaattatagttggagttaccatatgtctcttcaagttagataaataaagtttctttgaaagtcttccttaactgccagttctgctcattgaaatggctttatacacagtgatgaaaaggaataagaaccagtgaagcttccagataatggatactgaatgttaatacataaaagccaaatatgcaattactatttatgaaacaaacaaccccctaatatataataatattgagggttataataataataataatattagtctgttcttgcaacatgataaagaaatacctgaagctgggtaatttgtaaagaaaaaaggtttattggcttatggttgtgagggttgtacaagtgcagcacctgcatctgtttggcttcaggtgygggcctcaggaagcttataatcatggtggaaagagaagcaagagcaggtgcatcacatggcaagagagagcaagggcagtggggaggtgccgcgcactttttaaacaactgaatctcaaatgaactcagagtgggaactcacttacaagaggagggcactaaaacattcatgagggattaacctccttgactcaaatacctctgaccagaccccacctctaacactgaggattacatttcaacatgagatgtggagagaacaaacatccagaccatatcaggtacttattttaatgttgatggttccaaattatattcaattttcttcagcaaaggaaatgatgtaaaattgttatgctaaacaaattgtgcaaatctgatttaaagtatgaaacaacatgttttaaattgttaaattcaattgt

SEQ ID NO: 80485 - DNA, 1573 bp, Homo sapiens
tgcatgcaaaccgcactgtccactcctgcatcaagcctcagactatcagatctttggatgttgctacactcggtagaaggcacctggcagccgctgcgggactacagatgtgagcctcctcctttaaccgagtcaggtgtgccttgagaccaggtaggagattgttagatgctgtttgtttgtttgtttttcatttgttttcactgaatgttgcatgagactattttaaaaacgctttgagatactctttctcaaagaaagattattcataatccacccaagtctgcaaaattcacaacccacccctccgccattttataaactatgcaacatatttgatagtggtcaagtgagaaaaccaaaatcaaacatccaaaactggatattcgaaattgagtctgtatcactccaaagtcaaactatttccactacaaaaattgcctactcacaaacccaaatgtataactggttgccatatttgagtcatttgtagcattagtattcatcacatatacatgggttctgcatgagaatcacttaaaatagtttactttgaatttaacaacacttttttaaactgctacatttatgaaccaatataattatgttaacattaatataagtaatattgctaatattaatataagtaatattattaatattaatataagtaatgttagtaaatacaaaaataaaaaggtcatatttgattggacagacctagtttaagccccataaatttatttcaattcttaaacattaaaaaattatagttggagttaccatatgtctcttcaagttagataaataaagtttctttgaaagtcttccttaactgccagttctgctcattgaaatggctttatacacagtgatgaaaaggaataagaaccagtgaagcttccagataatggatactgaatgttaatacataaaagccaaatatgcaattactatttatgaaacaaacaaccccctaatatataataatattgagggttataataataataataatattagtctgttcttgcaacatgataaagaaatacctgaagctgggtaatttgtaaagaaaaaaggtttattggcttatggttgtgagggttgtacaagtgcagcacctgcatctgtttggcttcaggtgcgggcctcaggaagcttataatcatggtggaaagagaagcaagagcasgtgcatcacatggcaagagagagcaagggcagtggggaggtgccgcgcactttttaaacaactgaatctcaaatgaactcagagtgggaactcacttacaagaggagggcactaaaacattcatgagggattaacctccttgactcaaatacctctgaccagaccccacctctaacactgaggattacatttcaacatgagatgtggagagaacaaacatccagaccatatcaggtacttattttaatgttgatggttccaaattatattcaattttcttcagcaaaggaaatgatgtaaaattgttatgctaaacaaattgtgcaaatctgatttaaagtatgaaacaacatgttttaaattgttaaattcaattgt

SEQ ID NO: 80486 - DNA, 1573 bp, Homo sapiens
tgcatgcaaaccgcactgtccactcctgcatcaagcctcagactatcagatctttggatgttgctacactcggtagaaggcacctggcagccgctgcgggactacagatgtgagcctcctcctttaaccgagtcaggtgtgccttgagaccaggtaggagattgttagatgctgtttgtttgtttgtttttcatttgttttcactgaatgttgcatgagactattttaaaaacgctttgagatactctttctcaaagaaagattattcataatccacccaagtctgcaaaattcacaacccacccctccgccattttataaactatgcaacatatttgatagtggtcaagtgagaaaaccaaaatcaaacatccaaaactggatattcgaaattgagtctgtatcactccaaagtcaaactatttccactacaaaaattgcctactcacaaacccaaatgtataactggttgccatatttgagtcatttgtagcattagtattcatcacatatacatgggttctgcatgagaatcacttaaaatagtttactttgaatttaacaacacttttttaaactgctacatttatgaaccaatataattatgttaacattaatataagtaatattgctaatattaatataagtaatattattaatattaatataagtaatgttagtaaatacaaaaataaaaaggtcatatttgattggacagacctagtttaagccccataaatttatttcaattcttaaacattaaaaaattatagttggagttaccatatgtctcttcaagttagataaataaagtttctttgaaagtcttccttaactgccagttctgctcattgaaatggctttatacacagtgatgaaaaggaataagaaccagtgaagcttccagataatggatactgaatgttaatacataaaagccaaatatgcaattactatttatgaaacaaacaaccccctaatatataataatattgagggttataataataataataatattagtctgttcttgcaacatgataaagaaatacctgaagctgggtaatttgtaaagaaaaaaggtttattggcttatggttgtgagggttgtacaagtgcagcacctgcatctgtttggcttcaggtgcgggcctcaggaagcttataatcatggtggaaagagaagcaagagcaggtgcatcacatggcaagagagagcaagggcagtggggaggtgccgcgcactttttaaacaactgaatctcaaatgaactcagagtgggaactcactyacaagaggagggcactaaaacattcatgagggattaacctccttgactcaaatacctctgaccagaccccacctctaacactgaggattacatttcaacatgagatgtggagagaacaaacatccagaccatatcaggtacttattttaatgttgatggttccaaattatattcaattttcttcagcaaaggaaatgatgtaaaattgttatgctaaacaaattgtgcaaatctgatttaaagtatgaaacaacatgttttaaattgttaaattcaattgt

SEQ ID NO: 80487 - DNA, 1573 bp, Homo sapiens
tgcatgcaaaccgcactgtccactcctgcatcaagcctcagactatcagatctttggatgttgctacactcggtagaaggcacctggcagccgctgcgggactacagatgtgagcctcctcctttaaccgagtcaggtgtgccttgagaccaggtaggagattgttagatgctgtttgtttgtttgtttttcatttgttttcactgaatgttgcatgagactattttaaaaacgctttgagatactctttctcaaagaaagattattcataatccacccaagtctgcaaaattcacaacccacccctccgccattttataaactatgcaacatatttgatagtggtcaagtgagaaaaccaaaatcaaacatccaaaactggatattcgaaattgagtctgtatcactccaaagtcaaactatttccactacaaaaattgcctactcacaaacccaaatgtataactggttgccatatttgagtcatttgtagcattagtattcatcacatatacatgggttctgcatgagaatcacttaaaatagtttactttgaatttaacaacacttttttaaactgctacatttatgaaccaatataattatgttaacattaatataagtaatattgctaatattaatataagtaatattattaatattaatataagtaatgttagtaaatacaaaaataaaaaggtcatatttgattggacagacctagtttaagccccataaatttatttcaattcttaaacattaaaaaattatagttggagttaccatatgtctcttcaagttagataaataaagtttctttgaaagtcttccttaactgccagttctgctcattgaaatggctttatacacagtgatgaaaaggaataagaaccagtgaagcttccagataatggatactgaatgttaatacataaaagccaaatatgcaattactatttatgaaacaaacaaccccctaatatataataatattgagggttataataataataataatattagtctgttcttgcaacatgataaagaaatacctgaagctgggtaatttgtaaagaaaaaaggtttattggcttatggttgtgagggttgtacaagtgcagcacctgcatctgtttggcttcaggtgcgggcctcaggaagcttataatcatggtggaaagagaagcaagagcaggtgcatcacatggcaagagagagcaagggcagtggggaggtgccgcgcactttttaaacaactgaatctcaaatgaactcagagtgggaactcacttacaagaggagggcactaaaacattcatgagggattaacctccttgactcaaatacctctgaccagaccccacctctaacactgaggattacatttcaacatgagatgtggagagaacaaacatccagaccatatcagrtacttattttaatgttgatggttccaaattatattcaattttcttcagcaaaggaaatgatgtaaaattgttatgctaaacaaattgtgcaaatctgatttaaagtatgaaacaacatgttttaaattgttaaattcaattgt

SEQ ID NO: 80488 - DNA, 493 bp, Homo sapiens
cagctactcagggggctgatgtaggaggattgcttgagcctgaaaggttgaggctatagtaagccatgatcttgcactccagcctgggcaagagagggagaccctgtttcaaaaaaaaaaaaaaaaaaaaacagagagaataataatatatatatattttattttttttatttttttattatactttaagttttagggtacatgtgcacattatatttttaaaaagagttttaaccttaaaaaaattcatattgttcctgtgtccctggcacataataggtgcttaatwatttgcaggtagtagctgcctggaacttccctggaatctggatcaaaatgagctattccaaaacaaaaacaaaaacaaacaaacaaagaaacaaacacaaaaccaaaaaaaacaaaaatcaccttctgtctcatcctctttgaaattgccctaaatttctcaggaggggtgacaaagatatgttacacataaaagaaagaattc

SEQ ID NO: 80489 - DNA, 871 bp, Homo sapiens
tgcatgaaatgattcagagaataaaattaagtacagtcatacgttcgcttaacatcggggataaattctgtgaagtacattcttaggcaattttgtcattgtgtgaacatcctatggtgtacttacacaaacctagatggtatagcctattacacacccggcacgaggaacattaaggagtttttaattagaaacaaagaagcttaaaaggcataagaatgacaaaatgaactttgaggactcagggggaaagggtgggaagggggcaagggataaaagactacmaattgagtgaagtgtacgctgcttggatgacaggtgcaccaaaatctcacgaatcaccactaaagaacttactcatgtaaccaaacaccacctgttccccaataacctatggaaataaaaaattaaaaaaaaaaagaaacaaggaagcttagatttgttctcactttatggcagaaagtattacatatccagttttagaaatgtttttttcttctccgtgggtctctcctgagtttttcttttgttttgttggtattagaatgctaggtggtaaacttgagggtgggcagaaagttgaatggtgggctaatagcttagtcttgaagaatatacagttttcttctaagtttcatgagccgtttatattcaagcctaattagctaattagcataatgttactaagacaaagatcacaaatttcatttccctttatttaaatatgagctacttaacttgctctgttctttggtaacagaatttgctcctaattgtgaactcaccagtttgcaaattcatgctgttgacaccaggggtattgggaatttcagagaacggatcgatgcaaatcagtttctgctattaaaac

SEQ ID NO: 80490 - DNA, 871 bp, Homo sapiens
tgcatgaaatgattcagagaataaaattaagtacagtcatacgttcgcttaacatcggggataaattctgtgaagtacattcttaggcaattttgtcattgtgtgaacatcctatggtgtacttacacaaacctagatggtatagcctattacacacccggcacgaggaacattaaggagtttttaattagaaacaaagaagcttaaaaggcataagaatgacaaaatgaactttgaggactcagggggaaagggtgggaagggggcaagggataaaagactacaaattgagtgaagtgtacgctgcttggatgacaggtgcaccaaaatctcacgaatcaccactaaagaacttactcatgtaaccaaacaccacctgttccccaataacctatggaaataaaaaattaaaaaaaaaaagaaacaaggaagcttagatttgttctcactttatggcagaaagtattacatatccagttttagaaatgtttttttcttctccgtgggtctctcctgagtttttcttttgttttgttggtaytagaatgctaggtggtaaacttgagggtgggcagaaagttgaatggtgggctaatagcttagtcttgaagaatatacagttttcttctaagtttcatgagccgtttatattcaagcctaattagctaattagcataatgttactaagacaaagatcacaaatttcatttccctttatttaaatatgagctacttaacttgctctgttctttggtaacagaatttgctcctaattgtgaactcaccagtttgcaaattcatgctgttgacaccaggggtattgggaatttcagagaacggatcgatgcaaatcagtttctgctattaaaac

SEQ ID NO: 80491 - DNA, 738 bp, Homo sapiens
aaatattaaaaatacttaactcttagctgctaggattagggaagaaatatttccttaattttgcttggctattttctgtcttttcctttttttttttttgagatggactctcgctctgtcgcccaggctggagtgcagtggcacgattttggctcactgcaacctccacctcccaggttcaagcgattcttctgcctcagcctcccgaggcagggattacaggcgtatgccaccacgcccagctaatttctgtatttttagtagagacagggtttcaccacgttggccaggctggtcttgaactcttaacctctagtgatccacctgcctcggcctcccaaaggtctgggattataggcgtaagccaccgtccccagcctgcttggctattttctaaattttatataaggaatacatattgtatttttataatttatcatgagaaaaaaacattatttatcacctaaaaaatggtcttacctgcctaaaggagaaggaactagatcagctgaccccctgaaagtctaactcttagtgaatgaaacagtatccaggaaatagcatctttagaaaaactgaaggacatgtctacttcttgtgctctaagccttctgttctataacaaattcayctccatatttctcctgccttcattgctttaagctgtgacatttattccatatctatgtttcttcatactctctttgaaaaggggagaaaaccctcagatgaaaagag

SEQ ID NO: 80492 - DNA, 673 bp, Homo sapiens
tttttttcactccctcttctctctttcacacatatatttctctatttatttgatttctgcctatcttaactaaaataatcttagctcctttaacagtatagttccaaatctcagagagtaaaagttgatttcttactcgtctaatggatggggactccgcaggaccattcaggggcccaggctttctgtcctgtggctctgctgacctccaggtcttcagagttctttgcctccaggagtggatgagaaaagagaaagtatggcacatgggtgtgtttataggccaggtctggaacaggtctggaacagtgcccatcacttttgccctcactgcatgggctaagatgggtctacctgagcgtctaggaagagaagaaaataggtatttgtgagcaccttgtagctctgcctctctgccttcatttctgtcttttctgctgcttggctgcaaagctgcacatgtgctgggcaggactcagggaggctgagtaggaggagctacaggcaggtgctgcccatgtcaacaaggtgagttgagcaacaatgcacctgagagaccctagcacctacactaaccttcagaacatcgcacctgccacttcacctctgccttccaaatctcatgaaagtttctcttgcaaacccaacacasagccatataggtaagtggatc

SEQ ID NO: 80493 - DNA, 1646 bp, Homo sapiens
atgtggtacttcattacagtagtcctaggaaactgctatagtcaccaagcccatggtatagatggtgggcagatgagtgccaaggatgcagccctcgtaaactccatcctttagaggtcaggaagaagaggcaggtcctgcaaaagagacagaaaaggcacagccaaggaggtagaaagaaaaccaagagagtcagatgctctggagccaacatggacaaagtatttcgagaagaaaaaaagcttaaggcacttcaggtgagttggttacaatgaggactgagaactggtccttggacttggccatgtggaggtcactggtgactttaactagcccagtttcagtggaatgattgacatgcattagagaatgggaggtgaggaggtgcgaagaggaagtagacaataactactattgtccttgattttatagttggcaaagagcaaaaatgacttttctggtatagcaactttgtaaaayagccattactatttacagaaagataaactgaggctcagaagcattaaaagatctgtccaaggcccctggcagacagggactatagaaacctagatcttcagaaacaaaagtccatgctttttccatgtttccaaatggcagttgggatctgatgaataaaccttggagagggtcggcacaaaacttgttcttgcctgcactcagatagcatcagggccttcctaggaaacaactccatttaaagaagtatttcctcagcccttcccctgggccagtcactcaccccaccttgcccagtgggtaaaggtgcctccctcctcctcccaggtgaggggagtgagggggtgcacagggatggggaaccacatgctaagtggctagcaagtcaccttcttcttctccattctatatcctcaagtaggggttgaaaattcaaatgtctactggggctgggcaggtaatatacatgaataaaatgggcctgggatgggtcagtgggaaatgagtgagtctgtgggtgaactgggcatgaaggtcccacctaggctgggtgtggtggctcacatctctaatcccagcaccttaagaggctgaggcagcctcctgtcaacagagtgagatcctgtctctgcaaaaaaatttaaaaaaaaaaaaaaatagccaggtgtggtggtgtgtgcctgtagtcccagctactcaggaggctaagacaggaagattccttaaatccaggagttgaaaatgcagtgagctatgattgcaccactgtaccctagcctaggtgatagagcgagaccctgtgtctaaaaaaaaaaaaaaaggaaaacaaggcaagtccccacctaaaggtgtcaaattcatgttttaaaaactggatgtgacaccaaatgctggcaaaggtgtggaacaacatgaactcacatccattgctggtaggaatacaaaatggtatagccactttggaagagcttggtagtttcttacagcactaaacatgctcttaccataccatccagtaatcatgcttcttggtattaatataaatgagttgaaaaccaatgtccacacaaaaacctgcactcagatgtttatagcagctttattcataattgccaaaacttggaagcaaccaagatgttcttcagtaggcaaatggataaactgtg

SEQ ID NO: 80494 - DNA, 1646 bp, Homo sapiens
atgtggtacttcattacagtagtcctaggaaactgctatagtcaccaagcccatggtatagatggtgggcagatgagtgccaaggatgcagccctcgtaaactccatcctttagaggtcaggaagaagaggcaggtcctgcaaaagagacagaaaaggcacagccaaggaggtagaaagaaaaccaagagagtcagatgctctggagccaacatggacaaagtatttcgagaagaaaaaaagcttaaggcacttcaggtgagttggttacaatgaggactgagaactggtccttggacttggccatgtggaggtcactggtgactttaactagcccagtttcagtggaatgattgacatgcattagagaatgggaggtgaggaggtgcgaagaggaagtagacaataactactattgtccttgattttatagttggcaaagagcaaaaatgacttttctggtatagcaactttgtaaaacagccattactatttacagaaagataaactgaggctcagaagcattaaaagatctgtccaaggccmctggcagacagggactatagaaacctagatcttcagaaacaaaagtccatgctttttccatgtttccaaatggcagttgggatctgatgaataaaccttggagagggtcggcacaaaacttgttcttgcctgcactcagatagcatcagggccttcctaggaaacaactccatttaaagaagtatttcctcagcccttcccctgggccagtcactcaccccaccttgcccagtgggtaaaggtgcctccctcctcctcccaggtgaggggagtgagggggtgcacagggatggggaaccacatgctaagtggctagcaagtcaccttcttcttctccattctatatcctcaagtaggggttgaaaattcaaatgtctactggggctgggcaggtaatatacatgaataaaatgggcctgggatgggtcagtgggaaatgagtgagtctgtgggtgaactgggcatgaaggtcccacctaggctgggtgtggtggctcacatctctaatcccagcaccttaagaggctgaggcagcctcctgtcaacagagtgagatcctgtctctgcaaaaaaatttaaaaaaaaaaaaaaatagccaggtgtggtggtgtgtgcctgtagtcccagctactcaggaggctaagacaggaagattccttaaatccaggagttgaaaatgcagtgagctatgattgcaccactgtaccctagcctaggtgatagagcgagaccctgtgtctaaaaaaaaaaaaaaaggaaaacaaggcaagtccccacctaaaggtgtcaaattcatgttttaaaaactggatgtgacaccaaatgctggcaaaggtgtggaacaacatgaactcacatccattgctggtaggaatacaaaatggtatagccactttggaagagcttggtagtttcttacagcactaaacatgctcttaccataccatccagtaatcatgcttcttggtattaatataaatgagttgaaaaccaatgtccacacaaaaacctgcactcagatgtttatagcagctttattcataattgccaaaacttggaagcaaccaagatgttcttcagtaggcaaatggataaactgtg

SEQ ID NO: 80495 - DNA, 1942 bp, Homo sapiens
ttggttgctatggttgtattttttaattttggaaggattagcaattttttctttaaaaaattaaaatttgtatctctgatgctattagaactgggtgtaggctagatactgaagacagtttgtgggtctcacagtggtggtatagttgcctcctaaaggaagactgtaacagagaagtgctacacatcctgtcactttgcaagaaccagctcagatcctgtggaaccccaaatgacactcttggaatgtggctttataaactatgacaataaaataaagaattattaaaartaatgatacaaagaagacacacagccttggctctgtctggaaacatataaaatggtatctcctcaagttttgaaggaacagtgtgctcttttgaaagacataagggcatgtaagtggctttacttaaccttttaaatgaaaactttttatcaactgcagagaacaagacattctattttgcttttctttttttgagacagaaaaaacatttcccattaattcaagagtaggaggaattcacactattttcattctctgcaactttgccttttagcagtttgttgtgattatctttacatactcctaagggtagtcacccagcctgggactaacagtttaccccagcatgaggttcaggatggaatgcatacaggacagaatgtcagtgtgcttcctggactcttgatcacctgagtttctggttgtagaacaagtatcctgaaatcacaagctgtgttggcattctggaaatgctagagagagcactatggcttgtttcaaaattgatagcagtataaccagctgggatctgaacagaatcccactcactgcagcctgggctgggctgactcagctgaaactgcattttctgggtctctggtgctatcagaaacaggaggtactcatctctagtgcaatgggcaaaacatgtcacctgaagtccagaggtctgagttaaagtctcaacacaattgttaatagcaggatgcaaatgggtaagcaacgtaatccatccgggtctcagtttcatcacctgtgaataaacctgaggtttattaatgatcctaacctcaaagaattgttaagaagatcaaattacaatctgtaatgtgatataacatagtgtctaaaagcacagatttttgaagccaaatccttatttattgagtaaacaaatatttattgacacctactatgttccaggcattctgctggtttatagcatagtggaggagacaggaagtaaacatttaaacagcaatgagcagtatcattccaaaatttgtgagggctgtatagaaaagagcaaggtttggtgagagaatattgggaaggggaaacctcctttagattgggtggtcagggaggcttagagaggtaggttggctctgcctaagtgtgttaaccttgggctagtcaaaacttacgttaaatttggttggagaatggctgtgaaactcagaaggaaatgtgtctgaagtaggtacatatctcagtctaccaactcatatgtacaagaggtgtaacgttctctgctcttccataagtgaatttaccttattttgtgctgccattgttctaggagaccaaagctaagcgaatttactttgtgtttggtgactaggggcaaaaggcataaagtttaaccgcagtgtatctgggatctcctttccatgggaggggttaatactaagccagcatttttaccgacacagcccccagtatatcacccattgctttttgtacggtgaatcctcagtaatgttcaataagcgaacatgtgaaaacactcccgttgtgacagaggacataatgacattatctctgacattttcccaatctgttcttccaaattttaggggcctttgtagacttccctcaagaggaagtttctctgccatgattccttgcctgtcagtcaccaggaaag

SEQ ID NO: 80496 - DNA, 1942 bp, Homo sapiens
ttggttgctatggttgtattttttaattttggaaggattagcaattttttctttaaaaaattaaaatttgtatctctgatgctattagaactgggtgtaggctagatactgaagacagtttgtgggtctcacagtggtggtatagttgcctcctaaaggaagactgtaacagagaagtgctacacatcctgtcactttgcaagaaccagctcagatcctgtggaaccccaaatgacactcttggaatgtggctttataaactatgacaataaaataaagaattattaaaagtaatgatacaaagaagacacacagccttggctctgtctggaaacatataaaatggtrtctcctcaagttttgaaggaacagtgtgctcttttgaaagacataagggcatgtaagtggctttacttaaccttttaaatgaaaactttttatcaactgcagagaacaagacattctattttgcttttctttttttgagacagaaaaaacatttcccattaattcaagagtaggaggaattcacactattttcattctctgcaactttgccttttagcagtttgttgtgattatctttacatactcctaagggtagtcacccagcctgggactaacagtttaccccagcatgaggttcaggatggaatgcatacaggacagaatgtcagtgtgcttcctggactcttgatcacctgagtttctggttgtagaacaagtatcctgaaatcacaagctgtgttggcattctggaaatgctagagagagcactatggcttgtttcaaaattgatagcagtataaccagctgggatctgaacagaatcccactcactgcagcctgggctgggctgactcagctgaaactgcattttctgggtctctggtgctatcagaaacaggaggtactcatctctagtgcaatgggcaaaacatgtcacctgaagtccagaggtctgagttaaagtctcaacacaattgttaatagcaggatgcaaatgggtaagcaacgtaatccatccgggtctcagtttcatcacctgtgaataaacctgaggtttattaatgatcctaacctcaaagaattgttaagaagatcaaattacaatctgtaatgtgatataacatagtgtctaaaagcacagatttttgaagccaaatccttatttattgagtaaacaaatatttattgacacctactatgttccaggcattctgctggtttatagcatagtggaggagacaggaagtaaacatttaaacagcaatgagcagtatcattccaaaatttgtgagggctgtatagaaaagagcaaggtttggtgagagaatattgggaaggggaaacctcctttagattgggtggtcagggaggcttagagaggtaggttggctctgcctaagtgtgttaaccttgggctagtcaaaacttacgttaaatttggttggagaatggctgtgaaactcagaaggaaatgtgtctgaagtaggtacatatctcagtctaccaactcatatgtacaagaggtgtaacgttctctgctcttccataagtgaatttaccttattttgtgctgccattgttctaggagaccaaagctaagcgaatttactttgtgtttggtgactaggggcaaaaggcataaagtttaaccgcagtgtatctgggatctcctttccatgggaggggttaatactaagccagcatttttaccgacacagcccccagtatatcacccattgctttttgtacggtgaatcctcagtaatgttcaataagcgaacatgtgaaaacactcccgttgtgacagaggacataatgacattatctctgacattttcccaatctgttcttccaaattttaggggcctttgtagacttccctcaagaggaagtttctctgccatgattccttgcctgtcagtcaccaggaaag

SEQ ID NO: 80497 - DNA, 540 bp, Homo sapiens
gaaaatgatgtaaggagaaataaaaaccacccataattccacagtctggaaagaagactgctaaccttgtggtgtattttcttatagacattcaaacacacacacacacacacacacacacatacacatatactgtttaattacaaataatgaaaatgaagttgaatacttttgtcattattcacatacaattatatcaagatcatttttatgtcattgcaattctttgaaaatataatttttgatgatcataaaatatacaattgaaagataaattacaaggtattcaataactttcctaataaatattaagtttttccatgctacttttggctccaataactaatcttgctgtggtacagatggtcttactgggtcaaaaagcaagaayaatttaagattcttgtccgggtactcaaattgctttcaagaaagttgtgccaaattatatttccactagattgagttgacaatgttggtttatccctacctctttagcattgaatattttgtctttttcctctctcgtgaaacttgttt

SEQ ID NO: 80498 - DNA, 540 bp, Homo sapiens
gaaaatgatgtaaggagaaataaaaaccacccataattccacagtctggaaagaagactgctaaccttgtggtgtattttcttatagacattcaaacacacacacacacacacacacacacatacacatatactgtttaattacaaataatgaaaatgaagttgaatacttttgtcattattcacatacaattatatcaagatcatttttatgtcattgcaattctttgaaaatataatttttgatgatcataaaatatacaattgaaagataaattacaaggtattcaataactttcctaataaatattaagtttttccatgctacttttggctccaataactaatcttgctgtggtacagatggtcttactgggtcaaaaagcaagaataatttaagattcttgtccgggtactcaaattgctttcaagaaagttgtgccaaattatatttccactagattgagttgacaatgttggtttatccctacctctttagcattgaatattttgtctttttcctctctcgtgaamcttgttt

SEQ ID NO: 80499 - DNA, 648 bp, Homo sapiens
caatccttaattttttgatgtccttctaccatgtgatttttaacaataagtctctagcattctggataaaatcttctatctatcttctctggataaaagttcatagttcaagctttttatcccactaaaaaataattttcaatatgccattgctttaaggtcttccacttaaaaattgagtaaaaaaattatatgttggcttctgtgctgggatgttatggggtgatatctattgaaacacatttgtagtttaactaagaaaacaccttttcccaggggttgtttggggtaaacagacctcctgtatgacctcgggtatccataaacttgtgcrggaaaaagtaaaaccctctttcctctaccatgaaaataaaattcagattttcctcttattatataggtcaaaaacaatctaacatattaggagtatctgtgattgtctgagtgacagaaagatggatattgttcaaatccattttacccattgcagataaatgctattggtgctaataacttcttcaaaattacgatagcagacccactgctgtatgtttttaagtgagttacttgataagtacatatattaccatatcacatttttagcattttgataattatatcaatacttttttctttgaaattttatat

SEQ ID NO: 80500 - DNA, 648 bp, Homo sapiens
caatccttaattttttgatgtccttctaccatgtgatttttaacaataagtctctagcattctggataaaatcttctatctatcttctctggataaaagttcatagttcaagctttttatcccactaaaaaataattttcaatatgccattgctttaaggtcttccacttaaaaattgagtaaaaaaattatatgttggcttctgtgctgggatgttatggggtgatatctattgaaacacatttgtagtttaactaagaaaacaccttttcccaggggttgtttggggtaaacagacctcctgtatgacctcgggtatccataaacttgtgcaggaaaaagtaaaaccctctttcctctaccatgaaaataaaattcagattttcctcttattatataggtcaaaaacartctaacatattaggagtatctgtgattgtctgagtgacagaaagatggatattgttcaaatccattttacccattgcagataaatgctattggtgctaataacttcttcaaaattacgatagcagacccactgctgtatgtttttaagtgagttacttgataagtacatatattaccatatcacatttttagcattttgataattatatcaatacttttttctttgaaattttatat

SEQ ID NO: 80501 - DNA, 660 bp, Homo sapiens
aattatggccctggaatagatgaagccttcaaatgcaggccgaaggttctgaggcatcctccaagatgctctggggccatcgtgcgagccaggctggcaggtttggagacagtcagaggagaaaacctcttccatgtcatcagctccgaactcctaacgcccctgagaccaccctcctttacagacattgtcaaagccaatcactgtatgagaggaggaaggaaagggaaaggaaattagggcatgctaataaagggactgtgggagcttgaggaaagattacgggttaaaggtaaatgtaagaaaaaacaggccrgatgaagtggctcatgcctgtaatcccagcactttgggaggctgaggcaggtggactgcttgagcccaggagttcgagaccagcttgaacaacatggtgaaaacctgtttctacaaaaaataccaacattagccggctatggtgacgtacgcctccagttccagtgatacagaagggctgggctcctggctaaaccccagccttaagcctggaaccgtggccctaagtgaaaacagctgatcccatttttctgcccaaatgtggctttttgggcctcccccgcccctatcctgtgcccataaaagacttcagctggcagaacaacacaagtggctgagtgtcgc

SEQ ID NO: 80502 - DNA, 715 bp, Homo sapiens
ttgtacctctttatccagtggttttccttttgagggattacaagaggacacagattttctttttccttgaacttttcatcatttgtaccagtctctatagtcacttcagttgtttragggcttctctttttattggcttagaagcttagcattttccttctctcttttccacatcatgtgcaacatgggaaggagtaagaagtgtctgtccttgggtggaaagctagaactttagcagcgtgtctctaggacagcctctgccttcactagcttgaggtgggtctgatcttcattattaattgctcctctttttggttgtcttcgacaggtatttccagccttaaatttagtagatatcttttttttttttcccatactctcctaagtaggaaggagtgtactctgtgcatccctgtggctcttaatgctttcaaacgccagctcatgaatcttcaaacttttggtctttctaactgatgctttgcttccctggagaaaactaattactttattattatttttttcatcattgtccttcttgtttctacatctggtatatgccactcttgctgcagctcagtagcatgtcccagtccaagtgtattagtctgttttcatgctgctgataaagacacatctgagactgagcaatttacaaaagaaagaggtttaatggactcacagttccacgtggctggggaggcctcacaatcac

SEQ ID NO: 80503 - DNA, 1474 bp, Homo sapiens
cccaaataacatggaaagcaaagaacaactgtcctgctgaacactgttattctgaattttattctttaaactttttgcccagttagtcatacgtctgaaaatgcatagagtatcctcttaagcaagagtgtgactcaaactctcactacatacttgcgaaagaactttggcatgccccatctctgagaaggctggtggggttgaggctggaccaaatagtggctgaatgccttcatgaacatggaggtcactcttgagatcaaggctgggtggatctgaagggtggggcagcccactgagcaccacgtaaagtcagaggggctggaatgttggggaaaaattgaacagacactgaaggagtcaatctgtggttgctgccaagtgtctcctcctcttcttctaccataaatttggaatctgcgtttatctctttcacttcccccactccagtccttaccggagtctctatttgttctgtttgcagtcacatttcattccatctcccgcactttaaggcagtgtctttatcataaatttggccacttccatcatactacaaaccttccagcttgtacagtaccccttataatcctacaataatttccaattgctttcccaagtgtttcatgaagcttctctgtaaggctttctcatgtattttcaaacctggataccttacctaytctttccacaatactcatcaaaattgtcaatcccaaataaacagaccatgtgtaggtttgctgtgaaataatggattggatcctttaaaaaagactaaaaattactataagaagatgcaaaagcaatggagttgatagcactgggatcaaaaaccaatgtaatagctgtcactatagaatgactgaagatgaactaatagattcctctcagtggctgttcaaaatggtacttttaagagtacctttaaaaatttacttttcatgtttaatggttcataagaaatacatgatcattgtagaaaattagaagacatagataaaaaattatctatgactccatcatgagactgttgatgtttctgatgtatatccttcaagacttaatagtaatatttaatatatttatgtatatgtatataatatacacacaaacacatgtgacaagatattctgagtagggcagagctaagattcagatacatttggtatatgttatttggtgtcaccttctacctgtttcctgctcttctcaaatacctgtttgttccacatgatctacatggagcctgaggagtcttatgggaaaggaattcaaaacatgtccaaatttgaggttctaacatgtatagttatgtttggcaaacttagtgtgtatatgtttggagtgatgttcactccatagaagccagtattaaagaagatctatgaagtccctgagaaagaatccatcctaaaagtcaagctaattggggcaaactcagaaacagggactgaaggagaaagtcatgatt

SEQ ID NO: 80504 - DNA, 1557 bp, Homo sapiens
ggctgacttacagtgtgaattcactcacatcttagccactttaaattaatgagccacataaaaacccatgaggcactactattatcaactgtgcctcaatatactgcatctgttccttccttgctctctgtttctttttgtgagctcatttctagtttcatcaatattatctattcttgtgatccctgttctattcaacattagatatgcatttttaagctacccaattgtttaaaagggaactaaagaaacataaaatgggctgaagaatacattataaatgcaaactttattacttggcaaaggttgtaaaaaatggtggttatatgaaaataaaaaaattagcactcatacactggtgggtgtaaattgatatagtgtttctagaaggtaatcgggaaacaaatatcaaaagccttaaaaagcattttatgcatacaattgtagctctgtgaatttatatggagaaaataactgaacaagtacacaaaggttaatttaaaagtgtgtttattgcagcattatttataagtagaaatggaaacaaacagaaagttacatgatagagaattaagtaaaatagggttctatgtgcatatggaaatatatgcagctattaaaatgatgacatgagtttgtgtttacagtaatggaagaagatataatgttaaataaaaacagcaggttgcagagtaattggtatagtatgatcccatctcagtaataaaggcatttgcatgtctctaaccagagtggaaaagctggatctcatttctattggcatgcatgctaagcatgggagaaaatgacaccagagagaagtgttagggacacttgtgcccagggaaggaaaaggaggaagcaggagggaagaccgtggctggcctatgtaatggtttgatccctataaagatgggggcattctctccagtttcaaccgaaagtagcacatgggtctggaaccctgagcatgctgagagtggaggtgctgtgttcagcctatgagagactgctctgggagcaccaagagagaatatctccgacaggagactggcttccaagagcagtggcagcaggcagtgtgttgcagaaacataaaaaccctcttaagaaactggcatacaggcattcctccctaaagcaagtcacatggccattgcaacgtcaggaggagaggaaatacactctacctctttagcagcactgggacatgtagtcatatggcaaaaggcatggatttaggaaagggtaaaggattgagatcattattgcaatctatcacacctgcattttctcatattttggacaataatcccataacacttatgtatttatgcccattaaaataggtgatatgttagattgttacactaatggttcccaaaraaccatgttgcccagtgtttgggcctgtattggtttcctaaggctgttgtaactaagtaccacaaactaggtagcttcaaacaaaaatgtattctttcttagttctggagctcaaaagtctgaaatcaaggtgttggtagggccatgctccctttgaagcctctaggagga

SEQ ID NO: 80505 - DNA, 1557 bp, Homo sapiens
ggctgacttacagtgtgaattcactcacatcttagccactttaaattaatgagccacataaaaacccatgaggcactactattatcaactgtgcctcaatatactgcatctgttccttccttgctctctgtttctttttgtgagctcatttctagtttcatcaatattatctattcttgtgatccctgttctattcaacattagatatgcatttttaagctacccaattgtttaaaagggaactaaagaaacataaaatgggctgaagaatacattataaatgcaaactttattacttggcaaaggttgtaaaaaatggtggttatatgaaaataaaaaaattagcactcatacactggtgggtgtaaattgatatagtgtttctagaaggtaatcgggaaacaaatatcaaaagccttaaaaagcattttatgcatacaattgtagctctgtgaatttatatggagaaaataactgaacaagtacacaaaggttaatttaaaagtgtgtttattgcagcattatttataagtagaaatggaaacaaacagaaagttacatgatagagaattaagtaaaatagggttctatgtgcatatggaaatatatgcagctattaaaatgatgacatgagtttgtgtttacagtaatggaagaagatataatgttaaataaaaacagcaggttgcagagtaattggtatagtatgatcccatctcagtaataaaggcatttgcatgtctctaaccagagtggaaaagctggatctcatttctattggcatgcatgctaagcatgggagaaaatgacaccagagagaagtgttagggacacttgtgcccagggaaggaaaaggaggaagcaggagggaagaccgtggctggcctatgtaatggtttgatccctataaagatgggggcattctctccagtttcaaccgaaagtagcacatgggtctggaaccctgagcatgctgagagtggaggtgctgtgttcagcctatgagagactgctctgggagcaccaagagagaatatctccgacaggagactggcttccaagagcagtggcagcaggcagtgtgttgcagaaacataaaaaccctcttaagaaactggcatacaggcattcctccctaaagcaagtcacatggccattgcaacgtcaggaggagaggaaatacactctacctctttagcagcactgggacatgtagtcatatggcaaaaggcatggatttaggaaagggtaaaggattgagatcattattgcaatctatcacacctgcattttctcatattttggacaataatcccataacacttatgtatttatgcccattaaaataggtgatatgttagattgttacactaatggttcccaaaaaaccatgttgcccagtgtttgggcctgtattggtttcctaaggctgttgtaactaagtaccacaaactaggtagcttcaaacaaaaatgtattctttcttagttctggagctcaraagtctgaaatcaaggtgttggtagggccatgctccctttgaagcctctaggagga

SEQ ID NO: 80506 - DNA, 1557 bp, Homo sapiens
ggctgacttacagtgtgaattcactcacatcttagccactttaaattaatgagccacataaaaacccatgaggcactactattatcaactgtgcctcaatatactgcatctgttccttccttgctctctgtttctttttgtgagctcatttctagtttcatcaatattatctattcttgtgatccctgttctattcaacattagatatgcatttttaagctacccaattgtttaaaagggaactaaagaaacataaaatgggctgaagaatacattataaatgcaaactttattacttggcaaaggttgtaaaaaatggtggttatatgaaaataaaaaaattagcactcatacactggtgggtgtaaattgatatagtgtttctagaaggtaatcgggaaacaaatatcaaaagccttaaaaagcattttatgcatacaattgtagctctgtgaatttatatggagaaaataactgaacaagtacacaaaggttaatttaaaagtgtgtttattgcagcattatttataagtagaaatggaaacaaacagaaagttacatgatagagaattaagtaaaatagggttctatgtgcatatggaaatatatgcagctattaaaatgatgacatgagtttgtgtttacagtaatggaagaagatataatgttaaataaaaacagcaggttgcagagtaattggtatagtatgatcccatctcagtaataaaggcatttgcatgtctctaaccagagtggaaaagctggatctcatttctattggcatgcatgctaagcatgggagaaaatgacaccagagagaagtgttagggacacttgtgcccagggaaggaaaaggaggaagcaggagggaagaccgtggctggcctatgtaatggtttgatccctataaagatgggggcattctctccagtttcaaccgaaagtagcacatgggtctggaaccctgagcatgctgagagtggaggtgctgtgttcagcctatgagagactgctctgggagcaccaagagagaatatctccgacaggagactggcttccaagagcagtggcagcaggcagtgtgttgcagaaacataaaaaccctcttaagaaactggcatacaggcattcctccctaaagcaagtcacatggccattgcaacgtcaggaggagaggaaatacactctacctctttagcagcactgggacatgtagtcatatggcaaaaggcatggatttaggaaagggtaaaggattgagatcattattgcaatctatcacacctgcattttctcatattttggacaataatcccataacacttatgtatttatgcccattaaaataggtgatatgttagattgttacactaatggttcccaaaaaaccatgttgcccagtgtttgggcctgtattggtttcctaaggctgttgtaactaagtaccacaaactaggtagcttcaaacaaaaatgtattctttcttagttctggagctcaaaagtctgaaatcaaggtgytggtagggccatgctccctttgaagcctctaggagga

SEQ ID NO: 80507 - DNA, 698 bp, Homo sapiens
tgtttaacctgaaaaaataaaataaaataaggtaatagcttcagggaggaggaggcaagaaaagataaggtagctgtgtttggaagagcaaggcaagagttacacagctgcacagccaagcagccatttgtaataactccataatacacgtgccagagacacacacctcccacctaggagaagaggagagtaatgcccctggagactcagagatacatgtctcacgtcagaattaaggaataagaagttgattgtacattaggttgggataaatggatgaatgcaacaacaaagaagattttcccttcttaaagttgggagcagagttatcactcatctttatttcctcctgactttctcagtttgtttggaatgctgtgcctggcccaaaaacattatttatcattcatgaaaagaggaaacagatctctgtcctgaccaggctgataggtctatggacacagcctagggatatcagagacaccaggaaacatttttaagaacccacatgtgctgagggttgtcccaagttaatgaawtagatgctcttcctgcccctgagaaggttacatctagaatctcatgacagtctataggtctttatgtagtctataggtccctcatacatctatctgaagttatttcatgagtctgggaaacaacatttgaaaattgtgagttaatagtaaaagagtttt

SEQ ID NO: 80508 - DNA, 804 bp, Homo sapiens
cctccattcctactgatacaactataattatttcgtggtttcagtatcttctccggtaaccctatgcatagtattttttaaatagtgagataaatgtgtgtacatgtgtatgcacgtgtgtgtgttaggtgtagggtggggaggaaartctctcaggggagtgccagatctggctttgggtccattcagatttttctgagtatggacaacaaagcagatgtatccaaagcactagtatttatagtgcaacctgtttgtgcagcagaaacaaattggtcctggtaaaatgcagtgggtagaattggatgtggcttattggctttaggagaacaagaggcaatgctatctccttgggtgataatttttttcctttagagtgatcatgtagaaccttcctaacttgttctttctgctttctattttccaaatggaagttacagtggagaacaggactcaattgccttgtagcggtttgagaccctaattagttttgctcaactcactggccaatttgaatcttaagcaggaaatagagaaatcaaatacttcggcagtgcttcttacatcattaactatagtattactgcaaaattctttagtactataattaataaacactttcagataattttctcacttgatttttcccatgaatacaggaaaaccagcattgtccccattttgtcatatatggtagcaaagttaaaagacatgataaatagcacccagctggtaactgttggatctgggatgagacccaggttgtctaattcttatattgagctttattttagtataccagga

SEQ ID NO: 80509 - DNA, 808 bp, Homo sapiens
ctgtggttataataaaactaagagacacataactttaaagagcagccgaggtttgatgctttccagatgacgtggtcaggcaaagtgatctctcaatctgaagggcacaggtgctcaggtggacagcgaggacagccagattcacttcacactgaacattccggccaagatctaacatttaccaaatattgaaaatacatgaaactagaacttgtggaatgatgtttatggactacagattagtgtttatgtgcatgcacatgtataggactaagggggtcttgatataatagactaactttgcctatagactttataatggtctttcttggcctcgagaattcaactgaaagttctgaatattcaaattacttttgaaattaaaacaattattttttagtttgtgactgatgtgatgaattaagaatataatctttattctatggactttgaaaccattctagactcaaaggcattccccaaagaggagttacacagaaaggggcaaagaggtctaatatttacctgtggtggtttcataaagtgtcattgtggcaaagctgaactacacttcccagaattcccctttctgttttcagaaagggtgggccacaagaggaagtgggagatttggaggagggaagtgaagcagtcgccattttatagstcagcatgttgtcactaatcggctgactcccttcaatggtgtgaggtagtagctaggcttgcaactgcttcacagtcccctcgatcctccttcagcttcttcaactcctgggagagtagacatgtttagctccataatgaa

SEQ ID NO: 80510 - DNA, 504 bp, Homo sapiens
ctgctttatgaagtcttagtgcttagttcctctgtccctgcttccacagtctctgcagctcctgaagaaaactgatcctacmtttgtgtgtgtatatatatatatatttaattttttttttttttttttttttaaacagagttttactctgtcgccaggctggagtgtagtggtgcgatctcagctcacctcaacctccacctcctgggttcaagtgattctcctgccttagtttcctgagtagctgggactataggcatgcaccaccatgtccagctaatttttgtatttttagtagagacagggtttcaccatgttggccaggatggtctgtatattctttactctctgtctctctttttaagagacagagtctcactctgtcacccaggctggagctgagtggcttgatcatagctcactgcagcctcaaactcctgggctcaagtgatcctcctgcctcagcctctcaaagcactggggttacaggtgtgagctactgca

SEQ ID NO: 80511 - DNA, 734 bp, Homo sapiens
aaactaaaaagacactacaatgaagagcataggctattttgggttttgtgtttgtttgttttttgcactttataagctatgccaacactggatatattttcacattttataatgtgaaataatgagctatgtttatacaaagtaaaagtgctttagagttggaaacttgacttttattttcttagctgcattctatttggttcatcaaagacatggtaccagctgtttcattatgtccatatcattaggcacaaagcccttgtatgtgaatcaaggtagatttgttttatgtttgacttactttgaatggagaaaaaaccaagagtgctcatgagctacttagatggtgcagaaatgcttgaaaagaaagccatacatggattgctagttattacaattgtttaaaaaagtataattttgagccagaaacagttgttatatgtgaactgcttatttgattaattataatagtagatatgatgacttcaaggcttaattttttggactactaactttttttttttttttttttttgccatgaaracaaactaaaaaaatgttttggggccaattaaaaatcattctgtgtcatttgttctaactataaatatggtatatatacttactaaaagttaaaatattaaacatacaaacaaaaaccacccaaaatctcacatgcaggatgggttacatttttaaatgataaaagattgtttcttcactttgttggatcc

SEQ ID NO: 80512 - DNA, 734 bp, Homo sapiens
aaactaaaaagacactacaatgaagagcataggctattttgggttttgtgtttgtttgttttttgcactttataagctatgccaacactggatatattttcacattttataatgtgaaataatgagctatgtttatacaaagtaaaagtgctttagagttggaaacttgacttttattttcttagctgcattctatttggttcatcaaagacatggtaccagctgtttcattatgtccatatcattaggcacaaagcccttgtatgtgaatcaaggtagatttgttttatgtttgacttactttgaatggagaaaaaaccaagagtgctcatgagctacttagatggtgcagaaatgcttgaaaagaaagccatacatggattgctagttattacaattgtttaaaaaagtataattttgagccagaaacagttgttatatgtgaactgcttatttgattaattataatagtagatatgatgacttcaaggcttaattttttggactactaactttttttttttttttttttttgccatgaaaacaaactaraaaaatgttttggggccaattaaaaatcattctgtgtcatttgttctaactataaatatggtatatatacttactaaaagttaaaatattaaacatacaaacaaaaaccacccaaaatctcacatgcaggatgggttacatttttaaatgataaaagattgtttcttcactttgttggatcc

SEQ ID NO: 80513 - DNA, 637 bp, Homo sapiens
cagcaatgctctgaggaatggaattattggcttgctgggcagcccctcattgaaccaggcggcaaaggagatttataccacagagctgatgttttcattagaattcacacagaccgtatttagaaagtggatatctggaagcttgataatattgtgtgttcataatctgacactgtaatatagtggctttaaaaagaggaggggaggctctcgccttattcatttgatatttacattttattagtgttattatttggcataattacaaagaattagcaatgttaattaatgctgcactaatgcagtcataattacttgcatttattctagaacataagtaaatttataaatttatttatttggaactcaagtcacttcttggattcatgttttttaaaaatgaaatctcggccgggtacgatggctcatgcctgtaatcccagcactttgggaggccaaggggtgtggatcacgaggtcaggagttcaagatctgcctggccaagatggtgaaatcctgtctctactaaaaatacaaaaattagccaggtgtggtagcagtcacctgtaatcccagctactcgggaggctgasgcagaattgcttgaacctgggtggcagaggttgcagtgagaata

SEQ ID NO: 80514 - DNA, 599 bp, Homo sapiens
tgaggcatgtccaaccccccttcacatcatagcctgaactgggttttcaggttgactttggaatgcccttggccaagaggagaggtccattcagatggttgagaggggcttagaattttatttttggtttccagtacccatttatattcctgtgctagagtatcaatgttcttgtctcactgtatcttcaccaacagttggtagtaccagactttaaaattcttgtcaatctcatgggcaaggaatattttgctgttacgtttattggtatagctgattacttagtgagattgaacatcttttaatattggtaatttagatttccttttctgtgcattctgtattcatatgctttgcacagtattcttttgagttgttttattcttrctaatttgtatcatattaactaatcctttgttatgctcatcgaagataccttctcaatctttttttttctcattttccttatggcaactttggaaattaactatggaatatgtttgaaaaattggaatgttttcatttttcattttcagaagtgattttagtaataatacatgcttacaatccatgctttccgatgaggcagagagggctaa

SEQ ID NO: 80515 - DNA, 1261 bp, Homo sapiens
catcagctacctccttgagggggctgctctgtgcacagcaggctgtttaacagcaacctgggctctacccactgggtgccagtagctcctcccagcctctagtaacaaccaaaaatgtctccactcatagccaaatatcccctgccagggtatgccatctctcatatttaactactggtgtatagtcaaatatattaaacatttttaatgctttaacatttctgttagaaaatttacatctatattagacgttgatagttttccttcattttaaattctctgacataataatgttggaagttttgtttgaaagtgatgacacattaaaaatcttcataaagattcgctttattctcagcatttagtgagatgtccctgtgacaagatgttccaaatatgttccaaattgtttctccccacatttcactgacttttccataaactgacttgggatcaaaggtgacaatataggtgtgaattttctgatctagaaaaactagtactttctctcagaaagctcacagattagctacagtgggctgtttgtattgtaatgcaaacacaccacataaacaatggctcaacagagcaggaatttcttactcaagtaaagcacaaatggagggttttagcgtagaggtgggaagacttctgctctcttcagtgaattctttctgtcctaaatcatggtggacttctctcacgcgtggctcccgaggccaccttgggggtcatgatctgcacttcagtccgaggtgccatgagaaatcagggatgacctttttcattgccaggcctggaagtaatgttcaccacttgtgtccatattctcctggacaragctgttgcatgaagccatccataatggtgggaagctgcgaaatgtgtgtcggagaaaagaggatgtttttgtggaaacacatagctggtctctgacacacagaatttctcccttctatgagctatctgatgctttttgaggtatgatttgtggcaaaaggattttccacactcaacacactgatcatgtatttttccagcgtactctgatgtacagtgaggattgacttctggtagaattttcctacaccctttccactcacatggtgtctcacctgtgtgagttctctgatgtgagtcaggactgacttctggtagaagttttccccacatccactacattcatagggggttcacctctttgtgagttctctgatgtatagtgaggactgacttcaggggaaaggttgttccacatgca

SEQ ID NO: 80516 - DNA, 581 bp, Homo sapiens
aattatttttctaataatggagtgtggagcccatgggctgtgggtgtgtctggctgtggagtgaagctgtgaccacagcctatgtggggcaggatgggatgacatgaggcccctcccctaaaggagaccctgcccactgagcacggagggagaagaggttaggggtcccggggggacttgaagatgctgctggctgactcgggccccacttcccagggtttccttccttcctcctgccataccctcctggagaaagggcctttctggcttctctgggtcctggatactaagcctgctctgcactygtgatggacattaggaggggtctttaaaggagaggggggcaaacatagagcactccacgttttgtttctgaaatagcatcctcttctaccacctgtgtacacagttctaaggaaagtgactacaggtgtgaaggttactttgacggtcctggaatcaatgtgagttgtgtccttccttctctccctactgctcccactctgtcgccttccaagccaagcactagcgcagtcacacacatatgtgcacaggcacatacatgtatcataagtacatac

SEQ ID NO: 80517 - DNA, 1035 bp, Homo sapiens
agggcacaggagtcggaaggactagtggcaatagtgatgaaaggacctccttatcatgctggcaatgttaattacccaggtgtaggaagccatacactgaggcggaagatcgcaagtcagagtggccggcaggcacaacctcctggcacaccagaggcaggtcttcaatacccactggtttccccaacaggctgcgtaagggaccctgagccacagtgagttggtcaaatgctcctgacagtgtggagaaaccaacaggcaaaacgtgggtgcaaaagtgatgagaccccacactttacactcgtggtgacaatgaagctattaagtaacagcttctcaacctatgctgtttcctgttggatgcacataatccatttgcactgcagacaattttaggatgtggtttacagtaaggtggatggtaccttatggcaaaaatctctcagaaatttatgtgtggttttaaagtcattccagtcctagcacgttgtgcttttcagagacgccatagctgtttttccctttgtaatatcaaagcagtaatatgttctctggaggcctgttgggtgaatttaatggaatcaagttaagtaggtgccagaaccattgctgttttccctccatagccctgccacccactgtaaaaaggttgatgagattacttaatgatttccaattaagttgtatttccaaatatcatgatttccattttaatgtagttggtatggagctctgtgagtgtgtgcttcttttattatggatcacgttcagcttctttttatttgcctcctagtcataatagtaaaactctactcctctactccgaggagtccctaccacccatctcatcactttccagcccagcactcttcatgctcattcatttaaagcattcaacattgtgtaaatgaatcttggaaggcmaaagctactgaatttagcgaatttgtggaggcattgccacaaatcagccaggtgaagtttcacacaatcgaagactgcacaactcctagaaggcagcactatgctgcaaac

SEQ ID NO: 80518 - DNA, 548 bp, Homo sapiens
tgtgcactccgccgctgcgggcaaattgaggacaggaagcggaccgcacccacttctctcccaggacttgggcaatgttcaacacaggtggtcttccaaaggttcatagaaaatgcacatggtgaagaaacgatgcatggatttccactggtttgcactaaaataaacttgtcctaacttctgataacctttctgaactagatctagtttgaggcactaagaaggatgagacatccactgaaaaggactcccgtcagagcaacatgaattccacgaaaattgcagcaagaggaaacatcaaatttatggtgaagcttgggtggaagattgaagaaatcattgacgttttaagaaaagcttgtaaggacactaccccraagaaatgaactctttacgaatgtatagcttgtttcaagaagaggtgagaagatgtggaagatgaatcctgcagtggctgcgaaaaccactgtgcccagatcagctgcagttacgacgagagctatcagtggaaattttaaacaggagggatcacgatcctgacgcatccc

SEQ ID NO: 80519 - DNA, 548 bp, Homo sapiens
tgtgcactccgccgctgcgggcaaattgaggacaggaagcggaccgcacccacttctctcccaggacttgggcaatgttcaacacaggtggtcttccaaaggttcatagaaaatgcacatggtgaagaaacgatgcatggatttccactggtttgcactaaaataaacttgtcctaacttctgataacctttctgaactagatctagtttgaggcactaagaaggatgagacatccactgaaaaggactcccgtcagagcaacatgaattccacgaaaattgcagcaagaggaaacatcaaatttatggtgaagcttgggtggaagattgaagaaatcattgacgttttaagaaaagcttgtaaggacactaccccaaagaaatgaactctttacgaatgtatagcttgtttcaagaagaggtgagaagatgtggargatgaatcctgcagtggctgcgaaaaccactgtgcccagatcagctgcagttacgacgagagctatcagtggaaattttaaacaggagggatcacgatcctgacgcatccc

SEQ ID NO: 80520 - DNA, 548 bp, Homo sapiens
tgtgcactccgccgctgcgggcaaattgaggacaggaagcggaccgcacccacttctctcccaggacttgggcaatgttcaacacaggtggtcttccaaaggttcatagaaaatgcacatggtgaagaaacgatgcatggatttccactggtttgcactaaaataaacttgtcctaacttctgataacctttctgaactagatctagtttgaggcactaagaaggatgagacatccactgaaaaggactcccgtcagagcaacatgaattccacgaaaattgcagcaagaggaaacatcaaatttatggtgaagcttgggtggaagattgaagaaatcattgacgttttaagaaaagcttgtaaggacactaccccaaagaaatgaactctttacgaatgtatagcttgtttcaagaagaggtgagaagatgtggaagatgaatcctkcagtggctgcgaaaaccactgtgcccagatcagctgcagttacgacgagagctatcagtggaaattttaaacaggagggatcacgatcctgacgcatccc

SEQ ID NO: 80521 - DNA, 548 bp, Homo sapiens
tgtgcactccgccgctgcgggcaaattgaggacaggaagcggaccgcacccacttctctcccaggacttgggcaatgttcaacacaggtggtcttccaaaggttcatagaaaatgcacatggtgaagaaacgatgcatggatttccactggtttgcactaaaataaacttgtcctaacttctgataacctttctgaactagatctagtttgaggcactaagaaggatgagacatccactgaaaaggactcccgtcagagcaacatgaattccacgaaaattgcagcaagaggaaacatcaaatttatggtgaagcttgggtggaagattgaagaaatcattgacgttttaagaaaagcttgtaaggacactaccccaaagaaatgaactctttacgaatgtatagcttgtttcaagaagaggtgagaagatgtggaagatgaatcctgcagtggctgygaaaaccactgtgcccagatcagctgcagttacgacgagagctatcagtggaaattttaaacaggagggatcacgatcctgacgcatccc

SEQ ID NO: 80522 - DNA, 634 bp, Homo sapiens
aatcattgttcagtatttcctgaaggttgtaacattataatactctaacttgtagtactaaaaatattctttaaatcactgtgtaaagaaaatattttagaaagaatttaaatagcaacttatttgagtaagagtgtatcaataaaaaattagaagaatactttcaacacaagacactataaaaagcaatttaaacatcattttgaaatagtaacaatcttatatgttttgtcatcaaggtgctcctgatggtcaaaagcactgcatttttaggracatgacgggtaccatcactgaatcaatagttttttctctaaagtgacaggaagatttcagaagcaagaataaccacagaagatgtaatcagtggtaatctcccaaagtatttgcttgcagctttttaaattacctgcatttgtgtttgatccttgaagaagcactgtcaaggtctccataaccaataaagccaggtgtttttggtcttcaactgaactattatttcttgagtcccctaaaaaaaggttcaaaggtccaaattacaaaagtgataagcttattttttcttgattccgttttactgtaataatttctttatttcttcagtattcagttttacccctaataggacagatat

SEQ ID NO: 80523 - DNA, 1513 bp, Homo sapiens
ggtgtctttttgataaattttttaattttcctttgggtgggtagccaatagtaggattgctaggtcaaatgatttttctattttcagttctttaagaaatgggtacacatggacatgaagatggaagtaataaacattgaggactctaaaaggagggagagagggcaaggtgtgagggtggaaaaactacctatgaggtaccatattcactgtttgggacgtagattcgtgagaagcccaaacttcaccactatgcaatacacccatgtaacagaggaataaagcctagaataatttttttaagtgtgagttttatttttctgtctctgtattcccaggaaccagtcaaaatctgttcccaaagatgtgtcaacaaataatttgacagcatctcttttctcccaaactagagcaattcaatagccttttattgtttttcctactttcacctaattgtttcccttagtatagcctttttttaatccacaaagcaaacaaaatgattttataaagtgcaaagcagaatatgtcraaacctatatatttcttagaatatactaatataaaatttaagctcgttaccattatctacaagtgatagactttccacctgatattacctttttttcttggagtcttcccaccttcccccatcacttgtgatgatctaatcagggaggtcgccttttgcagatagaacacactacccttaagccaaccaatgggccttacatttatggttccttccgcctgaaattctccttccctgcattatgacatagctggatccttccaccattcagatctttggtttaaccaatttatgcctagtgttccactattggaacactaaacttgtgggaattatttatatcctactgctcaaagtcatcgccaaggtctgatttttcacaaacaaaaaatttcaacctccggcataaatgtgttaatgttcatttccctagaggagtcttccctgaccactagcttacatgactatccacaaatgccttatcacactctgttatcttagcttgctttatttcagtgaagtaaacttatttttgcattagtttacctgtttattgtatatttttcacaatcagagaaaaacctggtaagaacaggatcttgcctgctcattcaccaacctctcaatccagaccttaaaaacaactctcagtgtatagtgagtagacgatcatttactctcttctgaaataatgactaaaggaatgaataatccattcaatgctcaaatccctctcaaacatacttattgatatcttaaccaagtgctatcctatttttccataagtagaagcagtgataaagaattcagtagttttccattttttttacacaagctttccctcatttagcatatgttttctttccaatgtgttcttcatattgatgaatgtccccacctgttgtaaagacacaaagcaagtctactccctttttcacatcatgcttctttgattattgccttttgaatctcttgcacagg

SEQ ID NO: 80524 - DNA, 1513 bp, Homo sapiens
ggtgtctttttgataaattttttaattttcctttgggtgggtagccaatagtaggattgctaggtcaaatgatttttctattttcagttctttaagaaatgggtacacatggacatgaagatggaagtaataaacattgaggactctaaaaggagggagagagggcaaggtgtgagggtggaaaaactacctatgaggtaccatattcactgtttgggacgtagattcgtgagaagcccaaacttcaccactatgcaatacacccatgtaacagaggaataaagcctagaataatttttttaagtgtgagttttatttttctgtctctgtattcccaggaaccagtcaaaatctgttcccaaagatgtgtcaacaaataatttgacagcatctcttttctcccaaactagagcaattcaatagccttttattgtttttcctactttcacctaattgtttcccttagtatagcctttttttaatccacaaagcaaacaaaatgattttataaagtgcaaagcagaatatgtcaaaacctatatatttcttagaatatactaatataaaatttaagctcgttaccattayctacaagtgatagactttccacctgatattacctttttttcttggagtcttcccaccttcccccatcacttgtgatgatctaatcagggaggtcgccttttgcagatagaacacactacccttaagccaaccaatgggccttacatttatggttccttccgcctgaaattctccttccctgcattatgacatagctggatccttccaccattcagatctttggtttaaccaatttatgcctagtgttccactattggaacactaaacttgtgggaattatttatatcctactgctcaaagtcatcgccaaggtctgatttttcacaaacaaaaaatttcaacctccggcataaatgtgttaatgttcatttccctagaggagtcttccctgaccactagcttacatgactatccacaaatgccttatcacactctgttatcttagcttgctttatttcagtgaagtaaacttatttttgcattagtttacctgtttattgtatatttttcacaatcagagaaaaacctggtaagaacaggatcttgcctgctcattcaccaacctctcaatccagaccttaaaaacaactctcagtgtatagtgagtagacgatcatttactctcttctgaaataatgactaaaggaatgaataatccattcaatgctcaaatccctctcaaacatacttattgatatcttaaccaagtgctatcctatttttccataagtagaagcagtgataaagaattcagtagttttccattttttttacacaagctttccctcatttagcatatgttttctttccaatgtgttcttcatattgatgaatgtccccacctgttgtaaagacacaaagcaagtctactccctttttcacatcatgcttctttgattattgccttttgaatctcttgcacagg

SEQ ID NO: 80525 - DNA, 1513 bp, Homo sapiens
ggtgtctttttgataaattttttaattttcctttgggtgggtagccaatagtaggattgctaggtcaaatgatttttctattttcagttctttaagaaatgggtacacatggacatgaagatggaagtaataaacattgaggactctaaaaggagggagagagggcaaggtgtgagggtggaaaaactacctatgaggtaccatattcactgtttgggacgtagattcgtgagaagcccaaacttcaccactatgcaatacacccatgtaacagaggaataaagcctagaataatttttttaagtgtgagttttatttttctgtctctgtattcccaggaaccagtcaaaatctgttcccaaagatgtgtcaacaaataatttgacagcatctcttttctcccaaactagagcaattcaatagccttttattgtttttcctactttcacctaattgtttcccttagtatagcctttttttaatccacaaagcaaacaaaatgattttataaagtgcaaagcagaatatgtcaaaacctatatatttcttagaatatactaatataaaatttaagctcgttaccattatctacaagtgatagactttccacctgatattacctttttttcttggagtcttcccaccttcccccatcacttgtgatgatctaatcagggaggtcgccttttgcagatagaacacactacccttaagccaaccaatgggccttacatttatggttccttccgcctgaaattctccttccctgcattatgacatagctggatccttccaccattcagatctttggtttaaccaatttatgcctagtgttccactattggaacactaaacttgtgggarttatttatatcctactgctcaaagtcatcgccaaggtctgatttttcacaaacaaaaaatttcaacctccggcataaatgtgttaatgttcatttccctagaggagtcttccctgaccactagcttacatgactatccacaaatgccttatcacactctgttatcttagcttgctttatttcagtgaagtaaacttatttttgcattagtttacctgtttattgtatatttttcacaatcagagaaaaacctggtaagaacaggatcttgcctgctcattcaccaacctctcaatccagaccttaaaaacaactctcagtgtatagtgagtagacgatcatttactctcttctgaaataatgactaaaggaatgaataatccattcaatgctcaaatccctctcaaacatacttattgatatcttaaccaagtgctatcctatttttccataagtagaagcagtgataaagaattcagtagttttccattttttttacacaagctttccctcatttagcatatgttttctttccaatgtgttcttcatattgatgaatgtccccacctgttgtaaagacacaaagcaagtctactccctttttcacatcatgcttctttgattattgccttttgaatctcttgcacagg

SEQ ID NO: 80526 - DNA, 911 bp, Homo sapiens
tgcataaatgaataaatggaagacataaggaaatgataacatcataaattaccatatatatatatatatatatatatatatatatatatatatatatatatatgctatttagtgagatctaagtggggattatagttattaacaaatacacacaatttagaaggggtcygggcgtggtgtgtggttcaagcctgtaatcctaacactttgagaggctgaggcaggagaattgcttgagcccaggagtttgggaccagccctggcagcaatagtgagaccgtatctctacaaaaaatacaaaaattagcttggcacagtggcccatgtgtgtagaccttgctccttgggaggctgagatgggaggatcacttgagcctgagaggttgaggctgtagtgagccatgcttgcaccactgtactccagcctgggctacagagtagactttgtttaaataaataaatatatctacaaggggaagctgcagagtgtataatttagaaatggtaaatatttgaatgatagaaacttttgttgcccatgttttttcaaaacagatagagtcctaggttataactagatccctaaattatttgtagttttctatgaggcaaatactggttggagaccagtttagcatattaaataaattctcaactttaattttttttattctaacgctaggatctttgagactattgataatagaagcaagtgttttagtcattgactttagccctgtggggaattacatgaattcatttagactgatgtctgtcaagttcaaggccttttagcttttaagaatctagacatttgtcttttcatgaatattcaaacattatctcagttattaacttagagatttgacaaagagagcaattcaggttttaatattggcttaattgatgca

SEQ ID NO: 80527 - DNA, 922 bp, Homo sapiens
gcattctaaaacagttaaatgtattaacacttatgaagtagtacttagaacagtattaggcactgcatttgccaaataaacagaaatcttaccaaactagaatcttatatcattttttccctggattactttgaaaaaataaaatcaaatggatgaactaatagaaacaacctatcactgtggcctatttgccaacatgtctaattctggtagtcatttgggagtctttgtggtctcgattatggttggcattactgagtgacttccattgtgtaagtatgaagccactcacgaatgaaagtgctcctcccacctgcccaagcattcttgcatcattttattgttatttctggaagagtagtggtagaaacttgtttgaaaagttagagaatgggcaggcatcatggyttaggcatctatcccagcattttgggtggctgaggggggaggattgcttgaggcaaggaatctgagaccagcctgggcaacaggggagacccatctgtacaaaacataaaaaattacctgggtatggtggcatgtgcctgtagtcccagctgctcagggggctaagacaggaggctgcggtgagccatgtctgcaccactgcacaccacaccgggtgacagagtgagaccctgtctcaaaaaaataaaaaataaaaaataaacaaaacaaaaaagaaatcaataaaaaaagttgaagaaatcttcagttccgcttaatgataatcaattattaatacatcactaatttggccatttatatgagtaaaaaaatacattcttacctacttaattttgttatttctatcagagagaaaaagagagagatccaaagacaatattgttgaataactctctatgctcactactacctctaaaagcccctttaagaaatggaatatcatattttgaatgca

SEQ ID NO: 80528 - DNA, 922 bp, Homo sapiens
gcattctaaaacagttaaatgtattaacacttatgaagtagtacttagaacagtattaggcactgcatttgccaaataaacagaaatcttaccaaactagaatcttatatcattttttccctggattactttgaaaaaataaaatcaaatggatgaactaatagaaacaacctatcactgtggcctatttgccaacatgtctaattctggtagtcatttgggagtctttgtggtctcgattatggttggcattactgagtgacttccattgtgtaagtatgaagccactcacgaatgaaagtgctcctcccacctgcccaagcattcttgcatcattttattgttatttctggaagagtagtggtagaaacttgtttgaaaagttagagaatgggcaggcatcatggcttaggcatctatcccagcattttgggtggctgagrggggaggattgcttgaggcaaggaatctgagaccagcctgggcaacaggggagacccatctgtacaaaacataaaaaattacctgggtatggtggcatgtgcctgtagtcccagctgctcagggggctaagacaggaggctgcggtgagccatgtctgcaccactgcacaccacaccgggtgacagagtgagaccctgtctcaaaaaaataaaaaataaaaaataaacaaaacaaaaaagaaatcaataaaaaaagttgaagaaatcttcagttccgcttaatgataatcaattattaatacatcactaatttggccatttatatgagtaaaaaaatacattcttacctacttaattttgttatttctatcagagagaaaaagagagagatccaaagacaatattgttgaataactctctatgctcactactacctctaaaagcccctttaagaaatggaatatcatattttgaatgca

SEQ ID NO: 80529 - DNA, 922 bp, Homo sapiens
gcattctaaaacagttaaatgtattaacacttatgaagtagtacttagaacagtattaggcactgcatttgccaaataaacagaaatcttaccaaactagaatcttatatcattttttccctggattactttgaaaaaataaaatcaaatggatgaactaatagaaacaacctatcactgtggcctatttgccaacatgtctaattctggtagtcatttgggagtctttgtggtctcgattatggttggcattactgagtgacttccattgtgtaagtatgaagccactcacgaatgaaagtgctcctcccacctgcccaagcattcttgcatcattttattgttatttctggaagagtagtggtagaaacttgtttgaaaagttagagaatgggcaggcatcatggcttaggcatctatcccagcattttgggtggctgaggggggaggattgcttgaggcaaggaatctgagaccagcctgggcaacaggggagacccatctgtacaaaacataaaaaattacctgggtatggtggcatgtgcctgtagtcccagctgctcagggggctaagacaggaggctgcggtgagccatgtctgcaccactgcacaccacaccgggtgacagagtgagaccctgtctcaaaaaaataaaaaataaaaaataaacaaaacaaaaaagaaatcaataaaaaaagttgaagaaatcttcagttccgcttaatgataatcaattattaatacatcactaatttggccatttatatgagtaaaaaaatacattcttacctacttaattttgttatttctatcagagagaaaaagagagagatccaaagacaatattgttgaataactctctatgctcactactacytctaaaagcccctttaagaaatggaatatcatattttgaatgca

SEQ ID NO: 80530 - DNA, 936 bp, Homo sapiens
ctttgggtggtacttcagtaaagtaggtagaaattttaaaatgctgtgcaaggcagggatcatgtaggaagacaatatcaatttcgccttgctgggggcaactaaatgtatatttttctagaattctaatttattgcctcatatatcagaaaatactacaaacataaatgacatatgctagatttcagtattatacaacagagaatgtcaataaattcaaaactaatcatcccattggccacactgttttacaagtcaaaccctactggtctaattttaaacaattacaacaaaacaaataatgcttttccattcctcaaagaactacaatattgctaaaggtgtaaagcacaaaggtcacaattgttaagactcctcatgtcccatctcaatgtggagattcacttttcctagtacctcagaagactgctatttattcatccattaacatatgttttattatgttaaacatatgagacaggatttacattttgatagttactggagtgcctaatgcaaatacatgcttatattcatcaaaaagccatacaatatgttatatctattggaatacgcgtgagtacaagacaacctgcaatatagattgtcaatatggttgcatataaaatgctatgtctcttttactgacttcattaatctcagaattaaaatggcatggaaacacaataacctataataatagcaatayataatgataatacatggtaatattcaagtcatgattcacagtttaaaagcttcatttactttctcgctcttattcaatcatcagagaagcttgggataaagcatcagctacttttcctttttgctggctaatacaaaaacacagaagacaaggtgacatctccgaggccattccacaaacagcagtgctgggaagggaaccagtcttccagagaatgcgtgagagta

SEQ ID NO: 80531 - DNA, 936 bp, Homo sapiens
ctttgggtggtacttcagtaaagtaggtagaaattttaaaatgctgtgcaaggcagggatcatgtaggaagacaatatcaatttcgccttgctgggggcaactaaatgtatatttttctagaattctaatttattgcctcatatatcagaaaatactacaaacataaatgacatatgctagatttcagtattatacaacagagaatgtcaataaattcaaaactaatcatcccattggccacactgttttacaagtcaaaccctactggtctaattttaaacaattacaacaaaacaaataatgcttttccattcctcaaagaactacaatattgctaaaggtgtaaagcacaaaggtcacaattgttaagactcctcatgtcccatctcaatgtggagattcacttttcctagtacctcagaagactgctatttattcatccattaacatatgttttattatgttaaacatatgagacaggatttacattttgatagttactggagtgcctaatgcaaatacatgcttatattcatcaaaaagccatacaatatgttatatctattggaatacgcgtgagtacaagacaacctgcaatatagattgtcaatatggttgcatataaaatgctatgtctcttttactgacttcattaatctcagaattaaaatggcatggaaacacaataacctataataatagcaatatataatgataatacatggtaatattcaagtcatgattcacagtttaaaagcttcatttactttctcgctcttattcaatcatcagaraagcttgggataaagcatcagctacttttcctttttgctggctaatacaaaaacacagaagacaaggtgacatctccgaggccattccacaaacagcagtgctgggaagggaaccagtcttccagagaatgcgtgagagta

SEQ ID NO: 80532 - DNA, 985 bp, Homo sapiens
tgcatggagaaagtgtgaagtcttctctttctcttctcatgtttgtgtatcttttcagttgtagactgtcttattcacccttcatttccctgtttctagcactgtacccttacgagcagtgtgtacttaatccatgtagaaggaaagggcaaggtgagaagaaaaggagtgtgggagggagaatagaagaaaatagatggaggatgttctttttgaactttttgcttcagaatctgataatgtttttgatatcattcacatagtccaggctgtgaaaaaattacaactcaagcaatgtaaagtatcaaagagtgtttatatcacaaattggggtcttagctctgaaatatattactttatctatcacggacctgtttttacttatttcatatttgacaattatcggacttatttctaattttagcaccttcttcagactcttgtagaggagagactgtactgttccttcttttastctgcagtacaactagaacagcacctggcactgctgctgacatctctaccagattggtgtcttttaataagaagtgatgtcctaaggatatgttttgtcaagggacttattacctctgccgttgtttttctttgtgcgtgattactctttctgcactgtttttttccacctaaacataatggttttcaaaatgtggtccctggaccaatagcatcaccgtcacctggacattggtgaggatgcaagcccaatcccagacctactgcatcagaaactctggggtggagtcctgtaagctgttttaacacatcctcctggtgattccaacacctacaatagttttagaaatacaaacctaaagaaattctaggcctcttttagtccagcgctaacaaacactactttctatctaacacattttcttacagtatggaattaatcactccttactctctacttccatacagcaatttgtccaacctcaccaaggttgtttacttaccacatggc

SEQ ID NO: 80533 - DNA, 585 bp, Homo sapiens
aaaaggaggtggaggaagatttgggagtaaaattcttatagagcatgagggtcttctctggtttggacaaatggagtaagagagaggtcctttgaaagagatagatggaaaaaaacagaacacatgaaagccaagagaagaaaatggcatttcaatcatagtttaagacagcagaatggtgacagaaggactgtgattctactgagggaagaagacagcctgggactggggacctctctaggcatcagaatcatgtcaacaggagtaggagaggaacaattgagagacagagttaatgggatttcttcttctttattttggatctagataacttaaagtkgaatttaactgattactaaagtgggaacatcatcataaaaatcaacaaaaacattaataagctaatttctaaaactttgtaatatcttaatcctaatctagttctgagggggcaccactgtcattagaaacttgtttcaccataaatgggaatgagacaatgtgtcaaaactagtcaagtagtaagataatcaataggaagataaagatggatcaaagacctaaacaagaagttaagataaaata

SEQ ID NO: 80534 - DNA, 1079 bp, Homo sapiens
ttcttattgagggggaacttactaactcctttaattcttattttgcttaaggctgagtttttaaaacatctaacatcagccaagattattgatttatctataaggaataatctgtgaattaaccttctgtagcttttccttgctgaccagggaatacctccccattgaagcctaggccagattccagtccrttttgaccataccccatcatggtattttagagtacacctgaataagatacatggtgccatgtacatggaaactgactgctctcatgttacgggttgaactgtgtccccccaaaatttgtatgttgaagtcctaaaattggcactgttgccataagccagggaactacctaggagatgctaggagagaggcctagaatggaaccctccctcccccgcccctggggccttcagagggagcggtgcccagctgacaccttgaccttggacttctagcctccaaactgtgagacaatacatttctgttgcttaagccactcagttagtgtgctttattttggcagtcttagcaaactaatacatcccccaatccagaactgtcctcctttggataataaaaacagcaataattatagtgtcattaccctgagtgactggtcccactgttggtcattctttgtagatgtgagttattgccctattgagatcagaagtcctctcacttagaggcatatctaagacttttttcttgtggagggagctcactcaactgtaggtaaggtttgactcatctgggttagtagtaagaacaaacttccaagtggcaccatcttaaaggtgcaagcccatgtgggcgatgaccaggtctggtatattaagaggctcttggtagcacattagaaacacctggagagattttaaaatttacaaagcctagccaaaccccagacccattaaccctgactctctgagaataggaccctggcacctgtgttttaaggattctaggtgatttcaatgtgtagccaaggttcactgccatagcctgtcctggaatgcaggtaactaaaacttcagcagattatgaaaaacaaaagttactttcttgga

SEQ ID NO: 80535 - DNA, 652 bp, Homo sapiens
aattaaaaattaaatgttttcttcaaaaaattacactaaaacttacttgaaaaaaaaatttaaactgatgacaaaatcatcattatttatactccatcttcctaagcataatgatattaattcacaaagggtaacaaaagcatcagttctcaaattcaaatacatagcctttattctgtgttgaatgaccagggccaatatccatgtagaggatatgctatattgaaatgactgcaccagtttttactagtgtttaatttactaagacaccatgaaatgttgcgtgatgtagctatttaaagttgtctttttttccatgaagcagtttaaggcaagggcaggctctggcttttaaatagtcattttaaccttaatttttaaaacaaaacttttgaattattagtcaaggtaaaactaagaccttggaaagctgagggtgggtgacacacttagcccataaagaaataaatrtgattactgattattttaagatccttactgagagtaataatcatgaaattcacagagttttcttgtatcataagcagcaaggagagtaagaagttatgtcaggttccttcatcataagaagtaaaacattacttgagtttagaagtgaattataaatattcttctaaattaaaaaatgcta

SEQ ID NO: 80536 - DNA, 1205 bp, Homo sapiens
cctccaggggcataaccagcccagtggccccacagaccccacggagggtgggtccaggggacgagggagaggcaaaggttagraccctggagaagacagatggggacgctggtggctctggcccatctttcctctcggggaaacgtctctcagcctagcctccctttgcaggtgagagaagtgaacgtggggcatggtcttccgtggctgcccatggagtggcaactcaggttgttccatcacggccagccaaccacattcacccaccaacctcgccaggccgggtagatggtcaagggcctggcctctgccctccccactcccgatgggagaggcccaatgcctggccctgcatcctccattagcccagaagaagagccaaaatcaagaggatccaaaaagaaagcaagagacttacaatgggagctgggttggcaggccgcacgctgggaggctggaggggtgaggagagtcagaacggtggttattgcgggcaccacagaacggggagagacgatggcagaactccagggaggctcttgtgctcagaaatgcctccccagacacacccacctccctcttgctcccaagcaagccttcctgagcccgtggcacccagatttttaccctcaggtgcacaaggctttggggttgaggggtagggtatccccactggttcctctcgagagagaggaggctgggtttgatagagacctcattgctgtctgtagctcccacagccaagagcattacttccggtgccatatttcacccgtaagctgagaagtggtatttgttgaaggcctattgtgggccgagtcctgggcttcagtgctttccaaagagggaagcagcctcagctcctgtgtccctggtgaggcaatgaggctcagaaagattaagcaacttgcccaagcttgcccgggtggaagggatcaaatccaaaatggcagccaattctgtctgactgtatccagcacactttctgtcatccctagggccagggccagcgccagggccagggccaaagtttggctgccctgcgaatgttccctggggctccaccagtcctgaagtcagcgtggcaggaggcaggtgcactgtctgtaccatcatgggccataaaaaggctacatagacaaagcgcccctcctcccagtccccactgcttgagtggccagaggaagggctgcccacctccttgt

SEQ ID NO: 80537 - DNA, 627 bp, Homo sapiens
ttttgtggccaccccaggcgtccagatgtacacaggagactgtggctggggggtgatctggacagggaagtgctcaccacactcctgaccttcatctgggtcatgtgagggatgggctcggcatcacagtgcccttcccagcccacctggccagacctccctctgggccagaacagaggatcatgaggacagtgtgaggaagctgcccttgggccagtcgggtctgaccgcagggctccccaggccccactgggtacacatagacttactcttctgaaccttaaaagcaatgcttctgatcggcatcaacacctgtccttccagcaaatacatgtcccacargcgcagggtgagcccgagagagatctgtggggacagcaggtgtgagacaacctggcccttccaggctggggctggtggctcaagctgcacacattggggcttcagtctccagagtcagtgaccttccccatgagggtcgcctgagccatctagaatggtgggtcagacaaggtcttgcagctcctcatagggggcactcatttgagtggggatgtggctcctggacagaggggcttgcccagggcttgaggcttccctgagccctctcaagttgggtcctggccc

SEQ ID NO: 80538 - DNA, 1793 bp, Homo sapiens
tagccagtctaacagaagagtcataaataatgtgactcagttttctcatttgtacaagggaaaaactaatggtctttacctcccagtatggtcatgagaattcaataagacagtcatgtaacaatccagcacatggtctagatagaacatggtaagtattagataaatattagtcattattattattaatattgatatgtcatttatcaacaaagtcagaattataatggtggtacccaaaatttagygttaacataagcatgataaaattagagttgtttctggtttataaacatgtgaggctttttttttttgagacagagtctcattctgttgtctaggctggagtgcagtggtgcaatctcagcttactgcaacctccgccagtgaggcccttcattagacactaatttgaagctatggcattcccccactatgagcccacctgtcagccaggctatctgccttgatcctagatgaagtggccattctgcctgcccctcagaacctctctgtactctcaaccaacatgaagcatctcttgatgtggagcccagtgatcgcgcctggagaaacagtgtactattctgtcgaataccaggggtgagttttttcttttaatagttcttctcccttaagcagaagttggttcctgaaggcatagcccttcctcctgagcccaaggtggctttttgagtccagggatagattatccccaaagatctacccactctgtctgcataggcattgaaagagttgaagaagcaagggaaattgttctgtggatttgacagtgaactctctgggaagatgaatgtgcataacacattttggtggagttattttaaaaagtgaatcaactgtccaatgggtttgactctgacttgagatggataaatcactggagactcagatcctttaagggtggaggagtcctcacttttcctgactataagcttatacctagagccaaaacgaactataatcctaaaggtcagctggccctggggctgagcaggctctagtcttctccaggtgttcaggtgcttgcagctattgaagagtgataaggacacagaaattgctccatatatttcattaacaatgaatacagactgaacacctacatgtgtagacattcttctaggctcagggatacagttgacaaggtttctggattttgagagcttacatctagaggaggatacagatgataaatatactaggccagcattctctagtatggtagccaccagccacagctggctatttaaatttaaattaaattaaattaaattaaattaaattaaattaaattaaattaaattaaaatgtctgtttcctgccacactagtcacattttaggtgttcaatagccacatgtggccagtggttaccatattgaacaacatcgatttagaatatttgcatcatcacagaaagtttatttttggaaagcactgctctagggaattttggatagtaatcagtgctaggaggaagctaaaaggctgatgccatagagagttgacactgaggctcctttatattagatggcctgggatggcctctctgaggaggtgatatttatgccatatctgaaggacaagaggagccagccatgcgaacagcaggggcagagcatttgagatggagtgaacagttagtcaaaggtcctaaggcaaaaagtgctcagcattttggagaaatgaccaatgtggcaagaatatcacgcttaggagcagagtgagagagaaggccaaagcatcttgtaagaccactggcaagagttt

SEQ ID NO: 80539 - DNA, 1793 bp, Homo sapiens
tagccagtctaacagaagagtcataaataatgtgactcagttttctcatttgtacaagggaaaaactaatggtctttacctcccagtatggtcatgagaattcaataagacagtcatgtaacaatccagcacatggtctagatagaacatggtaagtattagataaatattagtcattattattattaatattgatatgtcatttatcaacaaagtcagaattataatggtggtacccaaaatttagcgttaacataagcatgataaaattagagttgtttctggtttataaacatgtgaggctttttttttttgagacagagtctcattctgttgtctaggctggagtgcagtggtgcaatctcagcttactgcaacctccgccagtgaggcccttcattagacactaatttgaagctatggcattcccccactatgagcccacctgtcagccaggctatctgccttgatcctagatgaagtggccattctgcctgcccctcagaacctctctgtactctcaaccaacatgaagcatctcttgatgtggagcccagtgatcgcgcctggagaaacagtgtactattctgtcgaataccaggggtgagttttttcttttaatagttcttctcccttaagcagaagttggttcctgaaggcatagcccttcctcctgagcccaaggtggctttttgagtccagggatagattatccccaaagatctacccactctgtctgcataggcattgaaagagttgaagaagcaagggaaattgttctgtggatttgacagtgaactctctgggaagatgaatgtgcataacacattttggtggagttattttaaaaagtgaatcaactgtccaatgggtttgactctgacttgagatggataaatcactggagactcagatcctttaagggtggaggagtcctcacttttcctgactataagcttatacctagagccaaaacgaactataatcctaaaggtcagctggccctggggctgagcaggctctagtcttctccaggtgttcaggtgcttgcagctattgaakagtgataaggacacagaaattgctccatatatttcattaacaatgaatacagactgaacacctacatgtgtagacattcttctaggctcagggatacagttgacaaggtttctggattttgagagcttacatctagaggaggatacagatgataaatatactaggccagcattctctagtatggtagccaccagccacagctggctatttaaatttaaattaaattaaattaaattaaattaaattaaattaaattaaattaaattaaaatgtctgtttcctgccacactagtcacattttaggtgttcaatagccacatgtggccagtggttaccatattgaacaacatcgatttagaatatttgcatcatcacagaaagtttatttttggaaagcactgctctagggaattttggatagtaatcagtgctaggaggaagctaaaaggctgatgccatagagagttgacactgaggctcctttatattagatggcctgggatggcctctctgaggaggtgatatttatgccatatctgaaggacaagaggagccagccatgcgaacagcaggggcagagcatttgagatggagtgaacagttagtcaaaggtcctaaggcaaaaagtgctcagcattttggagaaatgaccaatgtggcaagaatatcacgcttaggagcagagtgagagagaaggccaaagcatcttgtaagaccactggcaagagttt

SEQ ID NO: 80540 - DNA, 1793 bp, Homo sapiens
tagccagtctaacagaagagtcataaataatgtgactcagttttctcatttgtacaagggaaaaactaatggtctttacctcccagtatggtcatgagaattcaataagacagtcatgtaacaatccagcacatggtctagatagaacatggtaagtattagataaatattagtcattattattattaatattgatatgtcatttatcaacaaagtcagaattataatggtggtacccaaaatttagcgttaacataagcatgataaaattagagttgtttctggtttataaacatgtgaggctttttttttttgagacagagtctcattctgttgtctaggctggagtgcagtggtgcaatctcagcttactgcaacctccgccagtgaggcccttcattagacactaatttgaagctatggcattcccccactatgagcccacctgtcagccaggctatctgccttgatcctagatgaagtggccattctgcctgcccctcagaacctctctgtactctcaaccaacatgaagcatctcttgatgtggagcccagtgatcgcgcctggagaaacagtgtactattctgtcgaataccaggggtgagttttttcttttaatagttcttctcccttaagcagaagttggttcctgaaggcatagcccttcctcctgagcccaaggtggctttttgagtccagggatagattatccccaaagatctacccactctgtctgcataggcattgaaagagttgaagaagcaagggaaattgttctgtggatttgacagtgaactctctgggaagatgaatgtgcataacacattttggtggagttattttaaaaagtgaatcaactgtccaatgggtttgactctgacttgagatggataaatcactggagactcagatcctttaagggtggaggagtcctcacttttcctgactataagcttatacctagagccaaaacgaactataatcctaaaggtcagctggccctggggctgagcaggctctagtcttctccaggtgttcaggtgcttgcagctattgaagagtgataaggacacagaaattgctccatatatttcattaacaatgaatacagactgaacacctacatgtgtagacattcttctaggctcagggatacagttgacaaggtttctggattttgagagcttacatctagaggaggatacagatgataaatatactaggccagcattctctagtatggtagccaccagccacagctggctatttaaatttaaattaaattaaattaaattaaattaaattaaattaaattaaattaaattaaaatgtctgtttcctgccacactagtcacattttaggtgttcaatagccacatgtggccagtggttaccatattgaacaacatcgatttagaatatttgcatcatcacagaaagtttatttttggaaagcactgctctagggaattttggatagtaatcagtgctaggaggaagctaaaaggctgatgccatagagagttgacactgaggctcctttatattagatggcctgggatggcctctctgaggaggtgatatttatgccatatctgaaggacaagaggagccagccatgcgaacagcaggggcagagcrtttgagatggagtgaacagttagtcaaaggtcctaaggcaaaaagtgctcagcattttggagaaatgaccaatgtggcaagaatatcacgcttaggagcagagtgagagagaaggccaaagcatcttgtaagaccactggcaagagttt

SEQ ID NO: 80541 - DNA, 675 bp, Homo sapiens
aggctgcacttggcccccagtgtcccccttggccgatgtccttgaacagaacaaacttaaaggagtgctgtgtcttccaccttctcacctgtcagaggtactaccattttcatgggatcactatgtctcattttcaatatctttttctcattacatactttgagttttaaaaatttcttccaaaaattatctccatattccccttaggtctgtgcttttaaagcattgctccctaaggatatttcttgcttgaaccatgtggcccgttaggttttaactgagaaaacaaaaccacttcagttattgcagcagaaggaatttagtgtaagaaattgattaagcaggtgatagaagagctgagaagacaaatggtgcatgaggcaacccagaagtcagcactcgaaggaagctgctcccacccctaggatgaagagacaaagggaggaggtggtgctaccagggacagccgtcttgcaactgtgacactgcaggcataaggaccaaaarccaacaagaggaggacaggagcatagaaagataggaaatatagcatcattaggctgtgaagccaactctgagatcgcctttctcttgtcttcttgttaccaaataataaatgctagcatttatttgaatctgttagttaaaatttctgttacttatagctgaatacat

SEQ ID NO: 80542 - DNA, 759 bp, Homo sapiens
taaacagttggcttcacttcatgatgtctgctcaaatcctttttcctttaaaggatgtttatttaataagaaaaaaatgtaaaatgatagataataaaagccttactaggttcttaaaagatgaactatccatatttcagtaaatgaataattagtccttcctctttgggcaccttggaacagattcattcagatagtgggtggaaatgtacatgtatggtaagcattgctggcctagtcactgaaaaatgtaaactcttatttttgattgcaggtggaagttaagccatatgtcttggatgatcagctgtgtgatgaatgtcagggggcccgttgtggggggaaatttgctccatttttctgtgctaatgttacctgtctgcagtattactgtgaatattgctgggctgctatccattctcgtgctggcagggaattccacaagcccctggtgaaggaaggcggtgaccgccctcggcatatttcattccgctggaactaaaggataactgcagtgctcattttcaggcctcagaataagtgcactcttctgttmattctgaccccttcctcaacctcttcacgctggcatgtccttttgtagcagtctgtaacttaactatagtataatgaaaagaatgacctataatataggtgttttgtagattcttgtgtcactgcaaacaatatgaactcctttttcgtattgccatcgggttgcatggaagttttattctcttgttttgctggaaaccaaga

SEQ ID NO: 80543 - DNA, 701 bp, Homo sapiens
tgcatgctttattataaataaaattctagctttgaaaggcgttatgtgttgaacagtatgcttcaggggtaaatttaaaatagtctcttgaagccctagtcatggaagtaacttttattttaattgacattctcttattaaatgccctatccatcattaaaaggwttattatcagtgggcaaaacatgaaataatatgatcgaatggcaatcttgctagttgcgctacctaacagtaccatcttggatccttcaaaaccaaagacttgccccagcactgctgtggaaccacctggcttatgacccctatggatgatctttaggaaaagcagccctttacttttaatacaggctttaatgaactatacctgttaagttccaaaggtcaaaatggaggcatttgctgtctaatattcaaacatagaaagggagctgcttttaaagaattccctgcaaatactgaaagcagtcatgcgaatggagggtgctcttgtgtagctggtcagggacttttttttcttttctcctgaactacatgattctaattggaatgttcatttgcctctttttactcttttaaatgcttgtaggtggcttggggtgtgctatcgtgctgttcctactcagtaaacaggtgtgatgagttaacaagaaataacactgtttgagaactagctttgaataataatttttccctttgta

SEQ ID NO: 80544 - DNA, 660 bp, Homo sapiens
gcactaacgtcaatacggagggaacgtgattacatcagtgtcaggcgccggcgtaattaaatataactgagtttacgcagacgcagaaaacgcaggcaaacctgaggtcctcagaatggcgggcacaggtttggtggctggagaggttgtggtggatgcgctgccgtattttgatcaaggttatgaagcccctggtgtgcgggaagcggtgagtgcggggtgtctttgtagctgactcactgctagctggctcggtactgaaagaaacatgttacaatttgccacttctaccctggtccctattctctttcttaggctgcagcgctggtggaggaggaaactcgcagataccgacctactaagaactacctgagctacctgacagccccggattattctgcctttgaagtaagtatgtcttgagcctaggtgtgaacgagaattcctgtgaacctttattttggattgagagctttaaattccagttttaaccattgcctgcatagctactacttacctactgtataggtgtcagtctattgaaaacaactagatagataagtcttctccgaggttcttaytctaagatccataggaagactttctggggctccacaactcacttaatgcaaaaatttgtggctaccattctttgagata

SEQ ID NO: 80545 - DNA, 1657 bp, Homo sapiens
gttttaaatgaattcattatattattataatcataaattatattatttatgttctagaaaacaggaaaattctaaatgtaccagaaaatacaatcttctttgaacttgtcatattaaaaaaattattaaaactgaattttattgcaggcaggcagtctattagtcaatgagaatgaaatcatgttcttgaaaccaggaatcccgagaggacccacatatcctctgaaagaagccaactgctcctgcaggacccgggagacacccaaaatactgtaagtgccccaactgctgaagtagaaaaaagagatcctccacacacgcgcactagggaaactcaaggtctgtttgttggaggagtttttgaccttacctggagctgagtcaatttagagagcaggcggggcgtgatggctcacacctgtaatcccagcactttggaaggctgaggtgggcggatcacraggtcaggagtttgagaccagcctgaccaacatggtgaaaccctgtctctaccaaaaatacaaaaattagccaggtgtggtggtacgcacctataatcccatctactcaggaggctgaggcaggagaatcacttgaacccaggaggtgggggttgcagtgagccgagatctcaccattgccctccagcatcggtgacagagcgagactccatctcaaaaaaaaaaaaaaaaaaaaaaattagagagcagagtgaaatacaggggtagaggaagcagtgggaaaggtcttgagagctctctggatccccaagcaggccattccagcctggcaacacagggatccttcaggagggcagccagaggtgcaggggaaaatgccacagggagaagaaagtctccagctgaactttgtaacaatttgaacctggcaacctcctggccagaacttgggagggcatgaatctggtgtgcagactccacaggtgggggaagaaccaagcccttagcttttgcagctgggaagtgggtagcctggggcaagttctcaagccctgctcgcccactgcctggaaacagactcggggctattaggagggtcatgtgggagtgagaccagccctttggtttgcgtgggagctgtgtgaggcctgtgattgctggcttttctccacttccatgacaacctgcatgactcattagaggcagccataatcctcctatgtacacaactccattcacctgggaacctcacctcccatcccccacagcagccacagcaagacccacccaaggaaagtctgagctcagacacgcccagccctgccctcacctgatgggccttccctatccaccctggtagctgaagacaaatggcatatactcttggaagttctagggccctgcccactgctggttcctctccatactaccacagctgatgctctctggaaagcgccacctctcagcaggagtccaacaagcacaaaagtagagcattaaatcaccaaagctaagaaccctcactgagtccatttcacccccctgccacctctaccagcacaggtggtagtatcatagctgagagacctatagatggttcacatcacagggctctgggcagacaggcctcagtaccatcctggagctgggcagacttgctgggtggctagacccagaagagacattaacaattactg

SEQ ID NO: 80546 - DNA, 1657 bp, Homo sapiens
gttttaaatgaattcattatattattataatcataaattatattatttatgttctagaaaacaggaaaattctaaatgtaccagaaaatacaatcttctttgaacttgtcatattaaaaaaattattaaaactgaattttattgcaggcaggcagtctattagtcaatgagaatgaaatcatgttcttgaaaccaggaatcccgagaggacccacatatcctctgaaagaagccaactgctcctgcaggacccgggagacacccaaaatactgtaagtgccccaactgctgaagtagaaaaaagagatcctccacacacgcgcactagggaaactcaaggtctgtttgttggaggagtttttgaccttacctggagctgagtcaatttagagagcaggcggggcgtgatggctcacacctgtaatcccagcactttggaaggctgaggtgggcggatcacgaggtcaggagtttgagaccagcmtgaccaacatggtgaaaccctgtctctaccaaaaatacaaaaattagccaggtgtggtggtacgcacctataatcccatctactcaggaggctgaggcaggagaatcacttgaacccaggaggtgggggttgcagtgagccgagatctcaccattgccctccagcatcggtgacagagcgagactccatctcaaaaaaaaaaaaaaaaaaaaaaattagagagcagagtgaaatacaggggtagaggaagcagtgggaaaggtcttgagagctctctggatccccaagcaggccattccagcctggcaacacagggatccttcaggagggcagccagaggtgcaggggaaaatgccacagggagaagaaagtctccagctgaactttgtaacaatttgaacctggcaacctcctggccagaacttgggagggcatgaatctggtgtgcagactccacaggtgggggaagaaccaagcccttagcttttgcagctgggaagtgggtagcctggggcaagttctcaagccctgctcgcccactgcctggaaacagactcggggctattaggagggtcatgtgggagtgagaccagccctttggtttgcgtgggagctgtgtgaggcctgtgattgctggcttttctccacttccatgacaacctgcatgactcattagaggcagccataatcctcctatgtacacaactccattcacctgggaacctcacctcccatcccccacagcagccacagcaagacccacccaaggaaagtctgagctcagacacgcccagccctgccctcacctgatgggccttccctatccaccctggtagctgaagacaaatggcatatactcttggaagttctagggccctgcccactgctggttcctctccatactaccacagctgatgctctctggaaagcgccacctctcagcaggagtccaacaagcacaaaagtagagcattaaatcaccaaagctaagaaccctcactgagtccatttcacccccctgccacctctaccagcacaggtggtagtatcatagctgagagacctatagatggttcacatcacagggctctgggcagacaggcctcagtaccatcctggagctgggcagacttgctgggtggctagacccagaagagacattaacaattactg

SEQ ID NO: 80547 - DNA, 647 bp, Homo sapiens
cacacttgcacgcacatggtcctaatacatggccaagtttcccttttatgcctggattattcagtctcccttgctaaacagaaaactgtactataattcattatattacttaatgacaatttaaaataactgttttcctatcgcaagaacaaaaaaccaaacaccgcatattctcactcatagstgggaattgaacaatgagatcacatggacacaggaaggggaatatcacactctggactgtggtggggtggggggaggggggagggatagcattgggagatatacctaatgctagatgacgagttagtgagtgcagcgcaccagcatggcacatgtatacatatgtaactaacctgcacaatgtgcacatgtaccctaaaacttaaagtataataaaaaaaataaataactgttttcttaggaatcttcactgattaacaatgtaatgggtcttaccatcatgcaagtacaagtatgtgccccatgacctttcagtcaataatggactacataaatgacagtatgcacataagagaatggagctggagaattcctatcacctagtacttactatacttgttattttagtgcatactcctacttattaaaaaagttaactgtgaaacagcctcaggtaggtcctt

SEQ ID NO: 80548 - DNA, 1143 bp, Homo sapiens
tgactatttccttcactaaatgcgggtggcctcagcttaaagatttatacacggaagcgggagacattatccagaatatatatcaaggaatttaaatagggatatccaattaattaacatctgtattcatttatgcctagctttacattggatagattctatagtctatatcctgccatggttcagagcacgaaactctaactagagacatgtatgtaaaataatcagtgcaagaaagattgttcactttacctccaaaaaaaccttttggctttttaaatgttgaacaatagacatttacttaattggcacttgtaaagtccataaataacttaaggggataagggcaaatctataaacactgtaaaatattctaggttaggaaagaacttttgatacttcagtgttgccatatgrtatgtatgatctcatgaatgtgaggcaaaaggaaacaattgaaattagtaacctcactgccttttttcctatctgagtgatgctgtgatgtagccactgaatcacattgagagaaatttgggcttggggctgtattttttaatacatggaaatgtcataatttaatagtactctaatactaattacctctcgtgatttttttttcctgaagtctctttacacagacctaaattgaactagattacttccctttctctcttttcttgtaaagaaacctcatttaaacttgaaccaggtatgagatgaaagtgcctagtttcctcattgatgctctataatgaatatattattccaggaaccttcttggcttaccttttgctgttgaataacaccacattttattaaagatctgtgaaatgttccctgagatgttatatagcctgttctctttagacagtaagttttgcaaaatcttcttggctttgtataggtgataacaggaaacaagaataatgagataaaacctcttctttcaggttttttaattgaggaacaaattatttcatcgtttctcattagttattcccatggattctaatgacaaggtgccaactttcacactttaaacaggttaattaatcaggtagtaatgaagttgggtgatacctgagtgttggtgtgcagaataatcacagttcctaataatgtgcttaaatgtctgtaaac

SEQ ID NO: 80549 - DNA, 1143 bp, Homo sapiens
tgactatttccttcactaaatgcgggtggcctcagcttaaagatttatacacggaagcgggagacattatccagaatatatatcaaggaatttaaatagggatatccaattaattaacatctgtattcatttatgcctagctttacattggatagattctatagtctatatcctgccatggttcagagcacgaaactctaactagagacatgtatgtaaaataatcagtgcaagaaagattgttcactttacctccaaaaaaaccttttggctttttaaatgttgaacaatagacatttacttaattggcacttgtaaagtccataaataacttaaggggataagggcaaatctataaacactgtaaaatattctaggttaggaaagaacttttgatacttcagtgttgccatatggtatgtatgatctcatgaatgtgaggcaaaaggaaacaattgaaattagtaacctcactgccttttttcctatctgagtgatgctgtgatgtagccactgaatcacattgagagaaatttgggcttggggctgtattttttaatacatggaaatgtcataatttaatagtactctaatactaattacctctcgtgatttttttttcctgaagtctctttacacagacctaaattgaactagattacttccctttctctcttttcttgtaaagaaacctcatttaaacttgaaccaggtatgagatgaaagtgcctagtttcctcattgatgctctataatgaatatattattccaggaaccttcttggcttaccttttgctgttgaataacaccacattttattaaagatctgtgaaatgttccctgagatgttatatagcctgttctctttagacagtaagttttgcaaaatcttcttggctttgtataggtgataacaggaaacaagaataatgagataaaacctcttctttcaggttttttaattgaggaacaaattatttcatcgtttctcattagttattcccatggattctaatgacaaggtgccaactttcacactttaaacaggttaattaatcaggtagtaatgaagttgggtgatacctkagtgttggtgtgcagaataatcacagttcctaataatgtgcttaaatgtctgtaaac

SEQ ID NO: 80550 - DNA, 566 bp, Homo sapiens
tgcatatatatttcagataagtatgataagaaatctataaaatgagcatcaaatgtacttctttaattcaccataatccaactgtaatctgcactcaaagctttgtgtgttaattatgaagtgatatgaatctctgcatttcctttatacttgccttttaatagtgacttggtaatatctgctaatgggctttgttgtctgatgaactgaattactgtgttctctgcaaaggactctgctaaatggtccaagatatttgtgaaattaacctccatttaaacattagaattggggaaagagcatgaaaagattacctctgttggcaaagaaaaatcaatgttttataattttcaagaaaataragcagttctaagtttttcattccttattttatttgcacttaaagcaaaactagaaaagcaatttcatgattttaaaaaagaaaaaataatattatctggctctaactctttgaatctagttatttcttttaaaattaaaattttgccttcaaagtgtcgctatttcaacctgtgcaagtaaagttactcataaacacactgtag

SEQ ID NO: 80551 - DNA, 566 bp, Homo sapiens
tgcatatatatttcagataagtatgataagaaatctataaaatgagcatcaaatgtacttctttaattcaccataatccaactgtaatctgcactcaaagctttgtgtgttaattatgaagtgatatgaatctctgcatttcctttatacttgccttttaatagtgacttggtaatatctgctaatgggctttgttgtctgatgaactgaattactgtgttctctgcaaaggactctgctaaatggtccaagatatttgtgaaattaacctccatttaaacattagaattggggaaagagcatgaaaagattacctctgttggcaaagaaaaatcaatgttttataattttcaagaaaataaagcagttctaagtttttcattccttattttatttgcacttaaagcaaaactagaaaagcaatttcatgattttaaaaaagaaaaaataatattatctggctctaactctttgaatctagttatttcttttaaaattaaaattttgccttcaaagtgtcgctatttcaacctgtgcaagtwaagttactcataaacacactgtag

SEQ ID NO: 80552 - DNA, 863 bp, Homo sapiens
caaaaaagggttacttatacaagtatttytctcttttaagtatattaactacttcagtggaaatttttgagcagcttaggtaatcatgtgaatgatgctatagaaggaggggacttgttttcaaattggcagaataaactaaataatctcaatgacctcaactaaataatctcaatgatctcaaccaaatgatctcaaccaaaatcaacaaagatgttttaaatcaaattgagatttctcctcaattaaaaatataaagttctgtcatttaaactccttggtcttcatttctccgacctgtaaaaggaaatctataccccttgtatagaaagcaccaatacccaaataatgcagtaaatatagatacggtcccattcatgaaatcatctcaataagatggtgaatttgtcattggaaagctccaagtttttcattaaaaatcagtaatttaacagacatattgaatgatttacatgccaggtactgttctcggcactaatgaatgacacactcactgtctgggaacagaggctctgacactgcattgtaagctttatagtgattcgcaggagagcacaataatatcttctaagaatttttcaaagtaataggatattttgtgattgccataatgattggtgagggatattcctagaattagatatgccagaatcacaaacactaaatagtttctttaacctataaagctttgaataacctgccagatgttcatagtcatcaaaaatctgctaagattttctatacctaaatctatactttataattttatatataataaaatatgttaaaataaccatactatataattttattataaagtataaatttagctatatatatat

SEQ ID NO: 80553 - DNA, 718 bp, Homo sapiens
acactgcaggaacagggcgggcggccgtgccagtgcctgttctataaatagcaccgggcttcaggcacctgagctgctgtgacagccacgtctttatactcccttgaaaatcagtaatccctgaagcgtgtgtgtgtgtgtgtgtgtgtgtgtgtgtgtgtgtgtgtgtctccaaacaattctggatagggcagctttctggttcagcctgggttgggagccccgcacccccagactcaccatttgcatcatgagaatattctacaccagacacagtgcatcttcggaaaaccatcttattctctgtcaaagtgccagttttatctgagaaaatgtactgtatctgtcctaagtcttccgtgatgttcagagctcggcactgcagctgcgagtctgtttcttcgtcatacaactgcatgtcctggttaatgaagtacacttggcatgctttaacaatttcaatggaaacgtataaggaaattgggatcaaaacctggaagagacaaggcacacaggatgaaygaccgtgaggaccagggagctggggaattactcaaatctatttaaataacaaatgactacaaccgcaagaaagtagggactatactgtacctttaagagagcttaaataggttggtttagagtcagtattggaaaagtattagagtattggcaaagagaataaactaggacagcttatggagcagctgcagggcgg

SEQ ID NO: 80554 - DNA, 655 bp, Homo sapiens
cagccccagggatttgggtaaatctggactattgtatcctttcttattattgggtaattttcaagctcctcctcccggcgggtgggtttggctatccctccccagaaacaccacccacagcccctgaagaagtgtgatcctggagaaatggggctgtggccctgataggctgggtccagctgcctcccagccataagaacctgaggcttctcctccttcctgaggatatgtgagcggcagtgtgggggcccagggcagttgtgaggatgacagggaattcatacttttctagtggtagccagtgtttttcctgacatctaccagagcctggagctccccgaaagcctgcctggtccaaatacagaactctctgctttgtgccgcaggctccgcacgtgcacccatcaaccagcggcaaytgtgaatgtaaacaaagggtggcaaaacaaaggctctgcagcaagaggcggatgtcctaaggaaatgtatgggctcctcactttggtgggactcacacaggaaaaaatgcccggtgaccattgctcctgtcttagatctgctttgcagggaatggcagctcctatcatgcagcaaaccctgaagtacagccctcttctgttgaaacctgccttgtagcagaaatatttgtggatcc

SEQ ID NO: 80555 - DNA, 738 bp, Homo sapiens
gggaatatgaatgtgagctccatagtctaagggtcacctttcatggttcgtatggttcatatttttcttttcggtcagcacatttttataaatcacctgaaaacattaacatggatacaattgcatttttaaagttatgtatctgaaactattctttttatatgtatgtataatttttaataacctacttgagaaaacaagtaggatttttaaacaagaaggattttttcaaagatcattcttttacccattttccatattatatgttatctattgctttataataaattgccccgaactcaatggcttcaaatagtgataaatatttgctgtctcacaatgtctgtggttatgacttggggtctctcttgaggttgcagtcaggtgtcagccagggctgcagtcatccagaggcttgaatggggccggaggattcagttccaaggtgctattcacatgttgggcagagagtgctggcaggggttgctgagtgttggccagaagtcactgtctctcctcgtgggcccctccacaggcctcgccagtgtgcttccagcaygacagcaggcttccctggagccagtgactcaagaaacaggggtggaagccacagagccttttatgaaacagccttgggcattacacaccatcacttccgtcatattgtgtgggtcacccacaccagccctgattctgtacaagaagtgactacctaagggcatgaatactgggaggcaa

SEQ ID NO: 80556 - DNA, 687 bp, Homo sapiens
tttgtattcagaaaatgaagccagactagagaaaagaagactgaaaagacacagttactgccgtagggggaacacacagctgatgcacacacactcatggstgcagcaaatcaccaaccacgatgtgcgaaagtgtggagatggataggagagggagagctttgcttccagggcatggggtgggatatggcagtaactggggaaggccttgaggagaatgcaggatgccatcacaggaactccatgagctccctggactcccacagcagtggagactcctccttcatcccgttgctcccactgacttcaggcggcacttgggcaggacgcataggctcattactgcagagctctgagagggagtagcagccgatggaccgggagaggagacaagtgtgctaaggacactgaatgggtggtgggtatgtcactgtcactctggtagcccctggcttagcccaaggcaccagggaacctggacgtgggctccaaggcaatgacagagagagctccaggagataccttctagctctggcttgaggagtgaaaagggggttcccagtgctctgagaagatgaggaagtctccaattttatttattctttttcgtctattattttgaactcagtcccaggcaattctgctaccgtggctatgcaggaatggcagtggcagaaatgtctgctg

SEQ ID NO: 80557 - DNA, 1498 bp, Homo sapiens
tgcccaaatccaagttcaaggtctgaggttccctgtgccacacagatgactcaaaaccaggttgcaagtcctggcatggttggtttatgtccacttcaccctttccctgcatgttgttggcctttggagtcctagctttatgtgagtacagtgtgccagtagccccatttcagaaagcctgggcatttgacttttatttcttctaatctgatttcagttttcctgctatttctttgtttatagaggaaatcctcagggcaaaattcgctttgagccttcagcttattttttctggctcttgtcttctttcaaagtatggtcctgtaattcttcactctcattggctctttgatgcttttaagataatatatttcaacatcatacagatattttcatttttctcagagcaaggattggtctgaattacccagcctgccattactagaaccatttgttacttttacagttggggaaaaaattaaaaagaaacatccatgcatatttgggagatcagtgtcagttttgacttgtagatgctgaacccaagaaaaatacaatgttagtatttttctcctttgggaataaaataattttctttctcatagcataagcccaagcaccttggaagctaaaacgactatgtatgtctcagaatgcccccagagcagttaatgagaatggactgtgatttgtagggaaggattatgaatcttttcagagacacatttccagcacacccacgtctcattatcccaagtcacgggagaggttatggaagtagtgtggcccccagagcctgaccttcacctctccagtgcaatacagcagcaagagaattagcagataaacagacgaaagaatgagcaaatgaaggaacaaaccaaagatcatttgtttttcttttttttaattttcaaaagttttttttttttttttttttagacacasggtctcactatgttgcccaggctggtcttaaaggaatcctccctctgtgacctcccaaagtgttgggattacaggcgtgagccacctcacccgaccatagaccatctgtttccaggcctgagctcgataagaagcccagtgctacattttcaaagacctgagtggccactgagagaatatccaaagacaatttaaatcagactgtggatgcaattatcacgcgcccgatgatgtgcctcattttctatacagaggcccttttcaggagatgctgtacctccagatcataaaatcaggtagatgacctctgcagatctggctgttcccaggagggctgagcgcagcagtcagaagctggcacggaagggagaaggaggccgatgggaacagcactgacaacagcccgtgacagggccggcccttctgtctgcaccagcccagcacgccgggctgcacagcagattctccaacgcgtcttccagacctcagcttccacactgtgacggttagcaaggctgacgggcgtggacggcgaggggtcgggaagagt

SEQ ID NO: 80558 - DNA, 1498 bp, Homo sapiens
tgcccaaatccaagttcaaggtctgaggttccctgtgccacacagatgactcaaaaccaggttgcaagtcctggcatggttggtttatgtccacttcaccctttccctgcatgttgttggcctttggagtcctagctttatgtgagtacagtgtgccagtagccccatttcagaaagcctgggcatttgacttttatttcttctaatctgatttcagttttcctgctatttctttgtttatagaggaaatcctcagggcaaaattcgctttgagccttcagcttattttttctggctcttgtcttctttcaaagtatggtcctgtaattcttcactctcattggctctttgatgcttttaagataatatatttcaacatcatacagatattttcatttttctcagagcaaggattggtctgaattacccagcctgccattactagaaccatttgttacttttacagttggggaaaaaattaaaaagaaacatccatgcatatttgggagatcagtgtcagttttgacttgtagatgctgaacccaagaaaaatacaatgttagtatttttctcctttgggaataaaataattttctttctcatagcataagcccaagcaccttggaagctaaaacgactatgtatgtctcagaatgcccccagagcagttaatgagaatggactgtgatttgtagggaaggattatgaatcttttcagagacacatttccagcacacccacgtctcattatcccaagtcacgggagaggttatggaagtagtgtggcccccagagcctgaccttcacctctccagtgcaatacagcagcaagagaattagcagataaacagacgaaagaatgagcaaatgaaggaacaaaccaaagatcatttgtttttcttttttttaattttcaaaagttttttttttttttttttttagacacagggtctcactatgttgcccaggctggtcttaaaggaatcctccctctgtgacctcccaaagtgttgggattacaggcgtgagccacctcacccgaccatagaccatctgtttccaggcctgagctcgataagaagcccagtgctacattttcaaagacctgagtggccactgagagaatatccaaagacaatttaaatcagactgtggatgcaattatcacgcgcccgatgatgtgcctcattttctatacagaggcccttttcaggagatgctgtacctccagatcataaaatcaggtagatgacctctgcagatctggctgttcccaggagggctgagcgcagcagtcagaagctggcacggaagggagaaggaggccgatgggarcagcactgacaacagcccgtgacagggccggcccttctgtctgcaccagcccagcacgccgggctgcacagcagattctccaacgcgtcttccagacctcagcttccacactgtgacggttagcaaggctgacgggcgtggacggcgaggggtcgggaagagt

SEQ ID NO: 80559 - DNA, 995 bp, Homo sapiens
gcataaaaatacacatttttacccactcacacatatctatgtgtttctagttcgatgaacactccttaaactatattatcataaaaatgatagttgaaaaatgtttgatttttttccctcaaagtttaaaacatatctgcacttaagaagttggtgaaattaaattatatgtctaaggaaagacaaaagaaatactgaagcaaagatgaaagactggaataaaatacacaaaaatgcttgtagttgttaaaatgatagattagaaattgtttttttaatttccataaatttctataataattttgtttttattttcatatctctataaaaactaacatgctgtcagatggattttttcttgccacattgaactaacaaatgtttcaaataaaggaaataataatttgtactaggaaaagtgaatcacttcatattaaaacactatatataatttatataacagaaaagatacacaagccctaaaatactgaacaatgtaaagcaattaatgagaaaacatatccacatatttatctcttaaacggattataaagccagatggaatatgggcctaaattacaggtcccatacaaaatcaaactgaaattcactttggatcttcaagtgcttataggccagtttaaaaaagttgtacaaccattgtatttaatatagcttctacttttcatataaaaatttaattgatttttagaataacactaggtcttctgtacagaaaaagagtgtgaagataagcccaattcctgagcacttctgaaatacaaatcttcattattttgttaatatttaaaatttatttcagaaagtatacttgcttttttttccaagtcagaaagttatcattattaaaatctattttaaataytattaatttgctcaataattaatgactggtccatttttttcagtaagaacttctaagcaacttaataatttgtaaagctttgagataagaaaatattaaagggctataa

SEQ ID NO: 80560 - DNA, 739 bp, Homo sapiens
ccctagtcataacagtgctagaattggcccaaatttatccagaacttccaaaatggcacttgactccttttcagtgtatcaacacaaattaacattatataaaattcggcaagttttacagcaaaaagaaacataaccgagtacacatgtacctggaattgaagtatttcatctcttttctcttttccttctagaaagagcatgagatttagtatcggaaactgttctaattctggctttgcctcttattaatcataataactagagggagttggttaattctctgagcctctctttttccctttgtaatgtggagctgataactctttttactgtggggtgctttcagcgtctgcctactggcagtctccagtcctatttggactccagacctttccttatccattcctgggctgggtaatgttggtcctctgtcctccagtacagtarttttctacaccatttgttttcttatttgtctccctcagtagattttgcatccataggcaagtgcaactctgtcttgttcacatttgcagcatccattcttgggcatagttaatgctcaattaaatccttacttagcccataagaaatcagtcacaatagtcatctatcttagactcactctattgctaactttattcagattatgtagaggacgatgatattctaattcaaagactcacagtatatatatattcctggaaatgacttgctgaattcctctgagtgacta

SEQ ID NO: 80561 - DNA, 2324 bp, Homo sapiens
  misc_feature (1)...(2324): n = A,T,C or G
tgcatgtggatagacacatgtaagattcacttaagtgtcaaatttactaatataatgaaaacttggcccacacaagcaacaaaaaatattatccagcactcatactcaaaacgcagtgtgagagtttggttttttcagttcctaaaggttgatcatgtggttcataaaatctgagtctccaaaatgtattttcaaatgaatgtcaggcagacccaacaaatgagaactagggtacttaggattattgtaattgcctaatgtgtttggtgaccttgtattcccacttacagcaacttatgcttctttcaaattcttttgtacaaaaaaaattgtcttgtcgcactctccacttagcctttaagtcactaagatgtggctatttcattagttgaaagcaatgtctaaaataaaatattttattttaaaaatcaatcatcttgcataataatagctttaactttatgctcaatttaaaatatgttgtatttaaataattgcttacagaatagaaatagaaatgatatataagataatatagaagatgtaaggatttaagaagttaggatggcagtatttttatttactyttatcatatgtgatagtgtcttatagtgtggggaaaacatttaaggagannnnnnnnnnnnnnnnnnnnnnnnnnnnnnnnnnnnnnnnnnnnnnnnnnnnnnnnnnnnnnnnnnnnnnnnnnnnnnnnnnnnnnnnnnnnnnnnnnnntttaattattgacataattattcaggatattaatcttttatcattgctataacacagtcaattttcatattgccattttctttttattatttaaacacctctctctgttgggaatgcagacaaaaagatggaagagatttataataattaggtaatataagtttagtaggggctccatctttatttattcatatattcagagcgagtatttattgcccatgaattctatgccagaaaatgtgatatgtaatttttttaaaagtcacaatccttgctttcatggagcttatggcatagtggaggagtcaaacattattgaaaagatcatatacacatatgtaagattgcagctgtcatagtggctaggaaagtgaggaatgtaaacttctgatagtgtaaacaaattattgttccaatcaaagagatagtggatagcttccctgtgaaaatgaaaatcaagctgacatatagatataaatgagtgtttacttgaagtttcaggagggtcaatccagactgtgggaacagcatgtacaaagaccatgcatcaggaagaactgctggaagggaaaatggtgcagtatgaatatgttgaagcaggttggggatatcctacgtaaaggtgtgtataccatgtttttaatctttctcctaagagccatgcaaattcattgaaaatttttaaagtgtggcacgagacacgatcacatttgctctatataaagactactttggctacactatggagactgaagaggaagaaaggtagatttcacgtattcttacaaagagctggagcctatgaaaacactgaaagctggaaatattaaagaaatgaatggatattatgatgctcacgaggtaaaatcaataatgatatatttgatatggggcatatgctggagaagataatgaagctaacaagttttatgacttatataaaaagacaccatttaagcaagagatgttggaagaggactggttgaatatcataagtatgatgttggccatgttaaatgttaaatttgaggtatttttaagtcatttagtagaaatgtcaattatgtagttgaataaatcagtctagatcccagagctcagatacacatctagaaataatacatttgtaaattgtgtgtagatggggacaatagcagtaatgaacacagatggaattgcctaggcagaagagctcaaatgagaaaaggatgtaggcccaagtccagagaactgctaacatgagcttgaaaaaggaactgagaaagaggtgtatgttatgtcatgaaattcaagggaaagttgtgtttgtgatggagggagaaatcatcaatgctaaatgtcaagagacctgattagatgagctctgaagtatatccactacgttcaacaatacactaattaagaagtactttttccatgaggaatatggtatccaacactatggggaaaaagagttttctcagagtgactgggatatataaaaatggagagaaaatgtggtaatgtggagtaaccagagagtagagggaagggctcaatctctttgatttcattttaacacgaaacacagaatcttttaatgggaaatc

SEQ ID NO: 80562 - DNA, 644 bp, Homo sapiens
tgtagttctgaattaattattagcacatatataaaaaattaagcggagattcctataatttactggaaaatataaagatgcatatttttattgctatattttagtgcataataaattgaaaagcttgacctaaaatcagcctttacacctaccctgcmtataagatcgtgctttcctgcatagatgaaacaaatgtcacttgcaagtgattaaaaaaaaaaagaaaatgagcattagtcctatttattcttgcatttctcagcatatgttccagcagtgtcaccaaatgtaatattacatgtatcgaaatgcatcttaattcctgagacgtgtatcgaagtgcatcttccctgagactgataaaacaaaggaggggtaattttcaaacgctttgtttttgatgagtgttctgttaaaaaattctccttcacttttaaaacagtgaaagaccttgctttcaaatgctaatcagctgtttctttattccccagtagacttcagactactcggcctcaatacttttttcttgagtactttactgaccatggtcttggagattacatttggctcagaacaccatcctagcttgttatttttaattgaattgcaaagtacatctactctacataagaatcattgggaaa

SEQ ID NO: 80563 - DNA, 700 bp, Homo sapiens
tttcccagaggtaaccatccatgggatcatcaacactgccattcatgttgcttgcttgtgaacaattattatacagtgtgaattattttacccaacattaggttcataaaacccattaatggtgttgtttataagtgagatttgcttgttttcattgttgtgcaatattttattgtttgtgttcaaaaaaaaactttagatgaatgaaatttaacagagttgaattgagcaaagagccattcaggaattgaggagcccctcaaaccagataggttcagagcaactggggggctgccacaagattagataatatttatggacagaaagaagaaagtgacatacagaaaatggaagtgaagtacagaaacagctggattgattacagctccacatttgccttatttgaacacagtttgaacagttggtcacctatagttggctgaaactctgtgattggtacaagagtaggttacagtctgtttgtacatccagttaggtcacagttcactacgcatgaagaaaccttgaggccaaacttaaaatatgtaaggaggtatccagtctactctcaaagtatgtttgggctgtttccagtttagactattatgacaatgcttctacaaacatttctgtctcttggtatgtacattcatctagtgggtatgtacctaatgggggaaatttctgtattytaagatat

SEQ ID NO: 80564 - DNA, 738 bp, Homo sapiens
ttttgtagcatggcaatggaagaaaatatggagggcttcagggcaatagaaggaaacctctcagtaggtgcacagagtagaattctctccttcctttccaaaagctaggaaggcttaagaccccctcctacagcacagacacaagagaggagttggcatttgtagcaggcacatttcctattgaacttttagggcaaggatcatgaacgctgacttcctagcatgtgtgtgaatcccttcattaacataatgcaaatatttaatgttcggtttatttatttttaagagacagggtcttgctctgtcttacaggctgtaatgcagtagtacagtcatagctcactgcagcctcgaactcctaggctcaagcaatcctccctcctcagcctcccgagtagctaggattataggcatgcccagctaattattttacttatcgagaccaggtctcgatatgttgcccagcctaatcttgaacttctggcctcaagcaatcctcctgcctcagcttcttaaaatgttgggattacaggtgtgagccaccatacccagccatagctaatcttttagaaatgcagttgatttagwcagatcttgactcaattgcccagagaagtgagagaccaagaattgtttgctgccatctgcatcaatacaaggaagagaccagccccctgaataacatgggaaacctatgagctctggatgcagaaaagcatgtggaagtggtacagtatg

SEQ ID NO: 80565 - DNA, 1241 bp, Homo sapiens
ggagtatgtatttctcctgccctgagtctacaaatcatctttgtgtgtgggaatctatcttagaaacttgaacagttagtactcagtaaatattggttggattaataataatgaaacaatgaattcagattttcctgtgtgtggtagaaatgttcagaaatacatgtaatgaagatgtctttttggtgtgtgctttcttccattcccttcttaaagaatgtgtaggcrtatgtatcctgtgactttgtccataaatgattggactagaggtagaagcataaaccaaagtgggccaactagttttttcatccccaaagtttgaattgtgatgtggacagagcaattcatatttttctgggttctggctctgcaatattatgtagactcagcggctgaagccaccctattgaggtggcagtgatgtcccatatagaagtgaaggagagaatggaatgatcctttgagaagcaaaagtggagacagggacaaaaggtagatgtttgaatttattatagtttttcccaatctgggctgggatttttgagaattcctattttcaaagctagctttcctggggatttaattcattgcaatgaaactgtctagccaaagcaagcagtaagaataatgcaacaaatgacatttaatttaaaccataatctaaaaggtaagctgactctacagaaattaccaatacaacatttgtatgtaacatacgaatgtaactttttattaagaatagtataaagatatgggtaacacatacagccatcctgcttagtttaaataactaaagtgtcattgggactaaaagaatagtactctgaaatggtctctgctcttctaaggattagtttattcaatgattcagtgtcaagactggatgctgatattaaaaacatagatgacatagtcctaccttattaagctcagagcttagtaggggaaatggaaattaacaaataattataatgttagactcttatatgaataaacaagaaacaaaagcaaaccacatcagtctacaataaagtctggaagtgttatgtacattcataacatcagaagctcctgatatttagtgatgtcagggaagacttcaaggggatttgagacatgaggacagaggtgtttgtgtgggtagagaagaaaatggagacatggaaggtggaaaagcttcctttacgtgtaacaatgttgatagaaatgtaaatattgttcagctttttttgaagggcttg

SEQ ID NO: 80566 - DNA, 759 bp, Homo sapiens
cttgtgcccaggggttagagactgcagtgacccataatggtgcctgggctccagaacaagaccttatctctaaaaaaaaaaatgaaaagaaagatatcaaccaattaaaatgccagcattctttgtcacaataattatcatttggggggatcaattcttagctaatcacttgaaatgtgtggagaaggcaaaaaatactttataaaaaagtgtattagtgaggrattatttatagtggcaaaattttggaaaaatttaagtgtccaacaatagagacatggataataaccttggaaaatcaacctaatgaatctgattaatcatataaaaacacatttataaataatttataatatgaaaacacttatgcttcagtgacaaatagaaagaatagaacacagaattcatatatagagaccataatcaaaagtagctaataaaaatgataagctatgcaagaggtaaaaaagaacggaaaataaaactaccaaaagatcaacaatgtttaggtaaccagaagatcaaactatcaataaataatttttgctacttttctttatttctagggacctataaatgacaagcatcaatcatgttctttaaagaaagaatgagagcagcctctcttgccttatctttatcatataaccaacatcttctaagaagaagccaccttagcaaatgttaagagacttattttctccattttttcatcaggaaaaaaatatatatccaaatgaagatgctgggacaactaca

SEQ ID NO: 80567 - DNA, 759 bp, Homo sapiens
cttgtgcccaggggttagagactgcagtgacccataatggtgcctgggctccagaacaagaccttatctctaaaaaaaaaaatgaaaagaaagatatcaaccaattaaaatgccagcattctttgtcacaataattatcatttggggggatcaattcttagctaatcacttgaaatgtgtggagaaggcaaaaaatactttataaaaaagtgtattagtgagggattatttatagtggcaaaattttggaaaaatttaagtgtccaacaatagagacatggataataaccttggaaaatcaacctaatgaatctgattaatcatataaaaacacatttataaataatttataatatgaaaacayttatgcttcagtgacaaatagaaagaatagaacacagaattcatatatagagaccataatcaaaagtagctaataaaaatgataagctatgcaagaggtaaaaaagaacggaaaataaaactaccaaaagatcaacaatgtttaggtaaccagaagatcaaactatcaataaataatttttgctacttttctttatttctagggacctataaatgacaagcatcaatcatgttctttaaagaaagaatgagagcagcctctcttgccttatctttatcatataaccaacatcttctaagaagaagccaccttagcaaatgttaagagacttattttctccattttttcatcaggaaaaaaatatatatccaaatgaagatgctgggacaactaca

SEQ ID NO: 80568 - DNA, 759 bp, Homo sapiens
cttgtgcccaggggttagagactgcagtgacccataatggtgcctgggctccagaacaagaccttatctctaaaaaaaaaaatgaaaagaaagatatcaaccaattaaaatgccagcattctttgtcacaataattatcatttggggggatcaattcttagctaatcacttgaaatgtgtggagaaggcaaaaaatactttataaaaaagtgtattagtgagggattatttatagtggcaaaattttggaaaaatttaagtgtccaacaatagagacatggataataaccttggaaaatcaacctaatgaatctgattaatcatataaaaacacatttataaataatttataatatgaaaacacttatgcttcagtgacaaatagaaagaatagracacagaattcatatatagagaccataatcaaaagtagctaataaaaatgataagctatgcaagaggtaaaaaagaacggaaaataaaactaccaaaagatcaacaatgtttaggtaaccagaagatcaaactatcaataaataatttttgctacttttctttatttctagggacctataaatgacaagcatcaatcatgttctttaaagaaagaatgagagcagcctctcttgccttatctttatcatataaccaacatcttctaagaagaagccaccttagcaaatgttaagagacttattttctccattttttcatcaggaaaaaaatatatatccaaatgaagatgctgggacaactaca

SEQ ID NO: 80569 - DNA, 839 bp, Homo sapiens
ttgcctatagcaggactaagtgagctggttgctagtgtttaattgtgtgccctctggctatagaacacagtttacctaagtcgtcaatacaggaatcaaacgtacaaattagtccttgcttagaagtgaggttgacataattaaaataagcaaccagcattatcaaagaaccctatgaaaagcatgttagcattttaaaatccaacaactttattaaatatctagaggctaccttgctgttcattgttggtaattaaacagacaccaacattaggggagattttagctaatgtcagaggcattcctctcattaaagtctgcataatcactacatcatgattgccccaaaaagtaacattcaagattgctgaagagacaaaatatctatttccaccttgcctaattatctgtggtgtgaatacatctgatttcacagtttggggagtggaatctccataatgattatctgcagcaaatttgtttttatatattaaggaagagtttctcaaacctatgaaaaattgtttgttagtaattcaaagtgttgagaattcatgtatacaaagtttgcatgtaagtcctaagtatattttattgctttatcacagctagaggctactcaaatttttacctttcatttccattaatattcctcygtttttgatttgcattgctctaatgatcagtaatgttcaggttttttttcatgtgtttgctggccatgtaaatgtcttcttttgagaagtgtctattcatatattttgcctactttttgaaggggctgttttttttttcttataaatttgtttaagttccttgtaaattctggatattagacc

SEQ ID NO: 80570 - DNA, 527 bp, Homo sapiens
cctcatttattattgtctgccttggatctctgctacacaattcacaactccttttataaatgagcgtcttgagccattttacttctattctgttttctggcttccatggtgacagaaactttgacttaaggcaaagagcttccaatcagggatagaaggatgaactgttaatggctccagtgacaatgtaacctttcatacagttcattccagctttyggcaaaaattcagattttattgaggaatatctaagtagaatgactaaaaatatagtttttttccataatggagataagtaagtttattatagtatcataaaatttgctttcttccctttcattcaaaaatgcagagcaagcttctgtgttaaatgtaggcagcatttccacagtcattaagctaaagtggctgttgacctgtctgctcatccacccatgtgtggctacagggtttatcactacaggttagcaccacagtgactgatgggctggactctgaactccagactccatttgacctaattgcga

SEQ ID NO: 80571 - DNA, 934 bp, Homo sapiens
atatatatatgtgtgtgtgtgtgtgtgtgtgtgtgtgtgtgtgtgtgtatatacatacatatgtgtgtgtatatacatataatgtatatgtgtgtatatatgtatatatacgtgtgtatgtgtgtgtgtgtgtatacacataatttttggttggttgtttgagacggagtctcactctgtcacccaggctggagtgcagtggcgcgatctcagttcactgcaacctccgcctcccaggttcaagagattctgctgcctcagcctcccgagtagctgggattacaggtgcgcgccaccacacccggctaatttttgtatttttaatagagacaggtttcaccatattggtcaggctggtctcgaatccctgacctcttgatccgcccgcctcggccttcctgatccaaccgcctcggcctcccaaagtgctgggattacaggcgtgagccaccacgcccggcctgggctcaggttattatgcaaacatccagaactgggcagatcaagatgaatgataccaatgatactatcacattataggcaaaataggaccttctccccggtcagaaaagtgaactctcaggcatcactcctactggaatccagagtcaataaacatttatgaagcacctactgggtactaggagctgttgtagaaaggtactggggagaaggcagggaacgaaatgtacaaaaattctgaccacgtccatagtccctggccccgccccactacttgccccaaccctcacaggaacagtttccagccccgcccccagccccrcctcctctccaccccctcacttttctgaacctaccagagcgaggtgaagggtgagagtaatctacatattcatgagggatcagccaatccacagcctgaactcggatttgtcttcagagcctagctgattgtgacgtcaagagtgatgca

SEQ ID NO: 80572 - DNA, 1115 bp, Homo sapiens
tgtgtgtgaaatgtggtcagctgcctgctttatcccaggtgcagagtcggactgctgtgtgctgcctctctgcagccctgtggactcaggctctggaagtaagtttgtttttttttttgttttttttttcagcagatggggaatatatttcataggaaaagggaggaagggatgaaggaagaaactcatgagaaatggcttcacagaagccttcagcatccagcaacaacaatgtaagccctgtgggttgggtccttcctgggtttcagaaggtttctttaggaagtggctttagagtcaggacccgtcaggagcagaataactcgaccaggttgtttttaataaaacaatgaggaagtatataaaactctccagggtcgcacatgcacacccaaacacacacatcccttgcttgtgctttgcgctcttctcactaaggggcagatggaagacatgcaggatgggggagaagcgccagagctggggcaacctgaccttttcacttaggaattgggaccctgagcaggtaatgccgaagctcgagtttcctcctctgtagaatgggtgtaaatagacagcacttaaaggtgcagttggcatgaagtgagctgtggacagtgtgacattgctggtcagcagtagctcctcacaatccattccccttccacagacctcccaacctcacttccattttagagctgaggtggatgaaatgacattccaaaaacaggtgaccacctgcagtctcccagtgggatgcacccaggctgggaccagaccccgactccccactccaaactccttgtgcagggctgctcctgatgctctcgcgcctatcctggccaccacccatccgcgacacacagtggcttcttgcaatccttaatgcagaccacctyggaggggccagggcacaggtgggccagctttgcctgagctttcggctgctccttgatgcagatttgcttcccctcgggcacatgtgggaaacctgtagggcagccgtgacctgggcagcatttttaagctgcttgagtcctgggaggaggagtaatgggcaggaatctgagggcctggaccccagccatggggtgggggaggcccttcccaccacg

SEQ ID NO: 80573 - DNA, 1197 bp, Homo sapiens
acctcataaaaacacaccgatcagtggtttgtagaatatgttctccaaaactgctccttcaactgagcctttgccatcagagatcaggaactggcaaagccaacagttgaagctaatttccttcttcccagggattctgcctgcaattcagaatgccatgcaggtgcctagtggtatcctcagcctcaaggccctgcaaggcatggcaaactgagacaaaaatgagctaacttcccactctgcccaccgtgatgaggggcctctgagctgcactaaccatcccccaacaaacgcttcccccacaagctcccctaacaggaggtggctggaagccacagatcgcagacttgaaacttcttgcaagcctcatttcctatttggaaactgtactgattccatgtgttctgtgttttaacagaaaaatgagtgcctgcttgcctgctcaaatgtctttgattaagttatttcacacactagaatgacctagagtcctttaaaagatactgacacctgcaaccccccacacccagagagttcattttaattggtctgggttatgctctgggaattagggttttcaaaagctccccaagagtttctgacgtgtagctgaggttgagaaccaccaggcttgtgagatgttctgtttttatctgtttaacgtaktccagggcacaccaccatgtacccactaagagaaccttaggcacaattactgcccaccattcagaacaaccaatgccttaccaaagacaactgatagcttagccagtttctccaactctttttttactacgagctactcccacaaagaaaatcaatcatgaacaaagacccagtttctctcaccaagatgcactactgcagagatctgtgatttggggcagtaatttttttttaatttttaattaacttctaactgaaatttagtatttgtttcaattttagatgcaggcaatgaactgcagtcctgttagcaatagaagatattttcatatcatggtgtagctatcttgaaatgtcacttatgctcattgctgctttaaaatcacagtagtcatcagacttgctgctggatctggctatgtaatgtcctcgttttaaaatgtgcatctattaccatgtcacaaatttgcctttttaaaatgttttggtaacggtatttcaaaatatttgatttcctacgtattaaattta

SEQ ID NO: 80574 - DNA, 1197 bp, Homo sapiens
acctcataaaaacacaccgatcagtggtttgtagaatatgttctccaaaactgctccttcaactgagcctttgccatcagagatcaggaactggcaaagccaacagttgaagctaatttccttcttcccagggattctgcctgcaattcagaatgccatgcaggtgcctagtggtatcctcagcctcaaggccctgcaaggcatggcaaactgagacaaaaatgagctaacttcccactctgcccaccgtgatgaggggcctctgagctgcactaaccatcccccaacaaacgcttcccccacaagctcccctaacaggaggtggctggaagccacagatcgcagacttgaaacttcttgcaagcctcatttcctatttggaaactgtactgattccatgtgttctgtgttttaacagaaaaatgagtgcctgcttgcctgctcaaatgtctttgattaagttatttcacacactagaatgacctagagtcctttaaaagatactgacacctgcaaccccccacacccagagagttcattttaattggtctgggttatgctctgggaattagggttttcaaaagctccccaagagtttctgacgtgtagctgaggttgagaaccaccaggcttgtgagatgttctgtttttatctgtttaacgtattccagggcacaccaccatgtacccactaagagaaccttargcacaattactgcccaccattcagaacaaccaatgccttaccaaagacaactgatagcttagccagtttctccaactctttttttactacgagctactcccacaaagaaaatcaatcatgaacaaagacccagtttctctcaccaagatgcactactgcagagatctgtgatttggggcagtaatttttttttaatttttaattaacttctaactgaaatttagtatttgtttcaattttagatgcaggcaatgaactgcagtcctgttagcaatagaagatattttcatatcatggtgtagctatcttgaaatgtcacttatgctcattgctgctttaaaatcacagtagtcatcagacttgctgctggatctggctatgtaatgtcctcgttttaaaatgtgcatctattaccatgtcacaaatttgcctttttaaaatgttttggtaacggtatttcaaaatatttgatttcctacgtattaaattta

SEQ ID NO: 80575 - DNA, 835 bp, Homo sapiens
atatatatgaaacatacaaacaaatatagaaaatggacacaagactcccaagtatgctaaggcctaatatagccgatgattagcattccattgtatgtttgtttcaaaactcttgtttattttttgttactaatgtggagctatgtgctttcttcccactctttcttgtcctgctccctcccatgtataggtaccagagctctaaagttggtgattatcattattgtccatatttttgtacttttwctaagtttacatgtatctataaataagatacagtattgattactgcttctctataatgtacataaatgatgtcacagcatatatattctttgtacctaaactggacttttggcaccttttcacaccatgtgttgatttaaagtgcacaattaaatcaacattacccagaaacatcttgatagaatcaagtaaagagatctcatggtatattaacaaaaatgtgaggattgctatcagaatcactcttagaattcatacctctgtatggcagtggtcagtaaactatttctataaaaagagccagatagtaaaaatgttctgctctgaaggatatatggtttccatggaaactacttgatctatttcaaataaaaaaagcaggcatagataatatgtaagtgaatgggcatggctgtgttccaataaaactttatttataagaacagactatgggctgtttttgaagtttgccaacctctggtacgtggcagtgagagaggaaggagggacctggctgtgccatcttgctgtctatagaactctggggttggtagggctgatctaaggggtcaacttcctccttgatgct

SEQ ID NO: 80576 - DNA, 835 bp, Homo sapiens
atatatatgaaacatacaaacaaatatagaaaatggacacaagactcccaagtatgctaaggcctaatatagccgatgattagcattccattgtatgtttgtttcaaaactcttgtttattttttgttactaatgtggagctatgtgctttcttcccactctttcttgtcctgctccctcccatgtataggtaccagagctctaaagttggtgattatcattattgtccatatttttgtactttttctaartttacatgtatctataaataagatacagtattgattactgcttctctataatgtacataaatgatgtcacagcatatatattctttgtacctaaactggacttttggcaccttttcacaccatgtgttgatttaaagtgcacaattaaatcaacattacccagaaacatcttgatagaatcaagtaaagagatctcatggtatattaacaaaaatgtgaggattgctatcagaatcactcttagaattcatacctctgtatggcagtggtcagtaaactatttctataaaaagagccagatagtaaaaatgttctgctctgaaggatatatggtttccatggaaactacttgatctatttcaaataaaaaaagcaggcatagataatatgtaagtgaatgggcatggctgtgttccaataaaactttatttataagaacagactatgggctgtttttgaagtttgccaacctctggtacgtggcagtgagagaggaaggagggacctggctgtgccatcttgctgtctatagaactctggggttggtagggctgatctaaggggtcaacttcctccttgatgct

SEQ ID NO: 80577 - DNA, 1375 bp, Homo sapiens
gtaaaaagtggttttgcctccatttatgtcttcattttaatatccccaatctatacatgtatctgttctttggattctcttctgaagtgcgtaaaatatctgtgtagttccctcgttgattatgagttaaatatgtaacatgtgcccagattcatatctttatgaaaattatgactatattctgcttgtgaaattaccttttaacagctccttgtaatgttccaagggattaatgccagcagactttctgcataacacatacttgcatttgtttcctccttctctgttagactcttccttgtccctcactattggctccttatgtcacattatcaaataaattacttatatgcaagattttgtcttgatctccgcttgcaggaaagggtatgcctaagttattgaagcatgaaaattattctatcaatgttagttattatttgggtatgttgtcaatataaattaaaatcttgaaactaataatggaagccatatattgaggatggcagagaaacaaggagtctgggtttccaacaatcacagaaacattatatcaaccctggactgtatatgtttacatgaaagagaaacaaacatctcattttatatgccaccatcattttgagttttctgtcactcttgactgaccttcatcccaactgatgcatcccttcttttcctaagttcattcttgatatgaaaaggyatctgcatctacatgaaaaaggcagagctgagaagaaggaaacatccatggatgatcaagtacagggtatcccagctctggttgactaccaatgatgtggaacttcacagttggctagaattctgcaagaagttttcctggttaagatgtgacttgagtagattcaaaaggagtagttggaatttaaagtatcaaaatggacaaggcaggaaattcaaggaagagagcttgagaagtaatatgaagggggcaaggagtatggagtgggctgtggtgggcaagagtgagacgacctccctgaatagagcagtagagttccagagaagatataaacagtcctcagagcaccccttctcctctgcccaccttgaagtacagctgtaggggagccctgagtatccctcatttcacaggaccacgtggcatttccattcacatctctgaatactctttactccttgcttccataaacctcaaatggtattgtgttgtagattcaatgagatgaaatagcaaaaggacgtaatgggatgctcgttaaattctcccttttttccttcctttctgtcatgacacccgccggcacccgcacttctgcccgtggcgtttcctcttgcagttacaggatccagcttctatcagaggagaattttgccattcaggtagtct

SEQ ID NO: 80578 - DNA, 623 bp, Homo sapiens
cagatcttaaggcagcctctgctctaaggctaacttatcccaaatactgaagttgtaactatgcgaggacttgaaccaatgcccatgtataaggaggcctttccaaactcaatagaacagaaaatattcccagcttgcaaggagctcctagcattattaaactgcttcccaaaaattatatcgctgcccttaccgagttccctttcatacactctaaaaccagtactctgccaaaaacaagagggkatgcttctgcaaattaccagaatgccctctatgaattccatcttctctggtgttctgcctcaacaaatacctgccttactggcctcttgaattctgtctcctgtgttattacttggaaactctctgcaggctgatagactctcttcggcttcttctctttggtctgggatcacattcctgtactacgttttccaatgattgtatgcaaaccattgttttatatgttttatctattttcttattatttaaagcaagaaggaatatggtctttcttactccatcatgtctgtaagtagaagtccctgaaattgctttttaatttccatttcccgttgtgtattgctagtgacttctgcttgtttttaattttggattac

SEQ ID NO: 80579 - DNA, 623 bp, Homo sapiens
cagatcttaaggcagcctctgctctaaggctaacttatcccaaatactgaagttgtaactatgcgaggacttgaaccaatgcccatgtataaggaggcctttccaaactcaatagaacagaaaatattcccagcttgcaaggagctcctagcattattaaactgcttcccaaaaattatatcgctgcccttaccgagttccctttcatacactctaaaaccagtactctgccaaaaacaagaggggatgcttctgcaaattaccagaatgccctctatgaattccatcttctctggtgttctgcctcaacaaatacctgccttactggcctcttgaattctgtctcctgtgttattacttggaaactctctgcaggctgatagactctcttcggcttcttctctttgstctgggatcacattcctgtactacgttttccaatgattgtatgcaaaccattgttttatatgttttatctattttcttattatttaaagcaagaaggaatatggtctttcttactccatcatgtctgtaagtagaagtccctgaaattgctttttaatttccatttcccgttgtgtattgctagtgacttctgcttgtttttaattttggattac

SEQ ID NO: 80580 - DNA, 617 bp, Homo sapiens
tgcatattatattctgcactctttcccttaccttttaacgcatacccaggtgatttatttgttatgtcatatgtgaaaacatatggtgtttggtttctcctttttcttaatcacctagctggaactttctagatttcgtccatggggagrtctcttttaaaaatttaggctatagagttatactactcctgttctgaactccttgtaataaactccctcaaaagcatatgcaaacatttttaggttagtggatataaacttccataatttttaaactccagccagtctatcataactcatactgataatgtgcttgttgagggtgtaaaagggcccccttcaatgataactaggtgggatctatttatttctaagtgctggctattaatgaataaaaataattatatggtgcagtccagagccagtgtgatctacaattgtataacaagagacacaattaacaccaggcttgggaactgctattgtaatgagcattcggtatgaaaagatcactattttttaaaaagatataggaagaaaagacttaatatgccagttggtcttttgtagactatctaagtgggttaattatccattgtatgagacttggtttttga

SEQ ID NO: 80581 - DNA, 1278 bp, Homo sapiens
agcagagagtgattctttcatcaacgcttgaatgtgaactacattcaaattctgaattgaatgtagctaacttggaaaaataaatggctcaggagttaaacttggtaaaatagcataaccttttaatggttgaatttaaactttaaccagagatccaagcatcttcagatgactcttatttgcctaagcagaaagcccaagtcagcactaataaatcactaactataaagcacaatcttctctttctcagtatcatcatttttgagacaataagtcactggaagccatcccagagtcataaaattagggaaataacttaygacaagagagaaagatcgcattaactttacaaatgtcaaatttcaagagttggaacctaaaagaactgctggtattaatacaagtgttttcaaacatcagaataaaaggtcttactcatggctaccaggaaagatgaacaataacaacaacaaaaataaatacattcgcttgatttcaacattagtggctactcacgtgccacataattaaactttataggaataaatgtagggctcatacaaatatataaacaaattatcatcatatgtaatactttacagccagtttaaaatgctgccaactcattatttttccccttggaataaaataaaatacctggcaatgctgcccagctttttttttcttaacttatccaaatatatacaggagctgtaaccacgaacatcacattgactgatcacttaatttgttttcaattttcgtttaaagcaggtttcaactcaatttatttgtatttgttaaaccaacaaagattcctcctgctccagatggacagaagtctaatttactccttttgctaacaaaaatcattattgaaaatataatctgtgtcccatgaaggtactgattaacatttaaatgctctagtaaatgagaattttgttaatgtgatgtatatcatttgtatatatctatacccacccacacagatacgctgccttgtttcataagaaacaatcagctgaaaatgcccatggacatctattttaaaggaagataattatttaacgctatgaaaaatcaaatctaatgtcaatttactttgcaagaaggctaacaggaatgtaaatttcaagtttctcctgaactccgcaacaaaactgtttcagttagctggaaagccagatgtaaggtgcagaaagattaagaaaaagactgatgtgtttatcatcatcttcattagaagatgcaagtttacatttctccataaagatg

SEQ ID NO: 80582 - DNA, 1278 bp, Homo sapiens
agcagagagtgattctttcatcaacgcttgaatgtgaactacattcaaattctgaattgaatgtagctaacttggaaaaataaatggctcaggagttaaacttggtaaaatagcataaccttttaatggttgaatttaaactttaaccagagatccaagcatcttcagatgactcttatttgcctaagcagaaagcccaagtcagcactaataaatcactaactataaagcacaatcttctctttctcagtatcatcatttttgagacaataagtcactggaagccatcccagagtcataaaattagggaaataacttatgacaagagagaaagatcgcattaactttacaaatgtcaaatttcaagagttggaacctaaaagaactgctggtattaatacaagtgttttcaaacatcagaataaaaggtcttactcatggctaccaggaaagatgaacaataacaacaacaaaaataaatacattcgcttgatttcaacattagtggctactcacgtgccacataattaaactttataggaataaatgtagggctcatacaaatatataaacaaattatcatcatatgtaatactttacagccagtttaaaatgctgccaactcattatttttccccttggaataaaataaaatacctggcaatgctgcccagctttttttttcttaacttatccaaatatatacaggagctgtaaccacgaacatcacattgactgatcacttaatttgttttcaattttcgtttaaagcaggtttcaactcaatttatttgtatttgttaaaccaacaaagattcctcctgctccagatggacagaagtctaatttactccttttgctaacaaaaatcattattgaaaatataatctgtgtcccatgaaggtactgattaacatttaaatgctcyagtaaatgagaattttgttaatgtgatgtatatcatttgtatatatctatacccacccacacagatacgctgccttgtttcataagaaacaatcagctgaaaatgcccatggacatctattttaaaggaagataattatttaacgctatgaaaaatcaaatctaatgtcaatttactttgcaagaaggctaacaggaatgtaaatttcaagtttctcctgaactccgcaacaaaactgtttcagttagctggaaagccagatgtaaggtgcagaaagattaagaaaaagactgatgtgtttatcatcatcttcattagaagatgcaagtttacatttctccataaagatg

SEQ ID NO: 80583 - DNA, 1278 bp, Homo sapiens
agcagagagtgattctttcatcaacgcttgaatgtgaactacattcaaattctgaattgaatgtagctaacttggaaaaataaatggctcaggagttaaacttggtaaaatagcataaccttttaatggttgaatttaaactttaaccagagatccaagcatcttcagatgactcttatttgcctaagcagaaagcccaagtcagcactaataaatcactaactataaagcacaatcttctctttctcagtatcatcatttttgagacaataagtcactggaagccatcccagagtcataaaattagggaaataacttatgacaagagagaaagatcgcattaactttacaaatgtcaaatttcaagagttggaacctaaaagaactgctggtattaatacaagtgttttcaaacatcagaataaaaggtcttactcatggctaccaggaaagatgaacaataacaacaacaaaaataaatacattcgcttgatttcaacattagtggctactcacgtgccacataattaaactttataggaataaatgtagggctcatacaaatatataaacaaattatcatcatatgtaatactttacagccagtttaaaatgctgccaactcattatttttccccttggaataaaataaaatacctggcaatgctgcccagctttttttttcttaacttatccaaatatatacaggagctgtaaccacgaacatcacattgactgatcacttaatttgttttcaattttcgtttaaagcaggtttcaactcaatttatttgtatttgttaaaccaacaaagattcctcctgctccagatggacagaagtctaatttactccttttgctaacaaaaatcattattgaaaatataatctgtgtcccatgaaggtactgattaacatttaaatgctctagtaaatgagaattttgttaatgtgatgtatatcatttgtatatatctatacccacccacacagatacgctgccttgtttcataagaaacaatcagctgaaaatgcccatggacatctattttaaaggaagataattatttaaygctatgaaaaatcaaatctaatgtcaatttactttgcaagaaggctaacaggaatgtaaatttcaagtttctcctgaactccgcaacaaaactgtttcagttagctggaaagccagatgtaaggtgcagaaagattaagaaaaagactgatgtgtttatcatcatcttcattagaagatgcaagtttacatttctccataaagatg

SEQ ID NO: 80584 - DNA, 1114 bp, Homo sapiens
attttgctttgtatttttcaactgcagttggcrttcatttagtactgaattttagatatgtatgatcttggtagtgttctagattagatacagtaactataaataaagcttaactgagactataattaagatatttagttaatatttagagttaattatatccacttaagattttcacattcccccagttaatatgttatatatagctaaaaatacaaaacactcatttgaacttgtacttcactgccagatccagcagcaacaataaaaaataaattatatgagctacctgggaaagggatttggctgaggttgagttgaaaaggtaaagctctaggtattaattttcaccctgagtgaatacttgactgatggttggcatgcaggacatctgtatgagtaaagcttttgaacaaagaatttcatttggttaggttgagatggtcacggttttggtgttgcctcttttttttttttttttttttttttgagccaatggtacccaggagaaaaaagcacagtagttaaaaggaatggaggttttaagtcgtcactttcaagtgtggactattccattctgatccaaggtgtacctctctttcatcttggggtaaatcccagtgaattgaaaagaaagacagccacatcagatctaggccaggctccctcaagaagcagtcattcaaagctcactttcaggtccaaggttgtgactttcctggcttttgccctgtagtgttgcctttctgtgtcttgcaaaatggcttaccacagagtacatttatcacataagagagacaaattgcagagccagggaagtgaatttcattaagctgaaaagctttctctatattatgactttgactactggtttacagtaactcatccacctaaaataatttgagactcagaattcacccatggaacggctttacttatttccttatatactcccccaactcaatttcttaccctactttctgacacattttgaatcacctctgtcaactgtatcaccaaatttcttagcgagtagatatttaaataattctattttagtagctctcagaatacacctgaagtggatgataaggtagaacctcgtggccataca

SEQ ID NO: 80585 - DNA, 1114 bp, Homo sapiens
attttgctttgtatttttcaactgcagttggcgttcatttagtactgaattttagatatgtatgatcttggtagtgttctagattagatacagtaactataaataaagyttaactgagactataattaagatatttagttaatatttagagttaattatatccacttaagattttcacattcccccagttaatatgttatatatagctaaaaatacaaaacactcatttgaacttgtacttcactgccagatccagcagcaacaataaaaaataaattatatgagctacctgggaaagggatttggctgaggttgagttgaaaaggtaaagctctaggtattaattttcaccctgagtgaatacttgactgatggttggcatgcaggacatctgtatgagtaaagcttttgaacaaagaatttcatttggttaggttgagatggtcacggttttggtgttgcctcttttttttttttttttttttttttgagccaatggtacccaggagaaaaaagcacagtagttaaaaggaatggaggttttaagtcgtcactttcaagtgtggactattccattctgatccaaggtgtacctctctttcatcttggggtaaatcccagtgaattgaaaagaaagacagccacatcagatctaggccaggctccctcaagaagcagtcattcaaagctcactttcaggtccaaggttgtgactttcctggcttttgccctgtagtgttgcctttctgtgtcttgcaaaatggcttaccacagagtacatttatcacataagagagacaaattgcagagccagggaagtgaatttcattaagctgaaaagctttctctatattatgactttgactactggtttacagtaactcatccacctaaaataatttgagactcagaattcacccatggaacggctttacttatttccttatatactcccccaactcaatttcttaccctactttctgacacattttgaatcacctctgtcaactgtatcaccaaatttcttagcgagtagatatttaaataattctattttagtagctctcagaatacacctgaagtggatgataaggtagaacctcgtggccataca

SEQ ID NO: 80586 - DNA, 2103 bp, Homo sapiens
tgtctactcttgtgttttgctgtgtcctaaaacagggtgttggtccattcactctgtttcctgttagcatctatgtagatgttatatttgagctggggtttcactcttgttgcccaaactgtagcacaacggcgcaaacttgactaactgcaacctccgccagcagccccccgccccaggtttaagtgattctcctccctcagcctcccgatagctgggattacaggcgtgtgccaacacatcaggctaatttttatatttgtagtagagatggggtttcgtcacgttggccaggctggtctcgaactcctaacctcaggtgatccacgtgccttggcctcccaaagtgctaggattacaggcgtgagccatcccgcccggccctcggtttttttttttctgtaatgctggagtggaaagggaactttgtcattacatcccagttttacccgttactaacgatgagatcaagattgggggcgacagcaactggaaggttccagttcattctcgtgagctccagcttgtgtttgtgccttctgacttatccaggctgtctcttatttaacatccatcttattttccccactgtctggcctgtggacttcaattgttagcatcagtcctgaagacaacaaacttactgggaccacttaacccgctcccacagccgcataagtccaatgtctgtaacaaatctttttataaaaacacaccacatgcaggcacacacacacacacacacacacacacacacgagagagagaatgagaatcttttagtggtttggtttccctggttgaaccttagccgacatatatacaatatataaagtgccaggattatggaagatagtcaataatgaatggacagatgaatgacagagacctgcttgtctgaatgaggatggagaaagtgaggaggtacacaagaacttaaatttcttgagcacctactatatgccagaaattatgctctatgttgagggtacagttgtgtaaaatcagacttggttcttgttttcatgacagttgcagtttagtggcattctttatcttcattgctagcttttctgacttcctgctgatggccattttaaggctacacggcatataggtaatgttgaagttactaaagaaagcaaatgaaatacacacattttcttctttttcaacacctcgcaatcatgactgatccacttgctgtaatactcagcaaatgtttaatggaggaaggaagttagggcaggtgtgattctgacatctaacaaaggagacagagcacccactcctctgggatatgttgcgagcttgtgaggagcaggctaaccatactgaccaggttttctatttccctgttattaatcccttccacaaggaacattttgaccaagtaggaaagtctaaataggggtctggctctctttgctgatatggtctttaagcagaaaggccatctctctggcataagctggtttgtgatcttgggctcttcagaattgttatctctctacggtatgatattgacttagaaaatttttataatctattgtatatctttgatgtataggattccagaataaaaaaaaaattgtcaggaaggatctggtaaggttactgcttactaggagttttactaagagtatataccacaaccatgacatgggcagtaaataataaagacaggtgtctgaaatcctggaggtcatgtccttatccttcaggtcatsaggaacagccaggttggttgaagactcaggttggttttggagaagaaccagggcacacaatggaagcatgcttatataagtaactgataaaaaagaagggatgctcacaagataaaaatcagctctgtgctcatttggttttcctcattccaggcacataattctgattcctgccagaatagttacataaaatctatacttataacaataacccaatgattttatagctgaggactttacaagccgcccaagatttgttgagaatcactgaccccacttttgtaatactatgtattaattataatagattctagcttaatgcaggcatcttatcaagataatagtctatattttggtctaatcttctctttgaa

SEQ ID NO: 80587 - DNA, 2103 bp, Homo sapiens
tgtctactcttgtgttttgctgtgtcctaaaacagggtgttggtccattcactctgtttcctgttagcatctatgtagatgttatatttgagctggggtttcactcttgttgcccaaactgtagcacaacggcgcaaacttgactaactgcaacctccgccagcagccccccgccccaggtttaagtgattctcctccctcagcctcccgatagctgggattacaggcgtgtgccaacacatcaggctaatttttatatttgtagtagagatggggtttcgtcacgttggccaggctggtctcgaactcctaacctcaggtgatccacgtgccttggcctcccaaagtgctaggattacaggcgtgagccatcccgcccggccctcggtttttttttttctgtaatgctggagtggaaagggaactttgtcattacatcccagttttacccgttactaacgatgagatcaagattgggggcgacagcaactggaaggttccagttcattctcgtgagctccagcttgtgtttgtgccttctgacttatccaggctgtctcttatttaacatccatcttattttccccactgtctggcctgtggacttcaattgttagcatcagtcctgaagacaacaaacttactgggaccacttaacccgctcccacagccgcataagtccaatgtctgtaacaaatctttttataaaaacacaccacatgcaggcacacacacacacacacacacacacacacacgagagagagaatgagaatcttttagtggtttggtttccctggttgaaccttagccgacatatatacaatatataaagtgccaggattatggaagatagtcaataatgaatggacagatgaatgacagagacctgcttgtctgaatgaggatggagaaagtgaggaggtacacaagaacttaaatttcttgagcacctactatatgccagaaattatgctctatgttgagggtacagttgtgtaaaatcagacttggttcttgttttcatgacagttgcagtttagtggcattctttatcttcattgctagcttttctgacttcctgctgatggccattttaaggctacacggcatataggtaatgttgaagttactaaagaaagcaaatgaaatacacacattttcttctttttcaacacctcgcaatcatgactgatccacttgctgtaatactcagcaaatgtttaatggaggaaggaagttagggcaggtgtgattctgacatctaacaaaggagacagagcacccactcctctgggatatgttgcgagcttgtgaggagcaggctaaccatactgaccaggttttctatttccctgttattaatcccttccacaaggaacattttgaccaagtaggaaagtctaaataggggtctggctctctttgctgatatggtctttaagcagaaaggccatctctctggcataagctggtttgtgatcttgggctcttcagaattgttatctctctacggtatgatattgacttagaaaatttttataatctattgtatatctttgatgtataggattccagaataaaaaaaaaattgtcaggaaggatctggtaaggttactgcttactaggagttttactaagagtatataccacaaccatgacatgggcagtaaataataaagacaggtgtctgaaatcctggaggtcatgtccttatccttcaggtcatgaggaacagccaggttggttgaagactcaggttggttttggagaagaaccagggcacacaatggaagcatgcttatataagtaactgataaaaaagaagggatgctcacaagataaaaatcagctctgtgctcatttggttttcctcattccaggcacataattctgattcctgccagaatagttacataaaatctatacttataacaataacccaatgattttatagctgaggactttacaagccrcccaagatttgttgagaatcactgaccccacttttgtaatactatgtattaattataatagattctagcttaatgcaggcatcttatcaagataatagtctatattttggtctaatcttctctttgaa

SEQ ID NO: 80588 - DNA, 1538 bp, Homo sapiens
  misc_feature (1)...(1538): n = A,T,C or G
cacgctggctcatttggcagtgagaagacaaatgccaggtggggcttaggaggaggacggtggggagcatagagaggtcggtggatgagaaagacgggaggggactggggcagaggaaagggctgggcccccaggatgaaggggaaaggcaggcaggtgatctgcaggtgggaaggagagagaagatgggagcagagaagaaaccatgaggccagataacagggcagagaaaggagatggagaagccacagnnnnnnnnnnnnnnnnnnnnnnnnnnnnnnnnnnnnnnnnnnnnnnnnnnnnnnnnnnnnnnnnnnnnnnnnnnnnnnnnnnnnnnnnnnnnnnnnnnnngtctctcccatgtcgactctcgaggatcccctctgtgactatttaaaccaaacaacatacacatggattttggaaaaaggaagagcttgtggcatgtgcttccagaggattcagagtcgcctgaaggacttagagaaagctttccagccactcccctcccctcctctgggccacagcacccctgcagcaggcatgggtggccggccctgccaggctgggggaagccttgggcctaaggaggctgcctggttccctcggcagtgtctggaaagtattaataactgtggcaggaggattagccatatgccacgtaattcctgctaatcgggattggggggagcttgtgcttgtaagtaacagatgagctgagctgccctcccggccttcagtgccttcctgcagtggcggggctctggacaggcctggggcttcctgcccgcctgtcctccttccttccacctgcaagctttctgctctgggcccctttctctctgcacgcttcccagattggatcccctgcctcttgctgtttattcttcttcccaatcttccgcttctaagttaaagattccttatttctacccctttgctcccgtagtctgactctgtgcatgttctcaattgcttacttccacctcgatgtctgtccttgtccccttcctgcctctccctcccttttttcacacgcacagacccacacactcctaacttctctttctggcatcaacgaaaactctgactcttggttgccctgcgaaggccaagttcaacgttctcaggcaatccttcctgccccgcccgagcctgttctcctcacactcttctgccctcacagagaattcccaatcctcttcttgggaattgtttgccctcgcagctgggaaggagcctgactctgagaagctgctctccgccctcctcctccacccccccccccccgcccccgtctccatgctgagcccagaacrgcacgcacaggcgggaaacaaacctccctcgcaggggcaaatggagcgggggccccagcccacatggaactgctattcctgcctctgtgtcgcactgtgtctgtcctcctggcctctgtgtgcataggtaggaaggcgaacccgcctttctgagtggcgaaatacacgactgtgtctgagggaccctctcgggaggagacacacagggttgcagtggct

SEQ ID NO: 80589 - DNA, 1068 bp, Homo sapiens
ttgttgtttccagtagattatgtaggacttgggggggtctaaagcaagccctaacccagtggcatttagtgcccatctttgatctgtgtccaccttgccctgttctttgcttggatctgtttgtgtgactgatggctcaagcaaggccctccttcctcagtctacagctgttcctgcctcttcctggtccctagaatccacagatccggccatggtgtctcaactgcattgctgggtttccttactggtcagcttctaagagtagagaaggcaccagagcagagaagttatgcccgaagccatcagaaccgcactgcccaggctgaaygcaggattcgcacctgccagcggtagccctgagcaagtcacagaatgctagggaaggctgggaagagcatttgccttgaagacgagctgtgaggactggaagccagcatgcatggaacgtcatctttgcttgtggcttcaatgtgggaagctctcaggcagtgtgctctcccatatgtaatcatacttgccccaaacacagacaacgcattccagcgatgctagccgcctccctcctgtaccaagaacagcccatgctcagccccagttttatgcacataaacgtcctcccacctccggtacagctactcacactcccccaccttgaggccgcactaaagtgccgcctccttcccaaagccttccctgatcagcccaacccatgcagatctcttcctgctttgccttattctgctccagccagtgccttgaaatgtaacgtttccatcatagaattatcccatttgggagctggaggagtccttagaaatggctccagtcagttgctcttaaccagaagggttaataagcaggaggtacatccccatgacatcccggtggcacctaccgctcgcctcgccggttggccatcacagtcctactaaacttgctgctgcctcggattcctcctcagcacagtgctccaggcatcagtacccatcaatcagatgcgccactgccatccacaatccaggccatgagaagttgtctataacttggtgtagctggagcttttggaag

SEQ ID NO: 80590 - DNA, 813 bp, Homo sapiens
caatctacccacctcagcctcccaaagtgcttggattataggagtgagccacagcacccagcctgacttattttcttaagagggcacaacatgggtgacatgaatgttaataatgaataaaagaaaatgtcaccaccttcattctgtagcctaaggtaacaaagatattttcccaccatgctgtaagcttcctgagggagactacgtctctttgatacctgattcccggtcacctagcaaaatgtctgacttgtctgttaggaaatattaagtatttctatttgaatttatattactgaatttttattactattttaggatgtgtgaaattaattgaaaatatatattctaaggcttctagaagtcacttctcaagtcctttggggtttattctctttttggggattatagtagatatccaggtcttggatcatttattcaacaaatggttattgagcatttgatatatgtcagatactatgcaaggcatgtggatataatgtaacaactgagactggaatgtggataagtaattgtaataaaatctggtgtgtcttaacacacaaagaaagcagaagataaagtttcaaattagaggtagtcattactttttgtgatttcaatatgcctaaattttaattaccaaggtctagttgagtaagtcccccaggagcatggatcaaattgcagttacctgagtctatcaactgtaactgtataaagtacaaaaatacatttttaaaaatcacagaacacagccgggcacagtggcttacacctgtaatcccagcattttgggaggccraggtgggt

SEQ ID NO: 80591 - DNA, 710 bp, Homo sapiens
ctctcttggtgcatgtgtgctatcatttgtcttaacatctgaaccaaattttgagtgaagagtcatcctgattaaggtgagtgaccacagcaacattgaatatttcactcactattttagacattggtattcgagaacaattgttccataataagagaatttattgaagtagctagatgcaagataaacaccacaaaagaagccacactttccctttacactatttacttacactagattaatttatcccaagggcrtttattaaatacttactgtgtaggcatactattccaggtgctgtgaaagataccaaggaatttgtcaccaggcagttataaggttatcctagttttgggaacagaaattttaactaaaaatataaagtcaaatacaggggaaaaccctacagattaattcaacatactatctatgttctattcccttatggaagaaaattaatttatagctacttatttcaagcatttactattctaatcatttgaggaaattaaatatttctttttgttagataaagctaaagcttacaatggatgctttctttacgattaaaaaacattgaatgtttgtcactacagcttccctacagatttaaatttctttgatcatgacatttttcaaagttgctcacatgccaacataaaagactgtagttgaagcactgtagttggaagaatataagctttcaattt

SEQ ID NO: 80592 - DNA, 632 bp, Homo sapiens
gtttttttcacttgtaaaagctaggtaatactcttactttattttaataatcaaataacatgataaatgtgaaagtttgcaatctataagtcacagtgcagttctattatatattataattttcttattttgtttacttaaaatttgttctgaaaacatattatctatcaaatgttccttaaattacctcagtgagtgctatattgggtcttcctctggtagggctgtgattagtcccttctcacattgctataaagacataccaagaatgggtaatttataaaggaaggaggtttaattgactcacagttctgcatggctggggaggcctcaggaaacttacaatcatggtgcaaggtgagagagaagcaaaggcatgttttacatggcagcaggtgagagagagagggtgtgtgtgtgaagcaaaggaggaagagccccttataaaaaccatcatatctcatgagaactcattyattatcgtgagaacaccatgggggaaaccacccccatgatgccgtcaaccttaaacttggtccctccctagacacgctggggattatggaaattacatttcaagatgagattcggctgggggcacagccaaaccatatcaggttaagggctatttc

SEQ ID NO: 80593 - DNA, 2170 bp, Homo sapiens
ttattgaatacaataataaacagtaacacaatacacattatttagaagaaaatttggcaaattcacaattatatgaaattaaacaacattctcatcaaaaaggggaacaagggatgagccagaacaaggtttgtgtttatgatggatctaactagtgtagttttgacaggttggatgaaacttttccatattatcaacttttgttgactaagttgtgtgaaggaatttgtgttcaaagtcccataggattcagcaaattgcagtagaatgtattgagaaatgtagtagtccattctcatattgctataaaaagctacctgagactgggtaatttatgaagaaaagaggtttattcaactcacagttctgcaggctgtattggaatcatagctgagtaggcctcaggaaacttacaatcatgatggaaggtgaaggggaagcagacacatcttcacatgttggagcaagaaagagggagcaaagggagaagtgctatacacttttaaataactcacaagaacagcaacggggaagtctagtcccatgatccagtcacctctcaccaagcccctcctccaacactgaggattacaattcaacgtgagatttggatagggacacagagccaagtcataccaagcaaggtttatttggtctgagatgtccaaatataaaatgtattgggattaatgaataagagacaacaaaatatcacagactatggccagacacagtgtctcatacctgtaatcccagaattttgggagcctgaggtgggtggatcacttaagctgaggagtttgagaccagcctgggcaacatggcaaaaccccatctctgcaaaaaatttaaaaattaactgggcttggtggtgtgcacacctatagtcccagccacggggaggctaaggtggcgggatcacctgtgatcagggggtcgaccagcctgggcaacagagtgaaaccctgtctcaaaaaaaagaaaaaaaaaaggaagtcacagactacctgatcttcctccctggagactcctctttgcatttcagagcaaaaaagtgtggctcaaaacaaaaggcagcactatattgtggcaggaacagggacttaggatcaagtttgaatgtcaggtctgataatagctgtatgaacttaagtggtcacacaagctgagtctatttcttcatttggaaaatgataagcatagcatacagaattagagataaacatatacaaaattctcagcaccagcctaacacgaagtaggttcccaatgcatggtagttgttatcattaagccatgataaacagggataaagaggaaggagaagcaacatctacaaagaaccagatatccccctctgcatgcttccaagatcattttgagggtcatctaagagggaccatatctactgatcatcaggccaggacataaggggggatgtgggagtccatttttcaactccctgctcattcctgaatctgttattgagcaattaatgctgtgttcagttatatagattgaaaattggagagggtggtggaaggagggagagcattaggaaaaatagctaatggatgctgggcttaatacctaggtgacgggatggtttgtgcacaaatcaacatgtaacaaacctgcacatcctgcacatgtacccctgaacttaaaataaaaataaaagttgaagaaaaaaaaacaaaatgatgttgctaaaaatttaaatttgcatgatctaatacctgtatgtgaatttgcaaaaatgtgagccagaaaaaaacwtacgataatcatgatatcatattattaagtattatatattgtactacataaaattatgacaccaaaaatattatttttacaatttgtaagtttatgttactaatttatcttgtctatacctattacattttgaaattcactgaatatttttaaaggaaaaagctttatattttagtatatttaatgtactttttgtttttttttaacaaagagccccatatttttcttttgcactgagccctgcaaattttgtaccaaatcctgattccttccataagggaaggagagagcagggtggtaagaagtctgggccatccacatccctttctccctcaattcctttaaccatagcatctctctgtcaaatgtaacccctgaatgtgccatgcca

SEQ ID NO: 80594 - DNA, 2170 bp, Homo sapiens
ttattgaatacaataataaacagtaacacaatacacattatttagaagaaaatttggcaaattcacaattatatgaaattaaacaacattctcatcaaaaaggggaacaagggatgagccagaacaaggtttgtgtttatgatggatctaactagtgtagttttgacaggttggatgaaacttttccatattatcaacttttgttgactaagttgtgtgaaggaatttgtgttcaaagtcccataggattcagcaaattgcagtagaatgtattgagaaatgtagtagtccattctcatattgctataaaaagctacctgagactgggtaatttatgaagaaaagaggtttattcaactcacagttctgcaggctgtattggaatcatagctgagtaggcctcaggaaacttacaatcatgatggaaggtgaaggggaagcagacacatcttcacatgttggagcaagaaagagggagcaaagggagaagtgctatacacttttaaataactcacaagaacagcaacggggaagtctagtcccatgatccagtcacctctcaccaagcccctcctccaacactgaggattacaattcaacgtgagatttggatagggacacagagccaagtcataccaagcaaggtttatttggtctgagatgtccaaatataaaatgtattgggattaatgaataagagacaacaaaatatcacagactatggccagacacagtgtctcatacctgtaatcccagaattttgggagcctgaggtgggtggatcacttaagctgaggagtttgagaccagcctgggcaacatggcaaaaccccatctctgcaaaaaatttaaaaattaactgggcttggtggtgtgcacacctatagtcccagccacggggaggctaaggtggcgggatcacctgtgatcagggggtcgaccagcctgggcaacagagtgaaaccctgtctcaaaaaaaagaaaaaaaaaaggaagtcacagactacctgatcttcctccctggagactcctctttgcatttcagagcaaaaaagtgtggctcaaaacaaaaggcagcactatattgtggcaggaacagggacttaggatcaagtttgaatgtcaggtctgataatagctgtatgaacttaagtggtcacacaagctgagtctatttcttcatttggaaaatgataagcatagcatacagaattagagataaacatatacaaaattctcagcaccagcctaacacgaagtaggttcccaatgcatggtagttgttatcattaagccatgataaacagggataaagaggaaggagaagcaacatctacaaagaaccagatatccccctctgcatgcttccaagatcattttgagggtcatctaagagggaccatatctactgatcatcaggccaggacataaggggggatgtgggagtccatttttcaactccctgctcattcctgaatctgttattgagcaattaatgctgtgttcagttatatagattgaaaattggagagggtggtggaaggagggagagcattaggaaaaatagctaatggatgctgggcttaatacctaggtgacgggatggtttgtgcacaaatcaacatgtaacaaacctgcacatcctgcacatgtacccctgaacttaaaataaaaataaaagttgaagaaaaaaaaacaaaatgatgttgctaaaaatttaaatttgcatgatctaatacctgtatgtgaatttgcaaaaatgtgagccagaaaaaaactwacgataatcatgatatcatattattaagtattatatattgtactacataaaattatgacaccaaaaatattatttttacaatttgtaagtttatgttactaatttatcttgtctatacctattacattttgaaattcactgaatatttttaaaggaaaaagctttatattttagtatatttaatgtactttttgtttttttttaacaaagagccccatatttttcttttgcactgagccctgcaaattttgtaccaaatcctgattccttccataagggaaggagagagcagggtggtaagaagtctgggccatccacatccctttctccctcaattcctttaaccatagcatctctctgtcaaatgtaacccctgaatgtgccatgcca

SEQ ID NO: 80595 - DNA, 2170 bp, Homo sapiens
ttattgaatacaataataaacagtaacacaatacacattatttagaagaaaatttggcaaattcacaattatatgaaattaaacaacattctcatcaaaaaggggaacaagggatgagccagaacaaggtttgtgtttatgatggatctaactagtgtagttttgacaggttggatgaaacttttccatattatcaacttttgttgactaagttgtgtgaaggaatttgtgttcaaagtcccataggattcagcaaattgcagtagaatgtattgagaaatgtagtagtccattctcatattgctataaaaagctacctgagactgggtaatttatgaagaaaagaggtttattcaactcacagttctgcaggctgtattggaatcatagctgagtaggcctcaggaaacttacaatcatgatggaaggtgaaggggaagcagacacatcttcacatgttggagcaagaaagagggagcaaagggagaagtgctatacacttttaaataactcacaagaacagcaacggggaagtctagtcccatgatccagtcacctctcaccaagcccctcctccaacactgaggattacaattcaacgtgagatttggatagggacacagagccaagtcataccaagcaaggtttatttggtctgagatgtccaaatataaaatgtattgggattaatgaataagagacaacaaaatatcacagactatggccagacacagtgtctcatacctgtaatcccagaattttgggagcctgaggtgggtggatcacttaagctgaggagtttgagaccagcctgggcaacatggcaaaaccccatctctgcaaaaaatttaaaaattaactgggcttggtggtgtgcacacctatagtcccagccacggggaggctaaggtggcgggatcacctgtgatcagggggtcgaccagcctgggcaacagagtgaaaccctgtctcaaaaaaaagaaaaaaaaaaggaagtcacagactacctgatcttcctccctggagactcctctttgcatttcagagcaaaaaagtgtggctcaaaacaaaaggcagcactatattgtggcaggaacagggacttaggatcaagtttgaatgtcaggtctgataatagctgtatgaacttaagtggtcacacaagctgagtctatttcttcatttggaaaatgataagcatagcatacagaattagagataaacatatacaaaattctcagcaccagcctaacacgaagtaggttcccaatgcatggtagttgttatcattaagccatgataaacagggataaagaggaaggagaagcaacatctacaaagaaccagatatccccctctgcatgcttccaagatcattttgagggtcatctaagagggaccatatctactgatcatcaggccaggacataaggggggatgtgggagtccatttttcaactccctgctcattcctgaatctgttattgagcaattaatgctgtgttcagttatatagattgaaaattggagagggtggtggaaggagggagagcattaggaaaaatagctaatggatgctgggcttaatacctaggtgacgggatggtttgtgcacaaatcaacatgtaacaaacctgcacatcctgcacatgtacccctgaacttaaaataaaaataaaagttgaagaaaaaaaaacaaaatgatgttgctaaaaatttaaatttgcatgatctaatacctgtatgtgaatttgcaaaaatgtgagccagaaaaaaacttacgataatcatgatatcatattattaagyattatatattgtactacataaaattatgacaccaaaaatattatttttacaatttgtaagtttatgttactaatttatcttgtctatacctattacattttgaaattcactgaatatttttaaaggaaaaagctttatattttagtatatttaatgtactttttgtttttttttaacaaagagccccatatttttcttttgcactgagccctgcaaattttgtaccaaatcctgattccttccataagggaaggagagagcagggtggtaagaagtctgggccatccacatccctttctccctcaattcctttaaccatagcatctctctgtcaaatgtaacccctgaatgtgccatgcca

SEQ ID NO: 80596 - DNA, 2170 bp, Homo sapiens
ttattgaatacaataataaacagtaacacaatacacattatttagaagaaaatttggcaaattcacaattatatgaaattaaacaacattctcatcaaaaaggggaacaagggatgagccagaacaaggtttgtgtttatgatggatctaactagtgtagttttgacaggttggatgaaacttttccatattatcaacttttgttgactaagttgtgtgaaggaatttgtgttcaaagtcccataggattcagcaaattgcagtagaatgtattgagaaatgtagtagtccattctcatattgctataaaaagctacctgagactgggtaatttatgaagaaaagaggtttattcaactcacagttctgcaggctgtattggaatcatagctgagtaggcctcaggaaacttacaatcatgatggaaggtgaaggggaagcagacacatcttcacatgttggagcaagaaagagggagcaaagggagaagtgctatacacttttaaataactcacaagaacagcaacggggaagtctagtcccatgatccagtcacctctcaccaagcccctcctccaacactgaggattacaattcaacgtgagatttggatagggacacagagccaagtcataccaagcaaggtttatttggtctgagatgtccaaatataaaatgtattgggattaatgaataagagacaacaaaatatcacagactatggccagacacagtgtctcatacctgtaatcccagaattttgggagcctgaggtgggtggatcacttaagctgaggagtttgagaccagcctgggcaacatggcaaaaccccatctctgcaaaaaatttaaaaattaactgggcttggtggtgtgcacacctatagtcccagccacggggaggctaaggtggcgggatcacctgtgatcagggggtcgaccagcctgggcaacagagtgaaaccctgtctcaaaaaaaagaaaaaaaaaaggaagtcacagactacctgatcttcctccctggagactcctctttgcatttcagagcaaaaaagtgtggctcaaaacaaaaggcagcactatattgtggcaggaacagggacttaggatcaagtttgaatgtcaggtctgataatagctgtatgaacttaagtggtcacacaagctgagtctatttcttcatttggaaaatgataagcatagcatacagaattagagataaacatatacaaaattctcagcaccagcctaacacgaagtaggttcccaatgcatggtagttgttatcattaagccatgataaacagggataaagaggaaggagaagcaacatctacaaagaaccagatatccccctctgcatgcttccaagatcattttgagggtcatctaagagggaccatatctactgatcatcaggccaggacataaggggggatgtgggagtccatttttcaactccctgctcattcctgaatctgttattgagcaattaatgctgtgttcagttatatagattgaaaattggagagggtggtggaaggagggagagcattaggaaaaatagctaatggatgctgggcttaatacctaggtgacgggatggtttgtgcacaaatcaacatgtaacaaacctgcacatcctgcacatgtacccctgaacttaaaataaaaataaaagttgaagaaaaaaaaacaaaatgatgttgctaaaaatttaaatttgcatgatctaatacctgtatgtgaatttgcaaaaatgtgagccagaaaaaaacttacgataatcatgatatcatattattaagtattatatattgtactacataaaattatgacaccaaaaatattatttttacaattkgtaagtttatgttactaatttatcttgtctatacctattacattttgaaattcactgaatatttttaaaggaaaaagctttatattttagtatatttaatgtactttttgtttttttttaacaaagagccccatatttttcttttgcactgagccctgcaaattttgtaccaaatcctgattccttccataagggaaggagagagcagggtggtaagaagtctgggccatccacatccctttctccctcaattcctttaaccatagcatctctctgtcaaatgtaacccctgaatgtgccatgcca

SEQ ID NO: 80597 - DNA, 593 bp, Homo sapiens
tattctacatcttaagtttagatgctgaaaagtagacattctcatatactgttggtaggagtgtaaatgcgactgtagataattttgcaatgaatcaaaattgaatgtaagtataacatatattataacctttttcaaaaaatggactatatatagccatatttatgcatgtgtatttttatatgygtgtgtatataaaaacagcaattacatttattttttctttgggcaaacattatggaaggatatgcatggttgtctctaaggaatgaccctggaaatggagtagaaaaagagggcttttgttggtaactttatagtcatctgaacttttaatatattactttttgccaaaattatatattacatttacagtataaaaaactagtttaaaatgaaatgaaaataagcataatctttgactcagccattatattatttggagtgtatcccagggaataactagacaattgtatacaagtatgaatagaagggtattgatacggtttggatctctgtccccacccaaatctcatgttcaattgtaatccccaatgttggaagtggtgcctggtgattggatcatggggggt

SEQ ID NO: 80598 - DNA, 644 bp, Homo sapiens
taaaatgatttaaagagggtttataaatatgttctgttaataattctaatataattttaaaagataattcaatgattggttaaataaaaataccaaactagatttcaaaattaaaagtagtaaaataaaaaaaaagtgatttattttacatagactttaatatggaattatgtaactttttgagtggaatgggctaagagagctaacgtagtccagtcctcttgttttatagctgcaattaaagaggaagaaatatagccaagcactttaacagtacaggtttagagtcagacagacccamgttcaacccctgcttctccaccgaccagctcttcccctatcattcacaagtcacagaggcagttcttgaaaatgctctgcctggaaagcaggaatgccataaactgagaattcaaataaaggactctctcctctaaaacagatgtgtacccattcattcattcattcattcacttgacaaatatttattacatacacactagttgtttgaccttgggcaaggtacttagttgcggtctgccttagtttcctgagctataaagtgggtgtctacattacagagttgttgcaaggattaaaggagttaatgcacataaggtgttggtgatgggtcccaacacatt

SEQ ID NO: 80599 - DNA, 739 bp, Homo sapiens
ttcatttctaggtgtcccttgcaccacggagcacgtaactaacagccaaataactaacatccagaatcagaaactgcatttaacaggttccacaaatgatagatctgcagctaaattttgaggagcattgaactaggggatgtcacagaaaccagatgaaaagaagcttctggactcctcagaatgatctctggaacagagctgcccagcatcctggcacattcacccaggaytgttccaagatacagtagacaacttctatggttttttaagccactgaattattattgaatctctttatgagaacagtttcatcttaccctgactaatacaatgagggaatagtcttgatgagtttctcctctaaagacgatcagtgaaaaactttgaggaaagtataaggaaaagtgccaatggcacgtcagtctttcacctctgacagtgtatttgaaaaatattattataaatgtgtttttttaattgtataacccaatgtcaggcagggtcccatacccctttcagacctggttgcaattgacccaaacctcaattccaagacttaatggaagcccaggccttctttttagctttagcaaatgcctagaatttcctctcgccgtttccctcagcctctgagattttgtattgccacacactgcattagttttcacccatatcaatctagctgtgaactccaactcctttcctgattaccaacaacaatccgcccttccccgtg

SEQ ID NO: 80600 - DNA, 739 bp, Homo sapiens
ttcatttctaggtgtcccttgcaccacggagcacgtaactaacagccaaataactaacatccagaatcagaaactgcatttaacaggttccacaaatgatagatctgcagctaaattttgaggagcattgaactaggggatgtcacagaaaccagatgaaaagaagcttctggactcctcagaatgatctctggaacagagctgcccagcatcctggcacattcacccaggactgttccaagatacagtagacaacttctatggttttttaagccactgaattattattgaatctctttatgagaacagtttcatcttaccctgactaatacaatgagggaatagtcttgatgagtttctcctctaaagacgatcagtgaaaaactttgaggaaagtataaggaaaagtgccaatggcacgtcagtctttcacctctgacagtgtatttgaaaaatattattataaatgtgtttttttaattgtataacccaatgtcaggcagggtcccatacccctttcagacctggttgcaattgacccaaacctcaattccaagacttaatggaagcccaggccttctttttagctttagcaaatgcctagaatttcctctcgccgtttccctcagcctctgagattttgtattgccacacactgcattagttttcacccatatcaatctagctgtgaacyccaactcctttcctgattaccaacaacaatccgcccttccccgtg

SEQ ID NO: 80601 - DNA, 561 bp, Homo sapiens
caggctctaccccagctgtagaggccccacgcagactctccagcctcaagctctgagagttgggagatgaacatatgggcaagagatggtgtgaacacacagcatcccccattgctgcaccccttccatgccactgatggagcagaaatgagtcctggggacaggccccacaggaatmggtaggaaaatcaggaagcttggccacccagcagtaggaattaataccatttggtttctaggaaatggagtcattagctagtgctttcaaaaagaaagaaagaaaaaccctctagtgtaataagctaagctaaagagaacgtagggctctgtaaccaacaggcctgggactatcagcaggactgaagcttcaaagaatactgagagttcaaggaagactcattttcactcctagactctacagtgagtgcacttacagcagcagttgggagggggattactatataaagagcaaccttgctgagttcagatgttacattctttgaataaattttccttaatactgttatggcgtgtattaaaaagtatttctaaaattactgt

SEQ ID NO: 80602 - DNA, 1093 bp, Homo sapiens
gaataatttgctgcatttgagatttgtcattaaattgccctgtagtggcaaagtattcctctgagcartggtcctttggaagcactccagacacatagtacctacctggcaggtttcattacctttgcaatttgctatcctataatgtcatcagaacaaaagtgttctcctaaactgtcacaactatctgactttgcatgatcctaattaattttgctgcacattgacacgtaccagcttgcaccactccaaatccaggagggcagctcctatgtttcaagcagaactctatctcaaggtagcgcccttccttgcattcgcacacgcggttgtgggtgcgattgcactcctgcttgacgtactgcagctccttgcacacggggctgcagtatagacactcgtcactggtgtgccagctgtctgtgtagtagtggtcagggcaaggggcgcacacggtcttccactttgctgtacagtgttgttttaggtaggtaccaggaggacatttgtcacacaacagctgatgagaggtttcttcgtcataatgaaggtactttgaaggaaacgtttcctgggtggtccacttaatggagatgtccagaaactagaaggagaaaggaacacagtggcatcatcttagcatgaaaataggtttgttcttatgtgcaacagtatcatttgactcaaagtcctgtattaccttaagcctaatgagatttgccacaaagtaagcttggaagccataatttttgcctccgggagcttaatctcaaagaccaggaatgcagatagcagtgaacatattaactaaaatccaggctcaaagatgactggagtagaaagcccatcaaaatagaactataacacttagatgcactgctgaattaccatgtgacttgaaagacactttgtcgtcttgggttgcaggattatctctaggtgagtgagttggattaactggtaattctcagaacagctacacaaatcacctgttaaaaatatagattcctgggattcatatccttaagtattcttattccaccgatgtggggatgtgggattgggcctggggatttaaaacacctgcagtgtt

SEQ ID NO: 80603 - DNA, 1093 bp, Homo sapiens
gaataatttgctgcatttgagatttgtcattaaattgccctgtagtggcaaagtattcctctgagcaatggtcctttggaagcactccagacacatagtacctacctggcaggtttcattacctttgcaatttgctatcctataatgtcatcagaacaaaagtgttctcctaaactgtcacaactatctgactttgcatgatcctaattaattttgctgcacattgacacrtaccagcttgcaccactccaaatccaggagggcagctcctatgtttcaagcagaactctatctcaaggtagcgcccttccttgcattcgcacacgcggttgtgggtgcgattgcactcctgcttgacgtactgcagctccttgcacacggggctgcagtatagacactcgtcactggtgtgccagctgtctgtgtagtagtggtcagggcaaggggcgcacacggtcttccactttgctgtacagtgttgttttaggtaggtaccaggaggacatttgtcacacaacagctgatgagaggtttcttcgtcataatgaaggtactttgaaggaaacgtttcctgggtggtccacttaatggagatgtccagaaactagaaggagaaaggaacacagtggcatcatcttagcatgaaaataggtttgttcttatgtgcaacagtatcatttgactcaaagtcctgtattaccttaagcctaatgagatttgccacaaagtaagcttggaagccataatttttgcctccgggagcttaatctcaaagaccaggaatgcagatagcagtgaacatattaactaaaatccaggctcaaagatgactggagtagaaagcccatcaaaatagaactataacacttagatgcactgctgaattaccatgtgacttgaaagacactttgtcgtcttgggttgcaggattatctctaggtgagtgagttggattaactggtaattctcagaacagctacacaaatcacctgttaaaaatatagattcctgggattcatatccttaagtattcttattccaccgatgtggggatgtgggattgggcctggggatttaaaacacctgcagtgtt

SEQ ID NO: 80604 - DNA, 639 bp, Homo sapiens
gatatgagtaaatctgggttttcacgttcaagggattaataatctagttggggagacagattagtgacaagttgaaactgagggtgtgaaagaaaaacacagagtgctatggaagcatgcagagggggaagggagccggggtctggcaagtcaaggtggaaagtctaacagttacaataaacaaccaaacaaatcagctaaagttcagttcaggagttaccaaataaagtgataaaggtaataacaactaccatttatagaatatccattaagtttagtatttcgcatacattacccattttccaaattaggaaatgagactcagtaacttgctcaagttcactcaacaaataattatcagggctgaggttaggatatatctgccactagtgttactacrtaacatgtgaatacaaacttggttcttgattaatatttctattctttatgaccagtcacttgtctgatattacactctccctccatacctaattccagcttcattcaactcaaggagctctctcgacacaacctgtctacttttatattttactttagcacttgtcatcatctaacgtgaaatatcctatttcatcaattctaagatgcccatttattcatatttttacatctctgaag

SEQ ID NO: 80605 - DNA, 639 bp, Homo sapiens
gatatgagtaaatctgggttttcacgttcaagggattaataatctagttggggagacagattagtgacaagttgaaactgagggtgtgaaagaaaaacacagagtgctatggaagcatgcagagggggaagggagccggggtctggcaagtcaaggtggaaagtctaacagttacaataaacaaccaaacaaatcagctaaagttcagttcaggagttaccaaataaagtgataaaggtaataacaactaccatttatagaatatccattaagtttagtatttcgcatacattacccattttccaaattaggaaatgagactcagtaacttgctcaagttcactcaacaaataattatcagggctgaggttaggatatatctgccactagtgttactacataacatgtgaatacaaacttggttcttgattaatatttctattctttatgaccagtcacttgtctgatattacactctccytccatacctaattccagcttcattcaactcaaggagctctctcgacacaacctgtctacttttatattttactttagcacttgtcatcatctaacgtgaaatatcctatttcatcaattctaagatgcccatttattcatatttttacatctctgaag

SEQ ID NO: 80606 - DNA, 1634 bp, Homo sapiens
cccagggaggtggggcgtgaggggtggggcggtggtgtctggcccctgggagagcaggggaaaaaaaagccaccgggctgaggaacaaggcggctgctgtctccgcggggctctgaggtttcccggccccttcccgccagcggccagcctcctggcagccgggaccagcggtgggagggctgggcacacgctgggcagctgctgtgcttgtgtctcctccaccctgagagtccgatccagccaagatccggacgcagttggagtgtgtcccagacctttgtcctctcgctgggcgaaagctgtgagtttccgccgtacccggctgcctgaccccttcacttcgggttctgaaacctcaaattacagggcccctctttatgcatggcattgtctgagcccttttcggggagttcgcaatcattcatcttcaagtttacataaaccatgtagtaggaatttttctaactaatgtctgattggccctaaagcccgtgctattctgcattcactccttgttatctggggtagttagagccagagagaatctgcagagtgaaaattggactgcctggggcagggataaccttgcggagcactgttcccttcaccaaccccaccatcatcaaagggctattggtatcggagcttcctacgcgctgaacttctggagtagcctcctcgaggtctttccactagcctcaagctatcgacagaagtttggcactttgctctagggttcgctgtctcccccattaattccctggtctagaagttagacttgatgacttgtaaagtgtggtcccattcatggattacagttcgcgggttgccactgaaattgtttacagatggctgaaaaagtccctgcagagctgcttccccatcagggccaagtgttcaagttatatgtctccagagaagggcaaatactgcctttcaccagattcaagggaaggaaggtgaagaatcaggagaggggacccctggggagcaaggatggcttaccaggatcagagcatctgccccttccaagggacatccttccaccacgagttcaaagtggatccacagactgttccatcctgcaaattacagaagacggggtgtcattcagctttgtccctcaagggccagaatgtaacagcatgctggtttcttaagtgaactagtgaataaatgtagctcagtgagtgtggacaaaattgtatgactccaaatcacaccttgtattttgaatcgtagttttgacatctgcaacctgagatatcaacacttagacttgccatgggactcaagtcaatccaagtgttagtagtgaaacacaatataaatagcagtattattgtttttgttagagtaatgtttgtctaggatattatttgaaggtgtttttctcagaacataaaatgatgccaatatgtgggtgtcagaccttggagaaaactaatcaataactgagtccttcagtgttaaccctgggaaaggtttacgtctccctgagcctcatctataagataaaaacacactgatattgcagaaacgtaagagaaagcaaatgggagcgtttaaaaaacaattatataaatgatggtmatcactaattatgagcattaaataaagtaatgcatgtaaaa

SEQ ID NO: 80607 - DNA, 605 bp, Homo sapiens
aagggcgatgaagggacgcacctgggggtctctggctggggcaccaggggcagcccagcaggagactgtgaccacagagcctggtagttggatctgacagccaggaagagtaaggaccagcgaacaggtctagggagttcggtgggtgcaatacctgcccctctaacacaggacattaaggacacccaggggccacctaggccagggggcgctggtggcagacacacaattcttggcctgcgggtgtggtagcaggaggcctgggcagggcccttcccaagctggccacatttacataacaaaaggtcaaaattggagccacttgtgcaagggctatttataagaaccagtctcaaccgcttttggctcccccgttccttcccttcctgatctgctctcaccgcctccctgcccagagggcccagccccctagcccgcctggcctgaccacatggccttccctctccagaggtttcactgcctaagggctcacccaagctgcaggcctgggctttyaataccggcccaccaaagccttgggcagctgccgccaggaaacgaggggttccctcccacccccagagctctgggtcctgcaggagggg

SEQ ID NO: 80608 - DNA, 1156 bp, Homo sapiens
cttccttcctttctttctttctttcttttttttttttgagatggagtcacrctgttgctcaggctggagtgccgtggtgccatctcggctcattgcaacctctgtctcctgggtaagggttcaatcgattctcctgcctcagtctcctgagtagctgggattacaggtgcctgccaccaagcccagctaatttttgtgttttcagtagagacggggtttcaccatgttggccagattggtcttgaactcctgacctcaagtgattcgcccaacttgacctcccaaagaaagtgcatattttctttgtcatcttatgatagtagatcatggagctcctttagcttaatggattcctagaggccagtgactcctgatattttccagacgcttatagctagaaaaagccaagtaatgaagctctgatgctttgacttgctttgacttaacaagcttagggaagaagcaatgacactgtattttctttctttttgagagaaggtaagaacagcatgaaaggagaaggcagaggaggaggatcccttcttgcctctgtgtagaccgatcctagatgcagcttccttctgtcatctgcaggtggttgggacctgtctccacacctgtggtttgctcaggagtagggaggacaggcctgagaggaaaaaggacttgagctgggctttgcaaaggcacagtagaatttaggtagataatgaggagtggttgaatagatgtgtcacggaattaagggtccatctttagcaagacacaaaccctttaagacctggtcctgcctgtccatcttcacttcttagtacccatctctgtccaccctccccttccagccagacccagtattggccctattggcgagctcacctttgtcctctggccttggctttgcacgtgccctgacttctcacatggaagggaatgagtgcctgtgcctcacctgtccctgggctgcctgccaggctcctgcatactcccagactctgattgcggcaatctcccaaggaatgcacctcctgattttccaggctgaccacccttctgtagcacctggtacagttagttgctttgttcttaattctatgcttgtcttcctacctgtgacttttttcctgggcagtggtgcagctggaatggttcagcatgc

SEQ ID NO: 80609 - DNA, 1029 bp, Homo sapiens
aatcaaaaagaactctaagccatgtgaccacaagagcaatatctgcttttggtctaaaggatatttgaaagcaattacaatagtatatcattcagttctctcagtagttctcaattaattcttctacatagcaaatatatatggtctactatgataaaatttcctatgtactgagaaaacaacagcaaataaggcataatctttgttctcatgctgatttacttactcatgattgacttactcattttattttttttccctaagcaatccctatttgctatacagaagggtgcttctggctaaaaactgttcatttgcaaacaattaaagattcctgtgaagtcttcatgagggaaatacctgccaaaagaagtatgccaatgggatactataaactgatataccctgggctacaattatgctttgaagaaaatatagattctcctgttgcttgatattgctcataatttcataattttacactgttaatttatacactaatattttgaaatcaagtcaaaatctaaatgttgattgggcctattagtgtttgcacatgaacacatggctattactattgcatgacattgctttctctcattttggagtcttaaggtctatatatcaggatttctttaagctgttaacaaaatatcaaatgttattattattaatgtatgagttccttaattgtagagaacsttccacatttgagagatatatatgcactatatatatggtgtgtatatatatatgtatatatatatatacacacacatatactaaaagtatagatgcagagatgtgagtttgaatttgaactcagccacttacttgctttgtgacattgggcaggttacttctctaagcttcaggtaattcatttaaatggctgtcatgaggatgaaattgggtgatttgggggaaagcatctgactgacaataactgttcaataaacagctgaattgttctcttgatgtgtaactaattttatttttcaaagagacacctacgcagtagatattcca

SEQ ID NO: 80610 - DNA, 924 bp, Homo sapiens
gttgtcataaaactgggagctttcccaaaattcttagagtttaacctttttttttgtttctaatttcatctattttaaagtattgtctgaaattgcttgatattctggaccacagatgatggccagcaccatgggttgcagactggggcactgtgatcccagcaggacccatctgcctggccctgcttgctgtcgcgggaacacctctgccgccaccacggaggccgaggggctcgcctgcccccgacgcggaggccgaggggctcgcccgccccgacgcgggggcagatgtctttcacaaaggatcctggtggcacagggcagtggagtttctggctgaaggtggagcctcatgagaggagaggggcaagtgggaagtaagtgctttcactgaacactgaggtcagaaacacggaagaggtgttcattctcacccatcctctccagcatcacacgataagtccgtctgcgcagaaggcaagggcaggaaacaggcrtagagatcagaaaagaagttaggccatcttttcttgaagatgaagtgatcacctgtgttgaagtgtcagctgttaagtatcacagtgggatttacaggatactccctccagcagcagccaatacacacacttttccagcgtccatgcggcattcatcaaggtcggtcacatcctgggtcataaaataaacctcaacaagttttaaacagcacagcgtgtgttctttaaccacaagagaatcagctacacgtcaataaacacgagaaaaaactgtgaaaaaaattaaacaacgtatttctaaataatgggtcagaagcctcaagggaaattaaaaaaaaatacatagagttagatgaaaatgaatatacaacatatctgtatttataggatgcagataaatcagtattgaaagagaaatttatagcac

SEQ ID NO: 80611 - DNA, 518 bp, Homo sapiens
tacaaagaacacaagcctgctctatgacctcaagtaatacttagaacccaggcctgccagcctaggaacatgatgaaaattatctcactctgtactttataaaggctagtaatgagtaaaaatggatggagatggaagaaacttggagattatcaggcaacctcycagtagccaccctccttgacaagttgaacccaaaagaactcactaggataaactttgtctagtggaggcccaacctgcctctccgctacccctcaggcctgctacactaagggaaatgtggtaactgtttactgctgtggtatctgaaacctgcactgaagaacagggcaggttagatgcccgcgcctgaaaccagacgtttcctctgtgcagcttccatgtcatctgtttgcattaaaccccctgtggttccagaatcccatctgaaggtcgttctgcccacggcatttttgttgctgacagaatggcagacccttgtggattttcccactaaaatgatttcacagaaaggt

SEQ ID NO: 80612 - DNA, 518 bp, Homo sapiens
tacaaagaacacaagcctgctctatgacctcaagtaatacttagaacccaggcctgccagcctaggaacatgatgaaaattatctcactctgtactttataaaggctagtaatgagtaaaaatggatggagatggaagaaacttggagattatcaggcaacctctcagtagccaccctccttgacaagttgaacccaaaagaactcactaggataaactttgtctagtggaggcccaacctgcctctccgctacccctcaggcctgctacactaagggaaatgtggwaactgtttactgctgtggtatctgaaacctgcactgaagaacagggcaggttagatgcccgcgcctgaaaccagacgtttcctctgtgcagcttccatgtcatctgtttgcattaaaccccctgtggttccagaatcccatctgaaggtcgttctgcccacggcatttttgttgctgacagaatggcagacccttgtggattttcccactaaaatgatttcacagaaaggt

SEQ ID NO: 80613 - DNA, 518 bp, Homo sapiens
tacaaagaacacaagcctgctctatgacctcaagtaatacttagaacccaggcctgccagcctaggaacatgatgaaaattatctcactctgtactttataaaggctagtaatgagtaaaaatggatggagatggaagaaacttggagattatcaggcaacctctcagtagccaccctccttgacaagttgaacccaaaagaactcactaggataaactttgtctagtggaggcccaacctgcctctccgctacccctcaggcctgctacactaagggaaatgtggtawctgtttactgctgtggtatctgaaacctgcactgaagaacagggcaggttagatgcccgcgcctgaaaccagacgtttcctctgtgcagcttccatgtcatctgtttgcattaaaccccctgtggttccagaatcccatctgaaggtcgttctgcccacggcatttttgttgctgacagaatggcagacccttgtggattttcccactaaaatgatttcacagaaaggt

SEQ ID NO: 80614 - DNA, 518 bp, Homo sapiens
tacaaagaacacaagcctgctctatgacctcaagtaatacttagaacccaggcctgccagcctaggaacatgatgaaaattatctcactctgtactttataaaggctagtaatgagtaaaaatggatggagatggaagaaacttggagattatcaggcaacctctcagtagccaccctccttgacaagttgaacccaaaagaactcactaggataaactttgtctagtggaggcccaacctgcctctccgctacccctcaggcctgctacactaagggaaatgtggtaastgtttactgctgtggtatctgaaacctgcactgaagaacagggcaggttagatgcccgcgcctgaaaccagacgtttcctctgtgcagcttccatgtcatctgtttgcattaaaccccctgtggttccagaatcccatctgaaggtcgttctgcccacggcatttttgttgctgacagaatggcagacccttgtggattttcccactaaaatgatttcacagaaaggt

SEQ ID NO: 80615 - DNA, 643 bp, Homo sapiens
accttaattagattctgggtccacaacaaaatcaacaagtaaaaaaatgcctactaatttagtgcacattttgcaaacacttgggaaaatacaaacatggactctatagtaaatgacacagaactgatgttccatttcttgagcaatttgacggtaatgtggtgatacagaaagccatcctcgttcttagtgtcaggatgtctgcatctttcaaatggttcaggggacaaraaaaaaagtgtcaaattggcaacaggggaacagtataaaggtattcatcctactgttccttccatcctctggagggtcaacaatggtaaaagctgggtctttgaaaagactgataaaaggtacataaactcctcacaggaataatcaacaagaaaagagagaaggcacatatacccagcaccaagagcaaaggaaggcacctcactcacagatacccccgatactggtgagtttctaaaggggtattgtgagccagtttatgtcaacacatcgggaagcttagtagaaatggacaaggtcctgcaaaagtcagttggcaaagctaacagaaaaaccctttaaccatgaaagaagctagatcagtaagtcaaaaactctccacaaacaaaataccacccagagagctttcttt

SEQ ID NO: 80616 - DNA, 1785 bp, Homo sapiens
  misc_feature (1)...(1785): n = A,T,C or G
gccgtggcgggaggacctgttggatggagggactgcggtgtgagtttagaggccgtggcaggaggacctgttgggtggatggaggggctgcggtgtgtgtttggaggctgtggcgggagggcctgttgggtggatggaggggctgcggtgtgtgtttggaggccgtggcgggaggacctgttggatggagggactgcggtgtgtgtttagasgccgtggcgggaggacctgttgggtggatggaggggctgcggggtgtgtttagaggccgtggcgggaggacctgttgggtggatggaggggctgcggtgtgtgtttggaggccgtggcgggaggacctgttgggtggatggaggggctgcggtgtgtgtttggaggctgtggcgggaggacctgttgggtggatggaggggctgcggtgtgtgtttggaggctgtggcgggagagcctgctgctcagttctcaggactggttagaaagtaaatttaacgtaggagcaacttaacaaaaagaaaagcttttcattttgggggctttttttgtttgtctttagagatggctttgctctgtcacccaggctggagtgcagtggtgccaccacagctcactgccaccttgaactcctgagcccaagggatcctcccacctcggcctcctgagtagctgggactgcaggcatgcaccactacaccaggctgattttaaacaactttttgtagagacaggggtcttgccatattgcccaggctggtctcaaactccagagctcaagcaatcctcacacctcagcctcttgagaagccaggactacaggcatgcaccaccacacctggctaattaaaaaaaaattttggagtgatggnnnnnnnnnnnnnnnnnnnnnnnnnnnnnnnnnnnnnnnnnnnnnnnnnnnnnnnnnnnnnnnnnnnnnnnnnnnnnnnnnnnnnnnnnnnnnnnnnnnntacagcatgcaccaccacacctgctaattaaaaagaaatttggagtgatgggtctttccatcttgcccaggctgatcttgaactcctgggttcaagtgatcctcccacctcagcctcccaaagtgctggtattacagatgtgagccaccacacctggttatataaaaagaaaacctaaaactagtaaaccacactgatattttttgctatatttctgctatatacatgtccttttgaaaaggaaaataggaatattgaacttagtttttgcgtaaagggccatttcctcccacttaaagttgtttcctttttaatcctctgccagccattcttacgtggccagtggtagtggtgctgattaaaataacacaagtctgccagcagtcccagacagacatcgcaaatggcgccttccacagttcaggactgtgtgcttcactccacggaggtctgcctcagatgcctccctcccagcccctttccggaggccagggagagtgcgtttccaccaagcgcaggagtcagcacttcctcatagccttcccgtgccctcccagcaccaggcacacatggccgctcccacctatcccatccacctgttgtgacgcgggtctgagtagctgcaggtccacgtcgttcctggacccatcatctggcttagtgggcctgtcacagcagacctggaaactaattttctgtgtacagcaggttgcattgccgatgctattttagcttatggagcccagagcccaggaaatggttttaaacatgattttgccttccctcttccctcttgtttaaaaaaacccactccttggtggtt

SEQ ID NO: 80617 - DNA, 1785 bp, Homo sapiens
  misc_feature (1)...(1785): n = A,T,C or G
gccgtggcgggaggacctgttggatggagggactgcggtgtgagtttagaggccgtggcaggaggacctgttgggtggatggaggggctgcggtgtgtgtttggaggctgtggcgggagggcctgttgggtggatggaggggctgcggtgtgtgtttggaggccgtggcgggaggacctgttggatggagggactgcggtgtgtgtttagacgccgtggcgggaggacctgttgggtggatggaggggctgcggkgtgtgtttagaggccgtggcgggaggacctgttgggtggatggaggggctgcggtgtgtgtttggaggccgtggcgggaggacctgttgggtggatggaggggctgcggtgtgtgtttggaggctgtggcgggaggacctgttgggtggatggaggggctgcggtgtgtgtttggaggctgtggcgggagagcctgctgctcagttctcaggactggttagaaagtaaatttaacgtaggagcaacttaacaaaaagaaaagcttttcattttgggggctttttttgtttgtctttagagatggctttgctctgtcacccaggctggagtgcagtggtgccaccacagctcactgccaccttgaactcctgagcccaagggatcctcccacctcggcctcctgagtagctgggactgcaggcatgcaccactacaccaggctgattttaaacaactttttgtagagacaggggtcttgccatattgcccaggctggtctcaaactccagagctcaagcaatcctcacacctcagcctcttgagaagccaggactacaggcatgcaccaccacacctggctaattaaaaaaaaattttggagtgatggnnnnnnnnnnnnnnnnnnnnnnnnnnnnnnnnnnnnnnnnnnnnnnnnnnnnnnnnnnnnnnnnnnnnnnnnnnnnnnnnnnnnnnnnnnnnnnnnnnnntacagcatgcaccaccacacctgctaattaaaaagaaatttggagtgatgggtctttccatcttgcccaggctgatcttgaactcctgggttcaagtgatcctcccacctcagcctcccaaagtgctggtattacagatgtgagccaccacacctggttatataaaaagaaaacctaaaactagtaaaccacactgatattttttgctatatttctgctatatacatgtccttttgaaaaggaaaataggaatattgaacttagtttttgcgtaaagggccatttcctcccacttaaagttgtttcctttttaatcctctgccagccattcttacgtggccagtggtagtggtgctgattaaaataacacaagtctgccagcagtcccagacagacatcgcaaatggcgccttccacagttcaggactgtgtgcttcactccacggaggtctgcctcagatgcctccctcccagcccctttccggaggccagggagagtgcgtttccaccaagcgcaggagtcagcacttcctcatagccttcccgtgccctcccagcaccaggcacacatggccgctcccacctatcccatccacctgttgtgacgcgggtctgagtagctgcaggtccacgtcgttcctggacccatcatctggcttagtgggcctgtcacagcagacctggaaactaattttctgtgtacagcaggttgcattgccgatgctattttagcttatggagcccagagcccaggaaatggttttaaacatgattttgccttccctcttccctcttgtttaaaaaaacccactccttggtggtt

SEQ ID NO: 80618 - DNA, 1785 bp, Homo sapiens
  misc_feature (1)...(1785): n = A,T,C or G
gccgtggcgggaggacctgttggatggagggactgcggtgtgagtttagaggccgtggcaggaggacctgttgggtggatggaggggctgcggtgtgtgtttggaggctgtggcgggagggcctgttgggtggatggaggggctgcggtgtgtgtttggaggccgtggcgggaggacctgttggatggagggactgcggtgtgtgtttagacgccgtggcgggaggacctgttgggtggatggaggggctgcggggtgtgtttagaggccrtggcgggaggacctgttgggtggatggaggggctgcggtgtgtgtttggaggccgtggcgggaggacctgttgggtggatggaggggctgcggtgtgtgtttggaggctgtggcgggaggacctgttgggtggatggaggggctgcggtgtgtgtttggaggctgtggcgggagagcctgctgctcagttctcaggactggttagaaagtaaatttaacgtaggagcaacttaacaaaaagaaaagcttttcattttgggggctttttttgtttgtctttagagatggctttgctctgtcacccaggctggagtgcagtggtgccaccacagctcactgccaccttgaactcctgagcccaagggatcctcccacctcggcctcctgagtagctgggactgcaggcatgcaccactacaccaggctgattttaaacaactttttgtagagacaggggtcttgccatattgcccaggctggtctcaaactccagagctcaagcaatcctcacacctcagcctcttgagaagccaggactacaggcatgcaccaccacacctggctaattaaaaaaaaattttggagtgatggnnnnnnnnnnnnnnnnnnnnnnnnnnnnnnnnnnnnnnnnnnnnnnnnnnnnnnnnnnnnnnnnnnnnnnnnnnnnnnnnnnnnnnnnnnnnnnnnnnnntacagcatgcaccaccacacctgctaattaaaaagaaatttggagtgatgggtctttccatcttgcccaggctgatcttgaactcctgggttcaagtgatcctcccacctcagcctcccaaagtgctggtattacagatgtgagccaccacacctggttatataaaaagaaaacctaaaactagtaaaccacactgatattttttgctatatttctgctatatacatgtccttttgaaaaggaaaataggaatattgaacttagtttttgcgtaaagggccatttcctcccacttaaagttgtttcctttttaatcctctgccagccattcttacgtggccagtggtagtggtgctgattaaaataacacaagtctgccagcagtcccagacagacatcgcaaatggcgccttccacagttcaggactgtgtgcttcactccacggaggtctgcctcagatgcctccctcccagcccctttccggaggccagggagagtgcgtttccaccaagcgcaggagtcagcacttcctcatagccttcccgtgccctcccagcaccaggcacacatggccgctcccacctatcccatccacctgttgtgacgcgggtctgagtagctgcaggtccacgtcgttcctggacccatcatctggcttagtgggcctgtcacagcagacctggaaactaattttctgtgtacagcaggttgcattgccgatgctattttagcttatggagcccagagcccaggaaatggttttaaacatgattttgccttccctcttccctcttgtttaaaaaaacccactccttggtggtt

SEQ ID NO: 80619 - DNA, 1785 bp, Homo sapiens
  misc_feature (1)...(1785): n = A,T,C or G
gccgtggcgggaggacctgttggatggagggactgcggtgtgagtttagaggccgtggcaggaggacctgttgggtggatggaggggctgcggtgtgtgtttggaggctgtggcgggagggcctgttgggtggatggaggggctgcggtgtgtgtttggaggccgtggcgggaggacctgttggatggagggactgcggtgtgtgtttagacgccgtggcgggaggacctgttgggtggatggaggggctgcggggtgtgtttagaggccgtggcgggaggacctgttgggtggatggaggggctgcggtgtgtgtttggaggccgtggcgggaggacctgttgggtggatggaggggctgcggtgtgtgtttggaggctgtggcgggaggacctgttgggtggatggaggggctgcggtgtgtgtttggaggctgtggcgggagagcctgctgctcagttctcagsactggttagaaagtaaatttaacgtaggagcaacttaacaaaaagaaaagcttttcattttgggggctttttttgtttgtctttagagatggctttgctctgtcacccaggctggagtgcagtggtgccaccacagctcactgccaccttgaactcctgagcccaagggatcctcccacctcggcctcctgagtagctgggactgcaggcatgcaccactacaccaggctgattttaaacaactttttgtagagacaggggtcttgccatattgcccaggctggtctcaaactccagagctcaagcaatcctcacacctcagcctcttgagaagccaggactacaggcatgcaccaccacacctggctaattaaaaaaaaattttggagtgatggnnnnnnnnnnnnnnnnnnnnnnnnnnnnnnnnnnnnnnnnnnnnnnnnnnnnnnnnnnnnnnnnnnnnnnnnnnnnnnnnnnnnnnnnnnnnnnnnnnnntacagcatgcaccaccacacctgctaattaaaaagaaatttggagtgatgggtctttccatcttgcccaggctgatcttgaactcctgggttcaagtgatcctcccacctcagcctcccaaagtgctggtattacagatgtgagccaccacacctggttatataaaaagaaaacctaaaactagtaaaccacactgatattttttgctatatttctgctatatacatgtccttttgaaaaggaaaataggaatattgaacttagtttttgcgtaaagggccatttcctcccacttaaagttgtttcctttttaatcctctgccagccattcttacgtggccagtggtagtggtgctgattaaaataacacaagtctgccagcagtcccagacagacatcgcaaatggcgccttccacagttcaggactgtgtgcttcactccacggaggtctgcctcagatgcctccctcccagcccctttccggaggccagggagagtgcgtttccaccaagcgcaggagtcagcacttcctcatagccttcccgtgccctcccagcaccaggcacacatggccgctcccacctatcccatccacctgttgtgacgcgggtctgagtagctgcaggtccacgtcgttcctggacccatcatctggcttagtgggcctgtcacagcagacctggaaactaattttctgtgtacagcaggttgcattgccgatgctattttagcttatggagcccagagcccaggaaatggttttaaacatgattttgccttccctcttccctcttgtttaaaaaaacccactccttggtggtt

SEQ ID NO: 80620 - DNA, 807 bp, Homo sapiens
caaatcaaaattccaaccaaataagtgttcaaaaggttccataaatcatgtgttttcatgaggctttcatccaaaaggggagagtaaaacttgcaggagacgcgcaccttctcaacctgcattcttcattatttcctttaggtaactcgagtccatctatcatgcaaagctgaatatagggcacttccataagtgcccagattcttagttttttattaaatttattaaatctccaaaccagttaataagaaaggctaaaggtctttgggtggattacaagtaacttaagatcttaaaggcaatttgacacagttatattctaagccacttttctttaaacaaacaaacaaaaaactgtaagatataagccaaaaaaaaaaaaaaaaaaaayccacacactaattggtaactggctccctaaaaagaaccttatcttttgaatcaaaggcaaagcatataataagtgttatcttttgactgttgggtgtttttttctcaactatgtgaaaactgaagacacgcggaatagcgttaactagttgaggttgcagaaaaattatcgaaaatacatttcctgagaaaaattaaaaccatggttaagagcgaaaagaatactttttcttttctaaaaatctggaacaaacttaagcaaaataagttggactgtccaatgcaagactcacaataatgcggacgctgtcaagacaacacagccaccaatagccagcaggcagaacgcaggcacacgaaacgcagtgcgcaggcgccatgccacacaagggcagggtgtgcacagaattctcactt

SEQ ID NO: 80621 - DNA, 526 bp, Homo sapiens
gacaactttaaacccttcgggggccacaggctaaatctaggaatctcaggttctgctcatctaatcatctytgatagtcatgttctcctgaaatctagacatagacaatattcaagcgtatgcatacataacctctgacagtgtatcagatgtctcttatacagcactttatataacctctttgtgccatctctcactctagccactgatgcaatgatggcctcttccaagttttgaccagctttgtgctggtacaaccttatgtgttctttgacctctaggctgcagtgattaggtaagaaagggccctcaatccaagtcaggccaattagaattttatctgagatttggtagctcatcaataaaggtgcatatttgaggttacttgttgctatcttctgagccttctggaaacatgagcctgagaatgaagcccacatactatcagaagaaataaaagctaagtgaggcagagtgctagggacattgtttatgcttctgagtcagatgaacttgtgaccttcta

SEQ ID NO: 80622 - DNA, 626 bp, Homo sapiens
agaagtatgcatggaaacaccgtgcacgcacctgctcggaagggccagcaggcgacccctaaaacttctccatcctccctgttggcagctttatgcctggctacgggaaaacaagctcctgagacaaaggatgggaggaagccacagagcgcacctcgcacagctcctcccgggtgtctattcgtctttctcccaacccacatcactctctcctgacgctgcctaattttactttggagctcctgccccttcctgacccgttgcatacgtgtttatttattatctgtctcccctcaccacaatgtgagtcactagwgcggaggctctgtttctcagctgtgtccccgcacctagaacagcacctgcacatggtaggtgctcaggagagatctgtgaaatgaataaaggataacaaggccacataaagcatcagagttttggagtttcaagggaccttcgaagccatctggtttaactccccatctcctgcatgacagcctgatgactgctgggcaccatctctgcttgtatatgtctagtgatgggaggctcgctactttttaggaaatgccccctcattttgggagagctcagttgggaatgtcttcctcatgtcagctgaaatg

SEQ ID NO: 80623 - DNA, 626 bp, Homo sapiens
agaagtatgcatggaaacaccgtgcacgcacctgctcggaagggccagcaggcgacccctaaaacttctccatcctccctgttggcagctttatgcctggctacgggaaaacaagctcctgagacaaaggatgggaggaagccacagagcgcacctcgcacagctcctcccgggtgtctattcgtctttctcccaacccacatcactctctcctgacgctgcctaattttactttggagctcctgccccttcctgacccgttgcatacgtgtttatttattatctgtctcccctcaccacaatgtgagtcactagagcggaggctctgtttctcagctgtgtccccgcacctagaacagcacctgcacatggtaggtgctcaggagagatctgtgaaatgaataaaggataacaaggccacataaagcatcagagttttggagtttcaagggaccttcgaagccatctggtttaactccccatctcctgcatgacagcctgatgactgmtgggcaccatctctgcttgtatatgtctagtgatgggaggctcgctactttttaggaaatgccccctcattttgggagagctcagttgggaatgtcttcctcatgtcagctgaaatg

SEQ ID NO: 80624 - DNA, 623 bp, Homo sapiens
caaagtcacaatcttactaaatgttttataccgtgttttatcctgcccttttttcacttcatataatatcatgtcattgaatattctttgaaaagatgatttgtactacttgaattaaaattcatggcttagagtcacattatttagccatttctctattgttgagtgtctaggttgttgtttacaatttcccaccacttaaaaaaatgtggtgcctagcattttcataaataagtgattgtttgcatctctgattattttgataggggagattcctaaaataaaggctactggatcaaaagatatgaatattttaaaatgtctttctgaatgaattcctttgaagacactgtaacactgaattgcttattctttttggtttcaatcttcaagtttaattgcctatttctatactttatttactccatggaagcagcaagggaaagggatgaagcggcctggagtgcatgttgcattagagggcagaagacctagattctttaggtcttggaaaactcacaaatgtccaccagctttatataccttgtctttcaaataagggsgggggggtgggattccttagccataaattccacagttctctagttctccttggctactag

SEQ ID NO: 80625 - DNA, 664 bp, Homo sapiens
cccaacctggggctcctgggtccctggagatctaggaaaagtttaaggtatgttcaatattttggaaagcccagtggaaatcatacctttttaggcaacgccacctgggctaagcaaaacagtgcatttctttgacgtcagttgggtcacacttgtcatcttatgcagattatgaacttcgattagcagctgaatgcctttgggtaaaaaaaaattatttaaagcctaggtccatgtagggaatatataattaaatgagtaaaacttcaggaaaccaaggtttagacctcatcttgcctggggttaatagaatgatcttcgataactctttaagtgagtagtcctaaataccaagaatacgtttggtactggcatcttgcatttcactatctcagctagagccagccaggctgagagggattccatccagggaatctccctgacatgttttccttggatgccattcccttctcttggccaygttgctggcgggttcttggaccatttctctatgtcggtggatggattgtggtgcagctaaatttccagtgtgttcaaactccatctgcacgggtgccccacagcttaagcctgtttggtgaggagacatctgtggcaccaaaagaagatagctcaggcagatcctgcagttgctgattcttca

SEQ ID NO: 80626 - DNA, 620 bp, Homo sapiens
tttcctttcaacatgatagatgtcactgtgtcctttgccaaggacttcctgggagatggagtggccacagccatcttcaagatagcggtagcacccaccgtccaggtcaagctgctgatgcaggtkcagcatgccagcaaacatatcaccgcagataagcaatacaagggcattatagactgcgtggtccgtattcccaaggagcaggggagtcctgtccttctggcgcagtaacctggccactgtcttcagatacttccccacccaggctctcaacttcgccttcaaagataaatacaagcagatcttcctgggtggggtggacaagaggacccagttttggctctactttgcagggaatctgacatcaggctgtgccgctggggccacatccttgtgttttgtgtaccctcttgattttgcccatactcgtctagcagccgatgtgggtaaagctgaagcgaaagggaattccgaggcctcagtgactgcctggttaagatatgtaaatctaatgggattaagggcccgtaccaaggcttcaacgtgtctgtgcaggttattatcatctaccgagctgcctacttcggtatctatgacactagaaatggaatgcttcc

SEQ ID NO: 80627 - DNA, 562 bp, Homo sapiens
cttctcacagtactttgtgcaactttacaaaaatgatggaatatgtatgtgagatacagcctattttatatctattatataatatatctattatatagatataatatagataatgataacattataatatagataatgatattatatctattatcatttagtggtgaaaaatgtggcagtacttcaycacaactgtttctgaaaccccaagcaatagtttggacaacaaattctattgcaccaacaaattctcagccagctttgtttagaattgactctgcttagagcctgaggaagttaaataatggccaaagtaatggcagtcatagtaatagtaaaagtgagaaagaaattgctgaatggtaacctagatgactcttaagaattaactccttcagtaggaattaagtcaggcatcctgtaatcagaattagacaacaatctaaatgagaacatttgttttctcatattgcaggctaggaagatcattctagtggttgaaatcatgctatgtcctggaatatttcccactactctcactcccatctctatgcactttcaa

SEQ ID NO: 80628 - DNA, 913 bp, Homo sapiens
ggccaaccccaaactatttagagctggaggcagcagccactgccccggtgcacgccgggaaccactgcccactgccccagtgcttgccgggaacaaccctcaggccaggtgcatgctggggccgcgccgctactccctccgcacggccccacgcttttcgccctgaaggaatcggtacgagacggctcacctaggcagcccgcagcccgtggtagtgccggagccttgctcctcttcactcattccctcctccgtccccgcgggcgccaccgtgactgcagcctccacgcgccccaatacacagccgacgagctagggccggggccaagcccggagtcgcggccggtagggcccgccgcggggcacgctgggatatggagtcccccgcccaccctacttcgtgagcctccatctggaggggagctatccgccccacaaccctctgcgtgcgtggctcgcccgggcaggctgcaccgccttctgggaggagcgggccctccgccgtcgcttctcgagaaggccgtatttttttgtttgtaataccgtcccgcctccttccttccgcgccccctctctcccggtccgtgaagctgtggacatgcgtactagcggaggggaagccgctgggtagggagrcggtaaggactcacttgggcacggagccttttggatcgcgagaaaactacagaacccaagagcccgcgcgccatctgtgtcgcagctggagaggcagggtcaagcacgcacgagaagcttcatggcgtcattggttactcccattgcgattacttcccctaggtgcactgagattggttacttcgactaaaggggcggagacaaggaaaagtcagccccccccgaccccgcctccttgatgaaggaaggttgtgattggtccggagaggctgccgtc

SEQ ID NO: 80629 - DNA, 647 bp, Homo sapiens
tgcatttcttttctatcctgcaaagtctcagaaccccacaagcacttttcttcatttttatcaccttctgacaacccataataaagcattattaaaatacagtattaatttctgaaggcatacaaagcctgctacattaaaatgaacatcaacactaaattttataattcatcagtgagtatagtcataccatgataaactgattgtttagaagctgtatctgtcaagtttataggacaagaaacttagctamtaatacactagaactgtagcctacaatgctgttagcattttgtctaccaccaagtttaagaaacagatttctgggagaaaactttaattccttttcatggtagatcatcaccttaacatggcataccacctccacatccacttcatttcggcccctgctgactttcatccatcactccagtcacactgaacagatggatgcctgacctctccgtggatcttttcacagcctctgaacctttttctcaggcagttgtcagcccagactgcctccacccacctggaaaactcttactcattcttcagggcccacttcaaaagcctcctcttcaaggaggcattccctggcccttcaaggcaaaactgagacactctttcacagttctagaacaatc

SEQ ID NO: 80630 - DNA, 1193 bp, Homo sapiens
tgcatttaatatcatttctctcctatagaacaaggtttataggttcaggtggcagcactgataagtttgaagaaagtgagagaaaaaaaaatctacaacgatctcttcccaccatagcttgctactttcagaagaaaatagggttgagtaaacctttggaggaatacttgggagcaattttatctgatgagtcatgcagcgtagaatttaagggataaaagattacccagaatcactagtctcacctcgcttcttctattccctctactagaaaccagggctgaaggtgggggcagactagcagacagctgaatctgaatttctgtacttkgtgacagtaatgttttagtcccattgaacaactttctcatctattgtaagttttcatccatctgtctggcagccaaaccatacagctacacaaaatgcacttgtttcactatatcaactaagcttttaacttgtcctaaaagagctagcaaaaataagtgagagtgagtgtactatgacgcatacaaaccatagctgaacaaggtattctaaattcttttctaggattaaggaaattaatcagagagttacaagcctatgcctcacaaagttaagtttctccatggaaagtctttctttgaattagattaaatgttttgtcttcattttatttaccaaatgttcatatcagaagtaaccatctaagtgaagaacactttgtgatttttacagttactgttgaaaacattttctattgtattgactggtgtttttagtacaacgtcaaacacatagacacactatgtaatacactgttccaacagaggtattagtcatgctactcttggcagtccctgaagtctcagacaaggtgctaaaaatgacctgagcacactgtctgccatgtggtgccatcccttccctaggccttggcagttgaaggatgaggatatacaacagagcagagtttggcccatgctcagaagctacttctcgtgcctatctgccttcttgaataacaaataaactattctttgaggtgctcagaaatacacatggcagagatctttcttcaaggtccatctagtatagctgaaacaaaaaagaagtgtttagtaaacaacataattgtacccaaagggagtatccgttaaggttcttaggacttaatccttcaaaagagtgaaagggtaacaacaacc

SEQ ID NO: 80631 - DNA, 544 bp, Homo sapiens
tttaagctgttttgtcattttatattgacttgttttctgttgaattactttatttgggtgctattcccaacaaaatgaaactttgtacgtttaaaaycttttagagtattttaaaatccatcacctgtcacttagtgagcagtatacactgtcacattctttataaagccaatttcactcctcttgtaaaactgtggtataaaataggctaatcatagcctactgagcttttgtactttggtgttattgattttagtgaaaagagacatatttatttaaagttggaagttaaaaaaaggcaaggtttttaattgcttaaagcatttttagcagagttcaagttttggcactagaagtgaaataaatacaaagattaattttaatctaattatcatctatttttttcgattgtttatgaaaaaagtattctgccactgtggcagaaaaggattgaatctattcccaacatgatattcccaaattttttgcttttatgatatatttctggcaatggaattgtgatgtgttatgctaatatgcattt

SEQ ID NO: 80632 - DNA, 965 bp, Homo sapiens
aatcaaattaattatttaattaaccataccttaaacaaacattgtattagttagtctgtggtttaaaacaggttacctatattaaacactgatgaattggttcatgttggaaatcgccatttggtcagtaaacctcagcaaggccctgtgagtgctataattagggcttccagcagagttrgaaaagtaatagttggcatgcgaatctgaaagttgttatagtttgcagccagtaatggcttgtccactctattctaggctcttgggataataactttgttatttgagtatttaacctgcttctatggtttaaagtataaaatcttcaagagtagagtctctttaagtctttgtaaaaactctacattttgatgacaggtctgttattattctgagtcacttgctatatgtgatttgctttctattttctttatcttgcctactaaacagaaaatggacattagacaatgttctgtgataaaaaacatctgcttaattttttttcaaaatgctggattcaaggatgacaagaaacagcattcattgtatttctataatttgtgtcgaatatttaaaagtggaagaaactgaccttcaatagttattgaggtagtactcaaatcatgctcaattttttgttctatctttaaatcatacctcataaatcagataatgtgacctgaaagacaaaagcaatgtctacctgcaagcaaacattggatggaaactaatcaccctgcctatatatgtgacccacataatgattatatgacatcagcagaaaaagggttgtaaaaatgattttgccagggtccacaacatgaggcttatgaacacatagagcagtatttctcaactttttaaaaagttataacttcctaaggagttttctggacacactttttctaatcgcttccttccttccgtagaattttaatactacagatttattgtatatttgttta

SEQ ID NO: 80633 - DNA, 625 bp, Homo sapiens
tgtctataggtacaatagggatgcaaatcaatttttatagtcttacaaccctaatgtcagaaatcctacctataggaataatggagatgcaaatgatcaggatctattgctgtgtgacttttggcaacaaggaaatgggctaaagtgcaacttgattaatgcttaattrtaactatatttctgtccagaatctggcatgtattataattcttgtcaaccctgtagggacagtttcatcataaactttttaagggtagaaaatggagtatgatttatgttgctctctctaatattgtgtttcaaactgcagatttcaacccattgatgggttctaaaattgatatagtgagttgatcactttgtatgaagtagattataataataagttattaattagagtaggatagaaaatatcagaatgcctcacacttattaaggttaaatattgtttcatgaaatcttctttgagtcctgtaaatatatttctgagcatacactgtgtcacaatgtaaaatacatttttactgtttcttggagtgaaaattttcaaaattattgcctgagcttttagctcagttacttgtacataataggcagatcaataataatttttaataacagaatg

SEQ ID NO: 80634 - DNA, 625 bp, Homo sapiens
tgtctataggtacaatagggatgcaaatcaatttttatagtcttacaaccctaatgtcagaaatcctacctataggaataatggagatgcaaatgatcaggatctattgctgtgtgacttttggcaacaaggaaatgggctaaagtgcaacttgattaatgcttaattataactatatttctgtccagaatctggcatgtattataattcttgtcaaccctgtagggacagtttcatcataaactttttaagggtagaaaatggagtatgatttatgttgctctctctaatattgtktttcaaactgcagatttcaacccattgatgggttctaaaattgatatagtgagttgatcactttgtatgaagtagattataataataagttattaattagagtaggatagaaaatatcagaatgcctcacacttattaaggttaaatattgtttcatgaaatcttctttgagtcctgtaaatatatttctgagcatacactgtgtcacaatgtaaaatacatttttactgtttcttggagtgaaaattttcaaaattattgcctgagcttttagctcagttacttgtacataataggcagatcaataataatttttaataacagaatg

SEQ ID NO: 80635 - DNA, 668 bp, Homo sapiens
cttattcagtaaatatttttggagtatatagttgaggctatacaatgtgctaggtattgcagataacatagctagggagaaagatataatctctgcctgtatggtgataacattgcaataaagggcacacacaaaaaccaaatttgtatatctctgagatgtgtatagaatcccagattccctccccttttttttaatggagaatggaatataagtccacaagtgctgaagatgaaacacaccatttgaattgagctaccaattgtctggtgattcatttagatttagaggtatctaatatttttacatcaaactacagaatatccttacaacctacacacattgcaacttctggtaagaaaaagaaaaaataggaagaatagatgaagccgaaggcaggtaaagtgagagagtaaggsacatgcctgttttagagtagacctttggaatgggtcttacaagaggctttcagaattctggcctgtcacagggaagtgtgagccatgcattcattcatctacttggtcatgcattcattcatttacttgttcatttttttctattcagcattttctgtgtttggtaatgtgccctaagagtaaaagaacttcaggatctatttaattttaatctgtagtcataagacagctggaatacactagaattgg

SEQ ID NO: 80636 - DNA, 647 bp, Homo sapiens
ccatcccgctccgtcctgcctggaacgtcagtcctccctttgtccagcgcatccgactgtcacaatacaacagtgctcatgttcaagtcacccttatttcacttagtaacagccccacagcacaagagtagtgacgctggcatattgttataattgttctatttcactatttgttattcttgttaatctctttgtgtttaaacttcatcacagatatgtatgtataggaaaagaaaagacatcggatacatggggtttggtactatttgcagttttaggcatctactgggcatgatccactgatcaatggtcttggaacgtgtctgccatggataaggggagtctactgtattgattctgattaatgcctgagaatgggatgttatttcattcacacggaagsctttttcctttcttccattctttcttcctttttaaaaaaatctccttcagaaaaaaaagcaaccctggatatatgagacagggggcagggtgacacaggggaaataaaccacagtcctttacctggatctactcagaagactctgtagctactatttccccaacatgtaccatgccatgtatttatttgaatactcatgtccttgtgactcaaagttgatgttctacaggtcgtgggaggtcca

SEQ ID NO: 80637 - DNA, 1121 bp, Homo sapiens
taaaatgaggattctgactccggaggtctgggatggggcctgggattctgcatttctaatgagcttctggtctttgttaaggtaacaaggaataaggcatgcgaatggtaaaacaatcccatctgtatttcctgtctcaaaaaaaattaaatgctgttttatacccttgaccataatctctttagaaatgggcaaatcacattttaggaacaacagtccacyaagtgctaaaaaatctccaaaagttttctttataatacataatatgagttacatgttgctaatgggaattactgcacagtgcagtgaaatgtaattgtttcttaattcttgcataagtgccaacaggaacacacaactattgaagttcatgtgctttccataatgttcttcctatcttccccagaaggtggcagaagagagccacggctacaccatggtcttcaattacagtgcgaacttctgttggcttgtctgagtctgaatccttgtgcagcatgaggcaaagttttaggggtggggaagggatgggaaacacaactgaaaatactaaacaaaaaacccagaagccttctgataggttcaagttactcaacaattttatttacccattctacacacacgcacacaaaaacacatttcaaatacagttatgcacactttaaatggatctgagtggcatactttgttatcagtgtcacccgattaaatcagaatgttgctaaagacttatgttcctatttcaacagagcagtgcctaggaaatctacagtagaactctcttcctaggcttcccaatctgacccattcccattcaacccagaggtgctcagccccacaccatcccccttcccaaagggcaccatgtatgatcagccctttgattttgccatagcaaaaccatcaccataccagcataagttgatcttcttgttaggtcaatataataaaaaacgtacataagcaattcagatacaaaaacattgcgtaggtaaacattggtcacagatatccagtgaaaggcttactggaaaaaatacttttgccaacccttaaaatcaatttttaaatgccaaattttcttctcatttttacttactagattaagtgtaaaatccaaa

SEQ ID NO: 80638 - DNA, 1233 bp, Homo sapiens
tgctgctaatgtttattcaataagtattattgaatacactttcttagcctctttacattgctattacctgaaaaccttacaacaaaacaataaataaggtgttcatgttatttctacatacagatggaaacactgagattcaaatatgttcattgtcttctccaacgtgttcttttttgcatgtttgctgttgacctcaagaaagacttggaaataagaccataatctgtaattttttttttttttttttgagacggagttttgctcttgttgcccaggctggagtgcaatggcgggatcttggctcaccgcaacctccacctcccaagttcaagtgattctcctgcgtcagcctcccgagtagctgggattacaggcacgtgccatcacgcctggctaattttgtatttttggtagagacagggtttctccatgttggtcaggctggtctcgaactcccgacctcaggtgatctgcctgccttggcctcccaaagtgctcggattacaggcgtgagccaccactcccggcccatgatctgtaattttaatcaaaagtgttaggctacatagtgcattgtaaattttcaattatgcctaatataaataagcacaaccaacactatttttcaaagtcacataaaagtgttyaagaaatcacagaggctctccacataataaaagtaaaagtgtgaaaggcagaatttagaatgatttgttagagaagaactgtaggttctgcatataaaataggctcatttaacaatatgccattctgtatgccccaaaggatatgggggaaagttaagacacttcattttaaatcaattgtgaaatgtggtttaattatcagaagcaaatgagataattttttccaccaatagagcagttttaaatgttgttcactttattttagatattgtgagcataaaaatgatttgctaaacccagacaaaatttttgaagagtttcctgaatccaaacatgtttacactataataaattatttccaagacaccaggaacaccatagctaaaatacaattcaaatgagatctacatttaatgtagaagaaccagacatcccttatctatatcaactactaatatccctgctgtgaactataaattaacgaggttcattttgtgtgtgtggccatggagccaggcttccacgccccatttaagccgtatcagtcatacctcatatatttatttaacgaagataagcactt

SEQ ID NO: 80639 - DNA, 760 bp, Homo sapiens
ctccccgacacacgtgggaattataggagctacaagatgagatttgggtggggacacagagccaaaccatatcagaaaggaagggagggaagggaaaagaaaatgaggctaggtgggagtgagaaattttgaaaagatgaataaatgaaaaggaatttcaytccccttcccctcagtgtcactacatttctccagttaagattgatgatataatttattgtttggatttatcctcctctaataagctaagtggtctagcattataatatttttttctgactcttcaaaagtaatataatactttctctatttggataaactttcagcagaatgtttcagaattagcctgatattccacttcacgaattgctagtaaataaatacagatgtaaatatttttgtgtattagaattagatacagtttccattccttcaatgatactatgttttttgatagaaaatgtctgttgaaatttataatgattaaaaaggtgtagctactgagagaaatctgtaagaaaaacgacagatttataaagaaaattcccaagtttcttctaatagcacaggcagatgagatggttaatccacagcatactttcatggtgattttctacactccagacaggaacagctgccacttggaaaagagatatcatctgactgatgaccacctctaatgatttgacaggttctttctgagcagctgaacaattagtgtgctttttggcacagactgcatgtttaacaaactaatacc

SEQ ID NO: 80640 - DNA, 760 bp, Homo sapiens
ctccccgacacacgtgggaattataggagctacaagatgagatttgggtggggacacagagccaaaccatatcagaaaggaagggagggaagggaaaagaaaatgaggctaggtgggagtgagaaattttgaaaagatgaataaatgaaaaggaatttcactccccttcccctcagtgtcactacatttctccagttaagattgatgatataatttattgtttggatttatcctcctctaataagctaagtggtcyagcattataatatttttttctgactcttcaaaagtaatataatactttctctatttggataaactttcagcagaatgtttcagaattagcctgatattccacttcacgaattgctagtaaataaatacagatgtaaatatttttgtgtattagaattagatacagtttccattccttcaatgatactatgttttttgatagaaaatgtctgttgaaatttataatgattaaaaaggtgtagctactgagagaaatctgtaagaaaaacgacagatttataaagaaaattcccaagtttcttctaatagcacaggcagatgagatggttaatccacagcatactttcatggtgattttctacactccagacaggaacagctgccacttggaaaagagatatcatctgactgatgaccacctctaatgatttgacaggttctttctgagcagctgaacaattagtgtgctttttggcacagactgcatgtttaacaaactaatacc

SEQ ID NO: 80641 - DNA, 760 bp, Homo sapiens
ctccccgacacacgtgggaattataggagctacaagatgagatttgggtggggacacagagccaaaccatatcagaaaggaagggagggaagggaaaagaaaatgaggctaggtgggagtgagaaattttgaaaagatgaataaatgaaaaggaatttcactccccttcccctcagtgtcactacatttctccagttaagattgatgatataatttattgtttggatttatcctcctctaataagctaagtggtctagcattataatatttttttctgactcttcaaaagtaatataatactttctctmtttggataaactttcagcagaatgtttcagaattagcctgatattccacttcacgaattgctagtaaataaatacagatgtaaatatttttgtgtattagaattagatacagtttccattccttcaatgatactatgttttttgatagaaaatgtctgttgaaatttataatgattaaaaaggtgtagctactgagagaaatctgtaagaaaaacgacagatttataaagaaaattcccaagtttcttctaatagcacaggcagatgagatggttaatccacagcatactttcatggtgattttctacactccagacaggaacagctgccacttggaaaagagatatcatctgactgatgaccacctctaatgatttgacaggttctttctgagcagctgaacaattagtgtgctttttggcacagactgcatgtttaacaaactaatacc

SEQ ID NO: 80642 - DNA, 1077 bp, Homo sapiens
agtgttcctagatgctaaagtatcatcaggttaaagcattgataacttaatatactccattttattacttgttttatgtaagtttcactctgtgaccaagcacgtgctcctctgaaattcttccttggggctatcggatacataacgtcacactgcataaaagagagggccacttaaccttccttgtggcttttttgagaaagagagagagaaaaaaaagatgcccatttctgggagcctccatttctcagctggacacttcccatgccaggcatcgccactggatttcctccctaccgctcctctaaggagactttcttgggcaaaggtgtactctggccgtttagaaaagaatccttaccaggtacttgctaatggtgtcaggtttcattttttaaaggaaagcctggcatccctcttgcttcatagaagtcggctatgaagcaatggtgcagagttacttccctttttcatgtagaccagagatcaacaggagataagttgaggtggccgtccaggagatacaggtgaaaggggatctcagtctttttatgtgaaagttagttaatacagtcaaggrctcggatccattccaattgggcaattggacatggggacaacttcagtgggcaaacttgtctggtacttcctaggtctgtagaggtgaagacatcaagcttctggaaaaaaaaaacaccttggatcaggtccaaaggtttggggcgggaggggctcctttccagaaagcctcttgcttggtaggtatccatatatcaaacatgtgacttatcacagaatgtaattgatcataatgccttgttaaatctaacccttaatcattagcaagggaaaaacaaacaaaaagtaaacaaataaacaaaactctgataaaggaagagcacatgcctcaaactctcacttgaagtatttggaatagatttgccttctgtgattgtgactttgcttcgggattgccaaatgctgactttccatataaaaccagcttaaacatctgaatatttgttttactaccataaataattatttttggtatctttctatgctcctggcaattta

SEQ ID NO: 80643 - DNA, 655 bp, Homo sapiens
agagtgaaaagtgatttaactttgaatgagtcctcctgctttccagagtttgatttctagctatgtgtaacttgtagttaatgaagtcacacatctgataccttcagtgcctaccaacacattgctcttaattctcagagaggctaactttcccaggctggcaagacaaactaataatggcctgccttagcttcagttttatcaagtttatctgaacttaattgacatattgaagggggtgagaggaagccagagatcctaagaggcaaagacctgtttgcctttcactgttctggagtgaaagttcctcctcctgaatggtccagtgccctagagttgtcatgacaatcagaaaatttttgcaacctactcatctgacaaagrgctaatatccagaatctacaatgaactcaaacaaatttacaagaaaaaaacaaaccaccccatcaaaaagtgggcaaaggatacgaacagacacttctcaaaagaagacatttatgcagccaaaaaacacatgaaaaaatgctcatcatcacaggccatcagagaaatgtaaatcaaaaccacaatgaaataccatctcacaccagttagaatggcgatcattaaaaagtcaagaaacaacaggtgctggagaggaagtggagaaatagga

SEQ ID NO: 80644 - DNA, 623 bp, Homo sapiens
ccatgcccggctgaatttttttgtatttttagtagagatgaggtttctccatgttggtcaggctggtctcgaactcctaacctcaggtgatctgcccacctcggcctcccaaagtgctgggattacaggtatgagtcacggtgctcrgcccctttctctctttctatctggttgtcctcctgtctgcctttctgcccctgtccatcagtctctctgcctgtccctggtatgccactctctgtttcaccctctctgtgtctgactcagtctccctcctttccttctgtctctctctactttccttctgtctctcctcctccttctttctctgtctaactctgtgttttctctctatcactctctctgttgtttcctttttgtttctctctcctgctctttgttttgctccccactccccagtctggctgtgaagtttgtgtctctcctcctaaaggttttaggcagtaccttttctaagctagcctgggccatgcctaaatctctgatcttgggccttgtcttgtgctgactcagtgctgcccctgccatctcctgccctctttcccgccttacctgctctgtctgtccccagtgctgcaggatgagtggcgctggtctcggga

SEQ ID NO: 80645 - DNA, 844 bp, Homo sapiens
gatccccttcacaaacttctgttgtaatattaataattaccttgctacattgcagtaatgtgtttgtgtctgtcttccccactcagctataaatttctagaggccaaggactgtgtttagttcatctttgtatcccttagttcataataaatgctcaattcagttttcataaatggatgaaaaagaggatggatggaagaaaggaaggatggataaaaaagaaggaaggaaggaaggaaggargcaaggaaggaagcaaggaaggagtgacagtgatggaccacattgcttctgactttctgatttctaagaaggaagaaaaacaaggtaattccagcagaggcggcttaattccctcttgtccaatttttgtacaacctcttcacacaccatccgtggcattttccttatcttacaaataccggaggacactagccttcacagaaattatcttggctccttgccagaaaacaaacaagcctgagaataaagaaaaataaataaataacaacagtgatgtttagcactttgaggtctgggaaatgaattccgaatgggagctgaactcaaaaccaaatgtttggctttcggggacaacctactacttggctgaaagcctcagccccctcctgagaccacttagcaaatgtcggcccagagctcttcctgcgagctgctgtctatcccacccctttctcaggcctggaagaaattactgccaagaaaaaacaatcaaaccttctacctactacttcaaggttgcttgtggttgatcttttcctaccttgggaactttccaaatggttctttaggaattcggttgtgtttgaaaaaggtttactca

SEQ ID NO: 80646 - DNA, 844 bp, Homo sapiens
gatccccttcacaaacttctgttgtaatattaataattaccttgctacattgcagtaatgtgtttgtgtctgtcttccccactcagctataaatttctagaggccaaggactgtgtttagttcatctttgtatcccttagttcataataaatgctcaattcagttttcataaatggatgaaaaagaggatggatggaagaaaggaaggatggataaaaaagaaggaaggaaggaaggaaggaagcaaggaaggaagcaaggaaggagtgacagtgatggaccacattgcttctgactttctgatttctaagaaggaagaaaaacaaggtaattccagcagaggcggcttaattccctcttgtccaatttttgtacaacctcttcacacaccatccgtggcattttccttatcttacaaataccgraggacactagccttcacagaaattatcttggctccttgccagaaaacaaacaagcctgagaataaagaaaaataaataaataacaacagtgatgtttagcactttgaggtctgggaaatgaattccgaatgggagctgaactcaaaaccaaatgtttggctttcggggacaacctactacttggctgaaagcctcagccccctcctgagaccacttagcaaatgtcggcccagagctcttcctgcgagctgctgtctatcccacccctttctcaggcctggaagaaattactgccaagaaaaaacaatcaaaccttctacctactacttcaaggttgcttgtggttgatcttttcctaccttgggaactttccaaatggttctttaggaattcggttgtgtttgaaaaaggtttactca

SEQ ID NO: 80647 - DNA, 604 bp, Homo sapiens
cataatggaaacacagccctgaagggctaaaatcataaaggtcagatggttgcctagtaaattaaatgaagcatcctcaaattttgtttgatattttttaagttataagcagcataaaaatagcacatctttccttcactacaccacaactttcccccttcaagggccaagtgatttcattatatgacgaaattcaaataaatttttaaaaaattcacttccgcctggcctggtagaggtatacacgtgtagatccagctactctggaggctgaggcaagaggatcacctcagcccagaggtttgaggttatagggtgctatgatcatacctattaatagccatattaatagctactgcactctagctttggcaacattaaaaaaaactacgtctctaaaaaaattaaaaataaataaattttaaaaattgtaatccccttttcacactccaagaacttatcccaatacaattttaagataccaaatttggtaacataatagatattaaggaaaatatgtataggcagcagaatatttagaaaagtaggtctgtaatattttttgaagtctgcatgcaagtgcargacaatagtctttctcata

SEQ ID NO: 80648 - DNA, 1893 bp, Homo sapiens
cattttctgttttaatgagatctgcaaggggaaatgaatacaaaatttgcttatcttgcaaggaattaaaacaaaagaaggagttgggtgtatcaaatgttcagtagcatcaagctagaagagtatctcatcatccatctcacagctaagagagcctcatgaacaagatgggtaggaaaataatgaggtggatacaggggagaaggagagaggaagggtaatgtgtacagagggttcaggttattggttaaaactccatccaagagaaatatctggatgggtgctgataaaatttataggtgttactttcctttacctatgattttaccactgaccaacttccccgatgaacatcttattcttttactagctatattaatatatttattcaggtaacagttaagtcacacaggccttgaaagtattctttctctttccagtgacctacatatttccgctctgttctactgtcattatttaacagttaatctctcaaagagctgttatacttcacttattcctgaattcttgagggagatctcattacaaccccaagttaacgatacttatattcatatatgaaatatttctcagaaattctacttattagtccctatttatatagtataaagagttttcttaaatacagtcatactgaactaaaatttattgcttaacctactaattaggcaaactgtgtctcctagaatttgtagttcacaaattctaggtaaaagaccaagtgtgtyttcattaatttgattttgaaattaatcattctcaacaaatgaaaattttataattaaatacatttattgaacaaattgtctttctgtttggtatgataaaggagatttttcaccattcttaccaagaatccttatataaagatccatatgtgtctgtctcctctttaggaaattaaatgacaagacacgaaacataaaaattttccatattaattataaattcatacttaacatacttattaaaatgattttatttatgtaatgtaagaatgattatgactgtgattaaccacaaacaaagttccaaagcttattctgtcaaagcaaatttcctatcatacctgtcaagtttaatcttactgagatagatagtaacttgtgaactccatttctaaatttgctggaaccactagtgtgactctcagtatttacgctggcttaaatacagctcattggtcctatgtaacaaacatgcatgtcctgaacatgtatcctggaactatatatatatatatatatatatatatatatatataaaaatacacacacacacacacacacatatatataatataggtataaattttatatttatatataaaccttatatataaatatatttatatagttatataattatatataactacctatatatatagtaatttaatgcatttttcagatctcaatacaatgatcatgtaagaagccttctttgacttcgctgaattaatattcatatctactactgttatatatatagttgaagttgaagcctatgcccatagctgacagcagttgtaattgtactagtcaactgcctcccaagttcaaaactcagcatcagattaaccctatatttttgaaaactaaacataaaataatgaggtacagagaatttagacatctccacgtgtctatgttgcttctaacccttcagcggatatcatatctatagctttctgatggaaatctagaggggaagagttataatatataatacatatattatactatttgaaagaattttccttgaagtttcaagacatggaaacaaatatgcctttcccatgtggcctgtgaactggactcttgctattcaaagcacgattcatggaacatcagtagcagcatcaagtgggag

SEQ ID NO: 80649 - DNA, 1113 bp, Homo sapiens
cttccattatcatcttaatcgagaatgttcatctatgaattcatgtgtattgaaaataagattcagtagtcaacaaatgcaagatgatattttctatcagtcccccttttgggtactacttaagtcaaaacatgacagctgatgtgacttgggcagtacagacgggtgtaccgtaaaggaattgcagctgtgctgagcaattactccctttagcatccagatggaaactagtgtggtcctgaattgatccagctacaagttccattctggaaccctaccttagcctgccataaacatcatcatttttgtgagtgctatgtgaaaaatttggaacataatgttttaaattcttactcatataattttcattcatttgttagtrtttaaatattttcctaatttttcaaatccatatcttttatcatcctaaataaaatgtaaagatctcaaaaaatggagacaatttctgtatttttctgtatgtgggaagaatatcgtaaattgcatactcattatagtttccaaatccattttggctgaatgaatagtatatgaatgaaaaagattgtagtagaagtaaaatcaaagcttcttattgctctttgtattcataaaaactattgggaatatttagttatttgtatatttttctaacctggtgtcatctgaggttaatagtataacattaaaagttatttataacagagagacaaaacaaatcctgcagttcagatttctatgtgtttatggtgctttcttaaagtaatgtatatatagttaatcctgtttgagattttatgactgggcattttcctttattggtatcctgaaatagtcaccaatcattatctactttgataaactgaagaatcatgctttctcattttcgcttcctatgtgtaactctaatttacattttcaatactggatttatattccagtttctgtattttttagtcttaacttttactctcctttttaaagatggtgagctctttaatcatgtgaaaagcctaacttcccaataactctctttattttccattatttttatattatgtagtatattttcaaagatgaaataggaggccaaccgtaagaattgaatagtat

SEQ ID NO: 80650 - DNA, 1113 bp, Homo sapiens
cttccattatcatcttaatcgagaatgttcatctatgaattcatgtgtattgaaaataagattcagtagtcaacaaatgcaagatgatattttctatcagtcccccttttgggtactacttaagtcaaaacatgacagctgatgtgacttgggcagtacagacgggtgtaccgtaaaggaattgcagctgtgctgagcaattactccctttagcatccagatggaaactagtgtggtcctgaattgatccagctacaagttccattctggaaccctaccttagcctgccataaacatcatcatttttgtgagtgctatgtgaaaaatttggaacataatgttttaaattcttactcatataattttcattcatttgttagtatttaaatattttcctaatttttcaaatccatatcttttatcatcctaaataaaatgtaaagatctcaaaaaatggagacaatttctgtatttttctgtatgtgggaagaatatcgtaaattgcatactcattatagtttccaaatccattttggctgaatgaatagtatatgaatgaaaaagattgtagtagaagtaaaatcaaagcttcttattgctctttgtattcataaaaacyattgggaatatttagttatttgtatatttttctaacctggtgtcatctgaggttaatagtataacattaaaagttatttataacagagagacaaaacaaatcctgcagttcagatttctatgtgtttatggtgctttcttaaagtaatgtatatatagttaatcctgtttgagattttatgactgggcattttcctttattggtatcctgaaatagtcaccaatcattatctactttgataaactgaagaatcatgctttctcattttcgcttcctatgtgtaactctaatttacattttcaatactggatttatattccagtttctgtattttttagtcttaacttttactctcctttttaaagatggtgagctctttaatcatgtgaaaagcctaacttcccaataactctctttattttccattatttttatattatgtagtatattttcaaagatgaaataggaggccaaccgtaagaattgaatagtat

SEQ ID NO: 80651 - DNA, 1366 bp, Homo sapiens
tccagaaatgttacttctaataatttaccttatggatatagtcacatatgtagtaaataaaattcatacaaatgattattaacatattattttaatagtataaggttggaaacaacctaaatttccatcagtgargattggctaaataaattattttatgtccaaataatgggatagtatgtaaccacaaaaataatgaatgagttctgtaaatattgagtaatgaccaaggctgaccattaagttattttttaaagcgcagaacagtatgaatatatgcatgctaccatatgtttaaatgtaactgtacaggctatgtgtacactgaatatatccggaaagatacccaagaccatggtatcactggcaacctctaaaggtttgagtaaggaaagtagaagggttagaaaggagacttaactttttaatgtaaaacctcttttgtgcctataaatacatggcacttcattttaaacaaataattaattgccctttgcacatatgcctccaggccaccacattgccagagtagattccaatcttaaacttctaaggagaaaatgtcctataggtcttatagaatccaagagagacaagcaagttttctagtgtagtgccgattgcattttggatggagatctaaggatttcctgatagaacacgtttgggtctgttttagtacaagctgtcatagggctatgccacccagcaagctatgttatgcctgctggaatccagctaacaaaataattatagggcttttgttgctgagtttaacaagatcttctctagacacatctaaaagaaaatgggtggttatctaagggtctaagctctacttcagaataaggcattttatatacgacttcaactcaagttaactgcccagaatgatcaactgcaggaagggcttgacaagtccataaaggaggaagacaactgaagtttctaggtcaatgccagcactgatcaaacaaggccttcaaggtcagtggagccctgaggaataggtcaaacctaggccacagatctcaagtgactgttctttgctgctgtagaagatcaaaccaatactatcagtagctgttcaaaactgattaaccttggggtaaaaagaagaaactagaaactactgctaagtagaaaagtttatactaggtaggtcggacattaaaccaatatccatccattttttaaagttaaaggtaagtaatgtaggcaaggaactgttatggatgtagaagatcctccagaacacaatgctgaatgtgttaatacgactcctccccataccccaaatatccacccaatcccagtaacactgacttcaatttctcatagtgttacaccttccagatgcatgaga

SEQ ID NO: 80652 - DNA, 926 bp, Homo sapiens
tgcattttagctgcctcataaatgataatgaaaagtaacagatggttattttaaaattagatttctctgggaatttggcgacaaaactctgactataaaatgaaagctatcatttccatgttttatacaggaagctattagagtagttcacgctagcatatacttttacaatcaattmtttcctcctttttcccaaacagaattaattcactacctcttttcttttcacatcatgttttgtttgtttgtttgtatgttgagttccaataagcctttatgaagcagctcataggcaggtttggtccacagggtgtagtttgctggcacagattgtaaataatggggctatctacattgttgacccctattatagctaatgttggttttgtctgcaaagaattcctctttcctttggggaactatactgttccatgtagtttttttttttaataaattttatttgtgtaaatttaaggtatataacatgatggtataagatagatattttgtatatatattaaaatggttactatagtggtaatatatccgtcatttcatatagttacccatttttttctgcctggggcatgagcagctgtagtcaccaccaggcgttgtggctcatgcctataatcccagcactttgggaagccgaggtgggtggatcgcttgagcccagcagttcaagatcagcctgggcaacatggcaaaaccccatctctaccaaaaatacaaaaaattagctgggcatggtggcacgcgcctgtggtcacagctactcaaaggctgaggtgagaggatttcttgagcctgggagtgggaggttgcagtgagccgagatcgtgctgctgcactccagcctgggtgacagagttagaccttatcttaaaaaaacaaacaaacaaacaaacaaaaatcctgaatac

SEQ ID NO: 80653 - DNA, 550 bp, Homo sapiens
atatctaagaaaacccctactaaatcctttagaatggaactgctcaatatagtagccactagccacattgactactgagtacttaaatgtgactagtgcaactgaggaactgaatttttaattttatttaactgtaactaattttaattgaaaaactgatactctattcaattactggaaaacttttaagtacatttggaccaacctggactcgtgaatttacttttgttcccagtgtttttttctatttttttattgataacataatagatatacatattttgagtgtgyattcaaacatttaatattaatacattcatataatttgtaaagatcaaatcagtgtaactgggatatccattaccttaaatgaatctactttttaaatggtatttataaaatctaaatatatgtgaagtgtttctgcttaaatttagtgtttgaattgagatgtgctccaagtgtacaacacacaccaaatttcaaagacttagttaaaaaaaaaacactgggaagggcaggaggaagggagagatagggagagatttgt

SEQ ID NO: 80654 - DNA, 616 bp, Homo sapiens
gagaattccagaatggtctagaggaagcccactggtgccatgactggccatccagcactgatgatgctaggaacagaaccatcatccccactgctccagaaaagtcaaatgcttctgctactgcacttgctgaaagatccaaccyccctgcacatgaacactgacaacattgctcacctttgcctttcaagcctcatgttggtgtctttgcgtggtggacctgtgtcacatatggaacagtagctgcaaagaatctggaaatgtaatttttagcttttcagcctctttagttcaggaaggctgtttagaagcaggttgaagtagatgttgaatgcctgactcaatggcattatcatcttttaaccctattgccctcatatccatgtatggtggaaaatgtgtttgaggtccctatactccaagttggtatcacacaacttcacatttagaaggggtctcagaaatcacctaggtaggtcagaatttttcaaactggtttgcaggtcatggaagttccttgaggggaattagagactgccacagtcatcaaggagaaaggttggggagaagagcaaacacacaagattttataacagctcagctttaatgagtttta

SEQ ID NO: 80655 - DNA, 720 bp, Homo sapiens
tggacacttatcaatgttttggccacccagaaccttttcacatcttccttatgtttggggaattctgttttatgaatccccacatcctaacttagaaggcaggtactcactctcccaccttccttgcagmtagggcacagctgcatcagaaggactctgaatcagaagctagcactgcaaagcagcgagaactgggaggagtatgttctggctaagatggcttgtatcttcctcaatttcagaagatgctgatgaaagcatctgaggtcccacacaggcagggtcaccaagctgtgtgtctgtgctgacaggggggccagcatagtctcttctagactattctgcaaagtgttttgaggcattattcctagcttcatagcttcccggagtttttgtgacctaatattctttagtaaattctctttctgtttagagtagccagacacggtttctgatatttgcaactaggaatctttgagtctgaaagaccttcaagggtagggcccacagcttgtttatttctttattccccacacagtgcatggcactgagaagcttctctccacgtgtttgctgaatgaataaatgaggttgcttatcagcagtgcttgacttgactttaagagctgcaggctggagtttaagggctgaccataatgcctatgttacttgtgtcagaaatctgagtcctacatctcatttcaaggggctcaggaatgt

SEQ ID NO: 80656 - DNA, 611 bp, Homo sapiens
ctgcaacctcctcctcctgggttcaagtgatgtggtggctcaagcctgtaagttgtacatttttgttgacatttcctcctccaagaaccaactatatggctgacctggcccagcctgcccctgctgtgtctggagggagagttggggacacatttcagaggagccaaagcccccatccacttacccccacacttttctaataacatgtcacaaatgccccctggagaactcacccttctgtcctcagcagcctccatcaggttaaaacttcacaaactccaggaagcttccctgttggtcccctaagccttggaagcctgggttaggtacctctctttggtgtttccttagcacactgagttcacttttaatggttttatttaacaaacacttgcactgcataacacttgctaagcacttttagaaatgtttcctcgttgaggggggcggttccaagatggccgaataggaacagctcgggtctacagctcccagcgtgagcgacgcagaagacgggtgatttctgcatttccagctgagcttggaagagagtagtggttytcccagcacggagcctgagatctgagaacagacagactgccacctcaagt

SEQ ID NO: 80657 - DNA, 1155 bp, Homo sapiens
ctaccatgcacgataaatactttccttgattttccacatgttgttggtccttcagttaygttcagtgaaggcagactgccttcattgttttattagtttatccaactttctaagggatctcataaagtcatcaaaaaacttgtattaacaagtctcatgtgaaggcatgaaatagtgcttgctgtttgtcacatgttgcagagctatgtgcgccagtcattccttcattcttaaggaacactttcttcttgaaagtaataccagacaatgtagaaaacatcacactgtggcttgacttgttggtgctgcctagctctcctggcagtgtggcccttgagagcctgattccttgaaatgaccttagggcacgagaggattaggatcaattctccttctctcgctaagagtctgctggggattacacctgagtatagaagtgccacactctttaaaaaaactcaaaggttaccatggttaaatactattgggctgctgggtgccagaattttcaaagcagattcatctaaaaaatcaatatggacacaagacatttattgcattattccattatacatccatacctcaaacatttaacatgttctcaagaataatactttgagctcttaaaccttaactaaatgtaaaagcagggatccacagaaaattaaatctccagtgaaccaatacatcaaatttattatttttgttcctagttattccaatgactccatgaaaaggaacctattcaaaacacatgcccaataatagaagcattgttagaagagtcactaaaagtacaaaagcatcaattaaaagggaggtcctagttgatttaacagcaacaactaaaaggaggtaaaggacttatagaagattgctttagggaatatattgattttaaatatgatagttcattcctgacaatttctgcctttcatgaaataggtcacaggacgttggtatgatttagaataaggtaatgaagtgacagtaataaaaaaagtttgatgttctaaaggcagcgtgagttgtgaaatctgactactagtaatattgttttataaggaattaaagtaggtgagtacctaaagcgaatgctgtgtaggaacccatatactagataagtgcatattttgcctgcattggtcattaaat

SEQ ID NO: 80658 - DNA, 1155 bp, Homo sapiens
ctaccatgcacgataaatactttccttgattttccacatgttgttggtccttcagttacgttcagtgaaggcagactgccttcattgttttattagtttatccaactttctaagggatctcataaagtcatcaaaaaacttgtattaacaagtctcatgtgaaggcatgaaatagtgcttgctgtttgtcacatgttgcagagctatgtgcgccagtcattccttcattcttaaggaacactttcttcttgaaagtaataccagacaatgtagaaaacatcacactgtggcttgacttgttggtgctgcctagctctcctggcagtgtggcccttgagagcctgattccttgaaatgaccttagggcacgagaggattaggatcaattctccttctctcgctaagagtctgctggggattacacctgagtatagaagtgccacactctttaaaaaaactcaaaggttaccatggttaaatactattgggctgctgggtgccagaattttcaaagcagattcatctaaaaaatcaatatggacacaagacatttattgcattattccattatacatccatacctcaaacatttaacatgttstcaagaataatactttgagctcttaaaccttaactaaatgtaaaagcagggatccacagaaaattaaatctccagtgaaccaatacatcaaatttattatttttgttcctagttattccaatgactccatgaaaaggaacctattcaaaacacatgcccaataatagaagcattgttagaagagtcactaaaagtacaaaagcatcaattaaaagggaggtcctagttgatttaacagcaacaactaaaaggaggtaaaggacttatagaagattgctttagggaatatattgattttaaatatgatagttcattcctgacaatttctgcctttcatgaaataggtcacaggacgttggtatgatttagaataaggtaatgaagtgacagtaataaaaaaagtttgatgttctaaaggcagcgtgagttgtgaaatctgactactagtaatattgttttataaggaattaaagtaggtgagtacctaaagcgaatgctgtgtaggaacccatatactagataagtgcatattttgcctgcattggtcattaaat

SEQ ID NO: 80659 - DNA, 905 bp, Homo sapiens
gcatttcactgcagttcttgtccatttcgtttatttagttccttcagtttttgattagtaaaatttttgtttgaatctcatggtctgtaaaatgcactattccaccgcttttatctttgttatcctccatgttccagggatagcagctcttcctgtgttgtctgttagttatcaaaggaaggataaagcaccaaactccactatcagctactaccttcatcactgcagtacagtaacccagcctgtttatcttgagccaccgttaacactttccttgcagaatcacacattttataaatggtctgatagtcagacctccttttccttcttattcttcttctttctcctttccttggactagaacactagcccataccctcaaggtatratttccttgtggtgatgacttaaagatccaaatgaactatttcttatgaatgaaagtccaagagcaattaacatgggaaagttactttaagcactttacaatgtggatgaggtttttattctgttgctgaagtactgcaaaaattagaagtatgtatatatatcttcagagataatcaaggaaacaacagatatttaagataaaacatagaataggcattatttgtgagtgtactgagttttgtaactgtggtttaggcagcagtcattttcaataggtccttgggaaattctctaggctgtaggcaacaactttctcctttctggctatgccctaattgtttcattcaggattgctgggaactcctagctccagggaatttgtagtgtttgtgacttccaagaatgaaagattttactagtaaaaggcagtgtgtgtgtgtgtgtgtgtgtgtgcgcgcgcgcgcgtgtgtgtgagatcagtgtgcttctgaattaggaccctcctggtttataaa

SEQ ID NO: 80660 - DNA, 562 bp, Homo sapiens
ggaaattatatgtccataaaaataaatttcatttttctttaaataggtaaaaatagtaattacaaaagcaattataaatctttactatgttaaatatatatgcacacaactatgtattgaattgacagctatatgatagcaacrtaaagaccatgaggaaagacggaggctgagaaatactccaatatttaaaaaaactcaagtttgcacagcttaccaattaagtatcaggagtctttctttaatttatcaaatcagtttggtcacactgatcagaagtcctgatttgcagttgtatatttttgtgatttaaagtgagttaatttattatttcccagtaaatgcaatttattaagcatgaagtataaaacaatgtcaaaggcaggaaaaaatgtttcaaagtcctaagtgaagtaaaattaggcaaatactattaacgtgtgtgatgcgtttttgttgttactaatatattgggaattgaaattgacagcatctcttgagttcagttaatttttgtcactggattgtaaaagtaacttgtttgaggatcttcatttttagg

SEQ ID NO: 80661 - DNA, 652 bp, Homo sapiens
tgttctgcccagtaaaagaagggacaaaccaagttaggaaaatgccgaggcaaatttcggacagtgttgaagaatattccacaggcttttattaaactcccattctatggagattatataacattcattaatgtactttataccaaaagatgttccttgattttcagtgtcagagatgtccaagttactgtatgacaacttgcctgggaaagtctggttatttgatttttctacagcacactacccttaaggtaaaaatttaaagataataaattctgaaggactaaataacattaaaggaatgtattaaaaccattttcaaatctatatgcctatgtgtatatgaagagagaactagtacagagatatatrtatatgacttgctttaattctgtattctcagtggctggtacacagtgggcactgaaaaaatagttttgaataaaaaattaaggaaaaaaagaatgattattagctatagctagtgcttttaaggcagctatagtcattcacgtatttataactgagagcagagtgtggcttgccctctagtggtctgttttagcgaactttaatcctggcctttgaaagataaatatttacttgataatagtaaagtatttatagtaaaatatttacaaatggatggtaa

SEQ ID NO: 80662 - DNA, 652 bp, Homo sapiens
tgttctgcccagtaaaagaagggacaaaccaagttaggaaaatgccgaggcaaatttcggacagtgttgaagaatattccacaggcttttattaaactcccattctatggagattatataacattcattaatgtactttataccaaaagatgttccttgattttcagtgtcagagatgtccaagttactgtatgacaacttgcctgggaaagtctggttatttgatttttctacagcacactacccttaaggtaaaaatttaaagataataaattctgaaggactaaataacattaaaggaatgtattaaaaccattttcaaatctatatgcctatgtgtatatgaagagagaactagtacagagatatatgtatatgacttgctttaattctgtattctcagtggctggtacacagtgggcactgaaaaaatagttttgaataaaaaattaaggaaaaaaagaatgattattagctatagctagtgyttttaaggcagctatagtcattcacgtatttataactgagagcagagtgtggcttgccctctagtggtctgttttagcgaactttaatcctggcctttgaaagataaatatttacttgataatagtaaagtatttatagtaaaatatttacaaatggatggtaa

SEQ ID NO: 80663 - DNA, 2436 bp, Homo sapiens
agctatctacttttctgtgttctggraaaaaatggaggtaaaagcataaaggagaacttcagagcgaatcttttagaaatgagtcctttcttttattgattgttgccaaaaaaatgtgagcaaatatcctttaacatgaaaggaaaactgtccctctgctccccacctccatctccacagaaacatgaatatctcaatgcagaacagtgctgattgcagtagtcaaggggagaaggaaacatgagtccccattcttaaacaacaaaactttctctgctgtcatcgtacaaggactatgtaaagcattctcacaccctcctccaaaattgaatgagcctacccacctatgtcagtatcatcaatataccattgcaggtcacacaaaaagtgtctgaggaaggcttggtgaaggcataatatttctcctagtttgtgatactactccatcattagataaattatttgttaattattttatatttgatcaatttaggacaaaaacagaggaaaaagtcttgtaaagatggagtcagaaatggatcagagtaataacaactgtaagcccaacaacctcaatgattgccaggagccatccgggaagtaggaagaagcaagggagggggcccgcagaaggatggcaacactagggtcgccttgatctcaggcgtccagctttcagaactgagaaaattcatttctgttgttttaagccaccaagtttgtggtactttgttgtggcagccttaggacactaataaatcctcttttacagataattcctagtaagtaagaagaggctgattgaaaaaaatatttttcatgtctacctagtattgaatatatatgtttaaaaggcatattatgcattcgagaaaaaaactggaaagaagtaacatcaaaatggttctctttgggggctgggagccttggctcaggcctgtaatcccagcactctgggaggccgaggcagcaggcgggagcatcactttgagctcaagagctgtaggccagcctgggcaacatggcgaaatcccatctctacaaaaatacaaaaaaattagcccggcgttggtggcttgcacctgtggtcccagctacttaggaggctgaggttgtagaatcgcttgagcccatgaagcagaggttgcagtgagccaaaaatgcaccccctgcactccagtctgggtgacacagcaagactttatctcaaaaaaaaaaaaaaaaaagggttatcactgatgagaaatcagaggggattttaatttttttgttatacttttctgttatattctaaattatctgcccagaacttgtgtaactttataaattaaaatataaactgtttaaagatctcttattacaggagctataaagtcatctgtctgagattctcttataatagcaattatctttatatatttcagtgattatgggctttatattaaattttatttgagagacatccatagttatcctacaaaaaatcttttgacacagttttaggcaaatcaatggcaacttttatttttttaactacacatgaatttttctctttttctacaatcaaagaagttgagctgaagaagaaaattaactgggatctttttgtttcccctgttttacatatagttaaagaaccttgccagtgatgtattattaaagaaggaaggaaggaggaagaatggaaggaggagggaagaagaaggaaggaggtgagaggtgtgcggagaggagaaaaaaacaaggaagaatggagaattgtcattacttaccataaccattttgccatccttaatttctcttacaaaatttgtttctttgccatcccatttctgtatgtgaacaagtttgtctccatccaggctaacaacagactgagaccaacaacaaaatgcagaacatagcaataaatacaattcagatttctgatacggaagacgatgtgatttttgaaagagttgtataattgaataaatcatgatcagttaattatcctattgttatttctattacttatagattttctattatgtaaatttgaattcataatttgattaaaaagtatacatctaaatacaaaaatttaatatattaaaaacaaaaatcctaaaccagtgctttgcagctagtcgtccctctaaagaaagccttagaatgaggcaaactgtctatttagtcaatctgaggcaacctggggaattaaacaaaatgcaatctctctttcaaacaaaccttattaaatattttctgaaatacaagtttgatataaaatgtgaacagtatatggtaagagacaaatacaactgagatttatgctatagcaagtacccattgttcaaaatataacatatgcacattaaactaactttggtgtatttctccttggattgaaatactgaaaatattctacactttccaacatcttaaaaaaaacat

SEQ ID NO: 80664 - DNA, 2436 bp, Homo sapiens
agctatctacttttctgtgttctgggaaaaaatggaggtaaaagcataaaggagaacttcagagcgaatcttttagaaatgagtcctttcttttattgattgttgccaaaaaaatgtgagcaaatatcctttaacatgaaaggaaaactgtccctctgctccccacctccatctccacagaaacatgaatatctcaatgcagaacagtgctgaytgcagtagtcaaggggagaaggaaacatgagtccccattcttaaacaacaaaactttctctgctgtcatcgtacaaggactatgtaaagcattctcacaccctcctccaaaattgaatgagcctacccacctatgtcagtatcatcaatataccattgcaggtcacacaaaaagtgtctgaggaaggcttggtgaaggcataatatttctcctagtttgtgatactactccatcattagataaattatttgttaattattttatatttgatcaatttaggacaaaaacagaggaaaaagtcttgtaaagatggagtcagaaatggatcagagtaataacaactgtaagcccaacaacctcaatgattgccaggagccatccgggaagtaggaagaagcaagggagggggcccgcagaaggatggcaacactagggtcgccttgatctcaggcgtccagctttcagaactgagaaaattcatttctgttgttttaagccaccaagtttgtggtactttgttgtggcagccttaggacactaataaatcctcttttacagataattcctagtaagtaagaagaggctgattgaaaaaaatatttttcatgtctacctagtattgaatatatatgtttaaaaggcatattatgcattcgagaaaaaaactggaaagaagtaacatcaaaatggttctctttgggggctgggagccttggctcaggcctgtaatcccagcactctgggaggccgaggcagcaggcgggagcatcactttgagctcaagagctgtaggccagcctgggcaacatggcgaaatcccatctctacaaaaatacaaaaaaattagcccggcgttggtggcttgcacctgtggtcccagctacttaggaggctgaggttgtagaatcgcttgagcccatgaagcagaggttgcagtgagccaaaaatgcaccccctgcactccagtctgggtgacacagcaagactttatctcaaaaaaaaaaaaaaaaaagggttatcactgatgagaaatcagaggggattttaatttttttgttatacttttctgttatattctaaattatctgcccagaacttgtgtaactttataaattaaaatataaactgtttaaagatctcttattacaggagctataaagtcatctgtctgagattctcttataatagcaattatctttatatatttcagtgattatgggctttatattaaattttatttgagagacatccatagttatcctacaaaaaatcttttgacacagttttaggcaaatcaatggcaacttttatttttttaactacacatgaatttttctctttttctacaatcaaagaagttgagctgaagaagaaaattaactgggatctttttgtttcccctgttttacatatagttaaagaaccttgccagtgatgtattattaaagaaggaaggaaggaggaagaatggaaggaggagggaagaagaaggaaggaggtgagaggtgtgcggagaggagaaaaaaacaaggaagaatggagaattgtcattacttaccataaccattttgccatccttaatttctcttacaaaatttgtttctttgccatcccatttctgtatgtgaacaagtttgtctccatccaggctaacaacagactgagaccaacaacaaaatgcagaacatagcaataaatacaattcagatttctgatacggaagacgatgtgatttttgaaagagttgtataattgaataaatcatgatcagttaattatcctattgttatttctattacttatagattttctattatgtaaatttgaattcataatttgattaaaaagtatacatctaaatacaaaaatttaatatattaaaaacaaaaatcctaaaccagtgctttgcagctagtcgtccctctaaagaaagccttagaatgaggcaaactgtctatttagtcaatctgaggcaacctggggaattaaacaaaatgcaatctctctttcaaacaaaccttattaaatattttctgaaatacaagtttgatataaaatgtgaacagtatatggtaagagacaaatacaactgagatttatgctatagcaagtacccattgttcaaaatataacatatgcacattaaactaactttggtgtatttctccttggattgaaatactgaaaatattctacactttccaacatcttaaaaaaaacat

SEQ ID NO: 80665 - DNA, 1853 bp, Homo sapiens
ctatttttgtgaaatagattctgtacagaaaactaattctcacccttttaaagattgcaggcaaggatgaacacatctaaatgagaagtcaattttcttcctcagaacacagagttactagaacaaaataacattttgaaatataaatcattgatttttttatatttgctcctttgccttttcctcaatcaaattagtacattagaaaagttgctaggggaggtttgctaacaaagaaaattgggagatggtggtggggttaggggtggaaagctggggtgggtggtggtttttcagttacagaagtcaaagcatttgggtttggggacccagggatataaacaatgggcctgagagaatgtctgctgacataagagccagtcctccagctcaggttttataagatgtgtaggaaataaagatgacctgggttggggcagagggatgagaggaaagcaaggagggagatggggaggaagcaagagagcgtgggagatagcaaggccttgaggagccccagattcttttgccggtttcctttcctcagggagagtgctgaaataggtgtacaaggtagaaatctttcttaaatttgaaaggatatgagggttgaagcgtttgtacctcagttcccaggtggagtgaaaggtggaaagttttgttgagttgtgcagcatagcagagcataataatagaatgtgccatttgcattatttaaatagatgtctctgacacagaatttccgagctgaatgttttttatgtgctcaaaaaaagtgaaaataactaagtgtaaagtgaaaccagaagggtcttttagacaggatgtggtagtaactatgtggaagctttaaaggaagacttctcggcatagatgcgtgcatgcatagatggtgaaaattgaggacaagatgcacccacagtacgtggtttcctcacagcccatcaccatcacctgcaatatagggacaacaggaaggatgaggcagtaagaatagaagcacacatttatgtagggaccaggcatgtagtttacatattctgtgtagtttacgtatattaacacacttaattctcacacccaccatatgatgtaaataccactatagtactcactttayggatgagaaaacaggcatgcagaggttaagaataaaaattctgaattaatttagagtaagtggaactaattgacaacaattttatgataccttatagactagagaactcaaagaaaaaaatttaagcacacatatttatttattcataatacatatgattttattgcatacctaaattttcacacagacatgtgaacccactaaagatatctattgggaattatgaggtgatatataaaccagctaataaagactgagaataacagcataattggcatgaaaacacagaaaaagtcagagtaactcaagcagtccaaaagaacaggcaaagcttcaaaatccgaacttttcagcgtagtctctcaactttcccttattcttccactcatcagctaactcctgacttcagttttctctcttcactggctttgcctgagactaaagtctgcttttatcaacaccttaaattatcacacaacattccggtttagaccaagtttcttgtcttctttgtttagttcttcctttaacagcagtggggcccaggggagggtaaaaataaggctcacataccattaaacatatgtcttatctccctaccttgccaaatacactttcctaatgaaaaaatccaaagacatgggtaacaaacactatggtttcataaggctgaaaactagcaagatatcaaagacaaatgaatttagttattattgcacatgtctggttgtac

SEQ ID NO: 80666 - DNA, 837 bp, Homo sapiens
aaatgtttgtttgccctatactgttttgaatccaacaatatttccagactctcttattttctataataattcatccaaaactattttgtatttttttacagtcaagttacttttggagagtgacttttttttgcaattatcttatacagtattttcttggatagaagagagccacaaatccaagggaattcagacagcctctataagctggaaaagattataagaaagtggattcttccctatagcctctggaagcagtatagctctgccaataccttgatgttagctcagtgaggcccacatcagacttttgacctccaggactgtratacatttgtttttcttaaacctgtcagtttgtggtaatttgttatagcagcagtaaaactaatgcaggatatattaaaatattttctttcttttaattttatcattagattctgatgttcattgtttctgctgatttgatattaattaaggcttttcaccagtatcccagatctcttatctttctgggcaaatgatatgatttgacttctctgtccttttgaaagtttgatgtgttctactgagatcctaaccagtaatatgggaagataaatgatgagtgtaccttcctgtttgaagcttttaagcaccagtacacagtttgctatattgtcttctatttctgttgtagtcatggaaacatataattgagctgctatcagcctgagttcctgagtataataccagaagtatgactgttgatcaacattagatatgtctaagtataaaataaaagtttgtggtatatttctctgagatatggggtgtttgtgatgagaatataaacta

SEQ ID NO: 80667 - DNA, 811 bp, Homo sapiens
acagttctgagtgatgattcggtccagaacatggacatgaaaatgtgtgactgagaagttgaagatgtcattagagatgaggctcccaaggaatggggcagccaggatgcaagatatttatccagagatgtggatgaatatctctggaatgaccgagcagtggatgaaataaatgaatgatgacagtatctacaaacaacacaagaagtacagctgattacatgagcctcaaaagagaagagctacatgaaggagagtgattaatggtcctgacatggtggcatgggcagagaacccaccaaacacattccattaccttaagatttgggaataagattttatagccttaatctgggagggatgcagggtcttgatgtcctcagggataattagctttccaagaagaacaggaggttgaggaaatgtcggtaaagaaatcaaggatgtaaaggatttgttaacaacagaactgtgtttaacagtgcataacaaaaaggtgtgaagaggaaagaaaagttaaagttgagtctggagaaagaaaatataraggagaattcagatgagagaataaaaacggcatgtgatccagaaccatagggactttcatttcaggcagtgaccaacgacaaagtggttgagagtgatgtgtatttaggtgaccataagtatgcatgataattaattttcacttctgtcatcttttgatatatgagaacccttagctctcatggaatacaactgaagtctaaacagatgaccattcagaagggtaactgtctaaagttgtgcacacttacactgtaaaatactg

SEQ ID NO: 80668 - DNA, 543 bp, Homo sapiens
tattgatgttttttgaaagaatgttattgacataattcccaggaagatgtgtctaacaatcataattgcatatggtataccatctagtggtatgagatatttataattctacatatgtatatatattcacatgcttaattatctccaattataattttagccatattgggckcattgaactattttcgggtaactcctttccttttttaaaaaatttacgtgtttactttttttccttcaacttttaagttttggggtacatgtgcaggatgtgcaggtttgctatgtaggtaaacgcaggacatggtggtttgctgcacagatcaacccatcacctaagttttaggcccagcttccattagctattcttcctgatgctctctctcatcccaaaccccctccagctggctctccagggtgtgttgctccccactatgtgtccatagattctcatcattcagctcccacttataagtgagaacatgtggtgtttggatggctaccggctccatctatgtacctaaaaaagaacatgatcttgtt

SEQ ID NO: 80669 - DNA, 543 bp, Homo sapiens
tattgatgttttttgaaagaatgttattgacataattcccaggaagatgtgtctaacaatcataattgcatatggtataccatctagtggtatgagatatttataattctacatatgtatatatattcacatgcttaattatctccaattataattttagccatattgggcgcattgaactattttcrggtaactcctttccttttttaaaaaatttacgtgtttactttttttccttcaacttttaagttttggggtacatgtgcaggatgtgcaggtttgctatgtaggtaaacgcaggacatggtggtttgctgcacagatcaacccatcacctaagttttaggcccagcttccattagctattcttcctgatgctctctctcatcccaaaccccctccagctggctctccagggtgtgttgctccccactatgtgtccatagattctcatcattcagctcccacttataagtgagaacatgtggtgtttggatggctaccggctccatctatgtacctaaaaaagaacatgatcttgtt

SEQ ID NO: 80670 - DNA, 1556 bp, Homo sapiens
tcatcaagcctcagacttggcagaatttttaaagtaggacagttagtccaatcccttcatttgtcagataagaagagtgagagccagtggggacaagtgacttgccaaatgcccaatagccagaaagctaagttcctaggtcatttattatcccatagacctcctgagacttgctattttttctccactgttttctcctttcaaagacacttttaaagtcttttcaacatgcaaactatgtgtgtattcagagctaagactctctctgcctaaaataggcttatttagttccttctctctggtggtccttgctcaaaggcacaacctcttttttacagataaaactcaattttcaaactcaaagggaagagatggagaggcaaaggattccttgatcctctattatgtgccaggattttcccatgccttaactcattttaatccccaccacaacccgtacaggctagtatcatggacccatttcccagatgggaaagctgaagcatagagaagcagtaagcagcaagcaaaattctcaatttccataaataacctaaccttctcctctttggaaccttctcagttcagaaaaacaaaaaaaaaaccaagaatttaaaaaatagggcattttcaagatttctgattatggcttttcttttaacaaacttgttttttttcaaaataataattcctgatcatttctatgtttagaaaaaagcacattattgaaaacatgaaaatttaggggagtgatatggtttggatccgtgtccccacccaaatctcatgttcaattgtaatccccaatgttggaggtggggcctgcaaggaggtgactggatcatggaggcagtttctcatgaatggtttagcaccatatgctggatgctgtcctcacaatagtgagtgaattctcatgagatcgagtcatttaaaagtgtgtggcacccccccaccccacctgttttgtgcttttactctggccatctgactgtgactcctccctcttcaacttccaccataattgtaagtttcctgaggcctccycagaagccaagcaaatgccagcatcatgcttcctctacagcctgcaaaactgtgagccaattaaaccttttttctttataaattagccagtctttggtatttcattatagaaatgtgagaatggaataatatgggaggaaagaagaggaaaaaaatcctttataatctctcttcccagaacaaatgtcaacattttagtacattttccccgaagttgttattctacattgataaatataacctttttacacattaagaatactaaacctctaaactactataaactttaaaaatacatttcatagttggttattttgcgctttttatcaacttttattttagatttagggagtatatgtacaggtttgttactcgggtatactgcaagatgctgaggtttggggtataaatgatcccataacccaggcattaagcatagtactcaatagttattcaacctttgtccccttgcctccttcctccctagtagtccccagtttctattgttg

SEQ ID NO: 80671 - DNA, 1556 bp, Homo sapiens
tcatcaagcctcagacttggcagaatttttaaagtaggacagttagtccaatcccttcatttgtcagataagaagagtgagagccagtggggacaagtgacttgccaaatgcccaatagccagaaagctaagttcctaggtcatttattatcccatagacctcctgagacttgctattttttctccactgttttctcctttcaaagacacttttaaagtcttttcaacatgcaaactatgtgtgtattcagagctaagactctctctgcctaaaataggcttatttagttccttctctctggtggtccttgctcaaaggcacaacctcttttttacagataaaactcaattttcaaactcaaagggaagagatggagaggcaaaggattccttgatcctctattatgtgccaggattttcccatgccttaactcattttaatccccaccacaacccgtacaggctagtatcatggacccatttcccagatgggaaagctgaagcatagagaagcagtaagcagcaagcaaaattctcaatttccataaataacctaaccttctcctctttggaaccttctcagttcagaaaaacaaaaaaaaaaccaagaatttaaaaaatagggcattttcaagatttctgattatggcttttcttttaacaaacttgttttttttcaaaataataattcctgatcatttctatgtttagaaaaaagcacattattgaaaacatgaaaatttaggggagtgatatggtttggatccgtgtccccacccaaatctcatgttcaattgtaatccccaatgttggaggtggggcctgcaaggaggtgactggatcatggaggcagtttctcatgaatggtttagcaccatatgctggatgctgtcctcacaatagtgagtgaattctcatgagatcgagtcatttaaaagtgtgtggcacccccccaccccacctgttttgtgcttttactctggccatctgactgtgactcctccctcttcaacttccaccataattgtaagtttcctgaggcctcctcagaagccaagcaaatgccagcatcatgcttcctctacagcctgcaaaactgtgagccaattaaaccttttttctttataaattagccagtctttggtatttcattatagaaatgtgagaatggaataatatgggaggaaagaagaggaaaaaaatcctttataatctctcttcccagaacaaatgtcaacattttagtacattttccccgaagttgttattctacattgataaatataacctttttacacattaagaatactaaacctctaaactactataaacyttaaaaatacatttcatagttggttattttgcgctttttatcaacttttattttagatttagggagtatatgtacaggtttgttactcgggtatactgcaagatgctgaggtttggggtataaatgatcccataacccaggcattaagcatagtactcaatagttattcaacctttgtccccttgcctccttcctccctagtagtccccagtttctattgttg

SEQ ID NO: 80672 - DNA, 932 bp, Homo sapiens
atacagacaactgcacattattctcttctacattcyacttcctgggaggccccaagagatactaatcaaaataagtaaatactaataaaaatcagagaaaccgaatacccattatgagccaggaacatgctaagggatttacatgaccaccaacacaatgttggcaggtgacccagagttaactttctcactgggagtgttatctcctatcaactcttttcttggcctctgataagaggggacctgctcccattcctcatatacctcctgcctattcccttgttccccctgtccatgtgtcctcgggcaagtcctttctcatcaacacccagctcttctcatattctcctgctctcactcttgccttctaccctattcctaggtttctttagtaaaatctctcaagattttctccactcccaccatgtgccccctccttttttccccatttgttaactgtttcaaaaggatccctgaaggtatcagcacactactaagggggaaaaaatgaaaaaagggggaaaaaagcattatctgacatctcaaagctggcctggcactcacaccaggccatgataatccacaattggacataatagttctcacagaacacaacttcagacaaggttacactgagaccatgataaggccacatcataactttgtctaagcgcagacaataatgtcactgtgccacccacaaaataccaaacacttccttcacttggctaaaataagtgactgcttcttatttaccaatgaaaattttatctttgctctcttgtcttcatcatagataacatttattgagatacccaatcatagaattgtgcccaatttctaatctgcagcaaaatctcacttctttagacccttgcctgaatcacccaacccaaaccgaaatcctaaattaggcttttgtctaacacctt

SEQ ID NO: 80673 - DNA, 1056 bp, Homo sapiens
tcatgactgtaatcccagcacttcgggggacygaataggagaatccctcgagcccaggagtttgagacctgcgtgggcaacatagtgagagcctgtctttacaaaaaatttaaaaatccaggtgtgatggtaccagcagtcccagctactcagaggctgaggtggaaggatcactcgagcctcggaggcagaggatgcagtgagccatgatagcaccactacaccacagctggggtgacagagagaagacacgctgttttaaaagaaaaaaaattaataaagtttaatatggatattggaggccgaaagaaacattagtagcaggatcactaactgtccaccaaagtctcttctgttccaggagagagagttttacttggaaatggttgtccagtctttctgccatctaggtgacttgttcttgtcaataaagtaaaagtgaagtgccatttaaagactaaagaggttcaaagtggttgtgccttcttcctcctcttttggctcaacactggctggattgagcatgctctgaggcctgagaggatggggaaaccacaagacagaaagagcctggatccctgaatcacctcgtggaaggctgctgaccaatcgggaacacctgcactggactgttacttgaataagaaatacatttcttttgtgttaagccactgataatttaaagacttatttgttatagcagctagcattgctctaaataatctactcatatggaatttcaataggattgtttagtggctatcatatgaagatataaccagttgcagatataacctggttgcatgtggtaccaaaattaaagtcaggaagagaataattgttctataatatgtctgcattgacgattcgttctggagtccttactttcagccctggctaattttttttttttaaatggaaaatcagcattgctgagaggctgtgtgatttcacccactcgacttattgccttgctgtgcaggtttttactgagtattgaagtgaaccagaagagatttgtgtcttgcattagtgaactctctatctttgctggaa

SEQ ID NO: 80674 - DNA, 628 bp, Homo sapiens
tcctggatttctggtttggaatcactgcttagcaattatttagtaactgcaaatccctcacagaacgaggaatgaaagtctcaccaagacattcagagctcgttgcaatttggtactgagctgcccctccattcactgctcccagtctgtgcctctataatcacagccaccagagcacttcctctccccaggttcattctggttccttcgactggcatgtcctgctccttccaaacacatccatctcccatttctccctttattgaagtcctagtcattcttcaagtctcagttctaatcctagcttccctcccagtcttaccggattccctactcctttggatcatcagtgcatctcctgttctttcccttctttgagttcccagaatcattttattttttaaattaaaagttaataaaattgattttctgggggccataaaattctgtaaattttagyacgtgtataaaatcgtgcaaactgccataaacaggaaacaaacaattccatcaaccacaaaaactttctcatgctatcaccttggagtcatgtatatacgtgtatgtatacatatgtgtgtgtgtatctatacatacatatatatttatataatataatatttatatt

SEQ ID NO: 80675 - DNA, 757 bp, Homo sapiens
tgacatgctgggattcaatgcctgtgcttgactcatgaacttgctacaggcaggcttgctgtatgatggtgttggccaggtctagactaattgcctcctttccttccttcatgaagccagtctccctgggctgagagaagaggaattgaggaaaaaaaaaaaagaaaagaaaaagaatatgaacagccaagtctatgcatatagcagttattttagcagtgggttgagaggaattgaaatgggttatttttcctaatttttttttgagacagaatctcactctgtcacccaggctggagtgcagtggcatgatcttggctcactgcaacctccgcctcccaggttcaagagattctcctgcctcagcctcccaagtagccaggactacaggtgcgcaaccacatccagctaatttttgtatttttagtagagacggggttttaccatgttggccaggatggtctcaaactcctgaccttgtgatctgcctgcctyggcctcccaaagtgctgggattacaggcatgagccaccatgcccaacccattttcgaaagtttttgggttggaggctttcaagctatggggctttgagcactcacttagcctcgcagaggctctttaacagttcttgggattggagataatttattattattattattattgtttttagagacaaggtatttctctgtacccctggctggagtgcaacggcacaataatagctcactgcagcctcaaactcctgggctcaaa

SEQ ID NO: 80676 - DNA, 757 bp, Homo sapiens
tgacatgctgggattcaatgcctgtgcttgactcatgaacttgctacaggcaggcttgctgtatgatggtgttggccaggtctagactaattgcctcctttccttccttcatgaagccagtctccctgggctgagagaagaggaattgaggaaaaaaaaaaaagaaaagaaaaagaatatgaacagccaagtctatgcatatagcagttattttagcagtgggttgagaggaattgaaatgggttatttttcctaatttttttttgagacagaatctcactctgtcacccaggctggagtgcagtggcatgatcttggctcactgcaacctccgcctcccaggttcaagagattctcctgcctcagcctcccaagtagccaggactacaggtgcgcaaccacatccagctaatttttgtatttttagtagagacggggttttaccatgttggccaggatggtctcaaactcctgaccttgtgatctgcctgccttggcctcccaaagtgctgrgattacaggcatgagccaccatgcccaacccattttcgaaagtttttgggttggaggctttcaagctatggggctttgagcactcacttagcctcgcagaggctctttaacagttcttgggattggagataatttattattattattattattgtttttagagacaaggtatttctctgtacccctggctggagtgcaacggcacaataatagctcactgcagcctcaaactcctgggctcaaa

SEQ ID NO: 80677 - DNA, 757 bp, Homo sapiens
tgacatgctgggattcaatgcctgtgcttgactcatgaacttgctacaggcaggcttgctgtatgatggtgttggccaggtctagactaattgcctcctttccttccttcatgaagccagtctccctgggctgagagaagaggaattgaggaaaaaaaaaaaagaaaagaaaaagaatatgaacagccaagtctatgcatatagcagttattttagcagtgggttgagaggaattgaaatgggttatttttcctaatttttttttgagacagaatctcactctgtcacccaggctggagtgcagtggcatgatcttggctcactgcaacctccgcctcccaggttcaagagattctcctgcctcagcctcccaagtagccaggactacaggtgcgcaaccacatccagctaatttttgtatttttagtagagacggggttttaccatgttggccaggatggtctcaaactcctgaccttgtgatctgcctgccttggcctcccaaagtgctgggattacaggcatgagccaccatgcccaacccwttttcgaaagtttttgggttggaggctttcaagctatggggctttgagcactcacttagcctcgcagaggctctttaacagttcttgggattggagataatttattattattattattattgtttttagagacaaggtatttctctgtacccctggctggagtgcaacggcacaataatagctcactgcagcctcaaactcctgggctcaaa

SEQ ID NO: 80678 - DNA, 757 bp, Homo sapiens
tgacatgctgggattcaatgcctgtgcttgactcatgaacttgctacaggcaggcttgctgtatgatggtgttggccaggtctagactaattgcctcctttccttccttcatgaagccagtctccctgggctgagagaagaggaattgaggaaaaaaaaaaaagaaaagaaaaagaatatgaacagccaagtctatgcatatagcagttattttagcagtgggttgagaggaattgaaatgggttatttttcctaatttttttttgagacagaatctcactctgtcacccaggctggagtgcagtggcatgatcttggctcactgcaacctccgcctcccaggttcaagagattctcctgcctcagcctcccaagtagccaggactacaggtgcgcaaccacatccagctaatttttgtatttttagtagagacggggttttaccatgttggccaggatggtctcaaactcctgaccttgtgatctgcctgccttggcctcccaaagtgctgggattacaggcatgagccaccatgcccaacccattttcgaaartttttgggttggaggctttcaagctatggggctttgagcactcacttagcctcgcagaggctctttaacagttcttgggattggagataatttattattattattattattgtttttagagacaaggtatttctctgtacccctggctggagtgcaacggcacaataatagctcactgcagcctcaaactcctgggctcaaa

SEQ ID NO: 80679 - DNA, 757 bp, Homo sapiens
tgacatgctgggattcaatgcctgtgcttgactcatgaacttgctacaggcaggcttgctgtatgatggtgttggccaggtctagactaattgcctcctttccttccttcatgaagccagtctccctgggctgagagaagaggaattgaggaaaaaaaaaaaagaaaagaaaaagaatatgaacagccaagtctatgcatatagcagttattttagcagtgggttgagaggaattgaaatgggttatttttcctaatttttttttgagacagaatctcactctgtcacccaggctggagtgcagtggcatgatcttggctcactgcaacctccgcctcccaggttcaagagattctcctgcctcagcctcccaagtagccaggactacaggtgcgcaaccacatccagctaatttttgtatttttagtagagacggggttttaccatgttggccaggatggtctcaaactcctgaccttgtgatctgcctgccttggcctcccaaagtgctgggattacaggcatgagccaccatgcccaacccattttcgaaagtttttgggttggaggctttcaagctatggggctttgagcactcacttagcctygcagaggctctttaacagttcttgggattggagataatttattattattattattattgtttttagagacaaggtatttctctgtacccctggctggagtgcaacggcacaataatagctcactgcagcctcaaactcctgggctcaaa

SEQ ID NO: 80680 - DNA, 642 bp, Homo sapiens
taaatcctggcttggtcacttattatctgggagatattgagcatgttagttaacctttctgactctcagtttttcaacaccaaaatgaggaggataatatttatgatatagcatgttatgaggttcacctaaaagaaggcaaaatacctaacacatagtaaacacccaacaattttggcttttctagttatacagaccagccctctgataattcccattgaattcaccactgagaagggggtaggggtgcactgaatcccattcagttatgcagcctttgtttctaaggtagaaagtggatgtcattttcagcaatgcaaaaatgacctccacaccctcacataaagcatttgggtttggcaccttgatttcwtcaatgaggtgttcgcagcagcagccacaggaacagctggagtattgagggaacctcacaagacagatgactacatggggagactgtattagtaaaaattgtgtgttgagtaaacatggcagttactgtcaatggcataatctccatagtttccaacaagaggctgtgcaaattgcaaaggagggaaaagaatatctccgctttcctacattgaggttacagatgagccacagagcaaccatttgtatttgcaggcaatttccatcatt

SEQ ID NO: 80681 - DNA, 642 bp, Homo sapiens
taaatcctggcttggtcacttattatctgggagatattgagcatgttagttaacctttctgactctcagtttttcaacaccaaaatgaggaggataatatttatgatatagcatgttatgaggttcacctaaaagaaggcaaaatacctaacacatagtaaacacccaacaattttggcttttctagttatacagaccagccctctgataattcccattgaattcaccactgagaagggggtaggggtgcactgaatcccattcagttatgcagcctttgtttctaaggtagaaagtggatgtcattttcagcaatgcaaaaatgacctccacaccctcacataaagcatttgggtttggcaccttgatttctycaatgaggtgttcgcagcagcagccacaggaacagctggagtattgagggaacctcacaagacagatgactacatggggagactgtattagtaaaaattgtgtgttgagtaaacatggcagttactgtcaatggcataatctccatagtttccaacaagaggctgtgcaaattgcaaaggagggaaaagaatatctccgctttcctacattgaggttacagatgagccacagagcaaccatttgtatttgcaggcaatttccatcatt

SEQ ID NO: 80682 - DNA, 642 bp, Homo sapiens
taaatcctggcttggtcacttattatctgggagatattgagcatgttagttaacctttctgactctcagtttttcaacaccaaaatgaggaggataatatttatgatatagcatgttatgaggttcacctaaaagaaggcaaaatacctaacacatagtaaacacccaacaattttggcttttctagttatacagaccagccctctgataattcccattgaattcaccactgagaagggggtaggggtgcactgaatcccattcagttatgcagcctttgtttctaaggtagaaagtggatgtcattttcagcaatgcaaaaatgacctccacaccctcacataaagcatttgggtttggcaccttgatttcttcaatraggtgttcgcagcagcagccacaggaacagctggagtattgagggaacctcacaagacagatgactacatggggagactgtattagtaaaaattgtgtgttgagtaaacatggcagttactgtcaatggcataatctccatagtttccaacaagaggctgtgcaaattgcaaaggagggaaaagaatatctccgctttcctacattgaggttacagatgagccacagagcaaccatttgtatttgcaggcaatttccatcatt

SEQ ID NO: 80683 - DNA, 642 bp, Homo sapiens
taaatcctggcttggtcacttattatctgggagatattgagcatgttagttaacctttctgactctcagtttttcaacaccaaaatgaggaggataatatttatgatatagcatgttatgaggttcacctaaaagaaggcaaaatacctaacacatagtaaacacccaacaattttggcttttctagttatacagaccagccctctgataattcccattgaattcaccactgagaagggggtaggggtgcactgaatcccattcagttatgcagcctttgtttctaaggtagaaagtggatgtcattttcagcaatgcaaaaatgacctccacaccctcacataaagcatttgggtttggcaccttgatttcttcaatgaggtgttcgcagcagcagccacaggaacagctggagtattgagggaacctcacaagacagatgactacatggggagactgtattagtaaaaattgtgtgttgagtaaacatggcagttactktcaatggcataatctccatagtttccaacaagaggctgtgcaaattgcaaaggagggaaaagaatatctccgctttcctacattgaggttacagatgagccacagagcaaccatttgtatttgcaggcaatttccatcatt

SEQ ID NO: 80684 - DNA, 467 bp, Homo sapiens
cccgaccaaactattcaaatacgtttctccagattctgaaatgagtctggagacccctgaatctattactgaataccctcctttccaatctctaacatactggaatatcctgtactattcaggaatacagtaaaagtgtgtaggtggcttccacatgtcttccgcyatcccacccatctcaaacgagatgcacaaatacagtgcagagttaaggttccgtggtggggacaggaggcttgaaatcacaggaaaggtaactacttaatattcttgccagactctggaattctcatcaatggtctagcacaaaacccagcacaatatttctccaggatttatggaagaggccattcaatttacctccaaattggaatacaagatctagttcctccttaaaatttttaatacaaaagaagtccataaggccaggtgcggtggctcactcctgtaatcccagcactttggga

SEQ ID NO: 80685 - DNA, 568 bp, Homo sapiens
atttcattatttcctctgaagggaatgtctcccatagcccaagtggcaagcagttgactgtaaacggctgctgaagtgcaaaaacaaggggccaatttgattctccacttatttctgattggtaactacagtttctgaggacctggggttagatgttgtgaggtttttgtgtgtttgtggtttggggttttttttttttttatccccccttctatattcagacgcatcttcattctgctgaattctattcctcgacaccatgaggctcacagggaaaaaaatctctgaggaaaagtccttgtttttgtactcagataaaaatctgacaccattaatgaaaataataattgaactctttgggcttgaattggaatgagacacacactaagagcatgtttgtaattctaattgttctcacaaaatgtctttggagggctcyttgcaaagcacaagtttccatcctttcctttttggtaaaagaaacaacccatgtcctcttctttgcccttatcctttcctctgtcttctcatccagaaaagaaaaaagaactcagcaaaactgaatcat

SEQ ID NO: 80686 - DNA, 527 bp, Homo sapiens
acttccttctataaactgctaagtaagtgttaaaaaaaatctggaaagaacatgtgtgaaaaggtatgtttgatgtcgcatacaaactcaaactagcgtggaagatacagaagtcagtattgataaaggtacatatttgaagccaacattcaaacaatcaaaaaaaaatcatatccagaggatggggtctaattctccctttgtctccttrtatataacgttttattctttgccttctatccgtcggatcttccaagatcacagaggcgggaaaggattaaagtaaccgtatgttgtattaggagagataatgatattaacactccactgtatatcaaaacactctgtgcatgctgggtgcttataagctcctttgatggtatttggaatcattttcattttggctgccaaaaacacccgagatccatctagtggaaacaattaagttccattaggactgtatccattcggtaattattacaatgaagggtccctctttcatgctggagagtggagtctcaaagaaa

SEQ ID NO: 80687 - DNA, 859 bp, Homo sapiens
ttattaactgtagtcaccataatttaccttagagctccagaacttattcctcctgcaaaactgaagctttgtaccctttgagcagcatcttcccattgccctctcctgcccctggcaaccaccattgtactctctgcttcaatgagttggactatttcagattccacgtataagtggaatcttgcagtgcatgtctttctgtagagtgacatctcttgagtttttactcttttttttttttgagatggagtcttgctctttttgcccaggctgtagtgcagtggcgccatgtcggctcactcaagcgattctcctgcctcagcgtcctgagtagctgatccggattacaggcgtgtgccaccacccccagctgattttgtgtttttagtagagacggggtttctccatgttggtcaggctggtctcgaactcccgacctcaggtgatccaccctcctcggcctcccaaagtgctgggataacaggcgtgagccacctggcttgagtttttactcttgagtctttactcatctccactctgctgtactgccctagtcatcaagttacattagcccttgtttctgattattcgatttgatggaagtgaagtcayttgtatggaaatggaaatcgtatgatttgtgtgtgtgtgtatatatatatatatagcaggcaccttagtttcatccgcataacagatgattaagaattctagctgaacctatttaaagacattctatattttttaaaggctcttttttattagcctgaaaattagtgactggctattaggattctagataaaaagatttggaaatttattagagactgggagagttcatacctatgtataagaataa

SEQ ID NO: 80688 - DNA, 859 bp, Homo sapiens
ttattaactgtagtcaccataatttaccttagagctccagaacttattcctcctgcaaaactgaagctttgtaccctttgagcagcatcttcccattgccctctcctgcccctggcaaccaccattgtactctctgcttcaatgagttggactatttcagattccacgtataagtggaatcttgcagtgcatgtctttctgtagagtgacatctcttgagtttttactcttttttttttttgagatggagtcttgctctttttgcccaggctgtagtgcagtggcgccatgtcggctcactcaagcgattctcctgcctcagcgtcctgagtagctgatccggattacaggcgtgtgccaccacccccagctgattttgtgtttttagtagagacggggtttctccatgttggtcaggctggtctcgaactcccgacctcaggtgatccaccctcctcggcctcccaaagtgctgggataacaggcgtgagccacctggcttgagtttttactcttgagtctttactcatctccactctgctgtactgccctagtcatcaagttacattagcccttgtttctgattattcgatttgatggaagtgaagtcacttgtatggaaatggaaatcgtatgatttgtgtgtgtgtgtrtatatatatatatagcaggcaccttagtttcatccgcataacagatgattaagaattctagctgaacctatttaaagacattctatattttttaaaggctcttttttattagcctgaaaattagtgactggctattaggattctagataaaaagatttggaaatttattagagactgggagagttcatacctatgtataagaataa

SEQ ID NO: 80689 - DNA, 406 bp, Homo sapiens
taaggctatttgtaaatttatctgaaagcaagtaggtgccagcagaccacttattttcctctcatgctaaaaataaaaatttccaaactgacctaattgggtctacatcgcactggcaacgcgaacacctcagatgaagagagaaaacctacggagctcactgtaaaacaaatcttatttttcatatattaactaaagtgttttaagaacttagggctaaagagtgtttaccaagtattcacrggtaataaagttcatgaattttaggcatctgtctataaacaactgtgatcaaatcaaagctgtgacatgaacgtgacaactaatttttgtaagactttcttctttttttaattcctttttcttttgctgatcacactcagaaattcagaacaatacagaattc

SEQ ID NO: 80690 - DNA, 731 bp, Homo sapiens
cgcaccrgggatgcaggtggagctggccggccagtcccgcgctgtgactccgcacccctcagcccttgggtggttgatgggactgggcgccttggagcagggggcggcgctcatcagggaggctccggccgcaaaggagtccatggagggggtgggaggctcaggcatggcgggctgcaggtcccgagccctgccccgcagaaaggcagctaaggcccggtgagaaatcgagcgcagcgccggtgggctggcactgttgggggacccggtacaccctccacagccgctggcccgggtgctaagcccctcattgcccggggcgacagggccggccggctgctccgagtgcgggcccgccaagcccacgcccacccggaactccagctggtccacaagcaccgcgcacagccccggttcctgctcgcgcctctccctccacacctccctgcaagctgagggagccagctccggccttggccagcccagaaaggggctcccacagcgcagcggcgggctgaagggctcaagtgctgccaaagtgggagcccaggcagaggaggcgccgagagcaagcgagggctgtgaggactgccagcacgctgtcacctctcagtagaatgggttttagctaatgacaagccttgttaaactgccccaggtgactgctcagtctttgcctagttaaggcttagattctcagcaatgtatagctagatcatcttctttctgtt

SEQ ID NO: 80691 - DNA, 731 bp, Homo sapiens
cgcaccagggatgcaggtggagctggccggccagtcccgcgctgtgactccgcacccctcagcccttgggtggttgatgggactgggcgccttggagcagggggcggcgctcatcagggaggctccggccgcaaaggagtccatggagggggtgggaggctcaggcatggcgggctgcaggtcccgagccctgccccgcagaaaggcagctaaggcccggtgagaaatcgagcgcagcgccggtgggctggcactgttgggggacccggtacaccctccacagccgctggcccgggtgctaagcccctcattgcccggggcgacagggccggccggctgctccgagtgcgggcccgccaagcccacgcccacccggaactccagctggtccacaagcrccgcgcacagccccggttcctgctcgcgcctctccctccacacctccctgcaagctgagggagccagctccggccttggccagcccagaaaggggctcccacagcgcagcggcgggctgaagggctcaagtgctgccaaagtgggagcccaggcagaggaggcgccgagagcaagcgagggctgtgaggactgccagcacgctgtcacctctcagtagaatgggttttagctaatgacaagccttgttaaactgccccaggtgactgctcagtctttgcctagttaaggcttagattctcagcaatgtatagctagatcatcttctttctgtt

SEQ ID NO: 80692 - DNA, 2154 bp, Homo sapiens
atattggtttcaaatttcagaatatttttcttcttttattttatttatattttctaaatataatagaatatactttaatactgtagataatagaaaaagaataaaatatttgatttggagtgaaaaaggagaacatataggattcaccaaatgataaatctgtagcattcaaatcagctaaaattttgaacaggaaaagaataggaagagccttttttctagcgcactccccttttttgttgtttctctccctggagaaaaactttaaaaagcacaataatttggaacacttatggaaataaatgttgtagaaactcacgttaataataattccaataatgttgtcatgttagataaaccccctgaaccctcagaatcatttatatttatatttttttggctttacttaataacttcataattacataattatgtccctgaaattagggtgcaggaatgtttagtcagttaccaggactgaggatttggggttcatttacaaaatgaacaattcattattattgaaaaaaacatcagtttaagtgactgtcaaattatagcttcttatttcaggactgcaagcaattgagctctgagcatcccacacttctgaggaataaattttgcataatcattcaatcattttgagtgggcagcaatatagctttagcacctttgcttcatacactcaaatctaattacatagcactgaagagaagtcatcatcttccagaaatgtccattatgtttgcaaggcttatctgcttaatggtttttgtccagtgtcaggcagaactagctgcactttgtgttggaaatcacactgtcctcattctcttcggaaataatcaagtctttttattcttctctagatgctactatgcaaggcaaatattctaaaggagcatctcaatgagtttaagcctcttctaccatattctgtggaaacttcatgtggtggtttctttagcttcagagaaatccagggcagacaatcccagccttgatgctgatactataaatgaccttccccgggttctctacgtgaatggtgtgcacaagggaatgacgtcatcatcactttagtcatttgaagacggcctgaaatatcccaggggagctgtgagaacaatcagctcctccttcaggaaatgagaggaagggccaacccaagggaaatttatttattacatgtttgaaggctgctgaaataacaaaacatccttaacaagcaaacctatcctatacaaaataataataataataataatattctcacactggggcagtgaatgtcattcaggcaagtctagggagcattctgttaacggcactcccagaaaaggaggagggcaatgtggcaatattaaataaattactcatcagtgaaaaactttccttgacccatctgctcgcaggaaatctgctcaaagttggccttggcaccaaccaggtcaacagcttctgcgtcagagcaagtgctttgtcacaattatattgtgctgagaaatccctactcttaggatcaaatagttaaaataagacctrctgcagaagagcagacactcccaaaatcaggtgagatgtcaggcttcatttgtcaagcctgcaggaaatctaaggtttgaacattttcatcattttctctcccttcccaaggctgagctttgcaatctggagacatgttgtgtgcctgccctgggtcaacgtgtaaggccatcccttacctaaactgtactttcagagttagatcaagtgtgggaatttgtctcttcctttgagctttctcagttacattttgcaggttacttctgaattgtaaatctctgtcaatcccagaagagggaattcctttttgccattttacactattattttttgttagagattgtatttttcctacttttgaaagtcctccttttctccagtgtagttgaaataaaattatacatcaaaaagtagaaagatggaagaaggaattctgtctcaacaatgtaccatagaggccaggtgtgggagctcatgcctgtcataccatcactttgggaagctgaggcaggaggatcttttgagcccagggattcgaggcagcagtgtgctatgaccacaccactgcattccagcctggatgacaaaggaagaccaagtctctta

SEQ ID NO: 80693 - DNA, 1035 bp, Homo sapiens
ttcagagccattgttactaaaaaatagaaaaatagtctataattcgtaaatgagagtgttttggaagactgctttccttttccaggacataaacaactttacttcatgaactagatgataatgctgtacagagcacacagctggaattcagtaaccattgcactaaaaccattttttaaagttagtattgaaaacaggatattttcagggcactgacttcctaattaaacagtttgaaagaaaacattattttgtagcaaaatatatagatactgatattttgtatcatactgatttgtcacctataccagttaaaaatgttttagtgggcttctgtagtcccagctactcgagaggctgaggcgggacaatggcttgaacccagaaggcagagcttgcagtgagccgagatcgcaccactgcactccagcctgggcaacagagcgagattcygtttcaaaaaaacaaaaatgttttagttaaattaatgtgctacctttacatgcttatgaggaatattttctcttttcaggactaattatttttatacagtagttatgatgtaccagtatataattctctgtcaacgaacaaaccacttatttggttttatttatgcaggcaaaatctttgttttagtaaaaggtattttaggctgggcacggtggttcatgcctgtaatcccagcactttgaggccgacgtctgtggatcacttgaggtcaggagttcgtgatcagactggccaacatggtgaaaccccatctgcactaaaaatacaaaaattagccaggtgtgccggcacgtgcctataatcccagctactcaggaggctgaggcaggagaatcacttgaatccgggaggcagaggttaggggcagtgagctgagatcacgccactgcactccagcctgggcaacagagcaacactatctgaagaaaaaaaaaaaaaaagataaaggtattttagtgtaatgcctttttgaaaatgaaacaagcacttcaattgtgtggctgaaatgtttccttttaaaca

SEQ ID NO: 80694 - DNA, 653 bp, Homo sapiens
tagatgtcttaaaagatagaaaaattgtagctyatgaagacactgcagaattctctcttaaaataggtatatatagtgcaaaggattactgccattgcaatatttcacctaatcaaagattttatccaacgtgtataaacgggtatctttttagataagaaactggtcaaaatcataatagtggcatatgttgaggtcacatagtgaagttatctatgcagatcagacagtattgtggagaatacctagaatcttgagaatttacacaaatagtaataacttagatctgtatagcaaataatatacatatcagattcatttagtttatgtaatctttataatctgagaataatgagtcaagtgttatccttagtttactgattatcaaagaaaaatacagcttggagaagtcaaatgaattttccaaatttatgctacttataaatgggagagctaataaaagccacctgtctgggtataaccctgtacctatttcttctaaagcatattgttttctaaagaaagtagttacattttaaatgaatatataaggaatacatcttgaatgaagacaatatgcattttataatttacatatttctgtatttcattattcagaattcatttaaaaagtctccttgttggcatggaca

SEQ ID NO: 80695 - DNA, 653 bp, Homo sapiens
tagatgtcttaaaagatagaaaaattgtagcttatgaagwcactgcagaattctctcttaaaataggtatatatagtgcaaaggattactgccattgcaatatttcacctaatcaaagattttatccaacgtgtataaacgggtatctttttagataagaaactggtcaaaatcataatagtggcatatgttgaggtcacatagtgaagttatctatgcagatcagacagtattgtggagaatacctagaatcttgagaatttacacaaatagtaataacttagatctgtatagcaaataatatacatatcagattcatttagtttatgtaatctttataatctgagaataatgagtcaagtgttatccttagtttactgattatcaaagaaaaatacagcttggagaagtcaaatgaattttccaaatttatgctacttataaatgggagagctaataaaagccacctgtctgggtataaccctgtacctatttcttctaaagcatattgttttctaaagaaagtagttacattttaaatgaatatataaggaatacatcttgaatgaagacaatatgcattttataatttacatatttctgtatttcattattcagaattcatttaaaaagtctccttgttggcatggaca

SEQ ID NO: 80696 - DNA, 682 bp, Homo sapiens
  misc_feature (1)...(682): n = A,T,C or G
tcttcaaggttgcactgaagatggtggccagggttgggttcacatttggggctctactggggaagggtctgcttccaagctcatgtgttagtttgtatcattcatttacttttgggttgttggagtaagggcctcagtttcctgwtgtcagtcagagacctccttaagttgcttgcttgtggccctctctataggttggcttacagcatagcagcttgtgtcttcaaagcgagcaagggaaaaagtctcctattaagatgggcattacagccttaagtaattacatacaattcattgtctttttcattatcttttttttttttatttgagtctgttgcccaggctaggctcaccaatgccttgacctcctgggtcaagcagtgctccaaagtagctgggactacaggtgtacactgccatgtctggctggtttttgcgtttttgtagagacggggttttgttgtgttgccctggctggcctcgaactcctgagtttttttttttttttttttgagacggagtctcgctctgttgccagcctggagtgcagtagcacgttcttggctcactgcaacctctgcctcctgggttcaagctattctcctacctcagcctcccgagtagctgcccctcctgggcgcccaccaccatgccgggantatttttgtatttttagtagaga

SEQ ID NO: 80697 - DNA, 682 bp, Homo sapiens
  misc_feature (1)...(682): n = A,T,C or G
tcttcaaggttgcactgaagatggtggccagggttgggttcacatttggggctctactggggaagggtctgcttccaagctcatgtgttagtttgtatcattcatttacttttgggttgttggagtaagggcctcagtttcctgatgtcagtcagagacctccttaagttgcttgcttgtggccctctctataggttggcttacagcatagcagcttgtgtcttcaaagcgagcaagggaaaaagtctcctattaagatgggcattacagccttaagtaattacatacaattcattktctttttcattatcttttttttttttatttgagtctgttgcccaggctaggctcaccaatgccttgacctcctgggtcaagcagtgctccaaagtagctgggactacaggtgtacactgccatgtctggctggtttttgcgtttttgtagagacggggttttgttgtgttgccctggctggcctcgaactcctgagtttttttttttttttttttgagacggagtctcgctctgttgccagcctggagtgcagtagcacgttcttggctcactgcaacctctgcctcctgggttcaagctattctcctacctcagcctcccgagtagctgcccctcctgggcgcccaccaccatgccgggantatttttgtatttttagtagaga

SEQ ID NO: 80698 - DNA, 682 bp, Homo sapiens
  misc_feature (1)...(682): n = A,T,C or G
tcttcaaggttgcactgaagatggtggccagggttgggttcacatttggggctctactggggaagggtctgcttccaagctcatgtgttagtttgtatcattcatttacttttgggttgttggagtaagggcctcagtttcctgatgtcagtcagagacctccttaagttgcttgcttgtggccctctctataggttggcttacagcatagcagcttgtgtcttcaaagcgagcaagggaaaaagtctcctattaagatgggcattacagccttaagtaattacatacaattcattgtctttttcattatcttttttttttttatttgagtctgttgcccaggctaggctcaccaatgccttgacctcctgggtcaagcagtgctccaaagtagctgggactacaggtgyacactgccatgtctggctggtttttgcgtttttgtagagacggggttttgttgtgttgccctggctggcctcgaactcctgagtttttttttttttttttttgagacggagtctcgctctgttgccagcctggagtgcagtagcacgttcttggctcactgcaacctctgcctcctgggttcaagctattctcctacctcagcctcccgagtagctgcccctcctgggcgcccaccaccatgccgggantatttttgtatttttagtagaga

SEQ ID NO: 80699 - DNA, 682 bp, Homo sapiens
  misc_feature (1)...(682): n = A,T,C or G
tcttcaaggttgcactgaagatggtggccagggttgggttcacatttggggctctactggggaagggtctgcttccaagctcatgtgttagtttgtatcattcatttacttttgggttgttggagtaagggcctcagtttcctgatgtcagtcagagacctccttaagttgcttgcttgtggccctctctataggttggcttacagcatagcagcttgtgtcttcaaagcgagcaagggaaaaagtctcctattaagatgggcattacagccttaagtaattacatacaattcattgtctttttcattatcttttttttttttatttgagtctgttgcccaggctaggctcaccaatgccttgacctcctgggtcaagcagtgctccaaagtagctgggactacaggtgtacactgccatgtctggctggtttttgcgtttttgtagagacggggttttgttgtgttgccctggctggcctcgaactcctgagtttttttttttttttttttgagacggagtctcgctctgttgccagcctggagtgcagtagcrcgttcttggctcactgcaacctctgcctcctgggttcaagctattctcctacctcagcctcccgagtagctgcccctcctgggcgcccaccaccatgccgggantatttttgtatttttagtagaga

SEQ ID NO: 80700 - DNA, 716 bp, Homo sapiens
tgttcgtgcttaaattactctgatacacagaaggtgacttcttttttttttttttttttttttttgagacggagtctcgctctgtcgcccaggctggagtgcagtggcgcgatctaggctcactgcaaactcygcctccaaggttcaagcaattcttctgcctcagcctcctgaatagctgggactacgggcgcccgccatcacgcccggctaattttttgtatctttttttttagtagagacggggtttcaccgtgttagccaggatggtctcgatctcctgacctcgtgatctgcgcacctcggcctcccaaagtgctgggattacagatatgaaccatcgcgcccggcccagaagatgacttcttgactcctctctctccgtatctgacactacttcattctttaccagggtaaggtttgaggtctgggcattttgtgctctatctccttttctgcagtgtaaggggagagcaggaggaagaggctctctgcagcagcactgacacctggtatattgggcaagctcccaggaacaaatagcattctccatagggttttcctgaagaagatttagctgaaaataagaaactgaagagaagttaatgaagagttgttttttttttttttttttttttacagaggtatttttttttttttacagaggaattttttttttttttttttttttttttacaggaagggctaaaggactc

SEQ ID NO: 80701 - DNA, 716 bp, Homo sapiens
tgttcgtgcttaaattactctgatacacagaaggtgacttcttttttttttttttttttttttttgagacggagtctcgctctgtcgcccaggctggagtgcagtggcgcgatctaggctcactgcaaactctgcctccaaggttcaagcaattcttctgcctcagcctcctgaatagctgggactacgggcgcccgccatcacgcccggctaattttttgtatctttttttttagtagagacggggtttcaccgtgttagccaggatggtctcgatctcctgacctcgtgatctgcgcacctcggcctcccaaagtgctgggattacagrtatgaaccatcgcgcccggcccagaagatgacttcttgactcctctctctccgtatctgacactacttcattctttaccagggtaaggtttgaggtctgggcattttgtgctctatctccttttctgcagtgtaaggggagagcaggaggaagaggctctctgcagcagcactgacacctggtatattgggcaagctcccaggaacaaatagcattctccatagggttttcctgaagaagatttagctgaaaataagaaactgaagagaagttaatgaagagttgttttttttttttttttttttttacagaggtatttttttttttttacagaggaattttttttttttttttttttttttttacaggaagggctaaaggactc

SEQ ID NO: 80702 - DNA, 1334 bp, Homo sapiens
aagcacggggcagagctggggcccccctctcttggaaggtggtggagtgccggatgagcctgcacctcggtgctctggctgtggtggcgcccgcaagtcttgtcgaggttgtaggcctccaccttgtctgaccagtccatctcgcagatctccrtgtgctctcggttcagtctggggcggggtggggcagggccttggtgtgtggccagggagggccccgctggggaccctccatgctgcaggctaggacttcatgcccgcttcaggagggagctctgggccggctgtcctcgtgctcagcagtgaccaagagctgccgcccatgctgggaggctgcagagcagttgtggcactgggctttggccactcaaactcaggctggtccggaacctcccccacccagccctgtgctcccactgtgacctgggacagcccctgccggctctgagcttcagggtcctgtcgttcaatgccttgccccaggaccagccgtgggtggggtcaggagtcatcccttgggcagccctcgacccaccggatctggctcactgcttgcacgatggctctcttcagcagctcctgaatgttccggatgagctcagcttcctgagggaggagacgccctgagcaccagagccggtccttggtgaggatcccaggaggcccagctgctgcaggccttggtcaacacctgagcaaccagaaatagttgaatgccgggcctgagctctgactgtgcaagttctgctctctcactgggtttatcctgggcttttgggcattctccttggtgcgttgtaagtggggtgttttcctccagggccttctatgggctgctgggaaggtcactcagtggcagttcccacaccccaggcctcaagagtcatcactgctgctcactcagtgcacccaggaacgttggcctgtccctggcctctggacagcccctgaggacccaaactctgggggcccagatgcccgcccaggctgcccctcagggctctgtgttgggaaagaccatcctcacaccaagagcaggaggaagaccctgtgtttcttcttactgcctggccagtttaattttctgtgtgtaggaacaagccttttttccctgtgattggggtctttgcctggaccaccagctacctccttgtgtgccagagcccgagtcctgcacccctctgtccctgggttttcctcttcctgcactgtcagtgtctccatcacttcgcaggcacccttgttgcaggcagagggtttgtgggagctgcagcagttcttgaggcactgagagggtgcagggggataggcctgcagaaggggaagggagggag

SEQ ID NO: 80703 - DNA, 1334 bp, Homo sapiens
aagcacggggcagagctggggcccccctctcttggaaggtggtggagtgccggatgagcctgcacctcggtgctctggctgtggtggcgcccgcaagtcttgtcgaggttgtaggcctccaccttgtctgaccagtccatctcgcagatctccgtgtgctctcrgttcagtctggggcggggtggggcagggccttggtgtgtggccagggagggccccgctggggaccctccatgctgcaggctaggacttcatgcccgcttcaggagggagctctgggccggctgtcctcgtgctcagcagtgaccaagagctgccgcccatgctgggaggctgcagagcagttgtggcactgggctttggccactcaaactcaggctggtccggaacctcccccacccagccctgtgctcccactgtgacctgggacagcccctgccggctctgagcttcagggtcctgtcgttcaatgccttgccccaggaccagccgtgggtggggtcaggagtcatcccttgggcagccctcgacccaccggatctggctcactgcttgcacgatggctctcttcagcagctcctgaatgttccggatgagctcagcttcctgagggaggagacgccctgagcaccagagccggtccttggtgaggatcccaggaggcccagctgctgcaggccttggtcaacacctgagcaaccagaaatagttgaatgccgggcctgagctctgactgtgcaagttctgctctctcactgggtttatcctgggcttttgggcattctccttggtgcgttgtaagtggggtgttttcctccagggccttctatgggctgctgggaaggtcactcagtggcagttcccacaccccaggcctcaagagtcatcactgctgctcactcagtgcacccaggaacgttggcctgtccctggcctctggacagcccctgaggacccaaactctgggggcccagatgcccgcccaggctgcccctcagggctctgtgttgggaaagaccatcctcacaccaagagcaggaggaagaccctgtgtttcttcttactgcctggccagtttaattttctgtgtgtaggaacaagccttttttccctgtgattggggtctttgcctggaccaccagctacctccttgtgtgccagagcccgagtcctgcacccctctgtccctgggttttcctcttcctgcactgtcagtgtctccatcacttcgcaggcacccttgttgcaggcagagggtttgtgggagctgcagcagttcttgaggcactgagagggtgcagggggataggcctgcagaaggggaagggagggag

SEQ ID NO: 80704 - DNA, 1334 bp, Homo sapiens
aagcacggggcagagctggggcccccctctcttggaaggtggtggagtgccggatgagcctgcacctcggtgctctggctgtggtggcgcccgcaagtcttgtcgaggttgtaggcctccaccttgtctgaccagtccatctcgcagatctccgtgtgctctcggttcagtctggggcggggtggggcagggccttggtgtgtggccagggagggccccgctggggaccctccatgctgcaggctaggacttcatgcccgcttcaggagggagctctgggccggctgtcctcgtgctcagcagtgaccaagagctgccgcccatgctgggaggctgcagagcagttgtggcactgggctttggccactcaaactcaggctggtccggaacctcccccacccagccctgtgctcccactgtgacctgggacagcccctgccggctctgagcttcagggtcctgtcgttcaatgccttgccccaggaccagccgtgggtggggtcaggagtcatcccttgggcagccctcgacccaccrgatctggctcactgcttgcacgatggctctcttcagcagctcctgaatgttccggatgagctcagcttcctgagggaggagacgccctgagcaccagagccggtccttggtgaggatcccaggaggcccagctgctgcaggccttggtcaacacctgagcaaccagaaatagttgaatgccgggcctgagctctgactgtgcaagttctgctctctcactgggtttatcctgggcttttgggcattctccttggtgcgttgtaagtggggtgttttcctccagggccttctatgggctgctgggaaggtcactcagtggcagttcccacaccccaggcctcaagagtcatcactgctgctcactcagtgcacccaggaacgttggcctgtccctggcctctggacagcccctgaggacccaaactctgggggcccagatgcccgcccaggctgcccctcagggctctgtgttgggaaagaccatcctcacaccaagagcaggaggaagaccctgtgtttcttcttactgcctggccagtttaattttctgtgtgtaggaacaagccttttttccctgtgattggggtctttgcctggaccaccagctacctccttgtgtgccagagcccgagtcctgcacccctctgtccctgggttttcctcttcctgcactgtcagtgtctccatcacttcgcaggcacccttgttgcaggcagagggtttgtgggagctgcagcagttcttgaggcactgagagggtgcagggggataggcctgcagaaggggaagggagggag

SEQ ID NO: 80705 - DNA, 1334 bp, Homo sapiens
aagcacggggcagagctggggcccccctctcttggaaggtggtggagtgccggatgagcctgcacctcggtgctctggctgtggtggcgcccgcaagtcttgtcgaggttgtaggcctccaccttgtctgaccagtccatctcgcagatctccgtgtgctctcggttcagtctggggcggggtggggcagggccttggtgtgtggccagggagggccccgctggggaccctccatgctgcaggctaggacttcatgcccgcttcaggagggagctctgggccggctgtcctcgtgctcagcagtgaccaagagctgccgcccatgctgggaggctgcagagcagttgtggcactgggctttggccactcaaactcaggctggtccggaacctcccccacccagccctgtgctcccactgtgacctgggacagcccctgccggctctgagcttcagggtcctgtcgttcaatgccttgccccaggaccagccgtgggtggggtcaggagtcatcccttgggcagccctcgacccaccggatctggctcactgcttgcaygatggctctcttcagcagctcctgaatgttccggatgagctcagcttcctgagggaggagacgccctgagcaccagagccggtccttggtgaggatcccaggaggcccagctgctgcaggccttggtcaacacctgagcaaccagaaatagttgaatgccgggcctgagctctgactgtgcaagttctgctctctcactgggtttatcctgggcttttgggcattctccttggtgcgttgtaagtggggtgttttcctccagggccttctatgggctgctgggaaggtcactcagtggcagttcccacaccccaggcctcaagagtcatcactgctgctcactcagtgcacccaggaacgttggcctgtccctggcctctggacagcccctgaggacccaaactctgggggcccagatgcccgcccaggctgcccctcagggctctgtgttgggaaagaccatcctcacaccaagagcaggaggaagaccctgtgtttcttcttactgcctggccagtttaattttctgtgtgtaggaacaagccttttttccctgtgattggggtctttgcctggaccaccagctacctccttgtgtgccagagcccgagtcctgcacccctctgtccctgggttttcctcttcctgcactgtcagtgtctccatcacttcgcaggcacccttgttgcaggcagagggtttgtgggagctgcagcagttcttgaggcactgagagggtgcagggggataggcctgcagaaggggaagggagggag

SEQ ID NO: 80706 - DNA, 1334 bp, Homo sapiens
aagcacggggcagagctggggcccccctctcttggaaggtggtggagtgccggatgagcctgcacctcggtgctctggctgtggtggcgcccgcaagtcttgtcgaggttgtaggcctccaccttgtctgaccagtccatctcgcagatctccgtgtgctctcggttcagtctggggcggggtggggcagggccttggtgtgtggccagggagggccccgctggggaccctccatgctgcaggctaggacttcatgcccgcttcaggagggagctctgggccggctgtcctcgtgctcagcagtgaccaagagctgccgcccatgctgggaggctgcagagcagttgtggcactgggctttggccactcaaactcaggctggtccggaacctcccccacccagccctgtgctcccactgtgacctgggacagcccctgccggctctgagcttcagggtcctgtcgttcaatgccttgccccaggaccagccgtgggtggggtcaggagtcatcccttgggcagccctcgacccaccggatctggctcactgcttgcacgatggctctcttcagcagctcctgaatgttccggatgagctcagcttcctgagggaggagacgccctgagcaccagagccggtccttggtgaggatcccaggaggcccagctgctgcaggccttggtcaacacctgagcaaccagaaatagttgaatgccgggcctgagctctgactgtgcaagttctgctctctcactgggtttatcctgggcttttgggcattctccttggtgcgttgtaagtggggtgttttcctccagggccttctatgggctgctgggaaggtcactcagtggcagttcccacrccccaggcctcaagagtcatcactgctgctcactcagtgcacccaggaacgttggcctgtccctggcctctggacagcccctgaggacccaaactctgggggcccagatgcccgcccaggctgcccctcagggctctgtgttgggaaagaccatcctcacaccaagagcaggaggaagaccctgtgtttcttcttactgcctggccagtttaattttctgtgtgtaggaacaagccttttttccctgtgattggggtctttgcctggaccaccagctacctccttgtgtgccagagcccgagtcctgcacccctctgtccctgggttttcctcttcctgcactgtcagtgtctccatcacttcgcaggcacccttgttgcaggcagagggtttgtgggagctgcagcagttcttgaggcactgagagggtgcagggggataggcctgcagaaggggaagggagggag

SEQ ID NO: 80707 - DNA, 709 bp, Homo sapiens
ccgttgcttctgggccagcagcaggtcggtctccgcagccagtgcctccacctcacgctgcagctccgacttccagctgtgcgtgtcctgcagtcgctcgcccaccctgcacgtggagtcttgctgtgtcggctgtgccagcrcctgggtctctgcggccagctgctggctctcgtgcccctgcagctcccgctctgactggttgcagttggcgaaggcctggcggtagcgagcatagcagttctggaaccacacctccagccagcggtggccaggccggaggacgtgtaggcgcccgtgtttctggccacgtcatactctttgcagggcagctcgtagggtggcactgtctgtggggccagctctggtaggagcacatccgtctgcaccatggtgtctgccgcccaccacggccacgggagtgaggagtgtgtgtggtcagcttgttgcggtcagcccagtgcagtcatcggtcggctccaacggctcagtcccagagcaggacctggctcccagtcgcttgggtgacacagtaaaccaagagcttcctgttgccaagaaacgggatctcttctccagtggctaggggagggggcattcagggcggtgggcagaattgccctcttaaagggccaggcagccccagccccaccatccctgtccccacctcggggcaatcaacagtggccaagggttcctgtcacttaga

SEQ ID NO: 80708 - DNA, 694 bp, Homo sapiens
caaccccaaatccctgatccaaacccaaatctgtgatcaacccccaatccgcgatcccaaatctgtgatctactccacagtccatgatccagcccggtccaccacagccttcagcagtgacactcgcagcctccgacctctcagacagagtgagcctcgcaaagccgttgggcgcgcgcatgcaccgcggttgctgcccggctcccggaagccgttccctggtggcgcgcgctggcaggtgggkctgcagctctgggcgggcgccgatgggctcgcaggtcctcttgggatcgcccgggcgtccccaggatcgcaggagcgccgccagcccggcctgagaaggagggcctgtctggccttgcagcccgccccgctcctcctcggaagggagatagggtgctggcaagggcactccgtggccacctgggtggcttcgcagatggcccggcttcacgctgaggctctggccctggagtctgtgtggctagtgtcaggtagctggagaggcatgggggcagagtcaggggctgctccttcccccaccagccctcactgctgccagtgccccatgcgcagtttgcagctgcagatctggcactggcgtgggacggcggagcttcccttggatggcctcagggtcgcagagcgcacagcccacctggcctcaagttccactcctcttgggcatctctct

SEQ ID NO: 80709 - DNA, 1080 bp, Homo sapiens
atttgtttgggtttttctcaaccagtcattttctacaccataattccagctcagcccactccacttgcaattgcttgctctcatcttctaactcctgtttattcttctcaatttctgctgtaatggcttcatttaacctgctcctccgtatcttgtatgctttttagttcactgcttatttccttcttcctgctggaaaacatggctaaataacttgtattaatattttagcctcatttagcttcaagattatctcataaggatatctgagcacccttcttcccattgttatgacaattgaagcctttttaaattcctgtcctaggagaagttgctcaaaatttgccatacatctatgatgttttaattaatactgacctctgaatgatctagaaaataatggtaaaccatgtacacatatttgtgtgtgcgcatgtgtgcatgtatccatagcatctgtgtgtgtgtacattttatagatttttgtctttgtatgaagaaatatactgaatatccaaataatcataatttctatacaagtgaggtatgtggcttaaaatctagtgaacaaaatataactatacattcatgatttggaaaacttttaacatgattttgaggaattactcaattgttaattgtttctgccttctctaacaaaatgactaatatttggactgaaaagaaaaaaagaaaacctcggtaagtggaatttctgtrggtggtagctctggaatatcccaccaagagaatgaatccgattaaaataatgactgtagaaatttccttgttagtgaatattcagcctggccttaaggaaaatgtagctctctcttactgctttgtatcttatttcttttactatgtcaattctcaccttagtagaactactactagttctagtaccatggctgtcatagatgcaaccattatattccatttagtttcttcctcaggttccctaacaattgtttgaaactgaatatatatgtttatgtatgtgtgtgtgttcactgtcatgtatatggtgtatatgggatgtgtgcagttttcagttatatatatattcatatatacata

SEQ ID NO: 80710 - DNA, 1080 bp, Homo sapiens
atttgtttgggtttttctcaaccagtcattttctacaccataattccagctcagcccactccacttgcaattgcttgctctcatcttctaactcctgtttattcttctcaatttctgctgtaatggcttcatttaacctgctcctccgtatcttgtatgctttttagttcactgcttatttccttcttcctgctggaaaacatggctaaataacttgtattaatattttagcctcatttagcttcaagattatctcataaggatatctgagcacccttcttcccattgttatgacaattgaagcctttttaaattcctgtcctaggagaagttgctcaaaatttgccatacatctatgatgttttaattaatactgacctctgaatgatctagaaaataatggtaaaccatgtacacatatttgtgtgtgcgcatgtgtgcatgtatccatagcatctgtgtgtgtgtacattttatagatttttgtctttgtatgaagaaatatactgaatatccaaataatcataatttctatacaagtgaggtatgtggcttaaaatctagtgaacaaaatataactatacattcatgatttggaaaacttttaacatgattttgaggaattactcaattgttaattgtttctgccttctctaacaaaatgactaatatttggactgaaaagaaaaaaagaaaacctcggtaagtggaatttctgtgggtgktagctctggaatatcccaccaagagaatgaatccgattaaaataatgactgtagaaatttccttgttagtgaatattcagcctggccttaaggaaaatgtagctctctcttactgctttgtatcttatttcttttactatgtcaattctcaccttagtagaactactactagttctagtaccatggctgtcatagatgcaaccattatattccatttagtttcttcctcaggttccctaacaattgtttgaaactgaatatatatgtttatgtatgtgtgtgtgttcactgtcatgtatatggtgtatatgggatgtgtgcagttttcagttatatatatattcatatatacata

SEQ ID NO: 80711 - DNA, 1080 bp, Homo sapiens
atttgtttgggtttttctcaaccagtcattttctacaccataattccagctcagcccactccacttgcaattgcttgctctcatcttctaactcctgtttattcttctcaatttctgctgtaatggcttcatttaacctgctcctccgtatcttgtatgctttttagttcactgcttatttccttcttcctgctggaaaacatggctaaataacttgtattaatattttagcctcatttagcttcaagattatctcataaggatatctgagcacccttcttcccattgttatgacaattgaagcctttttaaattcctgtcctaggagaagttgctcaaaatttgccatacatctatgatgttttaattaatactgacctctgaatgatctagaaaataatggtaaaccatgtacacatatttgtgtgtgcgcatgtgtgcatgtatccatagcatctgtgtgtgtgtacattttatagatttttgtctttgtatgaagaaatatactgaatatccaaataatcataatttctatacaagtgaggtatgtggcttaaaatctagtgaacaaaatataactatacattcatgatttggaaaacttttaacatgattttgaggaattactcaattgttaattgtttctgccttctctaacaaaatgactaatatttggactgaaaagaaaaaaagaaaacctcggtaagtggaatttctgtgggtggtagctctggaatatcccaccaagagaatgaatccgattaaaataatgactgtagaaatttccttgttagygaatattcagcctggccttaaggaaaatgtagctctctcttactgctttgtatcttatttcttttactatgtcaattctcaccttagtagaactactactagttctagtaccatggctgtcatagatgcaaccattatattccatttagtttcttcctcaggttccctaacaattgtttgaaactgaatatatatgtttatgtatgtgtgtgtgttcactgtcatgtatatggtgtatatgggatgtgtgcagttttcagttatatatatattcatatatacata

SEQ ID NO: 80712 - DNA, 1080 bp, Homo sapiens
atttgtttgggtttttctcaaccagtcattttctacaccataattccagctcagcccactccacttgcaattgcttgctctcatcttctaactcctgtttattcttctcaatttctgctgtaatggcttcatttaacctgctcctccgtatcttgtatgctttttagttcactgcttatttccttcttcctgctggaaaacatggctaaataacttgtattaatattttagcctcatttagcttcaagattatctcataaggatatctgagcacccttcttcccattgttatgacaattgaagcctttttaaattcctgtcctaggagaagttgctcaaaatttgccatacatctatgatgttttaattaatactgacctctgaatgatctagaaaataatggtaaaccatgtacacatatttgtgtgtgcgcatgtgtgcatgtatccatagcatctgtgtgtgtgtacattttatagatttttgtctttgtatgaagaaatatactgaatatccaaataatcataatttctatacaagtgaggtatgtggcttaaaatctagtgaacaaaatataactatacattcatgatttggaaaacttttaacatgattttgaggaattactcaattgttaattgtttctgccttctctaacaaaatgactaatatttggactgaaaagaaaaaaagaaaacctcggtaagtggaatttctgtgggtggtagctctggaatatcccaccaagagaatgaatccgattaaaataatgactgtagaaatttccttgttagtgaatattcagcctggccttaaggaaaatgtagctctctcttactgctttgtatcttatttcttttactatgtcaattctcaccttagtagaactactactagttctagtaccatggctgtcatagatgcaaccattatattccatttagtttcttcctcaggttccctaacaattgtttgaaactgaatatatatgtttatgtatgtgwgtgtgttcactgtcatgtatatggtgtatatgggatgtgtgcagttttcagttatatatatattcatatatacata

SEQ ID NO: 80713 - DNA, 678 bp, Homo sapiens
cgaggaatccacccagggactggtgttgaactggggcctgatgaccacccggggacaaggtacacaccaggcttgttgtccacctgtcaccagatgtccacctgagtcctgatgtccatcttgatcctgggtgtccacattaggcctgatgtccacctggggcctargtacccactgggggcttcctgttaacctgggggctggtgtcattctggggcctaatgaccacctgggttgtattattcacctagggcctggtgtccacttggggcttgagtgtaaccttggacctggcacccacacaggacttgggtatcaaactggccccttggtgtccagttaagacatcatgtgaacctggcgcctgagtgtccacatggggccaaatgactactgggggcctgaatgtcaacctagaatctgaggtttactaggggcctaggtatccacctggggcccaatgtccacctgagcctgggtgtcaacctggggcctgatgtaaacctctagttcagtgtccaccttgggcttgatgtcaacctggagcctgatgtccacctgagtactgatgttcacctttgacctgatgtccacctgtggactgtttatccacccatggcctgatgttcacctggggctgaatgtccaactgtgacctgttgtgcacctggaacctag

SEQ ID NO: 80714 - DNA, 678 bp, Homo sapiens
cgaggaatccacccagggactggtgttgaactggggcctgatgaccacccggggacaaggtacacaccaggcttgttgtccacctgtcaccagatgtccacctgagtcctgatgtccatcttgatcctgggtgtccacattaggcctgatgtccacctggggcctaagtacccactgggggcttcctgttaacctgggggctggtgtcattctggggcctaatgaccacctgggttgtaytattcacctagggcctggtgtccacttggggcttgagtgtaaccttggacctggcacccacacaggacttgggtatcaaactggccccttggtgtccagttaagacatcatgtgaacctggcgcctgagtgtccacatggggccaaatgactactgggggcctgaatgtcaacctagaatctgaggtttactaggggcctaggtatccacctggggcccaatgtccacctgagcctgggtgtcaacctggggcctgatgtaaacctctagttcagtgtccaccttgggcttgatgtcaacctggagcctgatgtccacctgagtactgatgttcacctttgacctgatgtccacctgtggactgtttatccacccatggcctgatgttcacctggggctgaatgtccaactgtgacctgttgtgcacctggaacctag

SEQ ID NO: 80715 - DNA, 678 bp, Homo sapiens
cgaggaatccacccagggactggtgttgaactggggcctgatgaccacccggggacaaggtacacaccaggcttgttgtccacctgtcaccagatgtccacctgagtcctgatgtccatcttgatcctgggtgtccacattaggcctgatgtccacctggggcctaagtacccactgggggcttcctgttaacctgggggctggtgtcattctggggcctaatgaccacctgggttgtattattcacctagggcctggtgtccacttggggcttgagtgtaaccttggacctggcacccacacaggacttgggtatcaaactggccccttggtgtccagttaagacatcatgtgaacctggcgcctgagtgtccacatggggccaaatgactactgggggcctgaatgtcaacctagaatctgagktttactaggggcctaggtatccacctggggcccaatgtccacctgagcctgggtgtcaacctggggcctgatgtaaacctctagttcagtgtccaccttgggcttgatgtcaacctggagcctgatgtccacctgagtactgatgttcacctttgacctgatgtccacctgtggactgtttatccacccatggcctgatgttcacctggggctgaatgtccaactgtgacctgttgtgcacctggaacctag

SEQ ID NO: 80716 - DNA, 533 bp, Homo sapiens
tcgggaccatgcttgctagcgctggatgagtctctggaaggacgcacgggactccgcaaagctgacctgtcccaccgaggtcaaatggatacctctgcattggcccgaggcctccgaagtacatcaccgtcaccaaccgtcaccgtcagcatccttgtgagcctgcccaaggccccgcctccggggagactcttgggagcccggccttcgtcggctaaagtccaaagggatggtgacttccacccacaaggtccccactgaacggcgaaaatgtggagcgtaggtcagagaggggaccaggaggggagacgtcccgacaggcgaygagttcccaaggctctggccaccccacccacgccccacgccccacgtcccgggcacccgcgggacaccgcccctttatcccctcctctgtccacagccggccccaccccaccacgcaacccacgcacacacgctggaggttccaaaaccacacggtgtgactagagcctgacggagcgagagcccatttcacgaggtgggaggggtgg

SEQ ID NO: 80717 - DNA, 459 bp, Homo sapiens
tctctaagtggacatcagagctcagattgacacaaagactccagtagacataatgtaccaatgaatatccaggcctccggtaaatacccaggccccagattgacatcggggtctatgtggacacacaggccccgggtagtaaacaggcccaaggtggacactggactagacatcaggtcctaggttgacaaccatgcttcaagttgacaccaggccccaagtgaacatctggtcccagctggacactagtctcctggtgaatacctgggctsaaggttgacatcagaccctatgtgaacactagaccccagctaaacacttatgccctaagtggacatcaggcctcaggtggttacccagtcccaaggtgaacataggaccctgatgggcaccagttatcaagtggattcccaggccccaggtgaatatcaagtcctaggtggataccaggccccaagt

SEQ ID NO: 80718 - DNA, 640 bp, Homo sapiens
aagtattaccttaatacttgcactaacataagctaagctggatttggtagatcagtattgtcttttgagcttcttccagaacctacaaaggaagtgtctgagtcacaggtgcagggaaacagagtgcttattgaaacgtggttaaacccacaagacaactaactggctgggacctctctctcttttccaagcactttacagacaccagttaattaacacctccctttcaaggactgcatgcagggcactcaaagataaaattaaggctctgtgacaggagcaggtagggacagcaaccccatggactcttggacagtggtgggaggagggcacaacgctctgcccccgcgggtcacttgktgtacctgattgctgtctgtgttgggaggagctcaaagcagctgggctgccaggcaggggaacagaggggaacatgagaatgacaggttaggaaattacaagttaggtatgtgaaataggtgtgacaagacataaaagcaaaagcttgaatcctcttgcttccgaggttttatcatttattgcgtgtgcaaatgtcttttgttacttgggtattttaatggtttttttttgttatgaaataaatctttgacaccagtgagcttaaaaatacacatttaat

SEQ ID NO: 80719 - DNA, 2845 bp, Homo sapiens
acatggaattataggtagtctaagtataaagggcatatcaacctactagttttgacacattaacttagaatgtattataatgtagatgaggaaactcacaggcaattggcaaaggaagaagtctttgataacataaggctggaggtttgccaactatgctgtggatgtgtgtgtgtgtatgctgaccaacacggccttaacactcccttgaacttgactaaattttagacaggtttcttgctaactatatgcccctgatttcctttttctaagagcatttactttacaaaacttggaattgtaaattatttcttagccccttggagacagaaatctacaatcaatgtttccctcaaggacctaggagccacccctttaaaatgtaatcacaagaaacacagtgattttatctcccagtccctgtaggagggtaggagtctaattttataagcaccagttagtaaatagagatggtctaatcacattgaccaatcttctccctgatstcctccagtattttgccactagcttgtcccagggcttaaaatgtctctagccttttgtttcagcagagttcagttcaatctctttcccctattgacatatccttagcccctactcaaataatcttaaagcttttcttgcctgttttattctgtctggtacaatttttctttaacagagagagagacagagacagtgtgtgtgtgtgcgtgtgtgtgtgtgtgtgtgtgtgtgtgtgtgtgtgtgtgtgtgtgtagagggactcccaggggacctcaggaacaggcctgctccatgcactcttttatgaaaacagttgtctttaatctgttctatgtgttgaagtattttcctaaaattatatttaaacaaatatcaccatagttttaaaagcatttagagtatgcaactgttatgcatccatacaaactgaaaattttaaaaaaattgaaacactttaggaattatttcatttttctgatgaaatgagataagggaaagctccagagcataagagattcactggaaagcccaagatccaactgtgagcagcagagcattgggaagctgctccagtgctcttcagaagttatatttgtatcatcaaggcagaaaatgtgaactaggcaaagtaagagaaacatgaaggcgtggttaacctacttaaaaggacaatctccaagtgccttaggaacactaatttgcatgtaaccaattcatatgtaaattaggagtaatctttatttaggacctttgtttgggaacatttattacccattagttctgttatttttacttcaatgcttattttcctaatttgtgcataatcatgtaaaggattataaactcaatgttgaaaaatatatagcgaagaaataaatagaagccaagagcacaggggcaaatagtgactttagtttatttgtatcaaatgagtaattccttagtattttaagttagaaggtaacttagggcagataatcacaaaggttatcagtttggctgagatgcttagctttgcagagtctcacttcctcatttgtaaaatagtcagtaataatccctaactttttactgcttttatgacaataaagaaaatatatttaaagtgctaagacagtactattgaagcccctagtaagggctcaacatggtgatgttagtgtccaacatcaaaataagcttcttccccttcaccttctgcttccccttctcctttttgttctcatcctccttcttactcctctatattgtatccctaagacaatttgcctaaatgctaacaactatttgacattagtttcaactataggctgtggaaacctacaaccaaagggttcaatctttggtttctaactcagtgttgactttaattaaaccaaaaaattccaattagtacagatttttttcaggtatactaatagtactaatttgaggcaaatggtaatgatcaaattaattggtttgtgtcactctatcaatataggtatggccagtacttattgatccttttcaataatgtctctttctaagactctgttaaggtattttatgggaatgattaaaacaaaaggcaaaaaattaagtattattcaagaaagaatgtattaaataaaataatgctactattgagttctcatgtaaaataacattcctttaatatttcaaagtcaccagaagtcaagtcaaatcaatgcatgagtgaagagagaaaatggtaaggttagggcaatatttttgccaaactttgttctggaagttcttattaaaataaaaaaatgacctaaattatctttctatgtattctatttaaacatttgttttcctttgaattgggagggaaactgcaagtcaaattagggagaagtgctgtcatgctgatggagacaataccaaagatttatctacttagacaaatgaaatcagagtctgtagatctgaaatgttttgatgcctctgcagaaatacaaaaagttgtaaacaaatgctattttactgtagtcaaatttggtgccgttttctagaggctcctgattgtcaaaagttagctttatcaaatcagttccatggatttcaagagactgaaaaataaggttattacagaaagtgtagattgcacagttaagactgacttttagatgacaatgaataatttttagtataaatatatcctgaatattctttctatatatgtgtatgtgtattttacatatattccttcttttatctatgtatcaactaagtattatctatctattctatcaacaaaataaccaataacagcttctggatattatttttctttaatatattgtttgacctaatgggccaaactgatttt

SEQ ID NO: 80720 - DNA, 2845 bp, Homo sapiens
acatggaattataggtagtctaagtataaagggcatatcaacctactagttttgacacattaacttagaatgtattataatgtagatgaggaaactcacaggcaattggcaaaggaagaagtctttgataacataaggctggaggtttgccaactatgctgtggatgtgtgtgtgtgtatgctgaccaacacggccttaacactcccttgaacttgactaaattttagacaggtttcttgctaactatatgcccctgatttcctttttctaagagcatttactttacaaaacttggaattgtaaattatttcttagccccttggagacagaaatctacaatcaatgtttccctcaaggacctaggagccacccctttaaaatgtaatcacaagaaacacagtgattttatctcccagtccctgtaggagggtaggagtctaattttataagcaccagttagtaaatagagatggtctaatcacattgaccaatcttctccctgatctcctccagtattttgccactagcttgtcccagggcttaaaatgtctctagccttttgtttcagcagagttsagttcaatctctttcccctattgacatatccttagcccctactcaaataatcttaaagcttttcttgcctgttttattctgtctggtacaatttttctttaacagagagagagacagagacagtgtgtgtgtgtgcgtgtgtgtgtgtgtgtgtgtgtgtgtgtgtgtgtgtgtgtgtgtgtagagggactcccaggggacctcaggaacaggcctgctccatgcactcttttatgaaaacagttgtctttaatctgttctatgtgttgaagtattttcctaaaattatatttaaacaaatatcaccatagttttaaaagcatttagagtatgcaactgttatgcatccatacaaactgaaaattttaaaaaaattgaaacactttaggaattatttcatttttctgatgaaatgagataagggaaagctccagagcataagagattcactggaaagcccaagatccaactgtgagcagcagagcattgggaagctgctccagtgctcttcagaagttatatttgtatcatcaaggcagaaaatgtgaactaggcaaagtaagagaaacatgaaggcgtggttaacctacttaaaaggacaatctccaagtgccttaggaacactaatttgcatgtaaccaattcatatgtaaattaggagtaatctttatttaggacctttgtttgggaacatttattacccattagttctgttatttttacttcaatgcttattttcctaatttgtgcataatcatgtaaaggattataaactcaatgttgaaaaatatatagcgaagaaataaatagaagccaagagcacaggggcaaatagtgactttagtttatttgtatcaaatgagtaattccttagtattttaagttagaaggtaacttagggcagataatcacaaaggttatcagtttggctgagatgcttagctttgcagagtctcacttcctcatttgtaaaatagtcagtaataatccctaactttttactgcttttatgacaataaagaaaatatatttaaagtgctaagacagtactattgaagcccctagtaagggctcaacatggtgatgttagtgtccaacatcaaaataagcttcttccccttcaccttctgcttccccttctcctttttgttctcatcctccttcttactcctctatattgtatccctaagacaatttgcctaaatgctaacaactatttgacattagtttcaactataggctgtggaaacctacaaccaaagggttcaatctttggtttctaactcagtgttgactttaattaaaccaaaaaattccaattagtacagatttttttcaggtatactaatagtactaatttgaggcaaatggtaatgatcaaattaattggtttgtgtcactctatcaatataggtatggccagtacttattgatccttttcaataatgtctctttctaagactctgttaaggtattttatgggaatgattaaaacaaaaggcaaaaaattaagtattattcaagaaagaatgtattaaataaaataatgctactattgagttctcatgtaaaataacattcctttaatatttcaaagtcaccagaagtcaagtcaaatcaatgcatgagtgaagagagaaaatggtaaggttagggcaatatttttgccaaactttgttctggaagttcttattaaaataaaaaaatgacctaaattatctttctatgtattctatttaaacatttgttttcctttgaattgggagggaaactgcaagtcaaattagggagaagtgctgtcatgctgatggagacaataccaaagatttatctacttagacaaatgaaatcagagtctgtagatctgaaatgttttgatgcctctgcagaaatacaaaaagttgtaaacaaatgctattttactgtagtcaaatttggtgccgttttctagaggctcctgattgtcaaaagttagctttatcaaatcagttccatggatttcaagagactgaaaaataaggttattacagaaagtgtagattgcacagttaagactgacttttagatgacaatgaataatttttagtataaatatatcctgaatattctttctatatatgtgtatgtgtattttacatatattccttcttttatctatgtatcaactaagtattatctatctattctatcaacaaaataaccaataacagcttctggatattatttttctttaatatattgtttgacctaatgggccaaactgatttt

SEQ ID NO: 80721 - DNA, 2845 bp, Homo sapiens
acatggaattataggtagtctaagtataaagggcatatcaacctactagttttgacacattaacttagaatgtattataatgtagatgaggaaactcacaggcaattggcaaaggaagaagtctttgataacataaggctggaggtttgccaactatgctgtggatgtgtgtgtgtgtatgctgaccaacacggccttaacactcccttgaacttgactaaattttagacaggtttcttgctaactatatgcccctgatttcctttttctaagagcatttactttacaaaacttggaattgtaaattatttcttagccccttggagacagaaatctacaatcaatgtttccctcaaggacctaggagccacccctttaaaatgtaatcacaagaaacacagtgattttatctcccagtccctgtaggagggtaggagtctaattttataagcaccagttagtaaatagagatggtctaatcacattgaccaatcttctccctgatctcctccagtattttgccactagcttgtcccagggcttaaaatgtctctagccttttgtttcagcagagttcagttcaatctctttcccctattgacatatccttagcccctaytcaaataatcttaaagcttttcttgcctgttttattctgtctggtacaatttttctttaacagagagagagacagagacagtgtgtgtgtgtgcgtgtgtgtgtgtgtgtgtgtgtgtgtgtgtgtgtgtgtgtgtgtgtagagggactcccaggggacctcaggaacaggcctgctccatgcactcttttatgaaaacagttgtctttaatctgttctatgtgttgaagtattttcctaaaattatatttaaacaaatatcaccatagttttaaaagcatttagagtatgcaactgttatgcatccatacaaactgaaaattttaaaaaaattgaaacactttaggaattatttcatttttctgatgaaatgagataagggaaagctccagagcataagagattcactggaaagcccaagatccaactgtgagcagcagagcattgggaagctgctccagtgctcttcagaagttatatttgtatcatcaaggcagaaaatgtgaactaggcaaagtaagagaaacatgaaggcgtggttaacctacttaaaaggacaatctccaagtgccttaggaacactaatttgcatgtaaccaattcatatgtaaattaggagtaatctttatttaggacctttgtttgggaacatttattacccattagttctgttatttttacttcaatgcttattttcctaatttgtgcataatcatgtaaaggattataaactcaatgttgaaaaatatatagcgaagaaataaatagaagccaagagcacaggggcaaatagtgactttagtttatttgtatcaaatgagtaattccttagtattttaagttagaaggtaacttagggcagataatcacaaaggttatcagtttggctgagatgcttagctttgcagagtctcacttcctcatttgtaaaatagtcagtaataatccctaactttttactgcttttatgacaataaagaaaatatatttaaagtgctaagacagtactattgaagcccctagtaagggctcaacatggtgatgttagtgtccaacatcaaaataagcttcttccccttcaccttctgcttccccttctcctttttgttctcatcctccttcttactcctctatattgtatccctaagacaatttgcctaaatgctaacaactatttgacattagtttcaactataggctgtggaaacctacaaccaaagggttcaatctttggtttctaactcagtgttgactttaattaaaccaaaaaattccaattagtacagatttttttcaggtatactaatagtactaatttgaggcaaatggtaatgatcaaattaattggtttgtgtcactctatcaatataggtatggccagtacttattgatccttttcaataatgtctctttctaagactctgttaaggtattttatgggaatgattaaaacaaaaggcaaaaaattaagtattattcaagaaagaatgtattaaataaaataatgctactattgagttctcatgtaaaataacattcctttaatatttcaaagtcaccagaagtcaagtcaaatcaatgcatgagtgaagagagaaaatggtaaggttagggcaatatttttgccaaactttgttctggaagttcttattaaaataaaaaaatgacctaaattatctttctatgtattctatttaaacatttgttttcctttgaattgggagggaaactgcaagtcaaattagggagaagtgctgtcatgctgatggagacaataccaaagatttatctacttagacaaatgaaatcagagtctgtagatctgaaatgttttgatgcctctgcagaaatacaaaaagttgtaaacaaatgctattttactgtagtcaaatttggtgccgttttctagaggctcctgattgtcaaaagttagctttatcaaatcagttccatggatttcaagagactgaaaaataaggttattacagaaagtgtagattgcacagttaagactgacttttagatgacaatgaataatttttagtataaatatatcctgaatattctttctatatatgtgtatgtgtattttacatatattccttcttttatctatgtatcaactaagtattatctatctattctatcaacaaaataaccaataacagcttctggatattatttttctttaatatattgtttgacctaatgggccaaactgatttt

SEQ ID NO: 80722 - DNA, 670 bp, Homo sapiens
agtataactgcattaaatacaatctctgcttccctgtgtaactcagaattctctacaaattctgaaagtcccctgaataggccacttctaatcccaagcttgaaacagccctcatccttctgtttgaaaaattcatatagattcttcaagatctaagatggtttcttctctcagtttcagagtggccatcctctgaactacagcaggcattgctcgttgggaggaaggcaacrgcacaggcatgagcagcatgccaggccaagccctttatatatacatgaactcatctgctcttaaccttaccacgcatgcatcatcactgtccctactttagaggagcaaatgtggctcagagaggttaataacttgtctaggtcacagatttgccaagtgctggacccaaatcttggtggtcgggccatagagtttgtgcttctaacctttacaccacacgatctatcaaagcttctgttgctctaaaaatccttttgtgccactggtctctagcatttgcaagctccttaagggaaggctctttgtctctgtgctctgtagcctgtgactggcacacagaaacaccccgtatgtgaagccttagaggtccagagatggagtttagcagtagaaacaagagcaaacccctgacagtgtctctgggctcaaaacacac

SEQ ID NO: 80723 - DNA, 792 bp, Homo sapiens
ccagtaaataaatttcaggttttggaaaaagaccactttgtgtcactttccagaattccttctggtgattaccagtgtaatactgaataattttagaaagaataatgtcggaacctctcagaatgataagaaataagtgtggctatcatggtttaaaaaaaaaaaggaaatttaaagtcttattttacattggattttgttgctatgacatgattcctttttaagaaggagaaattggccgggcgcagtggctcatgtctgtaatcccagcactttgggaggccaaggcgggcagatcacaaggtcaggagatcaagacaatcccgactaaaaccgtgaaaccccacctctactaaaaatacaaaaaattagccaggcgtggtggcgggagcctgcagtcccagctactaggaggctgaggcaggagaatggcgtgaacctgggaggcagagcttgcagtgagcccagatagcgccattacactccagcctgggtgacagagcaagactctgtctcaaaaaaaaaaaaagaggaattaaatttgggaagcaacaaataataggagaggaggtgctaacttgcctagaaatgtgtgttaccagttaraggttattccttcatgactgttttcaaatatgttaagaattcatatgaaaagaattccatggagggaaaagagatactaaaataacattatcttaaaacacaactcacattttccatacgacaataaaaatgtttctaactgggctgcttggttacagcttaaatgcaacatacattgatggagga

SEQ ID NO: 80724 - DNA, 792 bp, Homo sapiens
ccagtaaataaatttcaggttttggaaaaagaccactttgtgtcactttccagaattccttctggtgattaccagtgtaatactgaataattttagaaagaataatgtcggaacctctcagaatgataagaaataagtgtggctatcatggtttaaaaaaaaaaaggaaatttaaagtcttattttacattggattttgttgctatgacatgattcctttttaagaaggagaaattggccgggcgcagtggctcatgtctgtaatcccagcactttgggaggccaaggcgggcagatcacaaggtcaggagatcaagacaatcccgactaaaaccgtgaaaccccacctctactaaaaatacaaaaaattagccaggcgtggtggcgggagcctgcagtcccagctactaggaggctgaggcaggagaatggcgtgaacctgggaggcagagcttgcagtgagcccagatagcgccattacactccagcctgggtgacagagcaagactctgtctcaaaaaaaaaaaaagaggaattaaatttgggaagcaacaaataataggagaggaggtgctaacttgcctagaaatgtgtgttaccagttagaggttattccttcatgactgttttcaaatatgttaagaaytcatatgaaaagaattccatggagggaaaagagatactaaaataacattatcttaaaacacaactcacattttccatacgacaataaaaatgtttctaactgggctgcttggttacagcttaaatgcaacatacattgatggagga

SEQ ID NO: 80725 - DNA, 1232 bp, Homo sapiens
cataagccccccactccaactccagctgaatatcagtggctggacaacatctgtgaaaatgcccaaataatcccagtgcaggaagccccacctgcagacgggaactcttaatagcaaaaactatgactttctgaaaagagagtctttgaaaaccaaaagctaatttttaaatattttataggaaaatgccaattaaccagaaaaaaactgcacagatttcttaattatcagtattattcctactacttacattagactttggagagaaaaggctgcaaatagcaagtagttgaaaggaattatattttaaaaatctaaatgttaaagctgatctgaggctaggttcatgttctgggtcatcttctataacttctctatcaatattatttttacagtatcttatcctccagtagagaagtttcttttatgggaatgaaatttcttctcagcaagggaatttctcttctattggaaaagctgccttccttaccccgttccctccctttctctctactttcctttctttcttttgtttttctcctctgggacttactttcctcttctgcaaaatggggttatagtatcattttcataggattgtggtgcgtattaaataatgaataatgcctagtaaacacccaatataaactacctcrttgttgctattgtttttatttccctcagagtctgggagggcaatgaatgaaatctgttttatctctttctcccatctggcttcaaacagctttcagagggtatagagtcagcacaaaatgatcggtgctgagaagcagagaaatcagggcatagagggcaagttcagcatctgggacagggtttgtgctctgtgagaacgggtcagttgtgggtcacaagaaataatcagcaaaaacaaggagctcggggtgattctgccaggaacactggatactgctgaagctcccctgctttagtgtgctgggagatggagatggcatcactcaaggtttttgggatcctgcaacatccatcctacatccattaagtaaatatacgttgtgctaggaactgcgaatacaatgatgaacaaaataagcagcccttcatttacagcttatgtggaaggtatatctaaatcaaattatcactctgtgagtatcaaattactgtctgtgaaaagtagtgtgaaaagaaagaagtgggtaatgtgagaacattttagttaacaattattgaacatttagttaccactt

SEQ ID NO: 80726 - DNA, 374 bp, Homo sapiens
tacaaataaatactagggtactttacccttcaatgagcagaattatcatgttagcagaataaactacagattgtacamatttgcagtagctacatcagtggtcataggattctgttggcatcttcatggaaatattagcatgagagcatgagtctactgaaagtttctattgacagtttctccttttttttcttttttttttttttttttttttgagacagcatctctctctgttgcccaggctggagtgaagtaatgtgatctcagctcactcaacttctgccttccaggttcaagcaattctcgtgcctcggccacccaaatagctgggattacaggcgagcaccaccacatccagctaactttttatattt

SEQ ID NO: 80727 - DNA, 1767 bp, Homo sapiens
cagacggctgttctttttatgaaatttaaatcttggaacaatgactgatagtataaagggaaattagctttacccaaggtttcacaagttcatcaaaagctttattctttaataatcaatagcaatgagtaagggttcttactgtggggaaagtctaaatcaacatatttttagaataacaaggttttacttttagtttcattatgagtgtctttataatagaatataactcttttagcatctgattgccaagggataagcttactgaaattaagatttctaaagttttccaaaataggcattaagctctcttaccaccttgataatatcacagctggaacttgtgactttctctcttgagactattttaaggatcttcaaatataccttcctaaaatcctacactgtgtcccgtgttttactaaacgttatgctctgtgagggaaggcaccttcagtgtcctgttctgcactaaatttccagtgccaagcatggtgcctatgtagtgaggtgaggcataaaatattaacacatctttatttcctggtaagtgacttttttctgtttgtcaaaggcatgcatatgaccatatagagaataaagatatttattgagagaaacagttaatactttgtttttacttttaaaaataggctctggaatctaaaaatgaaaataatatttctaaaggccaaacctaagactggataaaacaggcttatttaaggggaaacaaaaaatcattcaagaatccagaacaatgtagcaaattacaaatgtatcagaacaatagaattggaagaaaactgaagatgatctagattagccaaaatcctcacagatactcagataaccattgatgattctgacaagggaggtgagtgacctggaccttcatagaggtttctggggctggtgataagggctgtgcatctcagtgggccagagttatcattgagaatctgccccactcttctttcccatttgttgtcagtgccaaattgccagtgccaaattgctaactgaagacagagttcacatctgcagacattccctaactattcaagggagggttccacttagcctgtgcmgaggagctacttcatctgttcagctcattccaccgctacacgcctatgcttcatccagaaaacttcgagtgcgtctcctgagattttggtgagccccatctgaacttcgtgcacgagcatctaactacaatgtcccaatatacttttaggttccaaagtaaataaagatggggtcctggtgttcatatgggttatgataatgtgggagagaaacctgaattatcagcacctactgagatgaaagagtgataaaatgtaccccagtacacctcacataggaagggactaagaggccgggcacggtggctcacacctgtaatcccagcactttgggaagccgagatgggcggatcacgaagtcaggagatcgagaccatcctggctaacacggtgaaaccccatctctactaaaaaatacaaaaaaaattagctgggcatggtggcgggcgcctgtagtcccagctactcgggaggctgaggcaggagaatggcgtgaacccgggaggcggagcttgcattgagccgagatcgcgccactgccctccagcctgggcgacagagcgagactctgtctcagaaaaacaaacaaacaaacaaacaaacaaaaaaatggactaagaatatttcttaaacattcacctaatatcttttgtgactctctgttcatatgcacata

SEQ ID NO: 80728 - DNA, 396 bp, Homo sapiens
  misc_feature (1)...(396): n = A,T,C or G
annnnnnnnnnnnnnnnnnnnnnnnnnnnnnnnnnnnnnnnnnnnnnnnnnnnnnnnnnnnnnnnnnnnnnnnnnnnnnnnnnnnnnnnnnnnnnnnnnnnaaacaaactagtgggcactatattcactacgtgcgtgatgggctcaatcatatcacaaacctcarcatcacgcaatatacccatgtaacaaatgtgcacatgtaccccctgaatctaaaataaaagtcaaaattattttttaaagggtaagtaaaaatgaaaaactatggaaggtgaaattattttctcccctaggagcttgttcattggtttgttttcaaccaagctagaaagctttggagcaaagaacgatctcagaaaacgtattctatgtctttatgctctagcagagata

SEQ ID NO: 80729 - DNA, 811 bp, Homo sapiens
atccttatttgtcatcctgaaattgtcagttacagtttatgctctgataatgttcagayatccagttatagagctatcagtatcaagctcattatttaatgtattaacaacaaaatgacactctgtttccttgagcaagtctctttctctcttgcgagcttagttgaattgcctatgaatgtgagcacaaaaatgctttatttgcccaaagagaggggagggactagttcacctctttaggtactgtctcatacccagaatctagaattctatagtgatttatgaacttagagtttccagaccactgaatcaggatctatgtgcaagataaatgaatcaatgaggtagaaaaagagagcttcttaatttgagcaatgaaacccattaaataaaggaaaacttttaattggtatgtccaaaaattgaggactttgtccttggcctacatcggtagctattttgcatgtgtgtaggccaggcctgaatctccagtgaaaccctccctgaatccaggctcattcccagggctgactttcaaccccaaagatggatttttccctacatctcccatgaatctgtggtgtcaaccacaccatggcctctgccactgagttatttgttgtcttgaaccatttattcacaaatttcacttttttttttttttttttttttttttttgagacggagtctcgctctgtcgcccaggctggagtgcagtggcgcgatctcggctcactgcaagctccgcctcccgggttcacgccattctcctgcctcagcctcccgagcagctgggactacaggcgcccgg

SEQ ID NO: 80730 - DNA, 811 bp, Homo sapiens
atccttatttgtcatcctgaaattgtcagttacagtttatgctctgataatgttcagatatccagttatagagctatcagtatcaagctcattatttaatgtattaacaacaaaatgacactctgtttccttgagcaagtctctttctctcttgcgagcttagttgaattgcctatgaatgtgagcacaaaaatgctttatttgcccaaagagaggggagggactagttcacctctttaggtactgtctcatacccagaatctagaattctatagtgatttatgaacttagagtttccagaccactgaatcaggatctatgtgcaagataaatgaatcaatgaggtagaaaaagagagcttcttaatttgagcaatgaaacccattaaataaaggaaaacttttaattggtatgtccaaaaattgaggactttgtccttggcctacatcggtagctattttgcatgtgtgtaggccaggcctgaatctccagtgaaaccctccctgaatccaggctcattcccagggctgactttcaaccccaaagatggatttttccctacatctcccatgaatctgtggtgtcaaccacaccatggcctctgccactgagttatttgttgtcttgaaccatttattcacaaatttcactttyttttttttttttttttttttttttgagacggagtctcgctctgtcgcccaggctggagtgcagtggcgcgatctcggctcactgcaagctccgcctcccgggttcacgccattctcctgcctcagcctcccgagcagctgggactacaggcgcccgg

SEQ ID NO: 80731 - DNA, 747 bp, Homo sapiens
agtgtgcattgctaatgagttccctgacgatgcccatgctgctggtctgcagacgacacactcacacacattgctgggggtgattttgcaccactcccctttgaacatttcgcagtgtctcgagacattctgggttgtcacagctggagggagaggcaagggagyggggagatgctactgaaatctgataagtaggaagcaggggacagccccatccccccgtggccaacaaagaattatctgacccaaaataccaatggtgctgaggttgagaaaccctgcctcaaagatctcttccttggctgtctagtctctgatatcttcttcttgtccctctgtcatccccatggccttatagtcccacctgtcctcacttgtttatttccactgtcccttcttggttccgacttcataacctcccatatgcattacttactacaatagcttctttttatttacttactttttagtgcttatgtttcattattttttccttctttttttttttttttttgagacagggtctgtgtctgtcacccatgctggagtgcagaggcaccgtcatagctcactgtaaacttgcactcccaggctcaagtgatcctcccacctcagcctcccaaatggctggtactacaggtgcatgccaccacatctggctaatttattttttttattatttttttctgtagagatggggtcttactgtgttgtccaggtttgttttgaactctttgtatcaaggga

SEQ ID NO: 80732 - DNA, 747 bp, Homo sapiens
agtgtgcattgctaatgagttccctgacgatgcccatgctgctggtctgcagacgacacactcacacacattgctgggggtgattttgcaccactcccctttgaacatttcgcagtgtctcgagacattctgggttgtcacagctggagggagaggcaagggagcggggagatgctactgaaatctgataagtaggaagcaggggacagccccatccccccgtggccaacaaagaattatctgacccaaaataccaatggtgctgaggttgagaaaccctgcctcaaagatctcttccttggctgtctagtctctgatatcttcttcttgtccctctgtcatccccatggccttatagtcccacctgtcctcacttgtttatttccactgtcccttcttggttccgacttcataacctcccatatgcattacttactacaatagcttctttttatttacttactttttagtgcttatgtttcattattttttccttctttttttttttttttttgagacagggtctgtgtctgtcacccatgctggagtgcagaggcaccrtcatagctcactgtaaacttgcactcccaggctcaagtgatcctcccacctcagcctcccaaatggctggtactacaggtgcatgccaccacatctggctaatttattttttttattatttttttctgtagagatggggtcttactgtgttgtccaggtttgttttgaactctttgtatcaaggga

SEQ ID NO: 80733 - DNA, 998 bp, Homo sapiens
tgcattcacacataattgcaatattttagatatctttaaaactcagaggaaggagaaaaagacagggcagagtgagagagaaaaataacttattgcgagatggccacagattttcctgccccaccatctgctctgctgtttttgctgcatcctttcaatgtgaagtttgcacacatccccagagctctgtgaagtttgcacataaagttcattctcccctgccaagctgtcaagccaaaccccaacctcccccttaaatttgatttcctgttgcccgctactaccaactctccttggcctctcccctaaatctccttgagtttccttgagtctaagtttcatacttgctgtatgaagacaacatcatcatcgatgttgtcttctctcttctaatcaagcctcttattccttccagatccagctcaagcccaagaacgtaaactgcccatagggagagacttttttgtctattctgttcactgttatatccccacaattactgacacatggtagctgctaaatcaatatttgctaaatgaatgaaaagttaagcctactcctgactcttagcccattttaccacctgccaactrtggtgatatctgtagctcttatcacctgcacttgcatctttccttattcactccctaatctaatcagacaactgtgcccatttttttcatctcatctccagtagactgaagcattctgtaggataaggatctcttccaattcacttttctttgagccaccatccacatccacatcattcagttatgctgtcaactgagtattttaattttaaattcttcagcatcaacaatgtgataaatctgtttgtcagttttcatcctctgccacccccaagtacaggggatagttcatttgaaatctctaatcaagcatccacacaccaccagcattcagccaacattatattcaatcaactaactcccaagagcttaagggatgcttgaaattatttttcatcactgaaa

SEQ ID NO: 80734 - DNA, 746 bp, Homo sapiens
  misc_feature (1)...(746): n = A,T,C or G
atcacataaacctgtcaagaggatgaaataaattcacgttcataaagttcttagctaagaaagtgttgtctggccgggcgcggtggctcaggcctgtaatcccaayactttgggaggctgaggcgggtgtatcacctgaggttgggaattccagcctgaccaacatggacaaaccccgtctctaccaaaaatacaaaattagcctggcgtggtggtacctgcctgtaatcccggctactcgggagactgaggcaggagaattgcttgaacctaggaggcggaggttgcagtgagccgagatcatgccactgcactccagcctgggcgacagagcgagactccgtctcaaaaaaaaaaaaaaaaaaaaaaaaaaaaagaaagtgttgctttgagagctggttcaccattaactgtggcagggaaggtaggggtgttatggtcacagcgggtgtaaactccgagggggacgtggggtcttctgggaggccaggagattgctannnnnnnnnnnnnnnnnnnnnnnnnnnnnnnnnnnnnnnnnnnnnnnnnnnnnnnnnnnnnnnnnnnnnnnnnnnnnnnnnnnnnnnnnnnnnnnnnnnncaggagccagcgcagcccaaactgcctggtgactcaccacgaggcccaggggaaggaatgaggcccaacaaggccctggggaccgggcgaaggaacgagccctgggagaaggaatggcagcagccctcttcacctgcctggtgact

SEQ ID NO: 80735 - DNA, 746 bp, Homo sapiens
  misc_feature (1)...(746): n = A,T,C or G
atcacataaacctgtcaagaggatgaaataaattcacgttcataaagttcttagctaagaaagtgttgtctggccgggcgcggtggctcaggcctgtaatcccaatactttgggaggctgaggcgggtgtatcacctgaggttgggaattccagcctgaccaacatggacaaaccccgtctctaccaaaaatacaaaattagcctggcgtggtggtacctgcctgtaatcccggctactcgggagactgaggcaggagaattgcttgaacctaggaggcggaggttgcagtgagccgagatcatgccactgcactccagcctgggcgacagagcgagactccgtctcaaaaaaaaaaaaaaaaaaaaaaaaaaaaagaaagtgttgctttgagagctggttcaccattaactgtggcagggaaggtaggggtgttatggtcacagcgggtgtaaactccgagggggacgtggggtcttctgggaggccaggagattgctwnnnnnnnnnnnnnnnnnnnnnnnnnnnnnnnnnnnnnnnnnnnnnnnnnnnnnnnnnnnnnnnnnnnnnnnnnnnnnnnnnnnnnnnnnnnnnnnnnnnncaggagccagcgcagcccaaactgcctggtgactcaccacgaggcccaggggaaggaatgaggcccaacaaggccctggggaccgggcgaaggaacgagccctgggagaaggaatggcagcagccctcttcacctgcctggtgact

SEQ ID NO: 80736 - DNA, 995 bp, Homo sapiens
acagataccccactaaataccactgaagtatcaaaacaaatactttccagcaaacagtgtaagatgcaaaccatcagcaagagaaagtgtttatctaaaacagtggaagatggagagtggayaaaaactgttaaagtgtaagatggaacagaaacaaaagacaccacagtctggagaacagtgaagatgccaagagggtcctctttggaatcccacaggggcccctgattccacattggcaaatatagtggtagatgggagagaaaagtgaggttgaatgcaagaaaactgattaacattttgtgtatggaatattcatctccatttccctacctccccccactgagtagaagttagaatgctttgtatttacctcagtggaaaacaaagcaaaggaatcttctctaaataaatttagctaacctccaaatgccaagctttccagtgtcgttgctgatgctggcatcttgagaagaaactgaggtggagcaggaattctgcaatcactgtgacccgacgttatacattcagcatggtggtgtacaaagccagaaaggacctagatccttgataactctcttgaatagccctggagcacttacctctggattcttcattatgttgagaattaaacaaatctctatgtagctaagcaaccgtagagaagttttctgttacttgcagctcaagacaattctcaatgatatactggaaagtaagaggcagaaaaagtatgctaaatccttagcttctataaatatatttaaggaagacatagatgtgttaacattatttagtgttacagaagtaattacaaaaagaaataaaagtaggagatgttagatgtgcctgcctctggacagggagcaaactgtagagagggactgatggtcatctgaatttatttattttgtaattgacagataacacttaaatatatttattgtgtacagaataatgtggtgactatatatatatatatatatatatatata

SEQ ID NO: 80737 - DNA, 995 bp, Homo sapiens
acagataccccactaaataccactgaagtatcaaaacaaatactttccagcaaacagtgtaagatgcaaaccatcagcaagagaaagtgtttatctaaaacagtggaagatggagagtggacaaaaactgttaaagtgtaagatggaacagaaacaaaagacaccacagtctggagaacagtgaagatgccaagagggtcctctttggaatcccacaggggcccctgattccacattggcaaatatagtggtagatgggagagaaaagtgaggttgaatgcaagaaaactgattaacattttgtgtatggaatattcatctccatttccctacctccccccactgagtagaagttagaatgctttgtatttacctcagtggaaaacaaagcaaaggaatcttctctaaataaatttagctaacctccaaatgccaagctttccagtgtcgttgctgatgctggcatcttgagaagaaactgaggtggagcaggaattctgcaatcactgtgacccgacgttatacattcagcatggtggtgtacaaagccagaaaggacctagatccttgataactctcttgaatagccctggagcacttacctctggattcttcattatgttgagaattaaacaaatctctatgtagctaagcaaccgtagagaagttttctgttacttgcagctcaagacaattctcaatgatatactggaaagtaagaggcagaaaaagtatgctaaatccttagcttctataaatatatttaaggaagacatagatgtgttaacattatttagtgttacagaagtaattacaaaaagaaataaaagtaggagatgttagatgtgcctgcctctggacagggagcaaactgtagagagggactgatggtcatctgaatttatttattttgtaattgacagataacacttaaatatatttattgtgtacagaataatgtkgtgactatatatatatatatatatatatatata

SEQ ID NO: 80738 - DNA, 711 bp, Homo sapiens
tttagtctttcattttcccactgaaaggcaggccagagccagtgaggcaggtgtggagatgtgtccctcagacctcacctcaagggagacctgccataaagagtacarctagtgatgggtttctctttggaggcctctgagttctaccacagtaaggtcgtgctcttcctgaacagctcccaaccaatgaatgagcatcatattggtactaggtcctggccatttttgcccaatgtagaaatcctatatgagctggctctctccattggactggcaaaaactatcccagaactacgtcagagcccaaggttcttcctcccaaatctgccttccttttctcttgacataggtcttagatccacactgtggtctgaagtcttttcctgcttcccctgattactctccccttatctttcacagacattaccaccagtaaatttcttgcacttgtaactggattttgcttatgctttctagatgagatcatctagatctcatccagatgaatacagccatggcatctgctagacataatgtggattttattccagaggaagtagcctttcccccttatttagctttccctttttaccttgttatagtaagggtaaaggaaataaagaaatatcatctgccaagaagtctgggtttgggatgccagctgtttataagagttgtctgagaaaaccagctgctctgattctggggaaa

SEQ ID NO: 80739 - DNA, 711 bp, Homo sapiens
tttagtctttcattttcccactgaaaggcaggccagagccagtgaggcaggtgtggagatgtgtccctcagacctcacctcaagggagacctgccataaagagtacaactagtgatgggtttctctttggaggcctctgagttctaccacagtaaggtcgtgctcttcctgaacagctcccaaccaatgaatgagcatcatattggtactaggtcctggccatttttgcccaatgtagaaatcctatatgagctggctctctccattggactggcaaaaactatcccagaactacgtcagagcccaaggttcttcctcccaaatctgccttccttttctcttgacataggtcttagatccacactgtggtctgaagtcttttcctgcttcccctgattactctccccttatctttcacagacattaccaccagtaaatttcttgcacttgtaactggattttgyttatgctttctagatgagatcatctagatctcatccagatgaatacagccatggcatctgctagacataatgtggattttattccagaggaagtagcctttcccccttatttagctttccctttttaccttgttatagtaagggtaaaggaaataaagaaatatcatctgccaagaagtctgggtttgggatgccagctgtttataagagttgtctgagaaaaccagctgctctgattctggggaaa

SEQ ID NO: 80740 - DNA, 1463 bp, Homo sapiens
tgcatgaacgtcttggctgatgctctcaagggcaaacaccaggttcttattaggctgtgctcccaagtcatggtctggttctaagtgtgaagatgaaacatgatcacattgaaaatttgaaatcactggtcatcacagagctgggaaaattactgtaaacctcacaggcaggttaaaactgcccctggaatgattggccccagatgtgatgtgcaactcaaagatctagaaaaatgacaggataatctactcctatcccaatagtttggtttcaaagtgaggttgtactgacaacctcagctggcatcatggaccatgaagaaagagatgaaaatacaggagggaaaatcctgggattctttttttttttttttttttttttwaaatttagagacagggtctcactccatcacccaggctggagtataatggagcagtcacagctcactgcaggctcaaactcctgggctcaaggtatccatccttcaggggtttcttttctagggatgttaatacatgtatacaaacaaaatgactcaatgggggaaaaaaagggaataatagtttatagccagaatgtgaaggcttttcaacaagtcatatgaaagaatctgtatcttatcctaactgttgaaagggaacccttgaaagattaataagctgatacataaaaaaaagattggctcaatagacacacaactcttgaagttacgtatgaaataggaagtcagaaaaataaagtttatgtctcactactgaggtgagacaaagatgtttacctaaagcactgggcaaggatgtcaagagaggcacaagacagagacctgcaggttgccaaatttagcaaacaacaaaaccaaaaacaacaaaaaacaagaaaggataaatctgagtttttttttaagaagaattttttagtgtgtcttagcaagtcgtatctgagatacactagaagtatactaaaaaagtattcactattgatctgaaattcaaatttaactgagtatcagccaattatctacaaataagataataagatttgaagaacagggaaggaaaatgtctatgcatgaggaaagattaagactaaatgaactatcaaggcctggtcagcacagccaagacatgtgcttacctgcattgtgactagcctgtcatccaccatcacctccttggtcagaaagtcagctcctattgtggctttgtactgattgctgaatttcttattcacatactggttcatgagtgatgtcttcccgactctgaaattggagaaaaaccataagtataagtcaaataggagggtcctgaaactgacacgaattacttgaagcatttaaaagaatctgcctgacctgaaggacaagaaactgccctcacagcaaagggcaatgccagtagccttccgagcattacacttttgaagttttgtgttttctctctgggtaaaaatatagggtaca

SEQ ID NO: 80741 - DNA, 576 bp, Homo sapiens
ttagcctaagtgtggtgaacagctacagagagttctaaatcaagaaatgttacagcaaaagtgcttcaaacaacttgattatgtatcttataaatcagtacaaatgtacattctttactagtcagttatctttcctggcaggtatgattataacttgaccttgttcagtcttctcctggctataaagcagagagaaactgatttggtcartcactgattcctttagtggtattgagggcacacactggagaatggcgaaggaaacaagaactggccaccaaccatggagctgtgcttcctggtgccctggactacaggctaagagaagatgacctattctaggctggtagaagcttgttcacatatccccatttacaggttctgtagatccttgtggcgagtgagatttccacaatatcgtgagctttctggcaaaaagctgaagtgaattctgctccattgtcactttggaagatacatggggcagctagcaagcagaaaaaatattttctggtgtgtaaccttagttgcagttagaatatagtctcagggcacaaatattgatcaagaggatgt

SEQ ID NO: 80742 - DNA, 725 bp, Homo sapiens
aactatcaccatcttaagaaattaaacagtacaaatacatgaaacttcctttcttaaggtaagctttattcctgagtttgatattaagatataaatgttcattctgtatgtatgaaaatataatcaaaatgaccatattgaagtatmcacatgtagcttagtttggcttcatttttcaggtataaatttatgttttttttgagatactccatgcttgtatatgtagacaaggtttttttcattttcatttcagtatttcataatatatttatccattctactttgctagacatgtaggttgtttctaatgttttcaatactacagatcatctctgcattgaaaatcattgcatagggcggatcacctgaggtcaggagttcaagaccagcctggccaacatggtgaaaccccatctctactaaaaaaacaagaattagccggcagggtggcaggagccggtaattccggctactcgggaggctgaggcaggagaattgcttgaacccaggaggcggagtttgcagccagctgaaatggtgccactgcactccagcctaggctacagagccagactccctctcaaaaaaaaaaaatcattgtgtattaccttctaatatagtatatatatgcaagctattctacagggtatattcctaggagtgagataacttggtaattacttggaaattactaaattgctccccattcaaattactaaattgct

SEQ ID NO: 80743 - DNA, 1044 bp, Homo sapiens
ctcaaataaacttgttagattttaatatgcctaaatttatcttttaagacaaccaaatatagctgtaaatagtagaaaaatgagttcagctctcccaggtttgtgcatattccccttttgaccttctcagttagttgcttckacagtgtttttcacacctggctgattatcagaatgatgtctattatagtgatcacattgttggtcctatcccaaactttctgaatcagcgtatcttttttttttttttttttttttgaaacggaatcttgctctgtcacccaggctggagtgcagtggcacgatctgcttggctcactgcaacctctgcctcccaggttcaagcgattctcctgcctcggcctcctgagtagctgggattacagacacacaccatcacacctggctaatttttgtatttttagtaaaaatggggttttgccatgttggccaggctagtctcgagcttctgacttcaagggatccactgtacctgaccttttttttttttttaaatagagatgtggtcttgctatattgcccaggtctcaaaactcctgagctcaagcaatcctcctgcctcagcctccaaaagtgctgggattacaggcatgagccactgaaccaggccccgaatcagcatatctgaaggtcaggaactaggaatccttacttaacgaacctcccagatgactgtggcactctgaagtatgagagccactgctctgcgcagtcttattccatactgttttgctccagccataccaaactacttgatctaggcaattacttcatatccttattccaccctgtgcataactctggttcatatttgttactgcgctatagtatgattgtggatttatttttctccactagattctttcctctttgaaaacagatactgtgttttattttattttacattcctggcacctggcatagttcttgaaagcatgtagtaagtactcaaaaatatttgttaaagaagtaaaaaagcagtttgttccttgaaactattctgtatgctgcaataatggtgga

SEQ ID NO: 80744 - DNA, 1044 bp, Homo sapiens
ctcaaataaacttgttagattttaatatgcctaaatttatcttttaagacaaccaaatatagctgtaaatagtagaaaaatgagttcagctctcccaggtttgtgcatattccccttttgaccttctcagttagttgcttcgacagtgtttttcacacctggctgattatcagaatratgtctattatagtgatcacattgttggtcctatcccaaactttctgaatcagcgtatcttttttttttttttttttttttgaaacggaatcttgctctgtcacccaggctggagtgcagtggcacgatctgcttggctcactgcaacctctgcctcccaggttcaagcgattctcctgcctcggcctcctgagtagctgggattacagacacacaccatcacacctggctaatttttgtatttttagtaaaaatggggttttgccatgttggccaggctagtctcgagcttctgacttcaagggatccactgtacctgaccttttttttttttttaaatagagatgtggtcttgctatattgcccaggtctcaaaactcctgagctcaagcaatcctcctgcctcagcctccaaaagtgctgggattacaggcatgagccactgaaccaggccccgaatcagcatatctgaaggtcaggaactaggaatccttacttaacgaacctcccagatgactgtggcactctgaagtatgagagccactgctctgcgcagtcttattccatactgttttgctccagccataccaaactacttgatctaggcaattacttcatatccttattccaccctgtgcataactctggttcatatttgttactgcgctatagtatgattgtggatttatttttctccactagattctttcctctttgaaaacagatactgtgttttattttattttacattcctggcacctggcatagttcttgaaagcatgtagtaagtactcaaaaatatttgttaaagaagtaaaaaagcagtttgttccttgaaactattctgtatgctgcaataatggtgga

SEQ ID NO: 80745 - DNA, 1044 bp, Homo sapiens
ctcaaataaacttgttagattttaatatgcctaaatttatcttttaagacaaccaaatatagctgtaaatagtagaaaaatgagttcagctctcccaggtttgtgcatattccccttttgaccttctcagttagttgcttcgacagtgtttttcacacctggctgattatcagaatgatgtctattatagtgatcacattgttggtcctatcccaaactttctgaatcagcgtatcttttttttttttttttttttttgaaacggaatcttgctctgtcacccaggctggagtgcagtggcacgatctgcttggctcactgcaacctctgcctcccaggttcaagcgattctcctgcctcggcctcctgagtagctgggattacagacacacaccatcacacctggctaatttttgtatttttagtaaaaatggggttttgccatgttggccaggctartctcgagcttctgacttcaagggatccactgtacctgaccttttttttttttttaaatagagatgtggtcttgctatattgcccaggtctcaaaactcctgagctcaagcaatcctcctgcctcagcctccaaaagtgctgggattacaggcatgagccactgaaccaggccccgaatcagcatatctgaaggtcaggaactaggaatccttacttaacgaacctcccagatgactgtggcactctgaagtatgagagccactgctctgcgcagtcttattccatactgttttgctccagccataccaaactacttgatctaggcaattacttcatatccttattccaccctgtgcataactctggttcatatttgttactgcgctatagtatgattgtggatttatttttctccactagattctttcctctttgaaaacagatactgtgttttattttattttacattcctggcacctggcatagttcttgaaagcatgtagtaagtactcaaaaatatttgttaaagaagtaaaaaagcagtttgttccttgaaactattctgtatgctgcaataatggtgga

SEQ ID NO: 80746 - DNA, 654 bp, Homo sapiens
aaggcttgttactttaactctgtaagtatcagcttcccccttaataaagcaggaataaaaatatccacatcaaatggaagattgtccgagaaattatgtaacgtaagtcttggtatatggtaggtactcagaaaatattaggtctcttctcatttacttcctgtgtagctaataaaagttcttccaaattcatcagcaggtgctaagttttgaaaaataaaaaactagacctagacaacttggtctaggyagcggaaacgaagtatctaagcaatgcagacaaactagtctgaatggaaaataaccttgacttgatcagaatatttactagcctctatattctaaaccaaaaatctgaactacgaatttaagaataaactctaaattcaacaaccatccaaattctctaccacaatctatacaacacagagaaaacctaagtatgaaggtaaataaatatccttgagttgttcatctttctgatttgctcgttatctttatctgttacccaggtgcataatcgtgttattccctacctttttaaaaagttacgtagaaaatttaagaattcaaagaatctatgaaaataatttctatacatctttaatttcccttcttacatattggtattatggctataaattgtctatattg

SEQ ID NO: 80747 - DNA, 2024 bp, Homo sapiens
tgtatattcacttcatttttgcattctatactgttttcttaacatctgacattacatttcataaatgggaagcactctgttatttcagcctattctctgtaaaagtcaaggagtactctgggcttaatggttacatgtgattcaattaaacatactttaaatgaaaactcctaaaaatgtatcatttgccttcaaccattttattatttttattattgtttttattaagaagatgggaatcttacaggaaattactcataacatcctagttagtgtttacttagagtatctggtttaaatttgcttctaaattaatgtgtggtgactacaactttattctactcacacaacttaaaatatctgtagcaccaaaaaaaagaccacaagctgcctaaaaatggtctaaagtgtaaacattaaagtaaatgctagaagtcaacagctcatttgcttctatttttctgatttctctagaaaaatctgaagtcagaaaattctgccygctaccatcaaatacctcttagtcaaaaatgtgacaatgtgactttgcaaagtagtgaatacttcatagaacagacatctgaaaatcatatatatttttccccatcatcaaaaaatagcaatcctaaacagatggttaaattagaactgaaacacaaagtttaaaaacactgattcactgtttcctctcacagatacgttttatgtggaaagttcaggttttaattagatttttctaacaaaatcattgacgactcacattccaaaatttgtcagaccaaaaaataagagtatatggtaatttgttgaatgcaataaccctaaatttaaattcaatgctaagagttcaatgaaaagagagtcattttgctggcaataaataaaggagaagaatacaaggactgtatgcttatatcctgtttctaccatgtttctatgcagtgttgagcaagtcactatattctctcaacttcagtttctaccatctgtagaaatgggcaccataaatacacttgcaaatgtgaattataactaccattttttaaagatccatatgttgtataagaaaacgatttcaagtgtttttatccaacataatgacagctttaaaatgttactaggtgtcactttatagatgacttaaataaatcttttcatgggaaggaacaaaaatgcatttctatgcatcctgatctattcaacacaagttcctatcaattgctatagccttagctgtctcataatttctggtcttaaactatctcttaattgtttcattgaagtttttctcatcttctgaaagaattaatagcagaaaataaggtcctctaaagagaactaagcatagctattgaaacaagtaagtattaaatgagatagctcagtgtctccaattaacactggccagaaatggttcttactgattctgatcaatggaaagaacaggactggtaaccctgagtcctatttccatttctacccaaggatagctgggagctcttaggtaagtcagttaactctttgggccagaacctcatctataaaataaggtattgggagctgaccttctgtttaagattatgtttaagctgaccttctgtttaaaattcttataaactttaacactgataccaaatgttttttggaattactgatatggacagtacacacggaaatatggggtagaagaggggcagctgcccacaaaggctgcaccctcaaggctggaaaccatggccctaaatgagaacaaaaattcctgtttttgtgcccataagttgccttttggcccacccatccctctatctggtacccatataaaccccaaacccctggctccatgagcagaaaagaagatgaacagaagggcagaagaatggcagaatggtgtgacagacaaaagagaggagcatctgaacatcgagaggagttacactggggacggttggagaggagatcagctgctggatggccaaactccaggggaagatcatcttcccactccatcccccctccagctcccc

SEQ ID NO: 80748 - DNA, 1252 bp, Homo sapiens
tatcctttgtaatatcctgtacagtaaatgggtaaacgtaagtaaagtgtttccytgggttctgtaagctgctctcacaaattaatcaaacctgagaagggggtcacgggcacccttaacttatcactggtctgtcatcagtataggtcacaagctaggacttgtgattagcatgtgaagtggggggcagtctgatgggactgagccttcaacctgtgggatccgacactatcttcaccaagtgccggaatagaattgaattagaggacacccagctggtgtctgctggagaattgtttggtatgtgaggaaacaaccctaacacagctcatgtcagaggggttgtgttgtgtgagaataggaaaaacactagggtttttcttagcctttacaacattctgttgggaggaggcagacaataaaaaaatgaacgaaataaataggtaaatcacacagcttgttaaaaggagataagttgtaaggaaaaagagaaacaaaaacaaaaaagaagagttaggttaatgcttatacgttaaagggagctagatgttctgtggcagggttggggaaattgcaatttaagtacagtggtcaagttggcctcatgtaggagtaacatttaggagtaacttgagggccatgagggagttaagcgtgaggatttctggagaacattccaggcaaaggaaacaatgaatgcaaaggtaagagcatctctccaggtattcaaaggtgatgttcctacaaattgagattagaatgtttttcctaaaatcagtctttcattattaagctcctgtctattcatactgtttggttttttgttgtgttttgttttgctttttgtttttgtttttgttttctgagatggagtctccctctgtcacccaggccggagtgcagtggtgcaatctcggctcactgcaacctccatctcccaggttcaagtgactctcctgcctcagcctcctgagtagctaggattacaggcatgcaccaccatgcctggttaatttttgtttttttagtagagacagggtttcaccatgtttgccaggctagtctcgaactcctgacctcaggtgatccatctgcctcagcctcccaaagtgctaggattacaggcgtaagccaccacacctagtgggtttttgagataatttaacaatattagaaacagatggtctctctcagtgactctgcatctctagaaatgataatacagtactttttacatccaatgtatcttttt

SEQ ID NO: 80749 - DNA, 553 bp, Homo sapiens
tgtcgatgaccaagaaaacattggcagctaagtatggcttagtatggctgtgtactccacatgcattttatcatttgatatttacagcaaccccaagaagtagacatgacaggtcttctactcctttccacattcaaaaactgaaaaaatctggaagactagagaaaaactgcaagtgtttgggtcagggcaatatctgayctgaaatgacataaggctgtttttattatgtatttgtctcattaagtatgaatattaatatgtcctgctacagaatgtaaggtgtttgattatggagtgcttcctcagatcccactgggatggttacataatacatataccttttaaaaaatcagaaaaatttgaaacccatctggcctcaggatttttggataagagatgtaaaactgtattatctgacttttactgaagagcagtggttcccaacctttttggcaccagttagaccggttttgtagaagctaatttttccatggggtgaggctggtgggtagggaatgcagatgggttttgagatgaaactgttttacct

SEQ ID NO: 80750 - DNA, 647 bp, Homo sapiens
tctgtgagcctcaagggtgggttgaaaaatgagcttttctcctgggcaaactgctgctttgtgggaaggttctgcctagtgtccacccccatatctccttaagtttgtataaaatccatcatttatcaaaaccctggttgcactgtctgatatgccatttgggagaagaggctcagggaaggcaagaggcatcagagtcctaaatttgagggcacctgcagatcgggatggggaggctcctcctctcatttggagaggtgctcagggactctgcataaaccttgagcttgactctcagattttgtgggcttagcccattaccaatgctgttgcctgcaatctggggcccttaattataatttttagcagctagaggcagggaaaggaagttgctttgtgactcatgaagtcacataggcaggggagcagaagaaccacaaataagagactccacttggcaaaaaccaaattgcttcaaggctattcttggaaacttaaagcatcacatcttgtttcttyccagaaaatgcagaaagcctcatatttctggctagttggttttatttctattgcatatcaaacctcaaaagggcaacagctgggtggtggttaacaaggaaaactttaataagagctagttaccagga

SEQ ID NO: 80751 - DNA, 2122 bp, Homo sapiens
aaaacaaaaaacaaaaaagccaccccagagagctcctgtgctttctttccaataagaagttggcagtctgcaagccatagagggcccacaccagaaccatgctggcaccctgatcttggacttccagcttccaaaattgagaaataggcggggtgcagtggctcacgcctgtaatcccaacactttgggaggctgaagcaggcagatcacttgaggtcaggagtttgagaccagcctggccaacatggcaaaaccccgtctctactaaaaatacaaaaattagccaggtgtggtgtcatatgcctgtaatcccagctactcgggaggctgaggcaggagaatcgcttgaaccccggaggtggaggttgcagcgagccaagatcacaccactgcaatccagcctgggctacaaagacagattccatctctaaataaataaatgctgttgtttttaacccacccagtttatgatattttgctatagcagcctcaacaggctaaggcaactgtcctgtggattattaactagttggctctttatacaaattctattgagcacctagcacgtaccaattaccagtctattcactgcaataagcaagccagacagggtccctgtcctcctggagctcatggtctggagaagcacctggactgttctttggtagtggcatctgaatccagagcttcctgagttttgctcctagaggaccttgtgcagagctgcctgctgagggggaacagcccaatggcttcctagcgcacttgccaaatacctgcctccaagccgtctgcttcttccatcaggtccttgcttttggatcccagagacttcatttcctgccctacttttccttccaagagctcagtggagagttctcttcctaaaaaaagagaagcttwcttcttcagcagtgttatctctgggtctcaaccataaggctggaattttcccactcagccatggagtagtgttgccctttccatcttcctgaagccagagcatgcaacatgtggtagaagccattagtaagagatgggtagcagtcaagggcatggccccaagtctggactcgtggctactggggagaaagggaaattgatgaagctcctatagtgtgactgctattgtgtgctacattcacagaatccccaactgccctatgatgcagaccaggctctccaaggctgggtcctgagaaatggtactttcttcagatgttaatagattctgtgtgcaattttgggaaattctatagttctttgttcagtgcctttaataggctaatgtgcatggtgaaactcaaagggggaggttatgacaggcagtctcccccaaatttatttcacccaaatgccccatactagattgaatagtgtccccccaaaattcaagtccacccagaacctcggaatgtggccttatttggagatagtctttgcaggcataattaatcaaggtgatgccacgctggagtagagggagccctaacccaatgacggatgtccttagaagacgagaaaacagagacacatggcgaagaaggccatgtgatgagagggtcagagactggagagattcatccacaaaccaaggaacgtcaaggggtgccggaaacccccgaagctaagaagaagcaaaaaaggagctttcccctcagggttcagagggagcatggcctggctgacacctcgattttggacatctagctccagaactgtgagaaaataaatttctgttgttttaagtcacctgggttgtggtcatttgttacagcatccgcggggaactaatatgacccctttataccttgaatcctattaaccagtgatacaggttaccactttgaaaataggcaatgtggttgtccccactttacagatggggaaactgagattctttgaggatcagtagctttcctcaggctccacagagtgtggcttccatagcagtgtcagagctcacacctgggtctctgcgtccgcagtgtttaaccctctccctggtgccacagctgcatccttcagacccgggctttcgtggtttctagtgagtctcaggtgtctgtttccaaagtcgttgctccccttcctgcctggcacactgcagtgacaagccagc

SEQ ID NO: 80752 - DNA, 2122 bp, Homo sapiens
aaaacaaaaaacaaaaaagccaccccagagagctcctgtgctttctttccaataagaagttggcagtctgcaagccatagagggcccacaccagaaccatgctggcaccctgatcttggacttccagcttccaaaattgagaaataggcggggtgcagtggctcacgcctgtaatcccaacactttgggaggctgaagcaggcagatcacttgaggtcaggagtttgagaccagcctggccaacatggcaaaaccccgtctctactaaaaatacaaaaattagccaggtgtggtgtcatatgcctgtaatcccagctactcgggaggctgaggcaggagaatcgcttgaaccccggaggtggaggttgcagcgagccaagatcacaccactgcaatccagcctgggctacaaagacagattccatctctaaataaataaatgctgttgtttttaacccacccagtttatgatattttgctatagcagcctcaacaggctaaggcaactgtcctgtggattattaactagttggctctttatacaaattctattgagcacctagcacgtaccaattaccagtctattcactgcaataagcaagccagacagggtccctgtcctcctggagctcatggtctggagaagcacctggactgttctttggtagtggcatctgaatccagagcttcctgagttttgctcctagaggaccttgtgcagagctgcctgctgagggggaacagcccaatggcttcctagcgcacttgccaaatacctgcctccaagccgtctgcttcttccatcaggtccttgcttttggatcccagagacttcatttcctgccctacttttccttccaagagctcagtggagagttctcttcctaaaaaaagagaagcttacttcttcagcagtgttatctctgggtctcaaccataaggctggaattttcccactcagccatggagtagtgttgccctttccatcttcctgaagccagagcatgcaacatgtggtagaagccattagtaagagatgggtagcagtcaagggcatggccccaagtctggactcgtggctactggggagaaagggaaattgatgaagctcctatagtgtgactgctattgtgtgctacattcacagaatccccaactgccctatgatgcagaccaggctctccaaggctgggtcctgagaaatggtactttcttcagatgttaatagattctgtgtgcaattttgggaaattctatagttctttgttcagtgcctttaatagsctaatgtgcatggtgaaactcaaagggggaggttatgacaggcagtctcccccaaatttatttcacccaaatgccccatactagattgaatagtgtccccccaaaattcaagtccacccagaacctcggaatgtggccttatttggagatagtctttgcaggcataattaatcaaggtgatgccacgctggagtagagggagccctaacccaatgacggatgtccttagaagacgagaaaacagagacacatggcgaagaaggccatgtgatgagagggtcagagactggagagattcatccacaaaccaaggaacgtcaaggggtgccggaaacccccgaagctaagaagaagcaaaaaaggagctttcccctcagggttcagagggagcatggcctggctgacacctcgattttggacatctagctccagaactgtgagaaaataaatttctgttgttttaagtcacctgggttgtggtcatttgttacagcatccgcggggaactaatatgacccctttataccttgaatcctattaaccagtgatacaggttaccactttgaaaataggcaatgtggttgtccccactttacagatggggaaactgagattctttgaggatcagtagctttcctcaggctccacagagtgtggcttccatagcagtgtcagagctcacacctgggtctctgcgtccgcagtgtttaaccctctccctggtgccacagctgcatccttcagacccgggctttcgtggtttctagtgagtctcaggtgtctgtttccaaagtcgttgctccccttcctgcctggcacactgcagtgacaagccagc

SEQ ID NO: 80753 - DNA, 629 bp, Homo sapiens
tccctcctactmctcagcaaagtctttgtgtagagatctgataagcccttagggtgccctgactgcagccaacaatagaatttgtttagccatcttgctattcctttcttcacgtgcaaaacttgttggaggccagggagagattctctgtccatttcctcttgctgggtgaagtgtcccacaaggcagagtgcacaagcatgcgtgacctcttggaggagactagaaaggaggcataagctacgatgatgtcactgacattaattgttgggctcttgtttttaaaggaacatggcaacccgtgtgtgtctcatcccagaaagagaagactttaaccactgtgatgcctgagaatccagtgagtaagtcacagtggtggatcttgtttaccgtggagtagctcctgggggctggtcctaggcttaggaaagtgtgggatgttcccaccatcctggggcagcttgctgtgcccagggcgcgctgttccctctgagtcagcaccacctcctctgcactcccctagcgctgtgttcttgcctcagatacaccactgagttagggtttgttcacctgcttgtcccacctaccggctgtgggagcctcaagggcaaggaaccagactcccgcct

SEQ ID NO: 80754 - DNA, 732 bp, Homo sapiens
atatcctgctcttttcactctgcattatggcataagcattttcccatggattaaatgtctttataaatattatttttaaaggactgcctgakacttgtttggttgtaccatgacttataagaccatgcctcatttgatacttgtagactctccaagcccagaataacttgagagacaatagaagttaactgatttaatttacatagcagcttcagaaaaggaagaccatactatttctgtatatatggctcatatggactggggctaagagcatggatttcaaagtgaaatggcctgggctcatttcacagcacccctactagctgcctgcatgatatggaggcatttactcacctctgtaaagctgtcttctatcaaacaagggtggtgaaatgagacaggatggtaaaggcctggtacactgtgagtgcccgctgtcagtgtcctcacatgggcggtgcaagctgagggctgggcttgaacccaggtatcctcatgcctaggccagagttctttccacctcaaaggcttcccctgttctggaaggtccttgaagagagacagagcttgaagaggtacagatgaagatatggagtgctggctagaaatccttatggaaaattttaaatatatatatgtatatgatatatttgcatactcaccacacatacatgtacatacacacacacgcacatatacacatacatgtacatacacatgctacatatacat

SEQ ID NO: 80755 - DNA, 732 bp, Homo sapiens
atatcctgctcttttcactctgcattatggcataagcattttcccatggattaaatgtctttataaatattatttttaaaggactgcctgatacttgtttggttgtaccatgacttataagaccatgcctcatttgatacttgtagactctccaagcccagaataacttgagagacaatagaagttaactgatttaatttacatagcagcttcagaaaaggaagaccrtactatttctgtatatatggctcatatggactggggctaagagcatggatttcaaagtgaaatggcctgggctcatttcacagcacccctactagctgcctgcatgatatggaggcatttactcacctctgtaaagctgtcttctatcaaacaagggtggtgaaatgagacaggatggtaaaggcctggtacactgtgagtgcccgctgtcagtgtcctcacatgggcggtgcaagctgagggctgggcttgaacccaggtatcctcatgcctaggccagagttctttccacctcaaaggcttcccctgttctggaaggtccttgaagagagacagagcttgaagaggtacagatgaagatatggagtgctggctagaaatccttatggaaaattttaaatatatatatgtatatgatatatttgcatactcaccacacatacatgtacatacacacacacgcacatatacacatacatgtacatacacatgctacatatacat

SEQ ID NO: 80756 - DNA, 732 bp, Homo sapiens
atatcctgctcttttcactctgcattatggcataagcattttcccatggattaaatgtctttataaatattatttttaaaggactgcctgatacttgtttggttgtaccatgacttataagaccatgcctcatttgatacttgtagactctccaagcccagaataacttgagagacaatagaagttaactgatttaatttacatagcagcttcagaaaaggaagaccatactatttctgtatatatggctcatatggactggggctaagagcatggatttcaaagtgaaatggcctgggctcatttcacagcacccctactagctgcctgcatgatatggaggcatttactcacctctgtaaagctgtcttctatcaaacaagggtggtgaaatgagacaggatggtaaaggcctggtacactgtgagtgcccgctgtcagtgtcctcacatgggcggtgcaagstgagggctgggcttgaacccaggtatcctcatgcctaggccagagttctttccacctcaaaggcttcccctgttctggaaggtccttgaagagagacagagcttgaagaggtacagatgaagatatggagtgctggctagaaatccttatggaaaattttaaatatatatatgtatatgatatatttgcatactcaccacacatacatgtacatacacacacacgcacatatacacatacatgtacatacacatgctacatatacat

SEQ ID NO: 80757 - DNA, 1085 bp, Homo sapiens
tttcaatattcaaccaaaaaacattttttggttgaatttaattctaattatttaattctgaattaaataaataacgtaggaatgtgttggtaatgtcttcaatatcatctgatttattcatgtcaggtgaggtattggctaaataccttgcacaggtggtacatttatctccagaggatgccattctttaactttctcgggaagtccgtgttagtgcctgttacacaaagagctaacctaaatccttctttctgatatgtattcttttccccttcatctgtctctactggacagagatactagctgactactgctaatcatgatgcaatatcacagtaaaaagacagcaaattggtactcttttttctaaaactaatttccacttaatcttctttcttaggatctatttcgtttccctttaataaattttcttagcattatgaytccttaagctaacatttcaaagttctttgttaaaaatgtaaaccattgtgaaagagtggaaaagttatttcaaataaattgcacatcctgcatatacatatgtatgtattataattttttaacaacttctctaatatgtgagaggggtacctaatcctacctccatcactcatatattaatttttacctccaacttggtggcttttctattttgctttacaagtcatcagtaaaaatctacctcactttctctacttcgtaaataagtcataatacaattttgcccctttaatgctcccacctccttgctatctcaagtaaccctgcttccctctgacattggtgtgttccatttccaattagtctatgaatctgtcatatgactctgaagtaaaactactttcaaggtttgttacagcttttatctcctctctagcctatatgactcataaatgaaataaatgaatctaatacaacttgtttctcataggctgccttggccattacccagtatcttgtcatctgataaggatttgcaaattgattttcaatgataacagtttactcctgcaaataatatgtcatgcactgaaacagataatatgaagaaaaataatttgatgattacttcttatgcattt

SEQ ID NO: 80758 - DNA, 1085 bp, Homo sapiens
tttcaatattcaaccaaaaaacattttttggttgaatttaattctaattatttaattctgaattaaataaataacgtaggaatgtgttggtaatgtcttcaatatcatctgatttattcatgtcaggtgaggtattggctaaataccttgcacaggtggtacatttatctccagaggatgccattctttaactttctcgggaagtccgtgttagtgcctgttacacaaagagctaacctaaatccttctttctgatatgtattcttttccccttcatctgtctctactggacagagatactagctgactactgctaatcatgatgcaatatcacagtaaaaagacagcaaattggtactcttttttctaaaactaatttccacttaatcttctttcttaggatctatttcgtttccctttaataaattttcttagcattatgattccttaagctaacatttcaaagttctttgttaaaaatgtaaaccattgtgaaagagtggaaaagttatttcaaataaattgcacatcctgcatatacatatgtatgtattataattttttaacaacttctctaatatgtgagaggggtacctaatcctacctccatcactcatatattaatttttacctccaacttggtggcttttctattttgctttacaagtcatcagtaaaaatctacctcactttctctacttcgtaaataagtcataatacaattttgcccctttaatgctcccacctccttgctatctcaagtaaccctgcttccctctgacattggtgtgttccatttccaattagtctatgaatctgtcatatgaytctgaagtaaaactactttcaaggtttgttacagcttttatctcctctctagcctatatgactcataaatgaaataaatgaatctaatacaacttgtttctcataggctgccttggccattacccagtatcttgtcatctgataaggatttgcaaattgattttcaatgataacagtttactcctgcaaataatatgtcatgcactgaaacagataatatgaagaaaaataatttgatgattacttcttatgcattt

SEQ ID NO: 80759 - DNA, 1085 bp, Homo sapiens
tttcaatattcaaccaaaaaacattttttggttgaatttaattctaattatttaattctgaattaaataaataacgtaggaatgtgttggtaatgtcttcaatatcatctgatttattcatgtcaggtgaggtattggctaaataccttgcacaggtggtacatttatctccagaggatgccattctttaactttctcgggaagtccgtgttagtgcctgttacacaaagagctaacctaaatccttctttctgatatgtattcttttccccttcatctgtctctactggacagagatactagctgactactgctaatcatgatgcaatatcacagtaaaaagacagcaaattggtactcttttttctaaaactaatttccacttaatcttctttcttaggatctatttcgtttccctttaataaattttcttagcattatgattccttaagctaacatttcaaagttctttgttaaaaatgtaaaccattgtgaaagagtggaaaagttatttcaaataaattgcacatcctgcatatacatatgtatgtattataattttttaacaacttctctaatatgtgagaggggtacctaatcctacctccatcactcatatattaatttttacctccaacttggtggcttttctattttgctttacaagtcatcagtaaaaatctacctcactttctctacttcgtaaataagtcataatacaattttgcccctttaatgctcccacctccttgctatctcaagtaaccctgcttccctctgacattggtgtgttccatttccaattagtctatgaatctgtcatatgactctgaagtaaaactactttcaaggtttgttacagcttttatctcctctctagcctatatgactcataaaygaaataaatgaatctaatacaacttgtttctcataggctgccttggccattacccagtatcttgtcatctgataaggatttgcaaattgattttcaatgataacagtttactcctgcaaataatatgtcatgcactgaaacagataatatgaagaaaaataatttgatgattacttcttatgcattt

SEQ ID NO: 80760 - DNA, 1085 bp, Homo sapiens
tttcaatattcaaccaaaaaacattttttggttgaatttaattctaattatttaattctgaattaaataaataacgtaggaatgtgttggtaatgtcttcaatatcatctgatttattcatgtcaggtgaggtattggctaaataccttgcacaggtggtacatttatctccagaggatgccattctttaactttctcgggaagtccgtgttagtgcctgttacacaaagagctaacctaaatccttctttctgatatgtattcttttccccttcatctgtctctactggacagagatactagctgactactgctaatcatgatgcaatatcacagtaaaaagacagcaaattggtactcttttttctaaaactaatttccacttaatcttctttcttaggatctatttcgtttccctttaataaattttcttagcattatgattccttaagctaacatttcaaagttctttgttaaaaatgtaaaccattgtgaaagagtggaaaagttatttcaaataaattgcacatcctgcatatacatatgtatgtattataattttttaacaacttctctaatatgtgagaggggtacctaatcctacctccatcactcatatattaatttttacctccaacttggtggcttttctattttgctttacaagtcatcagtaaaaatctacctcactttctctacttcgtaaataagtcataatacaattttgcccctttaatgctcccacctccttgctatctcaagtaaccctgcttccctctgacattggtgtgttccatttccaattagtctatgaatctgtcatatgactctgaagtaaaactactttcaaggtttgttacagcttttatctcctctctagcctatatgactcataaatraaataaatgaatctaatacaacttgtttctcataggctgccttggccattacccagtatcttgtcatctgataaggatttgcaaattgattttcaatgataacagtttactcctgcaaataatatgtcatgcactgaaacagataatatgaagaaaaataatttgatgattacttcttatgcattt

SEQ ID NO: 80761 - DNA, 1085 bp, Homo sapiens
tttcaatattcaaccaaaaaacattttttggttgaatttaattctaattatttaattctgaattaaataaataacgtaggaatgtgttggtaatgtcttcaatatcatctgatttattcatgtcaggtgaggtattggctaaataccttgcacaggtggtacatttatctccagaggatgccattctttaactttctcgggaagtccgtgttagtgcctgttacacaaagagctaacctaaatccttctttctgatatgtattcttttccccttcatctgtctctactggacagagatactagctgactactgctaatcatgatgcaatatcacagtaaaaagacagcaaattggtactcttttttctaaaactaatttccacttaatcttctttcttaggatctatttcgtttccctttaataaattttcttagcattatgattccttaagctaacatttcaaagttctttgttaaaaatgtaaaccattgtgaaagagtggaaaagttatttcaaataaattgcacatcctgcatatacatatgtatgtattataattttttaacaacttctctaatatgtgagaggggtacctaatcctacctccatcactcatatattaatttttacctccaacttggtggcttttctattttgctttacaagtcatcagtaaaaatctacctcactttctctacttcgtaaataagtcataatacaattttgcccctttaatgctcccacctccttgctatctcaagtaaccctgcttccctctgacattggtgtgttccatttccaattagtctatgaatctgtcatatgactctgaagtaaaactactttcaaggtttgttacagcttttatctcctctctagcctatatgactcataaatgaaataaatgaatctaatacaacttgtttctcataggctgcmttggccattacccagtatcttgtcatctgataaggatttgcaaattgattttcaatgataacagtttactcctgcaaataatatgtcatgcactgaaacagataatatgaagaaaaataatttgatgattacttcttatgcattt

SEQ ID NO: 80762 - DNA, 1085 bp, Homo sapiens
tttcaatattcaaccaaaaaacattttttggttgaatttaattctaattatttaattctgaattaaataaataacgtaggaatgtgttggtaatgtcttcaatatcatctgatttattcatgtcaggtgaggtattggctaaataccttgcacaggtggtacatttatctccagaggatgccattctttaactttctcgggaagtccgtgttagtgcctgttacacaaagagctaacctaaatccttctttctgatatgtattcttttccccttcatctgtctctactggacagagatactagctgactactgctaatcatgatgcaatatcacagtaaaaagacagcaaattggtactcttttttctaaaactaatttccacttaatcttctttcttaggatctatttcgtttccctttaataaattttcttagcattatgattccttaagctaacatttcaaagttctttgttaaaaatgtaaaccattgtgaaagagtggaaaagttatttcaaataaattgcacatcctgcatatacatatgtatgtattataattttttaacaacttctctaatatgtgagaggggtacctaatcctacctccatcactcatatattaatttttacctccaacttggtggcttttctattttgctttacaagtcatcagtaaaaatctacctcactttctctacttcgtaaataagtcataatacaattttgcccctttaatgctcccacctccttgctatctcaagtaaccctgcttccctctgacattggtgtgttccatttccaattagtctatgaatctgtcatatgactctgaagtaaaactactttcaaggtttgttacagcttttatctcctctctagcctatatgactcataaatgaaataaatgaatctaatacaacttgtttctcataggctgccttggccattacccagtatcttgtcatctgataaggatttgcaaattgattttcaatgataacagtttactcctgcaaataatatgtcatgcactgaaacagayaatatgaagaaaaataatttgatgattacttcttatgcattt

SEQ ID NO: 80763 - DNA, 923 bp, Homo sapiens
tgcatgcaatacccatactttctttttgatagatttcttcattttgtaaatgtcaaattaaaaagtccattcaagtcctgtgaaagtgataacatcttaaccaaaattgagcatggatgatcatgtagtcatcacataaacagacactctcttgatggactgttccaaacacaaatggtacagacaccaattacccaaatgctgtatgtatgtatgaatagggactgtccctgattgggtgttgctaggtaacacaatcttccaaatgatactcacatgggggctctctggtgtggttataccaatttgggcattcattaacatccatgttaatgaataaataatgtattttactctatcgggggaaattcagccagatatcgggtgaaattcacccccaatatttcacatagattcttttctattttccctaagtgtcggccagtctgagaaataaagggacagagtacaaaagagaaattttaaagctgggtgtccaggggagacatcacatgttggcaggttccgtgatgccccctgagctgtaaaaccagcaagtttttattagtgwttttcagaagggcagggagtgtacgaatagggtgtgggtcacagagatcacatgcttcacaaggtaataagatatcacaaggcaaatggaggcagggcaagatcacaggaccacaggaccgaggtgaaattaaaattgctagtgaagtttcgggcactcattgtcattgataacatcttatcaggagacagggtttgagagcagacaactggtctgaccaaaatttattagacgggaatttcctcgtcctaataagcctgggagcgctacgggagactggggcttatttcatccctacagcttcgaccataaaagacgccgcccccccgaagcagccatttcagaggcctac

SEQ ID NO: 80764 - DNA, 1233 bp, Homo sapiens
aaaagaaatgtggtatagataataaattgggtgatgtataagtaagataatcttgttgagaaaggtgaagtggttgctcaaggaagatttctctgggaagagggtttagctgagccttacaggtggagagggagacagccaacgaagagctcgggaaatgcagtcagaaaggaagaaccagcaaatccccaagggcattgggggtgagtatatcccaggaacagaaaatttattatagctgaaacactgagtggtaggagatgatgtcaaatggtaggcaagggccaggccatggtgcttatatggacaagagtttgaattttattcttagtatattgggaagcccttggaggacattaatgacatgctctaatttacatatttaaaaattactctaacagatgtgcgtggaaataggttaaaagaaaggaagaggagaagtggagactattacagtcaccsaggctacagatggtactcactagggtaatggaggagaaatggagatcagtggctgggcttgttacatatttcagagctctaatttagaagacttcctgctgatagattggaccagggactttgtgctgataatttgggaaaataataaacaataactctaaagtatttgtcttgagcatgaggaagactagagaatatggcttttcatttatttccctttgctattattctgggtctaggtcccctgtgatatgctctgtgtcaccttccagtccaggtcaagttaggtatgatccatcaagatgcccatcactttaatctcattcctttgttagagctaaaatgtgaatctcaatgaccctttctgtttttgtctccaattgcagtttttaaaatacttgctctagctctttcctgtttgcagtgatttcacttgctcaagcttcaggaggtgcggctctcctcccactcagatgcactcggataaatgcctagttcaaggtgtcttctttcctgccctgctgtggttgggaactttctaaaactctgatttaggtgggacaaaactattttcaggtgtatttctacataaaaggctctaaaaaccaattattttccagcttctgtattctaaaattgtatatatcctttccctcttctgcccccgacttgcacccagagttactcacttagagctcaactagcattttgtcccttaacaaacactttctgaattgaattaaaataatctaattttccatataccatgca

SEQ ID NO: 80765 - DNA, 2026 bp, Homo sapiens
tgcatatataaaatgaaatattttgtgattcattctgtccaaaacaaaacagcataaaaagtaaaatgtgtaacttaattttatgtgtgaatttagatgctattttagttcccctggctgctttaaccagttaccacaaatttgttggtaggatcacacttctttctgggggctctcaaaaagcccccatgctttttgtttccaatctttttccagctcctagaggctccctgcattccttggctcacagcttccttccatcttcaaaggcaaatggactggtcaagtcttatattgcatcactcttgaatgtgactcttctgcctcactctttgacatttaaaagacatttgagattaccgtgcccacccctcaatgttaaaggataacttcttatgttagatcatctgattagcaatctcaatcccaactacaacctttattcgctcttgccatgtaacctaacatattcacaggttctagaagttaggatacggacatgttggtgaggagggagagattattcagcataccatacagggcacatattatatttaggaaatgtgcgaaattgtttacatagtgcattaaatgaaagtgggagttctggagtcagaatttatagaagtttagccactttagccactatctctgcaaccttaagtgaagacgggatttgtgacttgctttatctgtttggaaaataagaaaaacagctgtgtctaaaatatagaattgtttggaagactaaatgactactgcatagaaatcacttaaagtctggcacataataagtattcatactcaatattattcgatttttattttatttagtcttctcataaaccaatgcgagtaaaaatatgactttcattaccagatgaagaaaatcagggttagaatataatacaataattgttacatagtataaagttgtgaaatgggttttagaatgtaaacaatttcacactttggattaaactcttaaacttgaagtgaaaacattattttaagggcttaggttttacatgcattatatttaaaatacatgtacaattacctagcctctaggaaaaatatgtgaaacctgagcatagattttgagatatgacccaatattgattatgtttttaacattattattttagtaatataaccttaaaattagagacggaattatctatcaaaaatagagactacttttcagtcacatttgattgtcttaaatactcagatgcttgagttcaggccaatgaaatgcaagtgcaactttcagattgcattcctaaataaaatggatataacctctactttcaacattgaaacattttgctcaggaatcttcatggatgtatataaacaattgcaatatcctagggatgacagaacaagaagttagaagacagggtccctatctctggagtattttcacttgtactattttgtaagaaataaaaacatataactttttaaagccacttttagcttgatattgttrtatcacttgaaattataaacaaacttaaacaacatttgatccagaagtagagttgctgttacgaagtctcaaaaggaatcatcagcatggtgtttctgtgtctcaaggacacagatgttgtagactagaaggtcagctaccctgattatgtaaaagcaaaccatttgttaccagatttgtccaatagactttctgtaataatgggaatctcagaagttagaatacaggccaaaggagcctgtaatttaaggggaaccaataggaaaaaattaaaatactggaagtgttgatttcttgttaacatttgcggcaagacagcagagacaacatcatagaaaacctagagtttcaaagaagagataccagagaatacagctttgtaaaaggagattgttttggcctcagtctgcaatctattttacccaaattctggtaatttgagccttgacaatgatgaaaaatccaatggtttttgtataccaaactaaagtggtgataagaggtgactgaagaggcacctttggaaac

SEQ ID NO: 80766 - DNA, 2026 bp, Homo sapiens
tgcatatataaaatgaaatattttgtgattcattctgtccaaaacaaaacagcataaaaagtaaaatgtgtaacttaattttatgtgtgaatttagatgctattttagttcccctggctgctttaaccagttaccacaaatttgttggtaggatcacacttctttctgggggctctcaaaaagcccccatgctttttgtttccaatctttttccagctcctagaggctccctgcattccttggctcacagcttccttccatcttcaaaggcaaatggactggtcaagtcttatattgcatcactcttgaatgtgactcttctgcctcactctttgacatttaaaagacatttgagattaccgtgcccacccctcaatgttaaaggataacttcttatgttagatcatctgattagcaatctcaatcccaactacaacctttattcgctcttgccatgtaacctaacatattcacaggttctagaagttaggatacggacatgttggtgaggagggagagattattcagcataccatacagggcacatattatatttaggaaatgtgcgaaattgtttacatagtgcattaaatgaaagtgggagttctggagtcagaatttatagaagtttagccactttagccactatctctgcaaccttaagtgaagacgggatttgtgacttgctttatctgtttggaaaataagaaaaacagctgtgtctaaaatatagaattgtttggaagactaaatgactactgcatagaaatcacttaaagtctggcacataataagtattcatactcaatattattcgatttttattttatttagtcttctcataaaccaatgcgagtaaaaatatgactttcattaccagatgaagaaaatcagggttagaatataatacaataattgttacatagtataaagttgtgaaatgggttttagaatgtaaacaatttcacactttggattaaactcttaaacttgaagtgaaaacattattttaagggcttaggttttacatgcattatatttaaaatacatgtacaattacctagcctctaggaaaaatatgtgaaacctgagcatagattttgagatatgacccaatattgattatgtttttaacattattattttagtaatataaccttaaaattagagacggaattatctatcaaaaatagagactacttttcagtcacatttgattgtcttaaatactcagatgcttgagttcaggccaatgaaatgcaagtgcaactttcagattgcattcctaaataaaatggatataacctctactttcaacattgaaacattttgctcaggaatcttcatggatgtatataaacaattgcaatatcctagggatgacagaacaagaagttagaagacagggtccctatctctggagtattttcacttgtactattttgtaagaaataaaaacatataactttttaaagccacttttagcttgatattgttatatcacttgaaattataaacaaacttaaacaacatttgatccagaagtagagttgctgttacgaagtctcaaaaggaatcatcagcatggtgtttctgtgtctcaaggacacagatgttgtagactagaaggtcagctaccctgattatgtaaaagcaaaccatttgttaccagatttgtccaatagactttctgtaataatgggaatctcagaagttagaatacaggccaaaggagcctgtaatttaaggggaaccaataggaaaaaattaaaatactggaagtgttgatttcttgttaacatttgcggcaagacagcagagacaacatcatagaaaacctagagtttcaaagaagagataycagagaatacagctttgtaaaaggagattgttttggcctcagtctgcaatctattttacccaaattctggtaatttgagccttgacaatgatgaaaaatccaatggtttttgtataccaaactaaagtggtgataagaggtgactgaagaggcacctttggaaac

SEQ ID NO: 80767 - DNA, 753 bp, Homo sapiens
accagataagcactgtttattttattatttgtgcacaatgatgaaaatgaataaatatatttctgggatgatcacatggtaaaatgaagttatttagtataatgttgaaccataaaaacgtttgccagaaaaatatgtacagtatgttactaatcgtaaggatttccaaaacaatgataatcaatacaatgtaatgtttggatgtggttaaatttgtgataaaaatatttaaaagaaaaagagaagcaggaagcagttaattacaattttaatcaaagcaataacttcttgaagcagaagggtgggaaaggaacaggaaacacagtgactttaaagagagcagtaatttcaaatgttttaagcgggttgtgggtttactagtgccattcattatacactactgatagattacatattattttgtgtataaaatatttctgaacaaaaataaaaaaacattattcacaaccatttgtagcacactcactttcaggattactagaaatagagtagacagccatcttgggtttccaaggatggaagagtctccctaaatgctggcakttcagtgctaaaaatgggacagtcagtaggcaaactggaatggtttgtcaccccagaaatacgttagcatacgtgcaaataactaatgccacccaaaaataactcatcaagctctccattaatttcacatatagtaacaaacaaatttcacatatagtaacaaacataagtttttggagattcttgtgt

SEQ ID NO: 80768 - DNA, 753 bp, Homo sapiens
accagataagcactgtttattttattatttgtgcacaatgatgaaaatgaataaatatatttctgggatgatcacatggtaaaatgaagttatttagtataatgttgaaccataaaaacgtttgccagaaaaatatgtacagtatgttactaatcgtaaggatttccaaaacaatgataatcaatacaatgtaatgtttggatgtggttaaatttgtgataaaaatatttaaaagaaaaagagaagcaggaagcagttaattacaattttaatcaaagcaataacttcttgaagcagaagggtgggaaaggaacaggaaacacagtgactttaaagagagcagtaatttcaaatgttttaagcgggttgtgggtttactagtgccattcattatacactactgatagattacatattattttgtgtataaaatatttctgaacaaaaataaaaaaacattattcacaaccatttgtagcacactcactttcaggattactagaaatagagtagacagccatcttgggtttccaaggatggaagagtctccctaaatgctggcagttcagtgctaaaaatgggacagtcagtaggcaaactggaatggtttgtcaccccagaaataygttagcatacgtgcaaataactaatgccacccaaaaataactcatcaagctctccattaatttcacatatagtaacaaacaaatttcacatatagtaacaaacataagtttttggagattcttgtgt

SEQ ID NO: 80769 - DNA, 874 bp, Homo sapiens
aatgtgtagctctttaaaagatattcgagatatatgtgggagctgtcactactggcgagcagtttatggcgtataaatatatataacttaagccttatatcacctaataaagtataataacatgaattgcagattgactatattatgacacaaattacatgggcataaagtgaaaataaatgaaacasaaatttatgtgctttttctttcttgccaccctacccctgccaaccaatgtgttctattctcaacatagcgaacagaatcattcttccaaaatgtaattcagaccttgatgctgctttgctcaaaatcctccagcgactctccttaactccatgtgaaagcaacatgtaatgtggacttcatgtgcagtgtctggccaatgtcatatatctgacttctccaactgctctacttcctagtcatttcattttggatgcaatagatttgtctctttctttcacacgaactacttttcccaaaaatattcatggtgctaatgctttatcttttccccactacactttaatcaatgagtcctatcctgaccatattatttcaaattgaatctacactcccctttatccactcctatcccctttattctcctttttatagcacttattaattttagcattatttataagtgaattatttttcatgtttattgttcatagtctatattccacaccaccactaaatggaaggtactccagtactgtatttctgtctattatgtctactgatacattgtaaggtcctagaatggtacctggcacatagaaggcacttaataaatacctgttcataaactgaatacaggcatattttgaagatattgagggttcagttccagactactgcaataaag

SEQ ID NO: 80770 - DNA, 874 bp, Homo sapiens
aatgtgtagctctttaaaagatattcgagatatatgtgggagctgtcactactggcgagcagtttatggcgtataaatatatataacttaagccttatatcacctaataaagtataataacatgaattgcagattgactatattatgacacaaattacatgggcataaagtgaaaataaatgaaacacaaatttatgtkctttttctttcttgccaccctacccctgccaaccaatgtgttctattctcaacatagcgaacagaatcattcttccaaaatgtaattcagaccttgatgctgctttgctcaaaatcctccagcgactctccttaactccatgtgaaagcaacatgtaatgtggacttcatgtgcagtgtctggccaatgtcatatatctgacttctccaactgctctacttcctagtcatttcattttggatgcaatagatttgtctctttctttcacacgaactacttttcccaaaaatattcatggtgctaatgctttatcttttccccactacactttaatcaatgagtcctatcctgaccatattatttcaaattgaatctacactcccctttatccactcctatcccctttattctcctttttatagcacttattaattttagcattatttataagtgaattatttttcatgtttattgttcatagtctatattccacaccaccactaaatggaaggtactccagtactgtatttctgtctattatgtctactgatacattgtaaggtcctagaatggtacctggcacatagaaggcacttaataaatacctgttcataaactgaatacaggcatattttgaagatattgagggttcagttccagactactgcaataaag

SEQ ID NO: 80771 - DNA, 662 bp, Homo sapiens
gatccttttatttctccagaacattctgcaggtgagctggggaagcccactggccctggcctcacccccgagcccgagccttcagcctgggaatggtctggcctcttccttgctggctctccagcctggcctcgcaggaccctgggcgggaccccaggaaccctcacccgctatgtgcttccccaagaagcgctccctgtggcctaatttgagaaaacaatgggcctcaatccatattaatgaccctagagggaccctttgtcctcggtgcacaggctgtaatcagcggggctccgggggctctggcctaatttggagggacaggttttatcatcacccttgattcgggtgacccaatctgacaggcccacgaccccctgtatgcggggtccacgtcagagatgggcttcctcccagcggcccaccccagcgggctggggagagggaagggggaggtggtggccatgggggaagttcggggtgaagaaggggtcacagccagacccycacttggatgggcctgtgatcgggttctcgggaggagcaggatattgattagatcagtgaatggtgtggaggcagctctccccaggcacgtgctcccgaccacccaccagcaagcgtctgttgcctgccggtgccagggctgggtggggactctg

SEQ ID NO: 80772 - DNA, 2183 bp, Homo sapiens
gagcagcccaccccgccttaagctaatcaggcagtgccatgactggggaagcagtggggttgggggttgaggtgcaaacgaagtttcttcctaaaattcagcgagtattcatctctatgctgggtggcctagggtgcagtggcaaaacaaaacaaaacaaaacaaaacaaaaaaacagatgcaatttctgttgtcatggaattcatgtcctcatggaagagagggaaaaatrtaaaattacaattttggtgagttctgctaaggaggcacacatgggcggagttgaccatccaaggaggtcagggtctcagtcttcccagagaaacggatggtttagctgagctctggggatggatgggaatggattagatatgtcaaggccctgctgtaggaagaagcacagggtggacagagcccaggagcctaggtcagtggagagcagctgacagggccagggccagtgggaaaggctggaggggaagagggggaattcctacagggcttggcagaactagagaatgggctggagggctgcaaatggagaccagggaaggctgatggagccatccagggaagagatgcttgggctaaggcaatggcaatgcaggcggcaggagggggcagctcagaggtggtgcaggaggtgaagtggacagtgccagtggacagagggagtgtggaagtgagggcaggaggtgctgggttgactgtgggtttcccgtgaggatttccctgctctagaccttcatgggagtggaatcacacaacatgtggtccttcctgacccttctttgactcagcatcatgtttaatcatgactttttatcaccttcagctgctgaagagttttaagaaggtgggtgactcacacaagtggtcttccagaaagatggcctcaatgccgccatgttcccatggacctgagccaagctcttcccagcacgggagcagctcactcctgccctcaggacgtggcacaactgctgcagtttagagaaagtttgtggcaccctctcctcctcctccacgtggttagaagccaggatccctcatatatgtctgtgctgtcggctgtgactaaaccaagaggagctagatgtctgtgcccattttatagtgcttataacagaacacctgaaactaggtaatcatctataaagaaaagaaatttgtatcttacagttgtgtaggctgagaagtccagatcgaggggttgcatctggcgagggctttcttgctgctggggactctctgccaagtctcaaggcagtgcaagaaatcacatggtgatatggtttggatgtttgtcctctccaaatctcacattgaaacataatccccaatgttggaggtggggcctggtggaaagagttttgattatggggtggactcctcatgaatggcttggtgctgtcctcaagatagtgagtaagttctcttgatatctggttgcttaaaagtgtgtggccctcccccttctctctcttgcttccactttaaccatgtgatgcctgctcccacttggcctttcatcatgagtaaaagctccctgaggcctcaccagaagccaagcagatgtgggcaccatgcttcctgcacagcctgcagaactgtgagccaattaaacctctttcctttaaacatttcgcagccttaagaatgtctttatattgatgtgaaactgctgaatacacatgaccggggctgggtgtgctggctcagatctctcttcctctttttataaagccttcagttccactcccatgacaacctcatcaatccattaaactattaattcactcatctatgaatgtcttaatccattcatgagggcagaggtgtcacgacccaatcaccgcttaaaggccctacccctccatcctgctacgttgagaattacatttcaacacgagtttcggaggtgagaaacacgcagaccacagcaccaagtgtccaggaagagcaagcccagccagaagcctttgggcaggcagcagccacagggccatctgctagaggatcactcctggggtggagacacctggaagctcaggtatgcctcttgtttcccctaaattaaacaactggtttatttgacctgatttgcagagatggatctgcaggcccaaggtcaggatgactgagagctctggttactgtggattttaggtaaacaggatccc

SEQ ID NO: 80773 - DNA, 2183 bp, Homo sapiens
gagcagcccaccccgccttaagctaatcaggcagtgccatgactggggaagcagtggggttgggggttgaggtgcaaacgaagtttcttcctaaaattcagcgagtattcatctctatgctgggtggcctagggtgcagtggcaaaacaaaacaaaacaaaacaaaacaaaaaaacagatgcaatttctgttgtcatggaattcatgtcctcatggaagagagggaaaaatgtaaaattacaattttggtgagttctgctaaggaggcacacatgggcggagttgaccatccaaggaggtcagggtctcagtcttcccagagaaacrgatggtttagctgagctctggggatggatgggaatggattagatatgtcaaggccctgctgtaggaagaagcacagggtggacagagcccaggagcctaggtcagtggagagcagctgacagggccagggccagtgggaaaggctggaggggaagagggggaattcctacagggcttggcagaactagagaatgggctggagggctgcaaatggagaccagggaaggctgatggagccatccagggaagagatgcttgggctaaggcaatggcaatgcaggcggcaggagggggcagctcagaggtggtgcaggaggtgaagtggacagtgccagtggacagagggagtgtggaagtgagggcaggaggtgctgggttgactgtgggtttcccgtgaggatttccctgctctagaccttcatgggagtggaatcacacaacatgtggtccttcctgacccttctttgactcagcatcatgtttaatcatgactttttatcaccttcagctgctgaagagttttaagaaggtgggtgactcacacaagtggtcttccagaaagatggcctcaatgccgccatgttcccatggacctgagccaagctcttcccagcacgggagcagctcactcctgccctcaggacgtggcacaactgctgcagtttagagaaagtttgtggcaccctctcctcctcctccacgtggttagaagccaggatccctcatatatgtctgtgctgtcggctgtgactaaaccaagaggagctagatgtctgtgcccattttatagtgcttataacagaacacctgaaactaggtaatcatctataaagaaaagaaatttgtatcttacagttgtgtaggctgagaagtccagatcgaggggttgcatctggcgagggctttcttgctgctggggactctctgccaagtctcaaggcagtgcaagaaatcacatggtgatatggtttggatgtttgtcctctccaaatctcacattgaaacataatccccaatgttggaggtggggcctggtggaaagagttttgattatggggtggactcctcatgaatggcttggtgctgtcctcaagatagtgagtaagttctcttgatatctggttgcttaaaagtgtgtggccctcccccttctctctcttgcttccactttaaccatgtgatgcctgctcccacttggcctttcatcatgagtaaaagctccctgaggcctcaccagaagccaagcagatgtgggcaccatgcttcctgcacagcctgcagaactgtgagccaattaaacctctttcctttaaacatttcgcagccttaagaatgtctttatattgatgtgaaactgctgaatacacatgaccggggctgggtgtgctggctcagatctctcttcctctttttataaagccttcagttccactcccatgacaacctcatcaatccattaaactattaattcactcatctatgaatgtcttaatccattcatgagggcagaggtgtcacgacccaatcaccgcttaaaggccctacccctccatcctgctacgttgagaattacatttcaacacgagtttcggaggtgagaaacacgcagaccacagcaccaagtgtccaggaagagcaagcccagccagaagcctttgggcaggcagcagccacagggccatctgctagaggatcactcctggggtggagacacctggaagctcaggtatgcctcttgtttcccctaaattaaacaactggtttatttgacctgatttgcagagatggatctgcaggcccaaggtcaggatgactgagagctctggttactgtggattttaggtaaacaggatccc

SEQ ID NO: 80774 - DNA, 650 bp, Homo sapiens
gcatcagaggctcagcagagaagctggccgggctcagcagggtgagtgtgggggaaactgtaggggcagaggccagagagagtggggaggacccactgagggtggggagaaatggtgcaggacctcagggcagcagaaggaattgatcttttctctgagtgaaacagagaatgtcctgggggacgaggggcactgggaccagccacagatgtcccagctctgtctcatgtcagacacaggatagattgcactatcctccccactcaaaggccaacaaaatgtcgcaagggtgatgtcccttgagtagacactttcagagccaggacagctcagccacgccctctcttcctctggcatggtgaccagctggcgcccagggccccgagccccctggcacacagtgggtgcccagcacgaaggagaacagagcctttgttgtttccagccacwgagatggggttttttgttactgcagcgaaaccagcctgactctgatatgggggcggagacagagggacagctaggggactatagcgataatcccagtgacagacaacgcagctgaggccagaaaaggagcagaagaggtgctgagaagcagtcggggttaggaatattctgaagggaaagctgggagggggtgggtatgg

SEQ ID NO: 80775 - DNA, 1357 bp, Homo sapiens
cagagaaggtggctgagcaaaggccagccagtctgcgaggttgtggcgtgctcctctaagtgaagacctgagagcactgaagaggttggagaggctcatggcgacaggctctgcatggttctgtgtaggttcccctggggagcccagttcccagctctgctccatgaaggaagtagacttggacttggcccaacttgctttccgccttccctgcaacacttctgtccaccagaagggggcagggccacctcaggaaacgagacccattctgtggggggctcagtcaaggttcagtcctgagttaggtgagacctttcaatcctcagtggacaggtactgagcttcaggccccgtgctgggacctgggtgcactaagacgagccccaccccttgcagcctgtgtccgcagtgtcccaggccgaagggattgtgggggtttcaaggaggcagtgggcagctctgcctagggggaggccggaggaaaatgaggaccagctccctagaggaggcaactcttaagctgaagcaagagaagaagttgccttctcggctgacagggttgtgaggtgtgccactctgagggggcacagcaagcggcatggaggtgtgaccgcgggcatgtctggttgctggctatgtcctggatcctagagcacagggtgcaaggggctggggtgactggccatggctcgtggggggccctggagccacatgcacgaactccattctggtgcagcagggagaacagacagaatttcctttttaaaaaacaaaaaaaaatttcttatgaaaactatcaaataggcaccaagtacagagaagagttcatggacccccatgtacccagcacctggcaccaacagagatctaccagcttctcatccattctccctccacatttgtacaaaccttttatagatagaaattgttaaacataccaaagaagggagactggcataacgatccccacagacgcaccagycagctccaccaggaagtttccaggctggtctcggccgcccactccttcccaccctcagattattctgaagcaaatcacatagcattttatatttaaatatttcagtgtatatctctaaaaatgagagactctttaaaaacacaggcttgcactactatgataacacctgaacaatgtgcacaccattgtttttttttgttttttttttttgagatggagtctctctctgtcacccaggctggagtgcagtggcacaatatcggctcactgcaagctccacctcccaggttcacgcctcccgagtagctgggactacaggcacctgctactacccccggctaattttttgtatttttagtacagacggggtttcac

SEQ ID NO: 80776 - DNA, 549 bp, Homo sapiens
taagaatgcagaagacacaagattggctatgagctgattggttgaaactaagaaaatgacaccagctttctgtttaatgttactgttgaagaatagagagggtcttgttcattgaacccactacaaatgagataatggaattaggattagctgttattactgtcaatcacttctgacccaaggggaggttataacaatggctagaatgcttcctctgactgtgaagcagacgtccaattgtggatgatatttctgccaccctactgctgaggaaaaaaaaaaaaaaagattgtggctctaaatctactctgttatatgaaaaaaatgaagaaatttcagctactctcagggaagaaaataaatgtttccaacccagcttgaatcagagtgttcctaggggagaagctagtatggtggagatggcgctaacccaaatatgaaacctcccaaygggaagttaacactcagagtgagaagactgagctactgtgatcagttaaccattccctcatggaatatcactttctttctggtactaaactttggaag

SEQ ID NO: 80777 - DNA, 1051 bp, Homo sapiens
tctagttcctgcagctgtttagattcccacattaagagagcccatgttgtcccatctcctttgcagggtcaccagataactcccagaaccattctaaatctgccagaagggaaggtatgcagcatcttattcaacctattttatgcaggaggaattttaagcctggagaagaaagattaacagttggcgccccgtgcgctggctcatgcctataatcccagcactttgggaggccaaggtggggtggatcaccctgaggtcaggagtttgagaccagcctggccaatgtggcaaaatcctgtctctactaaaaatacaaaattagccgggtgtgatggcacgtgcttgtagtcccagctactcgggaggctgaggttggaaaatcactatgaacccaagaggtggaggttgcagtgagccaacatcgtgccactgcactctggcctgggcaacagagtgagactctgtctcaaaaataacaacaaaaaagagagcccatgttgtcccatctccattgcaggatccccagataactcctagaaccattctaactctgccgaaagggaaggtattcaggatcttatttaacctattttatggatgagaaattttaagcctagaraagaaagactagcagttggctgtgtctttcctcttgggagtgtcttagttcaagctgctataacaaaataccatatactgggtggcttaaaacagaagaaatttatttttcacagttctggaggctggaagtctgagatgagggagccagcatggttgaattctagtaggggccctctccctggtcgcagactgctcttgtctttccatgtctccacatggtggaaagaagggtagagagcaccctggagtctcttttataagggcactaatcccactcatgaggactccaccctcatgatctaaattaccttccaaaggccccacctctgaataccatcacattggggttgggatttaaacataaactttttttttttttgagatggagtctcactctgttaccctggctggagtgcagtggcgcgat

SEQ ID NO: 80778 - DNA, 853 bp, Homo sapiens
tgcatcacttaccaacagggatacattcggaaaaatgtgttgttaggtgattttttattgtatgaacatcatagagtgtacttacacaaacctagctggcttatcctatcacatacctaggctatatggtagagcctattactcctaggctacaaacctgtgcagtatgttactgtattgaatgctgtaggcagttgtaacacaatagtaactatttatatacctaaacacagaaaaggcatggtaaaaatatgctattataatcttataggactacatatatgtggtctcttgactgaaatgttattatgtggcattattattaaaygtgtgtgtattcatatatgtattaagattatatatatgaaagtaaaactacaattaacagtgttgtatgaggatcaatagaatcttttctgagtttatttcttaagtgagatttctatagcatccacaccaggctgaccatcagtatgccttgacttagctcctttagagcagtccaaatcatgtctccaacatatcttcccatgtgcctcttttccttctcgcagatttatcttttgcttcactcaggtgactgcctgttctactttggagaaccacctctgctgccccaattttcttgctccccaaatgaccttcccttttccttcaggtcaaagtcaaacctttttcgaaaactgtctcagtgctttgtttttttgttgttctctgcactttctagcacacattatttgtatcataatcataatgtggttgaaatgttttttacttagtagattcctagtgtgcaagaatcttaaggcatcaggacacagtattgtgtatatagtaccattgcaactatatg

SEQ ID NO: 80779 - DNA, 853 bp, Homo sapiens
tgcatcacttaccaacagggatacattcggaaaaatgtgttgttaggtgattttttattgtatgaacatcatagagtgtacttacacaaacctagctggcttatcctatcacatacctaggctatatggtagagcctattactcctaggctacaaacctgtgcagtatgttactgtattgaatgctgtaggcagttgtaacacaatagtaactatttatatacctaaacacagaaaaggcatggtaaaaatatgctattataatcttataggactacatatatgtggtctcttgactgaaatgttattatgtggcattattattaaacgtgtgtgtattcatatatgtattaagattatatatatgaaagtaaaactacaattaacagtgttgtatgaggatcaatagaatcttttctgagtttatttcttaagtgagatttctrtagcatccacaccaggctgaccatcagtatgccttgacttagctcctttagagcagtccaaatcatgtctccaacatatcttcccatgtgcctcttttccttctcgcagatttatcttttgcttcactcaggtgactgcctgttctactttggagaaccacctctgctgccccaattttcttgctccccaaatgaccttcccttttccttcaggtcaaagtcaaacctttttcgaaaactgtctcagtgctttgtttttttgttgttctctgcactttctagcacacattatttgtatcataatcataatgtggttgaaatgttttttacttagtagattcctagtgtgcaagaatcttaaggcatcaggacacagtattgtgtatatagtaccattgcaactatatg

SEQ ID NO: 80780 - DNA, 853 bp, Homo sapiens
tgcatcacttaccaacagggatacattcggaaaaatgtgttgttaggtgattttttattgtatgaacatcatagagtgtacttacacaaacctagctggcttatcctatcacatacctaggctatatggtagagcctattactcctaggctacaaacctgtgcagtatgttactgtattgaatgctgtaggcagttgtaacacaatagtaactatttatatacctaaacacagaaaaggcatggtaaaaatatgctattataatcttataggactacatatatgtggtctcttgactgaaatgttattatgtggcattattattaaacgtgtgtgtattcatatatgtattaagattatatatatgaaagtaaaactacaattaacagtgttgtatgaggatcaatagaatcttttctgagtttatttcttaagtgagatttctatagcatccacaccaggctgaccatcagtatgccttgacttagctcctttagagcagtccaaatcatgtctccaacataycttcccatgtgcctcttttccttctcgcagatttatcttttgcttcactcaggtgactgcctgttctactttggagaaccacctctgctgccccaattttcttgctccccaaatgaccttcccttttccttcaggtcaaagtcaaacctttttcgaaaactgtctcagtgctttgtttttttgttgttctctgcactttctagcacacattatttgtatcataatcataatgtggttgaaatgttttttacttagtagattcctagtgtgcaagaatcttaaggcatcaggacacagtattgtgtatatagtaccattgcaactatatg

SEQ ID NO: 80781 - DNA, 853 bp, Homo sapiens
tgcatcacttaccaacagggatacattcggaaaaatgtgttgttaggtgattttttattgtatgaacatcatagagtgtacttacacaaacctagctggcttatcctatcacatacctaggctatatggtagagcctattactcctaggctacaaacctgtgcagtatgttactgtattgaatgctgtaggcagttgtaacacaatagtaactatttatatacctaaacacagaaaaggcatggtaaaaatatgctattataatcttataggactacatatatgtggtctcttgactgaaatgttattatgtggcattattattaaacgtgtgtgtattcatatatgtattaagattatatatatgaaagtaaaactacaattaacagtgttgtatgaggatcaatagaatcttttctgagtttatttcttaagtgagatttctatagcatccacaccaggctgaccatcagtatgccttgacttagctcctttagagcagtccaaatcatgtctccaacatatcttcccatgtgcctcttttccttctcrcagatttatcttttgcttcactcaggtgactgcctgttctactttggagaaccacctctgctgccccaattttcttgctccccaaatgaccttcccttttccttcaggtcaaagtcaaacctttttcgaaaactgtctcagtgctttgtttttttgttgttctctgcactttctagcacacattatttgtatcataatcataatgtggttgaaatgttttttacttagtagattcctagtgtgcaagaatcttaaggcatcaggacacagtattgtgtatatagtaccattgcaactatatg

SEQ ID NO: 80782 - DNA, 853 bp, Homo sapiens
tgcatcacttaccaacagggatacattcggaaaaatgtgttgttaggtgattttttattgtatgaacatcatagagtgtacttacacaaacctagctggcttatcctatcacatacctaggctatatggtagagcctattactcctaggctacaaacctgtgcagtatgttactgtattgaatgctgtaggcagttgtaacacaatagtaactatttatatacctaaacacagaaaaggcatggtaaaaatatgctattataatcttataggactacatatatgtggtctcttgactgaaatgttattatgtggcattattattaaacgtgtgtgtattcatatatgtattaagattatatatatgaaagtaaaactacaattaacagtgttgtatgaggatcaatagaatcttttctgagtttatttcttaagtgagatttctatagcatccacaccaggctgaccatcagtatgccttgacttagctcctttagagcagtccaaatcatgtctccaacatatcttcccatgtgcctcttttccttctcgcagatttatcttttgcttcactcaggtgactgcctgttctactttggagaaccacctctgctgcccyaattttcttgctccccaaatgaccttcccttttccttcaggtcaaagtcaaacctttttcgaaaactgtctcagtgctttgtttttttgttgttctctgcactttctagcacacattatttgtatcataatcataatgtggttgaaatgttttttacttagtagattcctagtgtgcaagaatcttaaggcatcaggacacagtattgtgtatatagtaccattgcaactatatg

SEQ ID NO: 80783 - DNA, 853 bp, Homo sapiens
tgcatcacttaccaacagggatacattcggaaaaatgtgttgttaggtgattttttattgtatgaacatcatagagtgtacttacacaaacctagctggcttatcctatcacatacctaggctatatggtagagcctattactcctaggctacaaacctgtgcagtatgttactgtattgaatgctgtaggcagttgtaacacaatagtaactatttatatacctaaacacagaaaaggcatggtaaaaatatgctattataatcttataggactacatatatgtggtctcttgactgaaatgttattatgtggcattattattaaacgtgtgtgtattcatatatgtattaagattatatatatgaaagtaaaactacaattaacagtgttgtatgaggatcaatagaatcttttctgagtttatttcttaagtgagatttctatagcatccacaccaggctgaccatcagtatgccttgacttagctcctttagagcagtccaaatcatgtctccaacatatcttcccatgtgcctcttttccttctcgcagatttatcttttgcttcactcaggtgactgcctgttctactttggagaaccacctctgctgccccaattttcttgctccccaaatgaccttcccttttccttcaggtcaaagtcaaacctttttcgaaaactgtctcagtgctttgtttttttgttgttctctgcactttctagcacacattatttgtatcataatcatwatgtggttgaaatgttttttacttagtagattcctagtgtgcaagaatcttaaggcatcaggacacagtattgtgtatatagtaccattgcaactatatg

SEQ ID NO: 80784 - DNA, 1960 bp, Homo sapiens
ttgaacaggaaaagaagggagaaatggcatagcatccagaaagaggagagtattggaaaacattgcagtacataacaggttgctgtgctgggccatttaagtagtttaggatcactggaccataaagcatgagagagagtgtagcaagagatgagcccagggaagcagccagggcttcagataccgtgctaagatgctgctacttacgtgtaagcagaaaagtaaaacaattatgcagtatttatcctcttagaaagaacattctagctgaggtgtgaagaatggatctgagtttggtgacaagagaggcaaggggaccaattaagaggccactgcagatgaccaggcagcgctgattaccaagacatttcatggctctctctaatcagtaacaatagttaaaacgtactattgttgatattccatgctgatctaggccaaactgcaactgctaaccctagagaaatgtagaaatggactcgttccaaaaaaggggaataaaactttttttttctctgatagaagccgttttcttcttagagatagtatttgaaattacctttaagatgtcatcctatagtattaattttctgctgtttaaggtaagcttgataccccctccatctctaacacctcatacttacagcatcactacggtatatggaaccaaataagattgtttcagttaaagtctttgaatcaaaaagatcagaaacttgctcaatcactggagacaattcaacaaggactgacataaaaaggtaaactcagttaggttaggaataaattaccttgtgctatgtgagaaaaagaaccatattttggaaaaacagttgcttgtacataacatttgttagttaggatgatggtaaatgaatatacactgtatattatttatcagaattctcatatcttcactcttttaaaattcaactgagaatgtacatgtgttatataaaatttttcataatttggatttaatttgtttcaaaaattttgattacttgtattggagttgcagcctaaaagtcaactaccctaattttcaattaatcaaaaattattacaaattacaggtcacatattatgtaacatggtgaccatacacagttcattaaccatgtattgtattctggaaaaatgcttaaaaagaaacggtagctttacagagttctcaccacaaaaatgacagctatgtgaggtaagacatatgttaattagctcgattaagctattccacaatgcatatacagatttcaaaacaccatgttgtatataataaatatacacaattttataaataaaatgttttctgacattaaaaaaataaagaactcttatccacagtgctaggaactataaagtctctctccctttttttttttttttttttggttttggtcttttaaacattttatttttatgtagaactcaacagattccagcttaatttttcacattgctttggccatggaaagatcaaccttctactagcctctggacagactccactcatttttcactaaggtagctccaccgttgktctttttttttatttttttatttttaatttttttagattcagagggtacaagtgcaggtttgttacatgggtatattgcgtgatactaaggtttggggtatgattgatctcatcacccaggtactgagcatagcacccaatagttagtttttgaatacttgccctcctctcaccctccccactctagtagtcgccagtgtctattgttgccatttttgtatttacctcccactcataaatcagaacatacagtatttggttttctattcctatgttaattcacttaggatgataacctccagctgcaaccaagttgctgcagatgacataattttatttgttatggctgcatagtattccatagcgtatatatactatattttcttgatccaatatattgttgatggacacctagat

SEQ ID NO: 80785 - DNA, 706 bp, Homo sapiens
catcagaacatgactagtagtataaaataaaatgaaggtagatcaactttactcatttattggtaagattttgggctaataaatttgagtaatgagttgtgattattattaaaacacacttaagttaggatgttttcttggttccccagcctgtcctcatttgcttgaactgccctcaccactgactctttgacatttccccttaaatatctcaaaagcccctcaaaatcamcccatcctttgctaaactcaccatatgccctctgtggataacagcctccaagctggccttgaataatttttatttcttggtgttcacccacttgtgtatcttctccccaccacacatattatactggggttggtcacataataccatatgacagaggtaatggtatgccactcctaatattagtttaaatgttctgcagcttccatcttgaatattttctcttgctcgtgttctctcttttggacttcttgtctgagggtaagcaaactgctgtgtcatgagcagtcctagggaggagcatatgttgcaagaaactgaagccccaagtcaatagctaatgtggaagtgagacctgccaaaaatcacattagtgagcttggaaatgtattcttcagttacaatagaaccttgagataactgcagcactgggtggcagtttggttgcaaccttgtaagggacacttgaccaaaacc

SEQ ID NO: 80786 - DNA, 706 bp, Homo sapiens
catcagaacatgactagtagtataaaataaaatgaaggtagatcaactttactcatttattggtaagattttgggctaataaatttgagtaatgagttgtgattattattaaaacacacttaagttaggatgttttcttggttccccagcctgtcctcatttgcttgaactgccctcaccactgactctttgacatttccccttaaatatctcaaaagcccctcaaaatcaacccatcctttgctaaactcaccatatgccctctgtggataacagcctccaagctggccttgaataatktttatttcttggtgttcacccacttgtgtatcttctccccaccacacatattatactggggttggtcacataataccatatgacagaggtaatggtatgccactcctaatattagtttaaatgttctgcagcttccatcttgaatattttctcttgctcgtgttctctcttttggacttcttgtctgagggtaagcaaactgctgtgtcatgagcagtcctagggaggagcatatgttgcaagaaactgaagccccaagtcaatagctaatgtggaagtgagacctgccaaaaatcacattagtgagcttggaaatgtattcttcagttacaatagaaccttgagataactgcagcactgggtggcagtttggttgcaaccttgtaagggacacttgaccaaaacc

SEQ ID NO: 80787 - DNA, 706 bp, Homo sapiens
catcagaacatgactagtagtataaaataaaatgaaggtagatcaactttactcatttattggtaagattttgggctaataaatttgagtaatgagttgtgattattattaaaacacacttaagttaggatgttttcttggttccccagcctgtcctcatttgcttgaactgccctcaccactgactctttgacatttccccttaaatatctcaaaagcccctcaaaatcaacccatcctttgctaaactcaccatatgccctctgtggataacagcctccaagctggccttgaataatttttatttcttggtgttcacccacttgtgtatcttctccccaccacacatattatactggggttggtcacataataccatatgacagaggtaatggtatgccactcctaatattagtttaaatgttctgcagcttccatcttgaatattttctcttgctcgtgttctctcttttggacttcttgtctgagggtaagcaaactgctgtgtcatgagcagtcctagggaggagcatatgttgcaagaaactgaagccccaagtcaatagctaatgyggaagtgagacctgccaaaaatcacattagtgagcttggaaatgtattcttcagttacaatagaaccttgagataactgcagcactgggtggcagtttggttgcaaccttgtaagggacacttgaccaaaacc

SEQ ID NO: 80788 - DNA, 733 bp, Homo sapiens
tcagtggagggcagcaaggcactgaggacagcaaatggaccagaggctcctcccctaatgccatggagttaaataagaacaatgtgacctgttgagtaaaggcaccctgtatccagaatcagaaggaaaattagggagagagaaaccctgaaagcttgagtatttatttactcaaaaaagtctgaggtaatttggataggactgaggaaagtggaagaactgttacctttaaagagaaagattaatcacagggaccacacaagacagggctcaggggtaaggtgaattcactcacagagaataaaggacattatatgtgtgcaagcctgagtcatgactacaagtattaaacccaaaatcgagagactagaacctgaagaattccgtatttcacaccttcctctgccacatgaagccccacagaggctgagcagtaaaagctcaagtgaccaacagaaatatcccctccagaaatgacaaactgatgctatacaattctctaattttagagaaggaaaatagggatgcaggaaaarttaatgattagcttaattaaatgctatggttctatgtattcaacctatcagccacagaaataaaaatctaaatttgtttttccagctaccaccaatatatggggagaatgggaagcagacattaagtcctgaggccatgaaagttcaagaaaagaatacagttaaatcttcagtcggaccataattaaaattagttt

SEQ ID NO: 80789 - DNA, 694 bp, Homo sapiens
ccccctccccaccagcctttttccttttgtcaccaatgacaggttcacctgtgccacaccctcatgagtctagtaactggaaggtgggtaaaccccaactgagtgcctgtgactccaccctcttactttccactcaagtggcattataagaataaccttaaatttgatctaatttatacatattcctctcttagtaacatttctaacaacagcactcacaatcaaacccagtttgattgtgagattgggttacagaacacacaggtgaggctggagcagcaggttttaaaaactttattctaatgtgatataaagatgtgatggtttaaaaataagaaacacatatttatcagctgtggggatgctacacttgctagcttgcatccattcttcttgaaacaaggtatctggacacactatacccataagtggctctttgcaataccccaggcagaagctccartcagacacagctctctcaggctcacagggtggcaacctcctccttcatgtgggctctgaagggcaagggaaggagcacaggcagcaggggacagggagcagcccggggctgttgggattcccaatcaccgcagagctagtctctgtaaaggtgctgtgtggcaatgactaggtagagagctgggctccacagagaggtgaaaaccactcctgtatctttaactttccccca

SEQ ID NO: 80790 - DNA, 1030 bp, Homo sapiens
agatatagcacctaaggaatattgctaatattgtgtgtggtaggcacccttataaaagtacatagtaaatattatggcatcttagaatgaggagtgattaattctgcctggaggattctggaaggcttcaaagaatgggtgatattggaaggaagcttaccaattgaagaaaggtgcttagaaactgggaaaaacytccaaaggggaggagacaaaataaacagaggtgaggaggaaggaaatttcatacttcttaggtatagccatacacacagacagtggatcttgtttagattcaggaacataaagcccatgccaatttggaaaggatcttgaatgacatgctaagtaacatggactttattcctgatgcaataaagtgctggctatttggaaactgtcattagggaaagacaaggataaatccatatgatggaaaatgatctctggtagcaatgtgggaagaagtctggggttggattattggtgaggtggagactgcaggcagggagcccattataaaaatcataaaataatctgagaaaggaacacaaaagggtgggcatcgttcacaatccagtggcataatggagtgacttttgcttcatagaatacaattttattgactgtaggtcataaagaatcatgatgaggcaagaaaatctacatcaacaatagaaatatttttagatacattacttggagggggctgaaatttctgtgagaatattttttgaaaattatgtttttaaaagctattcccccttccttcttgttccagctacatgttgtttggtggataaaagtctgcttattcaatcatttacgtggtcttcattcaattaatctatatggattatctgcatgtgttagatattatgctaagtgctgggtgttgaattagacacaacgtttgtctatgggcatctcactgttaagtggatgaaaatgatactatgtatcagaaaatgtaatgattctgtgtttggaaattggcatttctggaaaaaaatcccattaaatatctaaa

SEQ ID NO: 80791 - DNA, 1042 bp, Homo sapiens
aaagtaattgattttataattattaaatcatgtttattgaatgaagattcatggataatattaatatgcaggagactaaagctgagaattatgcctaatataagagcaacaccaaccaaaatagaggaaattactgttttattttgttacttgtaaatatgatcattaaactattaaaatctctttactatttcaaaaattgttgtcagggttatccatgtgtttataattgtatattggatagctagttaaaatcaacagtgcaaaaaacaaacagttttaaacttcaaacaattattaatcataaggcagaatgagtaaataggatttcacttgaaagggtgtctagatctggcaagtcacaacttgacacgtcaaggcaaagaaactttgcactccccacaccccccagaaagaataaatggtctatgtatctacagaagatatkttttaaaaagaaggagggtctgcagcatgaggggtgatcagaccattgattgtggacttggattacacacagaactttgtggcgttggatgcacataatccttaatcctggggcttaaaactagaaaatcaaggacactaatatataaggctcaagttttaactagatgctgtactctatgcagctgctttgttgacaccttgtcacattaaattcagtagaagttgaaagtaagagaaaagcaacaagaaaaatggaaacaaaaagaaatcaatgtgttgcagtggatctggggaccaatctgaaagacaaggttctagttgtatttccaatgcgcattttccattttgtgatgttgtaaaagtaaagtcttcattagatacctctgatgtttacaatccccacaatagaaataaagaggaaatgagatgttccatttttaatattacacatacaatcattttacagtgtggaggttaattccgctcacaaaagtgcatgaaaggaattaaaggaaacaatttgaacattttaattcttttcatatatttcaaggggaggaattaggcaccaaaacacaaaacaattatatgt

SEQ ID NO: 80792 - DNA, 957 bp, Homo sapiens
aatttttttaagtgcagccaggttttctaaagagtataatcttcagtaaaaataaaagcttccaggataaaatatgtgaaatttgcagctgagcattttctagaacatcttaatgggtaagyaaagtaactgaatgggtcattacaaataatatttttaaaagtcaccttgcactgtgccctcaggtactcataaatccataagatgggatattttatgacaaaaagattcagattttctgatttttaccaccaaatatggtgttcattatttaggtgattatttcaatgtcattaactcttagtattctctcctaagtccattagagtcatcttccataagacatttcctatagttgtaatttttcacattttgcctcagggtcactagagtactttcagaatcataccattacactggcaaatatgacatatatgcaatatgattaattggtttgtaggtagataaaaataaactatttatagtttataacataaccctagactctcagaatatatcaaaatgactcatcataattcatttctatttatattaataaaataaatatatcattgcaatggcatatgacttgtttagcagaagaaatagatgataatttagagaagttgctttacagaattcatgaatatataaagaattattagctaaagaaagcataatttacgggagattataatagaccttaggaatcagatatcttgacctccttaggaatctggagaggtattcaaagccccagaactggatgcaagaagaacaatgaaccgagcctcctaattctgcccatgttgctcttttctataatactttaaacccctctaagttaggtattaattttaatccaagtttgtcacaggtaaacaatttctaacttttttttttaactttagacttttacttcctcctacttaaaacacaacgctacttaatagattc

SEQ ID NO: 80793 - DNA, 1083 bp, Homo sapiens
cagcctcccaaagtgctgggattacaggcctgagccactgtgcctggcctgtttttgttttttgagaccaagtctcattaagtggcctccgcctcccaagtttaagcaattctcctgcctcggcctcctgagtagctgggattacaggtgctcacggccacacccagctaatttttgtatttttagtagagatggggtttcaccacattgcccagggtggtcttgaactcctgggctcaagwgatccacccacttcagtctcctaaagtgctggaattacaggcataagccaccgagtttttcggttttttactttttttttctctctttttttttgagacaggggctctcactctatcacccaggctcaagtgcagtggtgggatactggctcactgcagcctcgacttcccgggctcaagcgatcctcctacctcagcctcctgacaggctgagactacaggcgtgtgccaacatgcccagctaggcagcatcatttctgaagtgtaggggacaggttctgccccactgcctcatggtttgccagaggcgtgtggatccttctgtggcagccatgggcggaagacagaggaagtgacgtgacaccagatgtcgctgctgcccataaccaatgccagagcagatccagaacccagcactgtagttcagttctgggtaatcttggaccaggagctcagtactcagggcaggcaggactcaccctgcctccagctcgcaggattgtcctgaggccccgaaggataaaagggttcagagcatgagagccaagcaaaggctcagcacccaccagccatggcttcctctacttacggcgcttgccagtcccaccctggacatggggaggaggaagccagcatgtcccagccttgagtgggatttttttttcttttgagacaaggtctcgctctgtcacccaggctggagtgcagtgtggcacgatctcactgcaacccctgcctcccaggtttaagtcattctcccacctcagcctcctgagtagctgggactacaggcatgcaccatcacacccagctacttttttgtttttgtaaggacggggtt

SEQ ID NO: 80794 - DNA, 693 bp, Homo sapiens
tggagagatatttggaggaaaatgaatamctttgtaaaaacataattgatatttttatcttggcagattatctaactaattgtatctggtctgtcaaatatttttggcaggttttatttttttaatttaaaaatattctttagcttttagagtagttttagattcacagcaaaatagagcagagagtacagagatatttcaatgcccctttccctgacacacccatgcatcccccactatcagtatctctgcaccaaagtagtacacttgttccagttgctgaatctgtattgacacattatcactcaaagtccatagtttagcttaagatatgcttccagttttgcacattctttggcttgtgacaaaagtagaatgagatatattcacctgcctagtatcatacagggtagttccactaccctaaaaatcctctgtgctctgcctattctttcctctccttccctaacctctggcaaccactggtctttttaccgtctgcgtaatttccccttttccacaatgtgatatgcttggagtcattctccatctctttacatttaatatatatgtgtctttatatttcaagtaaatttcttatagacaattgataattaagtcttatttttaaatccactttgacaatctctgccttttaattactgtatttacatggttgaattttaaagtgat

SEQ ID NO: 80795 - DNA, 693 bp, Homo sapiens
tggagagatatttggaggaaaatgaatacctttgtaaaaacataattgatatttttatcttggcagattatctaactaattgtatctggtctgtcaaatatttttggcaggttttatttttttaatttaaaaatattctttagcttttagagtagttttagattcacagcaaaatagagcagagagtacagagatatttcaatgcccctttccctgacacacccatgcatcccccactatcagtatctctgcaccaaagtagtacacttgttccagttgctgaatctgtattgacacattatcactcraagtccatagtttagcttaagatatgcttccagttttgcacattctttggcttgtgacaaaagtagaatgagatatattcacctgcctagtatcatacagggtagttccactaccctaaaaatcctctgtgctctgcctattctttcctctccttccctaacctctggcaaccactggtctttttaccgtctgcgtaatttccccttttccacaatgtgatatgcttggagtcattctccatctctttacatttaatatatatgtgtctttatatttcaagtaaatttcttatagacaattgataattaagtcttatttttaaatccactttgacaatctctgccttttaattactgtatttacatggttgaattttaaagtgat

SEQ ID NO: 80796 - DNA, 1132 bp, Homo sapiens
tatcctctaacagacaaccataaattaacagaatgcagaaatttgtctcaatatggtgtctctatggagatgcttgaaatatcaagcacccaattgctcaataaatgctaattggcaaagataataatgatatcttaactcatttcccaaaaggctttcttactctctgttgatttctccatccatctgctttagaatattaaaaggagaaaaagaattcagtactcataagaagtataaaattttctacaatttttgtagtttgagacatttctcattatacatttttattatacacatacacacataccttactacagttaattagtttataatgattaactttggaagcctctcccttctttgaattaaaacagatatttcagagattacttggatgaaaaaaaatgaggaagaggcctgatccatatttattgttacgctttttgtgactattccttccatatttgtgtggatctatcaccaggttatttattctgttccagtgatctaygtgtcaaaccctctgccatttacacagccttatatattgaagctatataataagtcttgaaacgcataaattaatttttcctcctttattcattttctccccaatgctattttagttatcctagggtttttgccctgccatataaattgtagaataattttgtctagatttacaaaaaaaaaaatcttgctgagggtgttataggaattgattacatctgtatataaatgtgatgagaattgacatctttactatgtagagtcttccaagcgataatcacaatatactcttcatttacttatatttttaaaaacttatttcaacagcattttgtagtgacaagcaagcaaatcctttacatgatttaatagattcacacttatatattctattttttgagccagaatatatggcattgtatttttaattttggaggtcacattttcattgccagtacatggaaatacagtgtacttttgtatgtttgcgctgtgtcctttaaacttgttgtggtcacctattatttctatgagttttgtttaattttgtttttgtttagattccttaggattttctatataaacaatcatgtcatctataagtagggacatttttatt

SEQ ID NO: 80797 - DNA, 593 bp, Homo sapiens
tgtgggccaggcaattgctgcaggggagaccacttaacttttcaaatgattctcattccttatgaagaaaagggcagttctgagccattggccaaatgataagcatttcccaaaatgctgtgtttttggtgtggagagccagcctgtccccttgaccacctgggtgcagggactctccccggcacctgacggacagtgggacctgcgagtctcaagggccagatttgcctttcagagctgtcctggaacttacccaagatagggacagtcagacttgcacccaagcattgctggtscccaaggtttcatcggggcttcacccacttctgttgtcagaggtgtgcatcctcacacaggtgacactggcaggcagtcattttgggaggacatggtaagaaggcgacactttatgtcctgaaatctgatagtattgattgtaatagctgcaaagaccagtgcattatgtaaatttggttttatttattctgctgacatttaaacttttgttaactcagaatatttgagacatacgcacataactgtagcattgtagaatgggtaaggattttgttatctaatcagaaatctagttc

SEQ ID NO: 80798 - DNA, 639 bp, Homo sapiens
cttgggaacccaccgcctgttggcaagggtttgctgagctccccatgggccgggcacgctgccagtgtgcaccaccagcatccagggccacaagctggagagacaggcactgcagaggcctaggcatgggctggagacataggcacagtggagcctgagccacgagatggagagacaggcatcagcggaggcctgggccatgagctggagagatgggcaccacagaggcctgagccacgagatggagagacagacactgtggaggcctaggccatgggctggagagacaggcactgtggaggcctgggccatgagctggagagatgggcaccacggaggcctgggccacgagatggagagacgggcaccgyggaggcctgaggacatgataaggtacacaccagggtctggcatctggcagacggcagagctgctgaaggctcaggccacaggagagggtcctgaaggcatgaatgagcaatgagatccttccccatgagcccagcctgccccgcagcctcaggaactgggtcagtcacgcggcttccatccaactcagacgcccccactggccacctcactaagcctcttggtctccatcctttccttggattcttgcctctctcacctgtagcccag

SEQ ID NO: 80799 - DNA, 639 bp, Homo sapiens
cttgggaacccaccgcctgttggcaagggtttgctgagctccccatgggccgggcacgctgccagtgtgcaccaccagcatccagggccacaagctggagagacaggcactgcagaggcctaggcatgggctggagacataggcacagtggagcctgagccacgagatggagagacaggcatcagcggaggcctgggccatgagctggagagatgggcaccacagaggcctgagccacgagatggagagacagacactgtggaggcctaggccatgggctggagagacaggcactgtggaggcctgggccatgagctggagagatgggcaccacggaggcctgggccacgagatggagagacgggcaccgcggaggcctgaggacatgataaggtacacaccagggtctggcatctggcagacrgcagagctgctgaaggctcaggccacaggagagggtcctgaaggcatgaatgagcaatgagatccttccccatgagcccagcctgccccgcagcctcaggaactgggtcagtcacgcggcttccatccaactcagacgcccccactggccacctcactaagcctcttggtctccatcctttccttggattcttgcctctctcacctgtagcccag

SEQ ID NO: 80800 - DNA, 1128 bp, Homo sapiens
  misc_feature (1)...(1128): n = A,T,C or G
cccgcgtgtcaggcacagttcttgtgcgnagggccatcccccaacacaggacctggaggcagaatgggctcttcttccaggctacagggagggctctgtccaggcccttgccttccccgcagccctcctcaggcatgggggctctggcctcagccatctttggattgaacagaacccatttcctcctatcctgcctggtagatgaaatttcacgctcttgagatttcaatttcggggtcccggggtgggggtggtgtttaagaacgacattcgcatgtcacagtgtacaaagcattttacccccatgatctcatttaatcttcatagcagctggttggaggaagcacctcctctcctttcacagggtggcagatggaaggccagagaccttgctctttgctcaccgtctcctggccaggaagtcttagagttgggccttaaccccttttcttggactccaagacccaggttcttactgtggcatgacagctgccaggatctgacgtccktccgggatggcttgcctacaagttgctggagagctctttgcatctgccgagtttctgaagggtagacccttctgtatcctgctgtgaaggtctctggatctcagcgttcttgtgggaattgattcacttctttcagagcatgagggccacacctgtgtttggagcacacccctgaaaacaaagagtagcttctccttccgagggcacggagcccagggtgccgcaagtcattcaaggtcaaggaagatagagcagtgtgcttcatcccagtgacctgctcttgaagggaaaaggggcactgccaggtggggtgtgacgtcaccaacctttttatcgcccccctcccccgccccgtggccacccgccgctgcccccgtgtgacaggtatggcagacaccgttcccatcttaccagtgagaggaggctcaggctcactgactcctgaaagttaagtcacccgggatctaagcccaggtcctccaaccccaactccagcaagctgcctccctccggttattcagggggctctgggcggacgggagggactttcttgtcaggggtccttcatttctctctcctgctgcacggcccttctgcaggacggctcctccctcgggcc

SEQ ID NO: 80801 - DNA, 1128 bp, Homo sapiens
  misc_feature (1)...(1128): n = A,T,C or G
cccgcgtgtcaggcacagttcttgtgcgnagggccatcccccaacacaggacctggaggcagaatgggctcttcttccaggctacagggagggctctgtccaggcccttgccttccccgcagccctcctcaggcatgggggctctggcctcagccatctttggattgaacagaacccatttcctcctatcctgcctggtagatgaaatttcacgctcttgagatttcaatttcggggtcccggggtgggggtggtgtttaagaacgacattcgcatgtcacagtgtacaaagcattttacccccatgatctcatttaatcttcatagcagctggttggaggaagcacctcctctcctttcacagggtggcagatggaaggccagagaccttgctctttgctcaccgtctcctggccaggaagtcttagagttgggccttaaccccttttcttggactccaagacccaggttcttactgtggcatgacagctgccaggatctgacgtccttccgggatggcttgcctacaagttgctggagagctctttgcatctgccgagtttctgaagggtagacccttctgtatcctgctgtgaaggtctctggatctcagcgttcttgtgggaattgattcacttctttcagagcatgagggccacacctgtgtttggagcacacccctgaaaacaaagagtagcttctccttccgagggcacrgagcccagggtgccgcaagtcattcaaggtcaaggaagatagagcagtgtgcttcatcccagtgacctgctcttgaagggaaaaggggcactgccaggtggggtgtgacgtcaccaacctttttatcgcccccctcccccgccccgtggccacccgccgctgcccccgtgtgacaggtatggcagacaccgttcccatcttaccagtgagaggaggctcaggctcactgactcctgaaagttaagtcacccgggatctaagcccaggtcctccaaccccaactccagcaagctgcctccctccggttattcagggggctctgggcggacgggagggactttcttgtcaggggtccttcatttctctctcctgctgcacggcccttctgcaggacggctcctccctcgggcc

SEQ ID NO: 80802 - DNA, 711 bp, Homo sapiens
ggaaaaatctgaagtctgaggcctgcccagggcagaagcctagaaaacaaccccccattttaggtagaaacctcaaagagctgacccctcgtagcagtcatgtagtaataaattcttaacaactggctctccaagatacaaagcccttgtttgcaacatctgctaactgccatggtgtaaatactcctaccaaggccaatttcatgctgccagtatgacattgctggacacagagctgagaaaagagtgcacagtcggttctcatggctacagcacaccacttcctagaagttagggtgaaccggaggaagccagttcttatggtccagctctgaatcagcagaatgatgcagataatctctcaaaccctgaaattagattaaagtgatcctagattgccaatgactcgtagtgaactcataggtgactcacgcataaatgaaactcctctgaaagaagaaaatatacaactgttctcattttttcctgaaaaataaataaaaccaacaacaatacmctcttcactacacaagtaaagacaaccagacagataagtaaacaagaccacatgaatgagaaccaatacaaacaacagacaaaataaaccagtacaggtacctagagagtagaaaggccaggaaagaagccagacaagcaaaacaaactgtatgattgtttccatttatataaaggtcaaaatggcaaaataaa

SEQ ID NO: 80803 - DNA, 764 bp, Homo sapiens
ataggctactgctatgagacttttctaataccgtataagtgtttattagatttctaatgctgtataataaattaccagaaaacacagcaacttgaaaacaataaacatttatcatctgatggtgtctgtgggtcaggaawgcagtattatttcctaaaatagctgggcccgtattgagatcttagtttaaggctactcaaagaagacatatttctaaataagatctctcacatagttgttggcaggctttaactttttgatgcctgttggctagagacttcagaaagctgctgactttccccagaacaagtgatctgaaagtgagaaagttccatgccagatagaagctgcagtcttcttgtaatctaatctcagacatgacttagcataatttctgccatacgctatttgctaaatccaccccacaatcaacagcaagggaagaaaagtcttccttttaaagggaggatgaagtataaaacaattcatcctctagccaaaaatcttaatttcctccctcttaaaaaatacatttctctcccctcaagatccacagatgttgtattctactgtagaatctgctttaagttcagaatcttgtcacttaaatcaggaccagttgtgaatgtcacccctttgctgtactttctaaagtttagctcctagagtacagttgctctcaatctgtagacctgtggaactaaaataaaaaattatctggtttatacaaacccaatagacaatggtggggcagacatagaaaa

SEQ ID NO: 80804 - DNA, 548 bp, Homo sapiens
gtgatggtgctagccatacccccagtaaccacctctggctgcttgtggaatgctcagcatgtgcccagcacttctcatttgatcttggctgctcacaataaccctgtggcatatgttttatctccactttgcagatgaatgaacagaagctcagctagtaagcagaaggaccaggcctctatcagagctctggggggctctatgttaaacccatgcacttaatcatccactggtctggtgctctgaaactttacatcaccttaggatttgtcaaaatgtagattctgactcagtaggtctggsggcagggcctgagatgctgcatttcctttttcctttccctcttttttttcttttttcttttttctttctttcttttttttttttttttttgagacagagtctcgctctgtcgcccaggctggagtgcagtggcgtgacctcagctcactgcaacctccgcctcccgggttcaagtgattctactgcctcagcctcccgagtagctgggactacaggggtgcgccaccaccattgaggcacctggg

SEQ ID NO: 80805 - DNA, 713 bp, Homo sapiens
aaagaggtaaaaaaaaaacaaaaaacaaaaaaaacaaattgaggttaattttctctctgaaactataattagaaaagagaaaataggaatcaacacagggaataatgagaaaatatatctaattgtaactataatttacttaattcttattctagaaggtataatgctttaaatgttaacatttagtaatgttggtatggtcagtatacatgcagtggtctttagacttttttttttttttgaagagttttttttttctttgtttttgaaaatgtatgtagctaatacacacatttcatggaaatgttggcaaacagttgatgcttctctatggaaagrggagatctcccctgcttcttttatcttacctttacctcaactttggtctcatattctttaccttgctcctacattatggacattaaactcatttaagtttttacctccctattctcagaaactttggaattagacttcccagtttcaaagcctggttctgctgcctgttgcctgcatgatcttgagcaggttattttctactctttgcctcagtttcttcttctataaaataaaaaccagatggcttcatggcaaattccaccaaacttttaaagaactaacacaaattcttctcaaactgttttttaaaattgaagcggggagctctcagcaacgtggaaaggaactggccagcaacttagcttaaaggatcc

SEQ ID NO: 80806 - DNA, 673 bp, Homo sapiens
aggggtcacagaggcaaaagtggaagctgacccagctgatgcctagactggagtccacccccagccctctcggccccacattagggctcattagcacttcttctaacttaccaagaaattcaatgtcctacaaaataaccagccgagccccaagggagccagaaggcctattcatcacagctggggtttccaaggacctcactgtctgtcccatggatttcatcctgtgaagaagctggcccaccatgggaagagagactaattggtatctccatagcttggactattttttccactggatctgcagtttctgggtaaacagkcatcaaatcagcattcagcatgagctgaaggaaagtttgcacacttgccatgtggcctaaattaagtgagtggtgcagtcagtaaagcatgtgtgctaaaaaataaacatttaagatgtcagggttgaagatactcttgtagccttttaaggaaggagatgtcaatttcttcttttaaaattccaaataaaaatgtcactaacaatatttctgatatcacttcacaagtgtcagcccatgcaagcaatagtgtgtgtgcatacatacaagggtgtgtgtgtgagagagagagaatgaaaaggcatgtacatacacatgcacaatagatatgtggatttctgtacgtttgt

SEQ ID NO: 80807 - DNA, 726 bp, Homo sapiens
agggtatggtttgtaggtggcctgtggggtcacgcggctttctctgccctctttgagactggctctgattgtgtgcattggctggaaacaatgtggtcctaaacaagatgaggtagattttgtctgagtggaaggactgatgagctgagtgccagtgcagcctgacccaacaagcaggcggtaggaagggccttgcccacagcaccactcacatttgctacctccctagagagggcagaatccccaccggccacatcccaagaagtggcttctgtgaaactattagttacatgttttcyaggccttgccagtgattctccagcacatctcatgtcctgagtgttatgcaagttggggtgagactgtggagcgtgccctcaggacacccacagtctgccagggcacagaaaactgcccagtcctgaggtcaaacccatggctcctgggttgcaaggacacagaaaagcaatttgtttgttcaatttcacaatttcctaagttctttcaaagcagagatcatgtttttttccccagcacctagcagggtgtccagcacacaaaagctctctataaatgttggtcaaatgaatgggcattggattggtctgagaggttactaaagtctttatggaggagacgaaacgtgacccgggctgtaatggatgagactgaactcctcaatggtcaattactttggatatatacatgctttccctgcactcagtg

SEQ ID NO: 80808 - DNA, 562 bp, Homo sapiens
caagaacttccttgcttcatgctgtttctcactcaaccacaacttccctcggttaaccagccttgcctatctggctggcctgaccagccaggacagtcgatgccagagatgaaaccttatgaattctgtattctagatactttagctgtgtttttccttaatctcataacaacctcaagagcccataaaatggtattgagagaatcacttatttttgcttctcatattttcaaggacaggaggagattcctattccattccccagcggggccaagtgtggaggaacatgtctatctagctttcattctccttttccccagagcaggaggaggatttctctgamtgataactttctgagaaggtggggtgctgggttggaccgccctgtaccctggtaatgggctgtctgcagttgctgtgttagtgactgggggtaaagtattttcacttcaaccacatcctccagtctagctcttgtcagcaatgatgatgacattttgatctctacctgcttttcttccttagttctgaactcagaaggggcagaaagagtgtttattgg

SEQ ID NO: 80809 - DNA, 296 bp, Homo sapiens
atatatatatataatatatatatatatwttttttcttttttcttcccagtggcagtattggtctaggtgccagaggatgggggcttggaccagggaagttgcagtggggagggagtggaggaatctgagagctattttggaggaagaatctctgcattcaagcgtggagggcgtgcttctccttagctgcaggaaaacctcaatgcgtctgctgcttctagtctcttattctctccctttatatatttcctttgcatttttattatccatgtattgaaactcctctgacattgatt

SEQ ID NO: 80810 - DNA, 536 bp, Homo sapiens
cctacgtgtgtctgaccaccagttcatgttctgacggcasgctagtctgcatcacagagtgtggggtagatggtgcatgcctgctaggatgggctaggtatcactgtaggtaagaaacagccccaaacgatggaaatgtacaccactgaaggctcttttcttgcccatgctgcacatcctccatggctctcctgtgccctgtgccccacatgccctcatcctgccacgagaataaaggagcagcctccatatgggagctgtcagctgctctaagagatgaaggagagggtggccagtctcaatggctcccaactcttgcctcgaggtgacacacttcacttccactcacatctcttgggtcaaagcaaatcccatgggtacatccactttcaagtggcccaggagagaacctgaaatactcggtggactccattaaggctgtcatatggtgtcagcctacatgggagactgtggaggggcagaggaggagagtggggaactgatgggaaatgacaggaggactaagtcaccgcaga

SEQ ID NO: 80811 - DNA, 293 bp, Homo sapiens
aggtttagggccatcaaacctccctaacccctccccaccaccccagcacagtcaaaaattcacatataactttggactccccaaaactaaactaacagcctactgttgactggacaatccttaacacatatttcatacgctgtatgtattttacaccgtagttttacaatgaagctagttacagaaaagaaagtgttattaagaaaattatagggaagaaaaaatacrtttacagtactacagtatatttatttctctcataagtttacaatcctgtgtttacaagatggatc

SEQ ID NO: 80812 - DNA, 610 bp, Homo sapiens
tgctttccatacccaggcctgctcctcctcctgtttccacatctctgttcgtggtcccaccactcacccagataaccaagcagaaattctggggacaataccaccctccaaagtgtcaccaagtcatgagacttctgctggttacatgcaacccaatcgatccacagctctctatctccactgtcctcttcccagcagccttcgttttgtccacatgaccatcttgtgtccacctgattatagtggcctccttgccagcttcctgctcctggccttgtcccttctgctccactgcacatcctgcagcttgggggttggttatgaaagcttcaaggggacatttcaggtatcttccttcagctgatggtgtcacatagaaagacttgctcaaggaggattaggtggtattcctgcattgtcatgtggttcagagggagtcatctctagyacaaaagttctagacctttaaagccaaggtcccagattcaagtcctgacttccagccctcttggctgagtgactatggttgggtgaccatagaatgtattgtcccacctgacaaaaaagatgcctttgtaatgatcatcataggacaataggcatatcatgc

SEQ ID NO: 80813 - DNA, 725 bp, Homo sapiens
ttttaaacccatatcagggcacaaacccacagatggaattggttgaggcctctcttgaagcccttttcctctcctccaggtttaggatgctgttcgcgatggaaaggaagtccctggccaacactggtgcctgctctggcccttttataggagcatctcctcctgccttcaggtcttccagagcccagcytctgctcgctggtcctacatcttttctttttcttcttctttttttttttttttttttttttgagacagagtctcactctgtcacccaggctggagtgcagtggcgtgatctcggctcactgcaacctcagcctcccaggttcaagcaattctcctgcctcagtctcccaagtagctgggattaccggcatctgccaccacacccagctaatttttgtgtttttggtagagacagggtttcaccatgttggccaggctggtctcaaactcctgaacgcaagtgatctgcctgcctcagcctcccaaagtgctgggattacaggtgtgatggtcccacctcttgtcttgccactctgcccctcatcgtctctgcatcagcatcttatcactgttcagttcccaggactgttccctgctcttcacatctgtgtcttagcatgtgctgacccctcaccatgctcctccattccctcctcttgcctgctttgcccaaccaaatcctactcatcctccatttcttagctggagtgtcactt

SEQ ID NO: 80814 - DNA, 725 bp, Homo sapiens
ttttaaacccatatcagggcacaaacccacagatggaattggttgaggcctctcttgaagcccttttcctctcctccaggtttaggatgctgttcgcgatggaaaggaagtccctggccaacactggtgcctgctctggcccttttataggagcatctcctcctgccttcaggtcttccagagcccagcctctgctcgctggtcctacatcttttctttttcttcttctttttttttttttttttttttttgagacagagtctcactctgtcacccaggctggagtgcagtggcgtgatctcggctcactgcaacctcagcctcccaggttcaagcaattctcctgcctcagtctcccaagtagctgggattaccggcatctgccaccacacccagctaatttttgtgtttttggtagagacagggtttcaccatgttggccaggctggtctcaaactcctgaacgcaagtgatctgcctgcctcagcctcccaaagtgctgggattacaggtgtgatggtcccacctyttgtcttgccactctgcccctcatcgtctctgcatcagcatcttatcactgttcagttcccaggactgttccctgctcttcacatctgtgtcttagcatgtgctgacccctcaccatgctcctccattccctcctcttgcctgctttgcccaaccaaatcctactcatcctccatttcttagctggagtgtcactt

SEQ ID NO: 80815 - DNA, 1597 bp, Homo sapiens
gattacagacatgcaccaccacgcccggctatattttgtatttttagaagagacggggttttaccatgttggccaggctggtctggaactcctgacctcaggtcatccacctgcctcagcctcccaaagtgctgggattacaagcatgagccaccatgcctggccggggagaaataattctaaggaaacaatactctgcctgaagctcagccttggcgtggctttgcaaaggargcctttggaatcagagagggttcaaaccccatctctaatctctcctagctgtgtggcctcaggcaaatcacctgacttctctgtgcttacagtccttgttctagggacagagatgagcaatgaacagggcaaacatgtcatctgattggcaacaaggcttggtgccaatcaaatgacagcaccaagatttgacaagggccatgaaggaaatcaaacagaggccatgacagaagataatgagggccgaggaagtctctctgcaaaggcgacatttaaactgtgaccgcatttttatgtaatggaataagccgtctctcaccccttgtggcagccagggtcctggaagggaacagatggcaagttcaaattaagataatttgtgaggaaattaataaaaggactattcataaaggtatgggtagggggtaaaggagccacaagttataatctggtgccctgcagctagtgatagtgaggatcccacctctgccctcatccctaaacccaaatacagacagagagggttgcctgacagcagcagagatcttagcttaggaatatagcagcccatgggagggagtagggcctataaatgccctcttctatcctgcctcctcctgtaacattctatgggctccctattgcccaaacccaattagaaaccagtgggaaaaggtgcctcgtgctggggtttacacagtaaagcctaccagggcccaaataacagtggagaagagcagaaatcgggtctgtaaagataagcagatgctacccatttgttccctttctgcacatcggaatcttggggggtcatattagaatttgttagcgcttctaatcctgcattcataaggccaatgagaattaccttgtatgtgttttatgtgtatgtgtttaattctaaatgcttgatgatttgctatagatgcatttcttgcaaggggctttcactgtctagagctttagatgtaacaggtaatcaataatgctgcagctctgattccaaattaaataactgcacattcattacccgttcctggaagcacaccaggaactccccctccagaagcacaaatccccatgctcagagccttccttctcctctgctagcccactctaaccgtctggcagcttggatcggacaatgtgaatatcatccggcttttagaaatcaaactcccttcgctagtctaacctaaattgggaagaagaatgccaaggctctgaaatttactccgccaagctgagccccaagggaggacataacatttggctgcggaatcagggaatgtttggctgcttccctgtcatctgcttctccaaggaaagtggaggaacacagaatttcagctccatggtgtgt

SEQ ID NO: 80816 - DNA, 695 bp, Homo sapiens
atttactcataatcagtctctgagccaggaagagtctagacagagacaggaagaagatagctagaagtggaacctgagctatctgctgggagagagaaatcaacattgacttatttttcagggagcataactggaaaatgatccaggaatctggggtgagggtgcagagggaggcatatggaatgaggctcttctcatttgattaaacccaagggaagtggaaaccagttttcccttcctttttcccactggcgagcagtgagtttgttctaacaccttgcatgatagctgacacatgttgattaaacacaatttttttaaagtaaaaaatgggatttattggctcccagaatgccaagaccaggagttaaggtcaggttcagcacaacacaatcctgatacttaacagggtccttggtggtacatctctcagcaatgttctccttcattctcaggtggtctcctgacacaagctacagcttcaggcctccttcccagaactgtaaccacatcaggtcaatctggttcaatctttatgccacaaagtggtgagtttttcaggtgctgtggacctccaggttgaagatcacataaccagagcacgcccacaggaatcaagcatgcaaccacaggcagaacctaagcrtgtagattgaggagagggaactgaatttagaagtggactccacatggca

SEQ ID NO: 80817 - DNA, 807 bp, Homo sapiens
ccctcggtacaggacctcagaaagacccaagccatctggcaaacctgacataaagacaaaataaagtgattgaaacagtctcttcaaagccacaatggcagatttgttgatttgggcgttatctttcatgcgaggccctcagaagtcaccagaacacctaggtaatctcaggcgggcctgactggagtggatggagctttccaggccgaggctcagagaggggcccagcctcacctggcgggggccctgggatggcctgcgggcccccggaaactccacaattggacacagagcccaggcctcggcagcggtttccagcgaggcctcctccctccagcccctgcctgggtcccagctcsggagcggccccagacccagacagacagacagagccaggagaggaagctggtgcgaggctgccctgagcaggaggggatggcaggagatgaaaggctgctgccctgattacagccgacagcccattagtaatgccctggcagcttcggtatcagaacctgcttctcacagcccccagctgggcaaggcctgggcagatggctgtttgccaggttccaggggagggtctccctcagacaactgagtcttggaccagcaaagatcctggagccacagacccctgggcagctctggcccagttctgcgttaatgggtcagagttaacataacctggaacctggcagtctctgggcctcagcttgccttcctgcagaagggacaggacttaacctatgggtggagtttcccttatcctgttgggtggcaaagcctggagcccaaagccttgga

SEQ ID NO: 80818 - DNA, 1029 bp, Homo sapiens
ccacacatccaggaaagcacgtgagacagcccaccctggcccagccacgcagaaggcctcgtcctacctcttctctcccgcagtgggcccagcgaagtccaggcacagggcagggtaggggaggccctcacaggagcccaattcctcatcttcccagtaaggaccacccccacgaatccctcagcaccaaccagagcccctgttctcagctttgccccatctgatctcgccaaagacacagtgtgctggccctgactccaggctcaaatgtggcagcagaccacactgtggtgggcacaactggatgcctggggaccgatctgctgggtgattcaggatagacagcccctctgggccctgtctcctctgtaaactggaggtgaacggcacctaccatatggagcggtggaggaggtggggaatgggtcaaatcagtagctataaattgtagagtggggtgcatgtccccagtgcaaccatcgagtcggacttttgtctcttttgaaaaatttatttattttgagacagggtctcattccgtcacccaggctggatggagtgcagtggcacagtcatggctcactacagcctccaactcctgggctcaaaggatcctcctgccttagcctcccaagtagctgggactacaggcacacgccaccacacccagctaatttttgtattttttgtagagacggggtttcgccatgttgcccaggctggtctcgaacccctgggctcaagtgatccgcccaccttggcctcccaaagtgctgggatcttttctccttttgagactctcctgtggcctgtccagaggccacactccagcccaatttctacttcctgagctctccctacaccaacctccatgccctcaagcaaacctcccagacctactcctggcaaagakgttctgcaataccaccttcaccctcatcacccggaaaacagctgctagtaaacagctgcttctttcatgaaaacagcactagaaggctgggcgtcgggctcatgcttgtaatccca

SEQ ID NO: 80819 - DNA, 764 bp, Homo sapiens
acacaggcatcacccaggactttacacacacagcctcatggcactccctggcagccccactgaggaaggccctgctatcatccctctgtagaakaaggcaccaaggctcagagacaccacattgctggcccaagcacacacagctatgaaaaggcagagccaggattcaagctcagatctacctgacttcacaacccatgctcctgaccctccctgggaacaaggacaagcttccatagggacaggctacccctaaccccattacaaggtaatgagcatggtgagtaccctcacccaagatctcccagccctggcacacagtgctcccaagtgtgctgaacaaacacccgctttctttcaactcccccaaagaagggcaaccttgggctttcacagtagcagacagggaaggctggtttctgcttggtagaggcgccagggcacacagcacaaccccaatcctttcctgtccctctcagcaacccccatcctcttccctggtgctagggacacaaaactgacttggacatagttccctttcatgcaagttcctaggctgggaggaggtaagaggtgcccatcaaaggcatggcataaagctctggggagaagccggcagggcatggtggctcacacctgtaatcccagtactttgggaggctgaggagggtggatcacttgaggccaggagttcgagaccagcctggccaacatggtgaaaccccgtctctaataaaaatacaaaaattagccgggcttgaggg

SEQ ID NO: 80820 - DNA, 843 bp, Homo sapiens
ggtttttgttctggcagttaccaccataatcccattgatacattaatattcttcgtttcttgttttattcgttatctttatatcgattacatagtatttagttatatggatataccatacttatgattattacttttaaatcttacatgtaatactgcagtgagcctcattgtacacacatctttgtacacttgtgtaagaatatcttcaggatgggttcttagaagtgttctcccccctgtgttccagccactctatcctttcttgactgtggctctaaagatcattagtcccattgtattttgatgtcattgcaacctaaaatgggttcatatccacagtctcttctggacacacctctcagaataggacaggtagggggatggtttctatttcacattcagggctagagacttcagatcctctggggtgtcactggttctgtagggactgtttgggtcattctttttttccaggctagaccagggaagcagggagagattctttttgctagtgttatgtagggagggagaccttagagatgcctctgtgagctgtgttctggatgtccagggagttttaggaatagtagttgatgtgatctcttcttgggagaaagaagggctagagtatgtatgattctgagggactggcgactcttctctcagttccatgsagctggatggaggacaaaggatgtccttttcctttcaaaacatttttctgaaaggcatacataacttctgcttatgttttactaaccagaacctaatcacacagtcaccttagctgatagggagaccggaaaatgttgtcttttttttttttttcctttttgagata

SEQ ID NO: 80821 - DNA, 603 bp, Homo sapiens
agactccattttgtgttgcattcttgctctactcaatttaacaacaaaaaaaagagcctcatcttagagcttaagctaccataaggaattgctccatttgtcttttatagacagttcttgagcccatattctgtgccagactctgtgctaagttctggggttgaaaacatgagtatgatctagtgccctattaaaaagctcggagatgagtcaaccgtcaaaaatagtgcagaattacgaaaccgaaataagtgcatactgggcttcaactctttctagaggaatcccacgtaaatgctacaaatactggtccctatctcgagtcttgctcctctctagttctttctctacatggaaaccagagattgaaaggcatatctaatccagtcttccaacaactcacaggccatactagacaaccaccagctcctcaaaagggcttcttgcatgccttggagccctcacaaagakgttctgtctccctgaaacctctttcttccttttctttcccatctcacctggttaattcctacattttcttctggtatcagctgaaatgcaactttctctgcctcacctcaaccagttgagagcctctgagct

SEQ ID NO: 80822 - DNA, 825 bp, Homo sapiens
agtttcagctttctacatatggctagccagttttcccagcaccatttattaaatagggaatcctttccccattgcttgtttttctcaggtttgtcaaagatgagatagttgtagatatgyggcgttatttctgagggctctgctctgttccattgatctatatctctattttggtaccagtaccatgctgttttggttactgtagccttgtagtatagtttgaagtcaggtagtgtgatgcctccagctttgttcttttggcttaggattgacttggcgatgcgggctcttttttggttccatatgaactttaaagtagttttttccaattctgtgaagaaagtcattggtagcttgatggggatggcattgagtctataaattaccttgggcagtatggccattttcatgatattgattcttcctacccatgagcctggaatgttcttccatttgtttgtatcctcttttatttcattgagaagtggtttgtagttctccttgaagtacactcctctttttcttttatgcttccctgatggtagaacacagacatagagatgagggtatcatggaccaaacaggaacggacaacattatagaggtagcaacgcatcaaatgagaaggggtctggttcttaacaccttcaagtaacagagtcacaacacctgactttatgtcagaaattcagaaaaagaaagaaattcctttttagtgtaacactctgctatttggggtttctatctcacatagctaaatccaatttattctaactaataaaagcatcaaataaatatccaggattagaaatatgtaatactata

SEQ ID NO: 80823 - DNA, 642 bp, Homo sapiens
aaacgtgaaaactaattcaaattgtgaattgataaagcagtaaaaaatatatttcaaaaaacagaaaagttttaaacctcaggcataattataaatgtgtattcctatagagatttctgggcatatacgtcaacagaaacgtctaaatcactaagtcatccaaatatcccaggaatataatgtggatatttgaggctacaagtagctgttcactcaaaggtctactactagtgttttttctcatatggaaattaagtcctatcattctcttgcttacaattcctcaaaatcttcccatcaacaaaaacacaaatgaaaatcccttaggtattatggagggcttttcaaaagctggttcctaccacttgtctaacatcatttcctggcaagctatacctcactctccacagcttgcaattttccaaacaygctgtgctagacgactttctttcacttcccattatatttgcctcccttcccttttcttctcagtaacaaacaaacgttttctcagagtcgccaactcctgatattcccaggcacccagattgtgtcttccctgtatatctattatacttttaaacaaaatatcattaaccataagattaatagtatttcaagtttattaaaactcattttcat

SEQ ID NO: 80824 - DNA, 534 bp, Homo sapiens
ttattagaattgcagccccgccgtgcttcacataccacctctaggacactgcttattaatgtcagaagagtaagtgacatgtcaagtttccagaaccatgccaatttctaaaaacccatttgttagctatggtacagaaacaaaatatgcccagcagttttcaactgggctaataaatttaattaaacattctcataaaagcaaagaaaacttttctatttaaactttcttacagaggaaaccacgtttgttgtcttgcttcttgatggaagaaacctaaacattatctacctaaaagacrgatcatccatcttgtcatccatctgcaaagatattttttgaaaacatttccactgacagcttactttattttgccaatccatttaaagagacagcaccaaagttgtttttaaaaaaatcaagttgctgcaactcaaagagcttggagaattttctagcctagtatctaaatagtttatttgattacaagatgccccatgcttgctatatttctaaagaactaattcataagca

SEQ ID NO: 80825 - DNA, 534 bp, Homo sapiens
ttattagaattgcagccccgccgtgcttcacataccacctctaggacactgcttattaatgtcagaagagtaagtgacatgtcaagtttccagaaccatgccaatttctaaaaacccatttgttagctatggtacagaaacaaaatatgcccagcagttttcaactgggctaataaatttaattaaacattctcataaaagcaaagaaaacttttctatttaaactttcttacagaggaaaccacgtttgttgtcttgcttcttgatggaagaaacctaaacattatctacctaaaagacggatcatccatcttgtcatccatctgcaaagatattttttgaaaacatttccactgacagcttactttattttgccaatccatttaaagagacagcaccaaagttgttttwaaaaaaatcaagttgctgcaactcaaagagcttggagaattttctagcctagtatctaaatagtttatttgattacaagatgccccatgcttgctatatttctaaagaactaattcataagca

SEQ ID NO: 80826 - DNA, 1514 bp, Homo sapiens
atggtttcaactgagtcacgtctaagattgtatacaatggtgttatcctagccaacattctgctgcaggaaattaatgagtgaaattaattgataaaagcagcaaataaaatgaaaattaaagtaggctgcaaacttccataagacagccaccctgacttacctctggaatactaagtaaaaagtctacaacacccttgagaagtagaaagctggctgacgtatcagctaagagaacttttcagatttatgtttctttatattatgctttggctgtaacaattggattggctgtcccaatgtctytttataacagatacttacagcattgatttgggaaccacaaatattttctttgcaagtaagctggcctgaaattggattccaccacaatgcactatcaaaatgaactttatgcacattaataaacaagtaacaatttcttcacctacaagaggacttgtgaggtatcaacattttcctgtttactttctttgtagtgagcaaatagtcataaattcaaattatattatacttttcaaaagctaccccttagatgaagccttcagtagacattacacttttctgggttattgtcgtcatcttccccctttccaggttatattgtaaaacgctcatttcaatgatttttactgtagttttgagcaattttagaaattattattgtattttatattatatggcaaatatgtcacctgttatgtaatattcctagagtaggtaggtagccagaaatgagcaggcaagggatccctctgggaaaagaagttctagagatgccgtattagtcacgattctctagagggacagaactaaaagaatatacatatatattctttatatatattctacatatatatagaatgtattctatatatattctttatatatattctacatatatatagaatatattctatatatattctttatatatattctacatatatatagaatatattctatatatattctttatatatattctacatatatatagaatatattctatatatattactttatatatattctacatatatatagaatatattctatatatattctttatatatattctacatatatatagaatatattctatatatattctttatatatattctacatatatatagaatatattctatatatattctttatatatattctacatatatatagaatatattctatatatattctttatatatatattctctctacagatatataaagaatatattctttatatatatattctccctacagatatataaagaatatattctttataaatatgtgtgtgtgtgatgtatatatatatatatatatagagagagagagagagagagagagagagagaagtttaataagtattaactcattaactcacacaatcacaggggcccataataggcgatctgcacaggcggaggagcaaagagtcagagttccagagctgaagtatttaaagtctaatgtgcgagcgca

SEQ ID NO: 80827 - DNA, 1514 bp, Homo sapiens
atggtttcaactgagtcacgtctaagattgtatacaatggtgttatcctagccaacattctgctgcaggaaattaatgagtgaaattaattgataaaagcagcaaataaaatgaaaattaaagtaggctgcaaacttccataagacagccaccctgacttacctctggaatactaagtaaaaagtctacaacacccttgagaagtagaaagctggctgacgtatcagctaagagaacttttcagatttatgtttctttatattatgctttggctgtaacaattggattggctgtcccaatgtctctttataacagatacttacagcattgatttgggaaccacaaatattttctttgcaagtaagctggcctgaaattggattccacyacaatgcactatcaaaatgaactttatgcacattaataaacaagtaacaatttcttcacctacaagaggacttgtgaggtatcaacattttcctgtttactttctttgtagtgagcaaatagtcataaattcaaattatattatacttttcaaaagctaccccttagatgaagccttcagtagacattacacttttctgggttattgtcgtcatcttccccctttccaggttatattgtaaaacgctcatttcaatgatttttactgtagttttgagcaattttagaaattattattgtattttatattatatggcaaatatgtcacctgttatgtaatattcctagagtaggtaggtagccagaaatgagcaggcaagggatccctctgggaaaagaagttctagagatgccgtattagtcacgattctctagagggacagaactaaaagaatatacatatatattctttatatatattctacatatatatagaatgtattctatatatattctttatatatattctacatatatatagaatatattctatatatattctttatatatattctacatatatatagaatatattctatatatattctttatatatattctacatatatatagaatatattctatatatattactttatatatattctacatatatatagaatatattctatatatattctttatatatattctacatatatatagaatatattctatatatattctttatatatattctacatatatatagaatatattctatatatattctttatatatattctacatatatatagaatatattctatatatattctttatatatatattctctctacagatatataaagaatatattctttatatatatattctccctacagatatataaagaatatattctttataaatatgtgtgtgtgtgatgtatatatatatatatatatagagagagagagagagagagagagagagagaagtttaataagtattaactcattaactcacacaatcacaggggcccataataggcgatctgcacaggcggaggagcaaagagtcagagttccagagctgaagtatttaaagtctaatgtgcgagcgca

SEQ ID NO: 80828 - DNA, 1514 bp, Homo sapiens
atggtttcaactgagtcacgtctaagattgtatacaatggtgttatcctagccaacattctgctgcaggaaattaatgagtgaaattaattgataaaagcagcaaataaaatgaaaattaaagtaggctgcaaacttccataagacagccaccctgacttacctctggaatactaagtaaaaagtctacaacacccttgagaagtagaaagctggctgacgtatcagctaagagaacttttcagatttatgtttctttatattatgctttggctgtaacaattggattggctgtcccaatgtctctttataacagatacttacagcattgatttgggaaccacaaatattttctttgcaagtaagctggcctgaaattggattccaccacaatgcactatcaaaatgaactttatgcacattaataaacaagtaacaatttcttcacctacaagaggacttgtgaggtatcaacattttcctgtttactttctttgtagtgagcaaatagtcataaattcaaattatattatacttttcaaaagctaccccttagatgaagccttcagtagacattacacttttctgggttattgtcgtcatcttccccctttccaggttatattgtaaaacgctcatttcaatgatttttactgtagttttgagcaattttagaaattattattgtattttatattatatggcaaatatgtcacctgttatgtaatattcctagagtaggtaggtagccagaaatgagcaggcaagggatccctctgggaaaagaagttctagagatgccgtattagtcacgattctctagagggacagaactaaaagaatatacatatatattctttatatatattctacatatatatagaatgtattctatatatattctttatatatattctacatatatatagaatatattctatatatattctttatatatattctacatatatatagaatatattctatatatattctttatatatattctacatatatatagaatatattctatatatattactttatatatattctacatatatatagaatatattctatatatattctttatatatattctacatatatatagaatatattctatatatattctttatatatattctacatatatatagaatatattctatatatattctttatatatattctacatatatatagaatatattctatatatattctttatatatatattctctctacagatatataaagaatatattctttatatatatattctccctacagatatataaagaatatattctttataaatatgtgtgtgtgtgatrtatatatatatatatatatagagagagagagagagagagagagagagagaagtttaataagtattaactcattaactcacacaatcacaggggcccataataggcgatctgcacaggcggaggagcaaagagtcagagttccagagctgaagtatttaaagtctaatgtgcgagcgca

SEQ ID NO: 80829 - DNA, 2592 bp, Homo sapiens
cattttagaattggtttgtcaatttcaacaagaataaaacattgtttgggttttgggtgactatattgacattttaaaaatgttgagttttctgctccataaacatttcatatactacaatttatttagagatcataacattttatcttaataatattgtgtagttttcagtgcacaatccttttgtgaataacttacatttgtgcatcgcttacatttagaatcttttgaattttctatatacacaatcatactttctgcaagaatggtagtttttcttctatatcctaatttattatcaagaattaaaaacctattctacagtgctcaacagaattgatactataaacatctttgtcttattccagattgtaggagaaagagctttcaatatttcaccccaaatatggtgtttcctattgaatttttgtagtaaatattcttcttctttttcttttacattatcagatgtaaaatgttccctttctagtttcttaatcatttaatcatgaataaaatttgaatgttataaaatgttgcttgcttcattatggcaggtgttattatttgctaacaattcctttctcccttcccacatttactatgctgcaaatataagcagaatagaaatccctgtgtcattcatttggtcatgtgacactccaaaggcacgctagtggacatggcttatcagtgacattaaacgtcgtttatgttatttttctcagcttcttgttctcctgcwattggccatgtgaaaaagtaaccgtaggtaactgcttcaactcaggctttttcagtaagaaaataaagagaacaggtctggctcacgcttgtaatcccagcactttgggaggccgaggcggacagatcacgaggtcaggagttcgagaccacggtgaaaccctgtctctactaaaaatacaaaaaattagccggacgtggtggcgggcgcctgtagtcccagctactcggagaggctgaggcaggacaatggcgtgaacccgggaggcagagcttgcggtaagccgagatcgcgccactgcactccagcctgggcgacagggactctgtctcaaaacaaaacaaaacaaaacaaacaaacaaaagaacaggtctgaatttgatccatactctgaagcagaaacacttgcagtaagctcccaacatgagcttgaaaaataagtgcttgtttttgtaagtcattaggctttggagtaatttgtaatgtagtatcagcacagcaaaaatttgtctaataaatgcattggttcaagtggtcacatacatttttcatttatactattaatgtacttcattgcattgatccatctcacatgtatgattaatgattacattaaataaatctcacactatcaaaataatttcatgtatacttctgctagattcagtttcctaatattttgcttataatttttacatttattttcatagaaaaaatcatttgtaaatgtctctctcatattcttgtaaagcttggtatctaagttttgcttatctcatgaaacaaattggatagtattttttttttctattatctgaaagaatttgtgtgagactggtaacctttcttccctgaatgaggagaattcagaactaaaataatatggcctgcaaatcctttgtgggaaatcatttagttagtcaatgttttaatagatacgtaaatactcaaatattctaattgttcccatttcaatgccaataaattacataatatttaataatttgtctattttattatcatttatttacttaatgattctgtgtgttagtctgagcttagctgggccattcacttggttgggcttattcttgtatttgcgatcttttgttcatcagccaatgactctacttctatggttgaattgctgtcagtttatcagtgaaagcaactggatctcgctttatcagcaaagtagcctagagcagatcatctaccagttggtcagggatctaagagaattagcagaggtcagggagtatttttcaggtttaggctgagatttagaataacatcctgtcaatcaaacagtatcagttacaaagcaagtcacaagttcaggccagattcaagagtcaggtaaatatacttcacttcttgatgggaaaagcttcaaagtcataaagtaagtgtatatggatataaggagaatagttacgggcatatttgcaaacaatgtactacatagtgccaaatgctgtgttaacttctctatattttatttctcagagattggccagttgagtacttgttacattgtgcattgatagttctccagtgccttaaaaggaattattattttgaattttgtcaattttttctgttgacttcagcaggaagattggtcagcactaagactgacaagtttgtccaatttcactaaagatggatattttggggccatgatttaactaattattttctttatttctgaaagataaacatttgctcaatcaaatcccatctcttctccaattctaattatttgaacatttttatttgactctacccaatcttactatcctagttcaggttctcactatttgaatgtttatataatagcatta

SEQ ID NO: 80830 - DNA, 2090 bp, Homo sapiens
ggatggattaaatagattccatggccctgctcctgagagatccttattcagtggatgtggggtgcgacttaactatcacttagcttaatttacttcacagtcagtgacgtcccacaatgtgagagccactgatgaagccctgacaccagaactcttgtcccactctgtcctttagtttctcattctttaaagtaggctgggaattagacgaccccctaataatgaaataaaacactaaccttttccaggaatgaaagctgaccaagtactattctgttcacattgactgatgcttcttttattgtcttttcacttttattttttataggtgtgtttgttccatagtgattttggaaaaagaaagtaacaatgtcccagcccaaaagcaaaaggcacaaagaagaaacayacttacagtagcctggtgtttttctgctttctctgatgtctccttaagctgattttgcagggcctcctgaagagacttcatttcttctctattttagtagaaaacagagcataagtgagaaaataatataattccattatttcctatgaacattataaaaggaaggagctttgctgtatacatttaggacatagacaactagaagtgcataaagccacagttaagcatacaggatgtgtctaaagattctggtaataaaaggctttctctcccatgcaaatattaaaagcaagttgatttttttttaaataaccttactattatgctttataaaaatcccacgtttgaatcatctgtgaggcacatgatgtgttaaatcaaagcaatatataattcaagttgaaaagataatttcactaacagcatactggggtatgaacatgctggttagaaaaagtcaccatagacttgctgataggataaaattactgttcccttctgatgctcttaattaattaattctaaagcattgtgctttatacatcctttgtaaggcctgacatcttttgtaaaaacagggaaaagaaacttattttaacttaaggcctgtctcatttaatgaagataatttaaaaatgcatgcctatgcatatatactcattgtgtctcaagctcagtagcacataaggatcctgtctccctttttaaaaagagtgatgtttccctaaatttgcatttctcttaaggatttaggatttatttatttataacacatcatattatctttctgtgccttgatttttttttactcgagctatcacctcaaatagatcagatattagataaaggctagtgtacttgtttgtgtttgtatgtgtggcaattcctggctacagaaattctctcaaagcaatagcaacaacaaaatagaaacctatttgagtcttaccagcacctaaactaatttaaaacttccaatctagtgccaaaagattagctctggatatttgagcaagtgacacaccctctcatactcaatttcttcatccaaaaacaagggcacaatggtagaactaacttataggtttgtgctcatattaagacgacagaacgtaagcaaagcacttaacacaatgcctatgaaagaattccttaacaaatgttaggtcatggcaataaccactgacatctctccacacccttatgttcattctctgaccatgatgttctacacaaccataagctgctctttcacccagcaggacttaatggggctgccagcttaattagccttgagactgatgtccaagtcccaatttcaagaatgagaaagaaagtctgtctgttttttgtaatcattttggactttggttgacaaatcaaaatatagtgagaacaagttatagaataattacagtcactttggtttttaaatgatttatgccttcttgggtgatgcttttaatgtgcttgaagtggattctgagtgacagcttccatcactgtctcaaactggtttcatttatcagactttcttcatatatggacatataaaatctgggcttccattattatttctgatattttccatagagtgtttgtagtataatataatatatacctacatatattgtaggcttacaatgtgcaagacacttttgtaaaccccacaccaaactat

SEQ ID NO: 80831 - DNA, 2090 bp, Homo sapiens
ggatggattaaatagattccatggccctgctcctgagagatccttattcagtggatgtggggtgcgacttaactatcacttagcttaatttacttcacagtcagtgacgtcccacaatgtgagagccactgatgaagccctgacaccagaactcttgtcccactctgtcctttagtttctcattctttaaagtaggctgggaattagacgaccccctaataatgaaataaaacactaaccttttccaggaatgaaagctgaccaagtactattctgttcacattgactgatgcttcttttattgtcttttcacttttattttttataggtgtgtttgttccatagtgattttggaaaaagaaagtaacaatgtcccagcccaaaagcaaaaggcacaaagaagaaacacacttacagtagcctggtgtttttctgctttctctgatgtctccttaagctgattttgcagggcctcctgaagagacttcatttcttctctattttagtagaaaacagagcataagtgagaaaataatataattccattatttcctatgaacattataaaaggaaggagctttgctgtatacatttaggacatagacaactagaagtgcataaagccacagttaagcatacaggatgtgtctaaagattctggtaataaaaggctttctctcccatgcaaatattaaaagcaagttgatttttttttaaataaccttactrttatgctttataaaaatcccacgtttgaatcatctgtgaggcacatgatgtgttaaatcaaagcaatatataattcaagttgaaaagataatttcactaacagcatactggggtatgaacatgctggttagaaaaagtcaccatagacttgctgataggataaaattactgttcccttctgatgctcttaattaattaattctaaagcattgtgctttatacatcctttgtaaggcctgacatcttttgtaaaaacagggaaaagaaacttattttaacttaaggcctgtctcatttaatgaagataatttaaaaatgcatgcctatgcatatatactcattgtgtctcaagctcagtagcacataaggatcctgtctccctttttaaaaagagtgatgtttccctaaatttgcatttctcttaaggatttaggatttatttatttataacacatcatattatctttctgtgccttgatttttttttactcgagctatcacctcaaatagatcagatattagataaaggctagtgtacttgtttgtgtttgtatgtgtggcaattcctggctacagaaattctctcaaagcaatagcaacaacaaaatagaaacctatttgagtcttaccagcacctaaactaatttaaaacttccaatctagtgccaaaagattagctctggatatttgagcaagtgacacaccctctcatactcaatttcttcatccaaaaacaagggcacaatggtagaactaacttataggtttgtgctcatattaagacgacagaacgtaagcaaagcacttaacacaatgcctatgaaagaattccttaacaaatgttaggtcatggcaataaccactgacatctctccacacccttatgttcattctctgaccatgatgttctacacaaccataagctgctctttcacccagcaggacttaatggggctgccagcttaattagccttgagactgatgtccaagtcccaatttcaagaatgagaaagaaagtctgtctgttttttgtaatcattttggactttggttgacaaatcaaaatatagtgagaacaagttatagaataattacagtcactttggtttttaaatgatttatgccttcttgggtgatgcttttaatgtgcttgaagtggattctgagtgacagcttccatcactgtctcaaactggtttcatttatcagactttcttcatatatggacatataaaatctgggcttccattattatttctgatattttccatagagtgtttgtagtataatataatatatacctacatatattgtaggcttacaatgtgcaagacacttttgtaaaccccacaccaaactat

SEQ ID NO: 80832 - DNA, 2090 bp, Homo sapiens
ggatggattaaatagattccatggccctgctcctgagagatccttattcagtggatgtggggtgcgacttaactatcacttagcttaatttacttcacagtcagtgacgtcccacaatgtgagagccactgatgaagccctgacaccagaactcttgtcccactctgtcctttagtttctcattctttaaagtaggctgggaattagacgaccccctaataatgaaataaaacactaaccttttccaggaatgaaagctgaccaagtactattctgttcacattgactgatgcttcttttattgtcttttcacttttattttttataggtgtgtttgttccatagtgattttggaaaaagaaagtaacaatgtcccagcccaaaagcaaaaggcacaaagaagaaacacacttacagtagcctggtgtttttctgctttctctgatgtctccttaagctgattttgcagggcctcctgaagagacttcatttcttctctattttagtagaaaacagagcataagtgagaaaataatataattccattatttcctatgaacattataaaaggaaggagctttgctgtatacatttaggacatagacaactagaagtgcataaagccacagttaagcatacaggatgtgtctaaagattctggtaataaaaggctttctctcccatgcaaatattaaaagcaagttgatttttttttaaataaccttactattatgctttataaaaatcccacgtttgaatcatctgtgaggcacatgatgtgttaaatcaaagcaatatataattcaagttgaaaagataatttcactaacagcatactggggtatgaacatgctggttagaaaaagtcaccatagacttgctgataggataaaattactgttcccttctgatgctcttaattaattaattctaaagcattgtgctttatacatcctttgtaaggcctgacatcttttgtaaaaacagggaaaagaaacttattttaacttaaggcctgtctcatttaatgaagataatttaaaaatgcatgcctatgcatatatactcattgtgtctcaagctcagtagcacataaggatcctgtctccctttttaaaaagagtgatgtttccctaaatttgcatttctcttaaggatttaggatttatttatttataacacatcatattatctttctgtgccttgatttttttttactcragctatcacctcaaatagatcagatattagataaaggctagtgtacttgtttgtgtttgtatgtgtggcaattcctggctacagaaattctctcaaagcaatagcaacaacaaaatagaaacctatttgagtcttaccagcacctaaactaatttaaaacttccaatctagtgccaaaagattagctctggatatttgagcaagtgacacaccctctcatactcaatttcttcatccaaaaacaagggcacaatggtagaactaacttataggtttgtgctcatattaagacgacagaacgtaagcaaagcacttaacacaatgcctatgaaagaattccttaacaaatgttaggtcatggcaataaccactgacatctctccacacccttatgttcattctctgaccatgatgttctacacaaccataagctgctctttcacccagcaggacttaatggggctgccagcttaattagccttgagactgatgtccaagtcccaatttcaagaatgagaaagaaagtctgtctgttttttgtaatcattttggactttggttgacaaatcaaaatatagtgagaacaagttatagaataattacagtcactttggtttttaaatgatttatgccttcttgggtgatgcttttaatgtgcttgaagtggattctgagtgacagcttccatcactgtctcaaactggtttcatttatcagactttcttcatatatggacatataaaatctgggcttccattattatttctgatattttccatagagtgtttgtagtataatataatatatacctacatatattgtaggcttacaatgtgcaagacacttttgtaaaccccacaccaaactat

SEQ ID NO: 80833 - DNA, 789 bp, Homo sapiens
ctatctcagtattttgtcgttccctgatgctttctataaatttgtcattattactattttctttcttatacttacaccgtttagtgtattctttattttacctattaactactggctattgtctacagttaacattatcaagtagtttttttatgattttttgttttgtttttctatgtgttattactgtataggttaactccttgggtatatttaacatgcttaactaaattgttagtttatctactccagtaattctgcttcagaatgcgtatgtagtgcaatgtgtagtgtttctttttagtagctctgtactcaaatatcttgtcattttagcccttatctgatttttttttttttttttaattttcaattgctctgtgtggcaatgggtacaggaaaagggccaatgatggctgctgtcctggggagaaaatgaaaaacccaggatagaaaactttgaaagcatagaatgctcttaggggatctaagggagatggggtgggtactaygactccacccttcctcactcccattacttctcattctagcagggcttttgtactgcactgatgttaccttgatgacaggagaggcctgagctgttgccattgatttctaaggggaagggacagaaggtgatactctcaaggaagagtgcagaaaaggagagcagaatctacagatgaccttcagcctactcttgcatgcctcctactgcggccccctgactcaactaatcacaacgatctcttccaaagacatatatattcatttctgtgagtcatc

SEQ ID NO: 80834 - DNA, 1309 bp, Homo sapiens
tggagtttcttgttttatggatcaaagttattattcttcagtgtataaattttatgcaattgatgacttgaaggtaggaaacatgagtggtataaagatggtgtctcctcctaatagtaaaaaagaaagtaatttatactgctgtttggtgaaggtagcatagtacagtgttaagaaaaacagctccgcagttagatctcagtttacttttttattttactcctttctactttgtgtttgaggcaaaatgttacctactctgagccgtcattctgttatctacaagacaaaggtaatgttctgatgattattgcaaaaaaatgtttttttgatttattatctcttctaatgaaagagtgaaactttagataatgcagaaattctaggaccaggctactatttcctcttaaaaaayggttagagttggggaagaagggtttagatgcttggttagtagctaggggcttttggataaaaactgaagtgctaaggaagcaattgtaaatttccatatggtaagtgatatttttatagttaaagctgagacttgtactgtctgtaagaatttttcaaattgagactatcctttagtctcaagagtgagctaaaactgagccaaaactgagggccaaaattcttttgttccaaggaaaatactttgaatgatctggttaattaacttcaaagcaaatcccaaaacatttggtctgattcagccccctgatgtagccaccctctcccaagtgagctctaggccttacataaaaggaaaacagcacttactgaatgcctaccatttacaattttagcccttaaaccacatgacttcacaaaccccacagctttcatcatgggtgttcttctcccatcctctgactcagctctacccacttgcctcttctccactgctttttatcttgtttgcctctgtcattccacacatgttgatttttgataactgcctgcctacatctggtccagggacttctcctgtttgttagaacattcctgaactcaaggaacaaaaaggttacattacagaataaaataaactgaaattttatgttatataactcttctaggatataaaatttttttatattataatttacattatcctgacctagaggtaggctacccagtttgaaaccttgcccactatttcctaactgtgtctccataggaaagcgacttaatttttcttagctcccttatatgtaaacagagacaataatggcacctctttcgttaggtacttataagaattaaatgactaatatatgtaaaagcacttaaaactgtgatgcat

SEQ ID NO: 80835 - DNA, 602 bp, Homo sapiens
actcaagaaacagaagccattcgttaattcaaatactggaagtttcataaaaagaacgattaagataagtgatacgatttagctgtgtccccacccaaaatctcatcttgaattgtaatccccataatctccacgtgtcaaggcagtgaccaagtggaggtaattggatcatgggggtggtttcccccatrctgttcttgtgatagtgagtgagttatcttgagatctgatggttttataagcgtctggcatctcccctgcttgcactcactctgtactgtcaccccatgaagaaggtgcctgcttctcttttgccttccactgtgattgtaataatcctgaggcctccccagcaatgcggaactgtgagtcaattaaacctctttcatttataaattacccagtctcaggtatgtctttattagcagtgtgagaatgaactaataccataagataagagagtacctatgaagacataaagagactcctgaagagtaccctatgtctaggggagagtactcaaggaaaagcaaaactggaaggggtgggctcttccccaaggctgcgattccaacattattggagcaggcaagcatgtggcc

SEQ ID NO: 80836 - DNA, 648 bp, Homo sapiens
tgcatgtgtctatccgtctatacccacacatatgtatacacacacatatcagctaacatctaagacctgaataattacatataaatatttcagatttccagtttctcttggaaataaatcagaagatctggcaacatgaggttgagtttgattggcagctgtccctcaagtcgtggcaggtacacatggtcccaccacttcacttagtttgtgaacagcctgtcccctttrgttatttgactgtgctattttctgtctgcatccgcctctataccacaggtcttaatggcaagaactcttcagaaaagcagaagcaaactccagtcaaatagattgggggtgggtaggctgggagttactttcaatgaggggcctcctttgtctttcaccgtgttgaagagttaaactcggaagagaggaattcagaaaggatgagtcaatttttttaattaagaatttttttttggcacagccctggtcaagaaggctctttgcctttctccacagttgcccggctgagcagacggttttgttggaagtgggaataaagctatgggtcccaaacatatttcagcaatgacagtgcttctccatgtgggcactatccatccctagggagtatattaacttgtcagagtttttttggtg

SEQ ID NO: 80837 - DNA, 753 bp, Homo sapiens
ccagtcagacagaaatatccagagctccaagtgatttacagcaaccactgggctgtgaattgttttgggaacttctcacctttcccaagtccagcttcatttagataggacaattacaaaatagctatttatgagtaccactgacctgcacttctttccccatcatcgaatgccaaggctataccatacacacagcattgtcaactggccaccttcggtaatgtcagaaaagattaaatgaagacattttatcttacttccccttctctgattcatatttttttatcccaagatgagaatactccagagtgttcattttccacatcacatacagggaagcctggtcctgacttgcagccctatagtaagtcttaggacaactattctaatacattcatatgttgccacattttagaatccaaaaggaataggatttcaggctgaaatttctttaactcagaaagaaacaataaaccagctcacccatcttgataccacttcacccctagctgctggctgggaatggcctcagctgacaaggatgaatgaaagagaaaatagatccactcacggttgtgtactacgaaaatatccttatttcaagatatcactatacttttttacttaataaacgcacttacccccagaaaagtacagaacacttggcaaataaaaataaayttcagaaaatttataagcctggcttatatattgctttatttagaggataattctcacattttttccttccac

SEQ ID NO: 80838 - DNA, 689 bp, Homo sapiens
ccctagcatattaatcacagttgttttaaattcctggtctgataattccaacaccctctgagtctgttttttatccttgctctgtctcttccaattgtgggggtttttcccccctctagtatgtcttgtaatttttttcttgatagatagacatgatatcataggtcaaaggaacctggggttggtttccatggaagtttctgcttgtgggtttttgctctggtaaattttaattttctgtatttacctaattgtctctacaactttgagggcggtggcttgccctgtggcctcacttctctgacagatataaaaagagttactgacttttcagtttgttcaattttttarctgttgttaggacaagtgactatttccaagctactagatgccaatctggaaattggaagtacaattatttttaaaggtaatttaataatgttttttcactcaaaaatgtattcatgtatatagttattgtaattgacagacatacatgattttattgctgttactgtttgtaccattttttccctcatataatccattttttttacttcattcagattgattctgtattctcagtagtttacctaagttttttgccatgcttttttttttttttttttttttttggctaggtgcctgtgtatgtattcctgagtatttactctgcttggaattcattt

SEQ ID NO: 80839 - DNA, 792 bp, Homo sapiens
ccttggaggaccagagtgagagctagaatcaacattgctaccacctttctggctgccccttctctcttgatccaaagtcagtcattccaaaaggcaaggcacaatgtcatacctgtgttctgaggatatatgggtggctccttaagatgacaatttgtaatggacacatttatgaaataaactccaaatccaagattctttaatcatccattttggtaacctttttcttaattaaacactcaagctacaatgtgacttaaaatcacattttagtttctgcacatactaaaatcgagcatttgaaagatgtgwtgtcatggtgctgtcacattgcataggtataaactatcttctccccaaaatcattttttttaattatcatactttaagttctggggtacatgtgcacaacgtgcaggtttgttacataggtatacatggaatactatgcacccataaaaaaggatgagtttatgtcctttgcaggcacatggatgaaactggaaaccatcactctcagcaaagtaacacaagaagagaaaaccaaatgcccaaaatgatttttaacaacaataaggaattaaaatctactgagaattcactgggggcatcctggtgaggaaagtggaattgtcttctttcctgccctctccccccaaaatatacattcccacataccagggggagggaacccccagcattagaatatttgtgattctttaagacatctgttaacaaaacagttgtggccagagagttcctggatttccttcttgtgcctgacaccttggc

SEQ ID NO: 80840 - DNA, 792 bp, Homo sapiens
ccttggaggaccagagtgagagctagaatcaacattgctaccacctttctggctgccccttctctcttgatccaaagtcagtcattccaaaaggcaaggcacaatgtcatacctgtgttctgaggatatatgggtggctccttaagatgacaatttgtaatggacacatttatgaaataaactccaaatccaagattctttaatcatccattttggtaacctttttcttaattaaacactcaagctacaatgtgacttaaaatcacattttagtttctgcacatactaaaatcgagcatttgaaagatgtgttgtcatggtgctgtcacattgcataggtataaactatcttctccccaaaatcattttttttwattatcatactttaagttctggggtacatgtgcacaacgtgcaggtttgttacataggtatacatggaatactatgcacccataaaaaaggatgagtttatgtcctttgcaggcacatggatgaaactggaaaccatcactctcagcaaagtaacacaagaagagaaaaccaaatgcccaaaatgatttttaacaacaataaggaattaaaatctactgagaattcactgggggcatcctggtgaggaaagtggaattgtcttctttcctgccctctccccccaaaatatacattcccacataccagggggagggaacccccagcattagaatatttgtgattctttaagacatctgttaacaaaacagttgtggccagagagttcctggatttccttcttgtgcctgacaccttggc

SEQ ID NO: 80841 - DNA, 581 bp, Homo sapiens
ggatccagcctagaaggttagtgtgttgcaatggagatgaagaaaaagcatagacattaagtttgaaatacttagctttatgtactcatttacattctggttcctagttgctattaggtgagaataatgacaatatcataaagtattagtgatgttattttcataagcattatttttctttctgcaaaaaccacttctctgttatagttctgattataaatctcaacatttcagggtcccttgaaacttttatattttcgaaactcaaattcttcacactattctcacagccatcacgcttgctttaggaatttcctaccacagtgatatctcagttattttttttcttgcaattatctaatacatattttttctttttttttcttttttttwaattatactttaagttttagggtacatgtgcacaatgtgcaggttagttacatatgtatacatgtgccatgctggtgcgctgcacccactaactcgtcatctagcattaggtttatctcccaatgctatccctccccctccccccaccccacaacagtccccagagtgtgatgttccccttcctgtgt

SEQ ID NO: 80842 - DNA, 535 bp, Homo sapiens
atctccttaaattcattatttctttcctgtaatatggacattaaaaaggcatagccactctaaaattcggtataacactgatgtcctccattatcaacatatggaggattcattctgagacyggacagtaatgggcagagctgtctgtggtcactgtctaccattctgtgagagtgctattggaactgacttgtctaccgcagtacaaaatgacaaaaaaataaatcagatctaagagtataaatctttgctcaagttcacagtttgctagcatctctaggcttatggctgagatggaggcaactagggttaagaccttacttaagctctattataatattccaagcatcatttagctttcatagacacaaaactggagcattgaaggctacagacacgatgtactgatgtactggctataaagtttacaatatttttactgcatgtgaagatgtaagatactatttacattttgatgggaaacctgggagctccaaagaaagaattgagccacattctaagtatcctgaattta

SEQ ID NO: 80843 - DNA, 545 bp, Homo sapiens
aagtgctctaatcctttaaagtagatttaacttaatctaacctaaatctaaaatataaaaccacttttaattatrtaattataagtcaagtattggctctcattagatgatgaaaattagccaaaactgctttccacacttcagctgatgatcacagcaccatattatttctacttctccagttaatttctactttcctaccaatgtaatgggcaataatatacattatatataaatatacattaaaagtaactatgtttcaattatacatgtaattaaatttgagcaccgctttcttatatattagaataggtgacttcaagtttagccaagtggtggtcaaattcagctgcgttttgccagcatttctaaatgacaagggacatgtatgtacatatagccagagaatctctttgaaaaatagtccttcaaaagtggaattgttttgaagacaataaaagtttaggtctggattgttgcttgcataccaaagatagaaatacagacataatacattggttaatgtttaagcttgtagaataaaa

SEQ ID NO: 80844 - DNA, 545 bp, Homo sapiens
aagtgctctaatcctttaaagtagatttaacttaatctaacctaaatctaaaatataaaaccacttttaattatataattataagtcaagtattggctctcattagatgatgaaaattagccaaaactgctttscacacttcagctgatgatcacagcaccatattatttctacttctccagttaatttctactttcctaccaatgtaatgggcaataatatacattatatataaatatacattaaaagtaactatgtttcaattatacatgtaattaaatttgagcaccgctttcttatatattagaataggtgacttcaagtttagccaagtggtggtcaaattcagctgcgttttgccagcatttctaaatgacaagggacatgtatgtacatatagccagagaatctctttgaaaaatagtccttcaaaagtggaattgttttgaagacaataaaagtttaggtctggattgttgcttgcataccaaagatagaaatacagacataatacattggttaatgtttaagcttgtagaataaaa

SEQ ID NO: 80845 - DNA, 1107 bp, Homo sapiens
actttatttgtgtttcttaaatataatggactttcaaaactctaccaagacaattgtaattgacttgaaatttatttatttatttattgagacagcatcttgctctattgctcaggctggagtacagtagggccttcatagctcactggcaccttgaactcctggactcagctatccacctcagccttctgaatagctggggataaggcatgaataccatcctgtcttgaccctgatatttgtattccagctttgtgcaataggtattgggcaccctgagcatcactcaactttttcaaattgtgacctttttatctcttcattctgtaaagactacttccttagaaaacaaaatggggtcattagttttcattttcctgcgttatatttatatcccgagccaacacataaactttggaagattgctcataaaagtctagatatcttgttatgcttaaaaaaatcagaagattgtggatactggtaccatggtttgaacgttgtaaatactggtgccgccccgccctccacaaaaagatatgtctatgtcctgatggccagaacctatgaatgttactttgtgtggaaaaagggtctttgtagatataattaaggatcttgggatgaagagatcattctggattatctgagcggatgttaaatccaatgatcagtatccatagaggggaagaagaaaatttgatacacaagaggaaaagacatgcagaagggaaggtatgtgaagatggagatagacattggtgtgatgtgcytataaccaaggaatgcgaagtaatgccaacagccatcagactttggaagaaggaaagaatgggctgggtgtggtggcatatgcctgtagtcccagtgctttgggaggctgaggtgggagaatggcttgagcccaggagcttgaggccagcctgggcaacatagcaagacaccatctctagggaaaacaacaaaaaaagcaagaaatgaattctcccctagagctgttagaggaaatgtggccttactgacactttgatttcagacttctggcttctaggactgtgagagaatacatttttttacgccatcagtttttggtaatttcttatagca

SEQ ID NO: 80846 - DNA, 1380 bp, Homo sapiens
aaagagtcttattcaygaagttgcaattgaattttgactcaagtagaactaaatagttctgcctaaccacttttggctttctgcccagacatggaaataaaaactcagaagtaagtaaagtggaaatgtgagaaaagagaaactattcaagactattttgaagattaaatgtagaatcattcaatgctaattatttagaattaagaagtgacatgggaccataaaactattaatcaaacaattaaaaagagatgaggctattctcagtaaattacttttcaaataatttttataataaaatctgtttcataagccctaagtaaaaaaatcaatactttatgaatgtatatatcaatatttagatttttttacaaataattaatttgacattatcagaaatatttagaaaatacaaaatcaagtaacgatttgcctaggtgacataggtcctaaaagaggactaatcataaaacccgtggaattgggattttaaattaaaaaaaaaaaaattctaggttacagctaccaaaaatgaaccagaataaattgaggctagaagatttatagccagataagacattttaaacaatttcttcaaattctaagttggccattaatataaacctttgagtattgccatatgtgtgaggcagagaggaaatacttaaatgcgtatatgagttatttaacaaagctatctagtaagaggtaagaaaatctaacatttatggagcacttgcagtatactagatggggttctaagtgctttataaatattagttcattaaacactcataacagctgcatgaggtaagtactattactagctcccttttgcaaatgaagaaacgaagggacagagtaatagagaatttgtccaacattaaggagacagtgcaacagattaaaatacaatctaggtctactgagtaatatttatcagccttttttttttttttttatgaagtgtcgctcttgttgcccaggctggagtgcaatggcacaatctcagctgactgcaaaacctctgcctcccgggttcaaacaattctcttgcctcagcctcccgagtagctggattacaggcgtttgccaccatgcctggctaatttttgtagttttggtagagacggggtttcaccatgttggccaggctggtctctaactcctgccctcaggtgatccgcctgcctcggcctcccaaagtgctgggataggcctgaactactgtgcctggccagcttctttgtttttaaaaggagaaaattttaaaggggggataatactgtttgaatgtttttcctttctgaatctcatattaaaagctaattcccaatgttggaggtgaggccaggtgggaggtgactggattatgggggt

SEQ ID NO: 80847 - DNA, 632 bp, Homo sapiens
ggtaggttagtattgaggcaaatggcatctaacttgccaggggacctgctaagaaatggaacaagagatgtgtgtcatcttggatgcagagcttgataataatatcagataggacgggaggtggcccaaatccctccacaaatttcattgaaaagtccaaaagatgtraaagccaaaaataataaataagtggaggtgattgttttaaaatccagtgttattgtgagaaagaaatgttaagcattcctagaaaagtatgtaactctgatttttagttctaaggtcttaaatacccatattcagtgagaagaaccttagacatcatcaagccttccacatgcagcaagttaactccaaaaattatagacattgatctaaaactaacagtaaactttccaggtattcgtatttccatgagcaggatgcacgattctgactgtccagctcttataagccaagagggaccatttttgtccacccagttgctgataggcagcaagtatgtaccatttctaggacgagttatttaaattttgatggggcttattgataaattagtcataggcaaattctcacttgttaatgtaaaggaggaaggattcaaggaaagaaaaagtttaatgtgtggatcc

SEQ ID NO: 80848 - DNA, 1248 bp, Homo sapiens
aggaaatatacccaaatttaatagtaactgcctttgggtggggatattatagggatttctttttctactctttctaaaattcccaatttttctattgtgaacatttattatttctataattatagaagactaacataatttttttccaagaggcttactttgcaagatactatgcttaatatcttctcttgcacttgcgccaagcccactctctaccagccagacctggaagagtagatgaggcagcgcttcatgcctagagcttcaaagtactgagactctccaagcagaaaggaggatgccagccagtgctatcctcatgtcccctatcacctatarggagtgtctctatctccctatcaccttccctcatagggaaagtcaaaacatgctcacacagttcttgttttgacatgtcagtttcaccaacccttcattttttccatccaaatagtcataagatattcagctttggccaaataaatttcatgtcctctttaatctaatgcagaccatgagtgatatattattgcaggaaaatcagcttcagtatgagtgtcaccacatctggtctgtcacccacaacctcactcacactttgacatattattcgatgaaagaacaggagcatcatgttccaggagcttctgtaattccccctgagacactggcattatggtttcacagtcctcaaggaggaacttaacatttaactggatatcttaatttctaaccaaagccacatagctttattttttcagattcaacctcttaaaagtagagtttgcaagatagtgtctaatcaagccattcgcagctttgctgattcagtgatggtttatgcatctttgtttgcaattgggattccagttttacagctgagactccccatctactccatttcccacaggctgtccacttgttcctgcaagatgttcactccccttctccttggcacaacatttgctgctgcccaaagggtccatttggctcaagtaaatggcattaaatatgattaagaaataggatcaaaactttaagcagttcctatttgtttttgagatggagtctcgctctgttgctcaggctggagtgcaatgaacggtgcgatcttggctcactgcaacctctgcctcccaggttcaagccattgtcctgcctcagccccccaagtagcaggactgcaggcatgcgccaccacgcctggctaatttggtatttttagtagaaacagggtttcaccatgtt

SEQ ID NO: 80849 - DNA, 1248 bp, Homo sapiens
aggaaatatacccaaatttaatagtaactgcctttgggtggggatattatagggatttctttttctactctttctaaaattcccaatttttctattgtgaacatttattatttctataattatagaagactaacataatttttttccaagaggcttactttgcaagatactatgcttaatatcttctcttgcacttgcgccaagcccactctctaccagccagacctggaagagtagatgaggcagcgcttcatgcctagagcttcaaagtactgagactctccaagcagaaaggaggatgccagccagtgctatcctcatgtcccctatcacctatagggagtgtctctatctccctatcaccttccctcatagggaaagtcaaaacatgctcacacagttcttgttttgacatgtcagtttcaccaacccttcattttttccatccaaatagtcataagatattcagctttggccaaataaatttcatgtcctctttaatctaatgcagaccatgagtgatatattattgcaggaaaatcagcttcagtatgagtgtcaccacatctggtctgtcacccacaacctcactcacactttgacatattattcgatgaaagaacaggagcatcatgttccaggagcttctgtaattccccctgagacactggcattatggtttcacagtcctcaaggaggaacttaacatttaactggatatcttaatttctaaccaaagccacatagctttattttttcagattcaacctcttaaaagtagagtttgcaagatagtgtctaatcaagccattcgcagctttgctgattcagtgatggtttatgcatctttgtttgcaattgggattccagttttacagctgagactccccatctactccatttcccacaggctgtccacttgttcctgcaagatgttcactccccttctccttggcacaacatttgctgctgcccaaagggtccatttggctcaagtaaatggcattaaatatgattaagaaataggatcaaaactttaagcagttcctatttgtttttgagatggagtctcgctctgttgctcaggctggagtgcaatgaacggtgmgatcttggctcactgcaacctctgcctcccaggttcaagccattgtcctgcctcagccccccaagtagcaggactgcaggcatgcgccaccacgcctggctaatttggtatttttagtagaaacagggtttcaccatgtt

SEQ ID NO: 80850 - DNA, 921 bp, Homo sapiens
agaagtgtatatcattcataacttcagatttagtaattgataagatcctgtgtataagaggagaaatatctccaaagagattaaaataatagcattctgcttgtgcttgagtggtgaggatacatgtgatttaaatatttgtctttccttytttagttttccagatatttgtaatgtttatgtgtttttttataatgaccagtgaaagcatgatgtagtcttattaatttcagactaattaagtaagatggatgcttttgtatcttttccctttatttcagactgtaatgcaaatgtgcacaaaggttgtaaagatgctgcgcctgcatgcaccaaggtaattgctcagtgatctgtgaatatatatgtagcatggttgcttcatagtatctatttgagcttttactcttttttgttaccatctagatttatttctaaagcgatcatgatagcgataacataacatatgctcaaagtgtatagttatttgcttaactgtacactgttagaaatagaaggaaagctcaagtccagatatttgtgttatatgctgtggctaggttaggctttctgttgagacctgcttggtttaccagtgcaagccctgggtacctgcaaatgaagatcagagtagtaagtcacaaatgtctgcaagcctcacagtcactggaagacctgtgactacacagatttctgggccccaattccagaatttctgattccatagatctgaggtagggcctgagaatgtgcatttctaacaagtttgcaggtgatgatattgctgctggtcctgagacctcagtttgagaaccactggactagaagaatgttctctgtagttgggaatgggcttgagtagatgaaggtgtctgtgattctattcctttcttttccactcagtagtcatgtcacagatgc

SEQ ID NO: 80851 - DNA, 921 bp, Homo sapiens
agaagtgtatatcattcataacttcagatttagtaattgataagatcctgtgtataagaggagaaatatctccaaagagattaaaataatagcattctgcttgtgcttgagtggtgaggatacatgtgatttaaatatttgtctttccttctttagttttccagatatttgtaatgtttatgtgtttttttataatgaccagtgaaagcatgatgtagtcttattaatttcagactaattaagtaagatggatgcttttgtatcttttccctttatttcagactgtaatgcaaatgtgcacaaaggttgtaaagatgctgcgcctgcatgcaccaaggtaattgctcagtgatctgtgaatatatatgtagcatggttgcttcatagtatctatttgagcttttactcttttttgttaccatctagatttatttctaaagcgatcatgatagcgataacataacatatgctcaaagtgtatagttatttgcttaactgtacactgttagaaatagaaggaaagctcaagtccagatatttgtgttatatgctgtggctaggttaggctttctgttgagacctgcttggtttaccagtgcaagccctgggtacctgcaaatgaagatcagagtagtaagtcacaaatgtctgcaagcctcacagtcactggaagacctgtgactacacagatttctgggccccaattccagaatttctgattccatagatctgaggtagggcctgagaatgtgcatttctaacaagtttgcaggtgatgatattgctgctggtcctgagacctcagtttgagaaccactggactagaagaatgttctctgtagttgggaatgggctkgagtagatgaaggtgtctgtgattctattcctttcttttccactcagtagtcatgtcacagatgc

SEQ ID NO: 80852 - DNA, 677 bp, Homo sapiens
tgcattcaaaaatataatgcaagtgtgaataatcctttytcgaatgctgcttgcagactgctccagctttgtcaggtgaacttgaaccgggccatcagatttgcccccattcccattgcacactctgtctatcaccccagggcattcaccatcttgactgttgtttaaagagaacaagcaatccatcattgagccagggagtcactttctcatagaaaagtaaaatcagcatgtgacactactcagccctagtgttttgcagattaaaatgatacatggcgactcacgtgttactaggaggattaagtcggttatcttgttccattgcccagacaaaagaattcccctcaagcagtaagtgggagctttacagaagctaaaatcgttgggctcaactatacagtggtaagacagagaatttaacaagagaacagaaaaaaaaaatgttattttacatctaagcacattttttattccctgcaagagatagtacaaagaagaatccatcccaaaaggggagctgtgaaatctttgtacaagtctctgctgtttgaaatgccaattttattactagagatggacacacaatttattgtctgactgcctctacagttgatttaaatatggtgaaataaatgagcagccgttggccctagggctgttagcttcataagagt

SEQ ID NO: 80853 - DNA, 677 bp, Homo sapiens
tgcattcaaaaatataatgcaagtgtgaataatcctttctcgaatgctgcttgcagactgctccagctttgtcaggtgaacttgaaccgggccatcagatttgcccccattcccattgcacactctgtctatcaccccagggcattcaccatcttgactgttgtttaaagagaacaagcaatccatcattgagccagggagtcactttctcatagaaaagtaaaatcagcatgtgacactactcarccctagtgttttgcagattaaaatgatacatggcgactcacgtgttactaggaggattaagtcggttatcttgttccattgcccagacaaaagaattcccctcaagcagtaagtgggagctttacagaagctaaaatcgttgggctcaactatacagtggtaagacagagaatttaacaagagaacagaaaaaaaaaatgttattttacatctaagcacattttttattccctgcaagagatagtacaaagaagaatccatcccaaaaggggagctgtgaaatctttgtacaagtctctgctgtttgaaatgccaattttattactagagatggacacacaatttattgtctgactgcctctacagttgatttaaatatggtgaaataaatgagcagccgttggccctagggctgttagcttcataagagt

SEQ ID NO: 80854 - DNA, 677 bp, Homo sapiens
tgcattcaaaaatataatgcaagtgtgaataatcctttctcgaatgctgcttgcagactgctccagctttgtcaggtgaacttgaaccgggccatcagatttgcccccattcccattgcacactctgtctatcaccccagggcattcaccatcttgactgttgtttaaagagaacaagcaatccatcattgagccagggagtcactttctcatagaaaagtaaaatcagcatgtgacactactcagccctagtgttttgcagattaaaatgatacatggygactcacgtgttactaggaggattaagtcggttatcttgttccattgcccagacaaaagaattcccctcaagcagtaagtgggagctttacagaagctaaaatcgttgggctcaactatacagtggtaagacagagaatttaacaagagaacagaaaaaaaaaatgttattttacatctaagcacattttttattccctgcaagagatagtacaaagaagaatccatcccaaaaggggagctgtgaaatctttgtacaagtctctgctgtttgaaatgccaattttattactagagatggacacacaatttattgtctgactgcctctacagttgatttaaatatggtgaaataaatgagcagccgttggccctagggctgttagcttcataagagt

SEQ ID NO: 80855 - DNA, 1341 bp, Homo sapiens
aatagatgaattttcaaatccaagttcaacaaatgtaatcctttcattatatgattacttatataacaattacttatttcctcttgaagaagtttaagaaaagcataattgtgttgttcctttttaacatttattttgttttcatacaggcaattttatatgatgacaaaggagcatgtttggagagtctgtttcttaaatgccttgaggtattttagtgtgtttatcttatttttaagttattatttaaaaatctctttaaatacctcctttatgaatattgttagtgtagtcataatattaatactaatagtatttgttgaacattatagctagactttgtgctaaaaccttttagatattgtttcctttaatctctacaactgattttttatgatctaaaaaaaacctgatttttatagattaggagtgcagtgcagaaaggttaagtaacttgcttatgttcatagagtaacagtggtaggaaggctgaaatttgatcctaggaggtgattctagagtctaattctactacatgattttttcataggcagaggtctactgtgggaaattttttgtgacatattctcatttaagtataatattctctcaccaaaaagagaactaccattcaacccaggagtactataactgggtatatacccaaaggaatataagttgttctaccataaagacacatgtatgtgtatgttcattgtagcactattcacaatagcaaagacatggaatcagcctaaatgcctatcagtgatagactggataaagaaaatgagatagaaatacaccatgaaatattatacagccataaaaaagaatgagatcatgttcttttgcaggaatatggatggagctggaggtcattatccttagcaaactaatgcagggacatagaaaaccaaatattacatgttctcacatgtaagtgggaaccaaatattacatgttcttacatgtaagtgggagctaaatgatgagaatgcatggacaaacgggaacaacagacattgaagcctactgaraaacggagagagggtaggaggaggaagaggatcaggaaaaataatgggtactagacttaatacttgggtgatgaaataatctgtataataaaccgccatgacacgggtttacctatataacaaacctgcacatgtactcctgaacttaaaggttaaaaataaatacataaatattctgtcaaatacatagtttgtgtttttcctctcaaagaggaaaaagcatggaaagagaactaaaggcatattttagtgaagagttaggatattaaagttggtcattctgggttcatttcccagttct

SEQ ID NO: 80856 - DNA, 659 bp, Homo sapiens
agctgcacyggggtgagagcctaggccaggagggcagaggggtggatccaagctgcactggggtgagagcctaggccaggagggcagaggggtggagggagtgaggggctcctgggagagtgatggggggcttgaagggatggggataacaggagaaaccccagcattggtggcagggaaaaggtgaggggcaggtaaggggacggaaaggtttgaagatggagtggtggaggcagtggggcagaaggcatgggcgctgggggaccaggtcggcctgatccgatgatgggggaaggagaggcttaattgcttgcacacgtccaaactcctcaagatgtgtacattaaatgtgcgccatttttgtatctcgatgatgcctccataaagctaaaaaataaattcctctgtccttatcggaaatgcacctggcccccgcttcggaaaatgactggccgctctctccttgcagcgtgttccgcagctgtaggcacctgtcgtcctgccttcgatggctcctccctccgtccccctggtcctcctcctcgtcctcttgctgagcctggcagagactccagcatccgcacctgcccaccgggtaacgcctccctaagttcctcggaaacaacagtgtccccaaatccctgccctctgggaagagt

SEQ ID NO: 80857 - DNA, 659 bp, Homo sapiens
agctgcaccggggtgagagcctaggccaggagggcagaggggtggmtccaagctgcactggggtgagagcctaggccaggagggcagaggggtggagggagtgaggggctcctgggagagtgatggggggcttgaagggatggggataacaggagaaaccccagcattggtggcagggaaaaggtgaggggcaggtaaggggacggaaaggtttgaagatggagtggtggaggcagtggggcagaaggcatgggcgctgggggaccaggtcggcctgatccgatgatgggggaaggagaggcttaattgcttgcacacgtccaaactcctcaagatgtgtacattaaatgtgcgccatttttgtatctcgatgatgcctccataaagctaaaaaataaattcctctgtccttatcggaaatgcacctggcccccgcttcggaaaatgactggccgctctctccttgcagcgtgttccgcagctgtaggcacctgtcgtcctgccttcgatggctcctccctccgtccccctggtcctcctcctcgtcctcttgctgagcctggcagagactccagcatccgcacctgcccaccgggtaacgcctccctaagttcctcggaaacaacagtgtccccaaatccctgccctctgggaagagt

SEQ ID NO: 80858 - DNA, 659 bp, Homo sapiens
agctgcaccggggtgagagcctaggccaggagggcagaggggtggatscaagctgcactggggtgagagcctaggccaggagggcagaggggtggagggagtgaggggctcctgggagagtgatggggggcttgaagggatggggataacaggagaaaccccagcattggtggcagggaaaaggtgaggggcaggtaaggggacggaaaggtttgaagatggagtggtggaggcagtggggcagaaggcatgggcgctgggggaccaggtcggcctgatccgatgatgggggaaggagaggcttaattgcttgcacacgtccaaactcctcaagatgtgtacattaaatgtgcgccatttttgtatctcgatgatgcctccataaagctaaaaaataaattcctctgtccttatcggaaatgcacctggcccccgcttcggaaaatgactggccgctctctccttgcagcgtgttccgcagctgtaggcacctgtcgtcctgccttcgatggctcctccctccgtccccctggtcctcctcctcgtcctcttgctgagcctggcagagactccagcatccgcacctgcccaccgggtaacgcctccctaagttcctcggaaacaacagtgtccccaaatccctgccctctgggaagagt

SEQ ID NO: 80859 - DNA, 659 bp, Homo sapiens
agctgcaccggggtgagagcctaggccaggagggcagaggggtggatccmagctgcactggggtgagagcctaggccaggagggcagaggggtggagggagtgaggggctcctgggagagtgatggggggcttgaagggatggggataacaggagaaaccccagcattggtggcagggaaaaggtgaggggcaggtaaggggacggaaaggtttgaagatggagtggtggaggcagtggggcagaaggcatgggcgctgggggaccaggtcggcctgatccgatgatgggggaaggagaggcttaattgcttgcacacgtccaaactcctcaagatgtgtacattaaatgtgcgccatttttgtatctcgatgatgcctccataaagctaaaaaataaattcctctgtccttatcggaaatgcacctggcccccgcttcggaaaatgactggccgctctctccttgcagcgtgttccgcagctgtaggcacctgtcgtcctgccttcgatggctcctccctccgtccccctggtcctcctcctcgtcctcttgctgagcctggcagagactccagcatccgcacctgcccaccgggtaacgcctccctaagttcctcggaaacaacagtgtccccaaatccctgccctctgggaagagt

SEQ ID NO: 80860 - DNA, 659 bp, Homo sapiens
agctgcaccggggtgagagcctaggccaggagggcagaggggtggatccaagctgcacyggggtgagagcctaggccaggagggcagaggggtggagggagtgaggggctcctgggagagtgatggggggcttgaagggatggggataacaggagaaaccccagcattggtggcagggaaaaggtgaggggcaggtaaggggacggaaaggtttgaagatggagtggtggaggcagtggggcagaaggcatgggcgctgggggaccaggtcggcctgatccgatgatgggggaaggagaggcttaattgcttgcacacgtccaaactcctcaagatgtgtacattaaatgtgcgccatttttgtatctcgatgatgcctccataaagctaaaaaataaattcctctgtccttatcggaaatgcacctggcccccgcttcggaaaatgactggccgctctctccttgcagcgtgttccgcagctgtaggcacctgtcgtcctgccttcgatggctcctccctccgtccccctggtcctcctcctcgtcctcttgctgagcctggcagagactccagcatccgcacctgcccaccgggtaacgcctccctaagttcctcggaaacaacagtgtccccaaatccctgccctctgggaagagt

SEQ ID NO: 80861 - DNA, 1181 bp, Homo sapiens
tggaagcatgtacacacatttacatatgtgtctatcttccatttccagcacctaccctatgagattcatgtgagggttaaatgcgatatggtaattgaagctggagaaatttgggttatcttattctctggacagtggtgaacacagcatgagggaatgcctgtggctacctggacccttcctccagacctcttattttggctctgggcacccacccttgtctgcagtcactgtacccaggctgtcctgaagggagaatagagcaccccttccgtcctctccttccacgtgctttatgagagctggttccgccctgctccaggagtggacatgtgactctggactggccaatcagaactcccacccctgcccggcccctgtgattggttcaggtgagccaatcagattcagggaaataatagaagggtgaggaagtgagggcggccttggccctgcagtggcctttattccccacagtggagggatggaaaccaaagaggtccgcgaagcccagacagcgggccaggcctggggccctgtgctcccggatccaaccaaccacgccccaaggtgtccagcttcagcttctggtgtttattgctgctgtttcttttcagttacccaagccaataaagttttctttctcttttttttaacctccaatccgtttgagctgcatttgtctcatrcaacctgaaacgtgccaccgctgcaatcatcacgtcccacatcctgccatccagaattccccagagccccactcagcccgtctctgtcccatcggtgtgcatggggcacaggccggaatggttggtctgaggcagggtcgctctgcttcctcaaagcccctccctctgcgccccagctgcagcagctggcacacggaggagatgtgcaaatctaggaagatgggtgaagaacgttataggaggcggccacagggttctccacataggtttgccatatttagcaaattaaaatgcaggatgcatttaaaatgcaatgttcagttgcatttatttcaaataaacaacggatgtatatatacatcctatatatatagattggataagtactgggacttttttttttttaattatttttttgagacagagacttgctctgtatcccaggctggagtgcagatctcggctcattgcaacctcctcctcctgggttca

SEQ ID NO: 80862 - DNA, 745 bp, Homo sapiens
ttctaataagggatactcaacctgaatatatataaagagcatagacaaaatgctctattatagtccaaaatgtgtcagccacaatgaaaccccaaagagctaatctcactggcactgtggcacccacaaagctataaattttgattattttcctagagttgacaattgcctaattgttttactcctttggtattttgatctcctttattaatttttcccaagcacttcaacagaatyatcgaaatctctcagtactatttatcatattggtaaactcaccgcataactccttctggaatcctctatcatcatgttacaatcttaagtggtttctgtctatgcctttcacacagcttctatgcaggataagtggaagatttaccctgaaacttctctccagaatcctcctgaggattatctgtccctttctttttatatctcttgtttatagatgggatattttcctttgtgccagcttatgttttccttcatgagaagcatatcttctaataacatattgagaaagagagatgaaggaatgacacttctgagactgcttgaatagcagtgcctctattatatgcttatgcttgattttttaggaggtgaggtatagaaccatagataagaaattattttcccttagaatcttatagtattgttccatttctgtcaagctttggcattaatattgagcatttaaaattacctaatttcagtttcagtgctgatttttctctctgga

SEQ ID NO: 80863 - DNA, 1505 bp, Homo sapiens
agccgtgtgctggctctacagggcattcaaaaaaaaattgcataaggaaaggagaggattctgggatggagatctccaagacaaaactagtctcaacagaataaacamtataatggaaattttttaaaacattaaggaatattcattgaaaataagcacagacagcaaattatgtgagtgactaatattttcatacctaatgatataaaccacgatttttgtcatgattcaaccaaaagcagtgatagaattttactgaaaagatggggaagtggggtaagtaggtaagaaaattaaattctcatctagaaaagcaaattattaatgagtatgtagaaatctaataaatcaagaaatagcaatataagactatcatttagacacagagaagtaaaaagaaaaatagggaagaagagatctgaatagagagagttgggttctaattttgactctgccacctgctaaccataggataatgggtaaattgtttaacttctttaagtctcagttccttaatatataatatgggcatagtaatagcacctatttcataagggtttgtgagaagtaaatgaaataaataaagcacttactacaagacctgttaaacatgcattttatacatacaatttttattattattcttttttttttattattttttttgaggcggagtcttgctctgtcgcccaggctggagtgcaatggcgcgatctcggctccctgcaagctccgcctcctgggttaacgccattctcctgcctcagcctcccgagtagctgggactacaggcgcccgccaccacgcctggctaattttttttgtatttttagtagcgacggtgtttcactgtgttagccaggatggtctcgatctcctgacctcatgatccacccgcctccgcctcccaaagtgctgggataacaggtgtgagccaccatgcctggcctattattcttaatattaagattcgcatggtcttgttttgacaattttatgatgactgataatgataggtaactctgcagtaacaacatgttcttgattagatatcttagaaaaatgatgagaagcttgtttttgctttctaaaaatgaaatacccaggagttcctaagagtgggttcctaatgccacactgcacaatatccactaaaaaggagttctcagtgcttcccttcagtcttcctttgaggcctctcttattcttggcaacccagattaaacaccaaagaagctgcatcactcacaggtgggggtaacagctttttcttcagctgctctcactgctcttgtaaaagccatcaaattatctggaacttcatactatattgtaaatatttgtttattttggtgtcttccaggagttgaacctagtaagaaactgtgccctctattatcagtgccccagtgcttagcaaagtgcctacttgaatatatagtaggtattcagagaatacttggagaatgaataaatgaacgaataaatgagttaacaaattccaa

SEQ ID NO: 80864 - DNA, 304 bp, Homo sapiens
taggtgacagagcgagactctttttcaaaaactaaaataaaaaagcacctgtatttgtggggacagagtgagagactttaatcctaggagctcaagtccaggggtaactaacctggcgaacctgtcctgacctctgtcctatggtatatggtarctattacatctccattaaaatatgggaaatttgagacctagagagacatcactgctaataggtataaagaaagtgcataaggtttgaagtcagacagggctaaattcaaatagaggctctgccatctactagttttggatcttggaattc

SEQ ID NO: 80865 - DNA, 2573 bp, Homo sapiens
atgtaaattagcaatctgacattcaaactcaaactcacttcctcctcaatgactttttgggcatcttgaattttccaggaagtctccccagcagtctacttttaacttgaccagatacaactacagattttgacatcaagtgtgtttacaaaataataggccatgtccgtatgacagcagtttatgtggaagcaataatagctcttaaacttggcaggaattttaataattttttaaaaacaatctctggaagcaagtctgcacctgactgccataaaacccacaagccaggacttgtggcttacctaaacatctcagagaagaacaaattgattatgtatgttttgaataaaaagaaatgcaaaatctcagaaatggtggtgtggctgcaaggaagcgcagggatggagagcagagggtgaggaggggtagggagctacagggagagaagtaaacggagcagaacagctgaccagggcctgaaaaggaaactcttgctttgctttcattgcagtcagccctttaataggaaattatcaggctcgctgctgttgatcagagaagctggccttgctattgtgacagcttaactaatagagagcaaaagggcagctcttacttgaaagaagctctagaaattgtaagatctggcatgcatgggccttgcctcgcaagcatgatggacttgctcatgtaaattacatcttatgtgttatccaggatcttgagaaccttttcagggaaaaggggaggaaggcagaggtggtcttgagagttctagcagcgtgcaagggggataccctccctcttctacccctacagctgaaacagggtcttgggagttaaaatggatctcttagtcactccttctttagttgtccctcccagagttctcaagccatttcttcagtacttcagggactctggttaatgtgggtcttgctaagccattaaccatctttaaaaattcaacgaccatgaagaagagctcaggggcaaagtatcatagaaccagactgttccactcttaaatagtcagaaatggccatcccaatccaaagccagtgggcttatttctccctgataatagtattgaaaggtagaaagcctgaggccctgaaggacctgtagatggcacttggaatttgggggcatgaagtgttagggacataaaagggagagactgatatagagaaaagaaagctattttgagaaaccaaatagattaaatgataatccagacccaatagcatgaaggaacaaaatgctaaccactaaacatcacaggtgttttgttttgtttttgtttttttctttattagagacacagtgttcctatgttgcctggctggagggcagtggctattgacaggagtgatcacagctcagtgcagcctcaaactcctaggatcaagtgatcctcctgccttagcctcctgagtagctgggactataggaacacaccaccacacccagctcataagtttgttttcatattgaaaatttcatcaaacctatatcccctgtcagctatggcaaaacatacttacagctcgctgctctgcataagctcgatgagatccataaaaagcacatcccggttcctttcacaaaagccatccatgtcataggatacctggccaagaatggaaagaaatcgaatttcattgaacaaaatgtaattaattgaacaaaatcatttattgaacaaaaaatctaatttcaccaaacaaaaaaccaaagctgtcatggctaccctcaccacaacatgtggatttccagatgttgcatttgggatttcattgtgcactgtcacaggaaggctgtgcacgtcttacttgttagctgacttagtggggaaggcctgcagatgctgatgagtatctggctgcctggatggcccagctgatccgtaatcagaactccagctctcaagtccccataccccttcttcagtggatccataggggtgtctaagtgacatactcaatacttttcctaaattttagctaagccagagcaaaagtgaagcccctcatgctcagtaattcactgcaatgagccatgtcatctgaggctttgcagtttctcccagaagtggtatcaaagttgcaccaatctggccagaaactcatgctcagatactctgtttaacaagagatcagctgggatgatggatgagaccaggggatttccatagcactaggaagtccccaagaccacgacctcaacttaacttttttatcatcagcagccccacacarcctggcatccagtaggcacccaatactgatgggctttataagaacaccaaaagtgcactctgggccttgatttatactaccagtaggcatggggagacaaggaatgccagtctgtgattccagcaagaggcaagacgaaaatccatttattcagcagctaatacatgtagcagggtgattcattttccaaaaatatgcagtagtatgctgagatttagtgctggagtgactcccagccggcccctaccctgctgaagccccagccgactgtcccagggtgggtcctggccaggactggcaccaaggcag

SEQ ID NO: 80866 - DNA, 1275 bp, Homo sapiens
ggaaaaacaaatactacatgatcttactgatatgtggaatcaaaaaatgttgcaactggggctctctcacctgtgctgartaagaagaaactcagatttaactccaataagaaaactgaagtcacagggctgacggatcctctttatgctgccaaggagtggggacaataagagagatggtagctgaattaagaattaagagaagtagtgtctgaggtagccttaattcccaccactgaggctggcaaagacactggtgtttctggtggatgaagaacatgtcagtttatgtggttcgggttaaaccatcttgaaggcatccctacaaagctgcacatcagagtttgaggcttaggcggaggagtctgtgggtggagggccagataatacactatgggttagtgtagggcagagatgtgtctgtgcaggaggttgtttccctcattttacctcacccatgcagtgccctgagaacaacagatatccctcccaacagagccagcatctggtccccagcagcagagagggctaataataattaaaggtgttttttttttgtttgcttttttgcttttgctttttttggcagcaaaaacttgaagtcctacaaatgttccacattgaagttctgacatcatattgattgtcttgtatatctcctgtccctagatggttgctaagagtaggggcagctgaaaagatgtggatagcagaggatgaaaggtaactttcccccacccacacctctaggccactgaaggcccttcacaaaactctgcctgagtttggataatagggctttgacctagacactgactgagctgaatcatgagtggaatggaacttttactctaaaccaaattgatttattccagaggaaactaaaatatttctggatagaactgtattcattcattttcaggcttactctaaatccaccagtcatgttaagtccaccaacaccctaccaataacattatcagaattaggggcttgaatttaaaaaaataaacaattggttagcaaatatgtagaaaatattccaggtatgtacactgcaatattgccttctcattacacaaataatttcagacttaagcaaattcctagtcctatgatattcaagtacagatattccaaaggcatttggacaaacataatccaaaggaaacatacaaatgacagagagctaggtacggatcacgtcagactgggctgtctgtgagagagacagagagagagagagagagagagagagagagtgtgtgtgtgtgt

SEQ ID NO: 80867 - DNA, 1275 bp, Homo sapiens
ggaaaaacaaatactacatgatcttactgatatgtggaatcaaaaaatgttgcaactggggctctctcacctgtgctgaataagaagaaactcagatttaactccaataagaaaactgaagtcacagggctgacggatcctctttatgctgccaaggagtggggacaataagagagatggtagctgaattaagaattaagagaagtagtgtctgaggtagccttaattcccaccactgaggctggcaaagacactggtgtttctggtggatgaagaacatgtcagtttaygtggttcgggttaaaccatcttgaaggcatccctacaaagctgcacatcagagtttgaggcttaggcggaggagtctgtgggtggagggccagataatacactatgggttagtgtagggcagagatgtgtctgtgcaggaggttgtttccctcattttacctcacccatgcagtgccctgagaacaacagatatccctcccaacagagccagcatctggtccccagcagcagagagggctaataataattaaaggtgttttttttttgtttgcttttttgcttttgctttttttggcagcaaaaacttgaagtcctacaaatgttccacattgaagttctgacatcatattgattgtcttgtatatctcctgtccctagatggttgctaagagtaggggcagctgaaaagatgtggatagcagaggatgaaaggtaactttcccccacccacacctctaggccactgaaggcccttcacaaaactctgcctgagtttggataatagggctttgacctagacactgactgagctgaatcatgagtggaatggaacttttactctaaaccaaattgatttattccagaggaaactaaaatatttctggatagaactgtattcattcattttcaggcttactctaaatccaccagtcatgttaagtccaccaacaccctaccaataacattatcagaattaggggcttgaatttaaaaaaataaacaattggttagcaaatatgtagaaaatattccaggtatgtacactgcaatattgccttctcattacacaaataatttcagacttaagcaaattcctagtcctatgatattcaagtacagatattccaaaggcatttggacaaacataatccaaaggaaacatacaaatgacagagagctaggtacggatcacgtcagactgggctgtctgtgagagagacagagagagagagagagagagagagagagagtgtgtgtgtgtgt

SEQ ID NO: 80868 - DNA, 1275 bp, Homo sapiens
ggaaaaacaaatactacatgatcttactgatatgtggaatcaaaaaatgttgcaactggggctctctcacctgtgctgaataagaagaaactcagatttaactccaataagaaaactgaagtcacagggctgacggatcctctttatgctgccaaggagtggggacaataagagagatggtagctgaattaagaattaagagaagtagtgtctgaggtagccttaattcccaccactgaggctggcaaagacactggtgtttctggtggatgaagaacatgtcagtttatgtggttcgggttaaaccatcttgaaggcatccctacaaagctgcacatcagagtttgaggcttaggcggaggagtctgtgggtggagggccagataatacactatgggttagtgtagggcagagatgtgtctgtgcaggaggttgtttccctcattttacctcacccatgcagtgccctgagaacaacagatatccctcccaacagagccagcatctggtccccagcagcagagagggctaataataattaaaggtgttttttttttgtttgcttttttgcttttgctttttttggcagcaaaaacttgaagtcctacaaatgttccacattgaagttctgacatcatattgattgtcttgtatatctcctgtccctagatggttgctaagagtaggggcagctgaaaagatgtggatagcagaggatgaaaggtaactttcccccacccacacctctaggccactgaaggcccttcacaaaactctgcctgagtttggataatagggctttgacctagacactgactgagctgaatcatgagtggaatggaacttttactctaaaccaaattgatttattccagaggaaactaaaatatttctggatagaactgtattcattcattttcaggcttactctaaatccaccagtcatgttaagtccaccaacaccctaccaataacattatcagaattaggggcttgaatttaaaaaaataaacaattggttagcaaatatgtagaaaatattccaggtatgtacactgcaatattgccttctcattacacaaataatttcagacttaagcaaattcctagtcctatgatattcaagtacagatattccaaaggcatttggacaaacataatccaaaggaaacatacaaatgacagagagctaggtacggatcacgtcagactgggctgtctgtgagagagacagagagagagagagagagagwgagagagagtgtgtgtgtgtgt

SEQ ID NO: 80869 - DNA, 1275 bp, Homo sapiens
ggaaaaacaaatactacatgatcttactgatatgtggaatcaaaaaatgttgcaactggggctctctcacctgtgctgaataagaagaaactcagatttaactccaataagaaaactgaagtcacagggctgacggatcctctttatgctgccaaggagtggggacaataagagagatggtagctgaattaagaattaagagaagtagtgtctgaggtagccttaattcccaccactgaggctggcaaagacactggtgtttctggtggatgaagaacatgtcagtttatgtggttcgggttaaaccatcttgaaggcatccctacaaagctgcacatcagagtttgaggcttaggcggaggagtctgtgggtggagggccagataatacactatgggttagtgtagggcagagatgtgtctgtgcaggaggttgtttccctcattttacctcacccatgcagtgccctgagaacaacagatatccctcccaacagagccagcatctggtccccagcagcagagagggctaataataattaaaggtgttttttttttgtttgcttttttgcttttgctttttttggcagcaaaaacttgaagtcctacaaatgttccacattgaagttctgacatcatattgattgtcttgtatatctcctgtccctagatggttgctaagagtaggggcagctgaaaagatgtggatagcagaggatgaaaggtaactttcccccacccacacctctaggccactgaaggcccttcacaaaactctgcctgagtttggataatagggctttgacctagacactgactgagctgaatcatgagtggaatggaacttttactctaaaccaaattgatttattccagaggaaactaaaatatttctggatagaactgtattcattcattttcaggcttactctaaatccaccagtcatgttaagtccaccaacaccctaccaataacattatcagaattaggggcttgaatttaaaaaaataaacaattggttagcaaatatgtagaaaatattccaggtatgtacactgcaatattgccttctcattacacaaataatttcagacttaagcaaattcctagtcctatgatattcaagtacagatattccaaaggcatttggacaaacataatccaaaggaaacatacaaatgacagagagctaggtacggatcacgtcagactgggctgtctgtgagagagacagagagagagagagagagagagwgagagagtgtgtgtgtgtgt

SEQ ID NO: 80870 - DNA, 1275 bp, Homo sapiens
ggaaaaacaaatactacatgatcttactgatatgtggaatcaaaaaatgttgcaactggggctctctcacctgtgctgaataagaagaaactcagatttaactccaataagaaaactgaagtcacagggctgacggatcctctttatgctgccaaggagtggggacaataagagagatggtagctgaattaagaattaagagaagtagtgtctgaggtagccttaattcccaccactgaggctggcaaagacactggtgtttctggtggatgaagaacatgtcagtttatgtggttcgggttaaaccatcttgaaggcatccctacaaagctgcacatcagagtttgaggcttaggcggaggagtctgtgggtggagggccagataatacactatgggttagtgtagggcagagatgtgtctgtgcaggaggttgtttccctcattttacctcacccatgcagtgccctgagaacaacagatatccctcccaacagagccagcatctggtccccagcagcagagagggctaataataattaaaggtgttttttttttgtttgcttttttgcttttgctttttttggcagcaaaaacttgaagtcctacaaatgttccacattgaagttctgacatcatattgattgtcttgtatatctcctgtccctagatggttgctaagagtaggggcagctgaaaagatgtggatagcagaggatgaaaggtaactttcccccacccacacctctaggccactgaaggcccttcacaaaactctgcctgagtttggataatagggctttgacctagacactgactgagctgaatcatgagtggaatggaacttttactctaaaccaaattgatttattccagaggaaactaaaatatttctggatagaactgtattcattcattttcaggcttactctaaatccaccagtcatgttaagtccaccaacaccctaccaataacattatcagaattaggggcttgaatttaaaaaaataaacaattggttagcaaatatgtagaaaatattccaggtatgtacactgcaatattgccttctcattacacaaataatttcagacttaagcaaattcctagtcctatgatattcaagtacagatattccaaaggcatttggacaaacataatccaaaggaaacatacaaatgacagagagctaggtacggatcacgtcagactgggctgtctgtgagagagacagagagagagagagagagagagagwgagagtgtgtgtgtgtgt

SEQ ID NO: 80871 - DNA, 1275 bp, Homo sapiens
ggaaaaacaaatactacatgatcttactgatatgtggaatcaaaaaatgttgcaactggggctctctcacctgtgctgaataagaagaaactcagatttaactccaataagaaaactgaagtcacagggctgacggatcctctttatgctgccaaggagtggggacaataagagagatggtagctgaattaagaattaagagaagtagtgtctgaggtagccttaattcccaccactgaggctggcaaagacactggtgtttctggtggatgaagaacatgtcagtttatgtggttcgggttaaaccatcttgaaggcatccctacaaagctgcacatcagagtttgaggcttaggcggaggagtctgtgggtggagggccagataatacactatgggttagtgtagggcagagatgtgtctgtgcaggaggttgtttccctcattttacctcacccatgcagtgccctgagaacaacagatatccctcccaacagagccagcatctggtccccagcagcagagagggctaataataattaaaggtgttttttttttgtttgcttttttgcttttgctttttttggcagcaaaaacttgaagtcctacaaatgttccacattgaagttctgacatcatattgattgtcttgtatatctcctgtccctagatggttgctaagagtaggggcagctgaaaagatgtggatagcagaggatgaaaggtaactttcccccacccacacctctaggccactgaaggcccttcacaaaactctgcctgagtttggataatagggctttgacctagacactgactgagctgaatcatgagtggaatggaacttttactctaaaccaaattgatttattccagaggaaactaaaatatttctggatagaactgtattcattcattttcaggcttactctaaatccaccagtcatgttaagtccaccaacaccctaccaataacattatcagaattaggggcttgaatttaaaaaaataaacaattggttagcaaatatgtagaaaatattccaggtatgtacactgcaatattgccttctcattacacaaataatttcagacttaagcaaattcctagtcctatgatattcaagtacagatattccaaaggcatttggacaaacataatccaaaggaaacatacaaatgacagagagctaggtacggatcacgtcagactgggctgtctgtgagagagacagagagagagagagagagagagagagwgagtgtgtgtgtgtgt

SEQ ID NO: 80872 - DNA, 1275 bp, Homo sapiens
ggaaaaacaaatactacatgatcttactgatatgtggaatcaaaaaatgttgcaactggggctctctcacctgtgctgaataagaagaaactcagatttaactccaataagaaaactgaagtcacagggctgacggatcctctttatgctgccaaggagtggggacaataagagagatggtagctgaattaagaattaagagaagtagtgtctgaggtagccttaattcccaccactgaggctggcaaagacactggtgtttctggtggatgaagaacatgtcagtttatgtggttcgggttaaaccatcttgaaggcatccctacaaagctgcacatcagagtttgaggcttaggcggaggagtctgtgggtggagggccagataatacactatgggttagtgtagggcagagatgtgtctgtgcaggaggttgtttccctcattttacctcacccatgcagtgccctgagaacaacagatatccctcccaacagagccagcatctggtccccagcagcagagagggctaataataattaaaggtgttttttttttgtttgcttttttgcttttgctttttttggcagcaaaaacttgaagtcctacaaatgttccacattgaagttctgacatcatattgattgtcttgtatatctcctgtccctagatggttgctaagagtaggggcagctgaaaagatgtggatagcagaggatgaaaggtaactttcccccacccacacctctaggccactgaaggcccttcacaaaactctgcctgagtttggataatagggctttgacctagacactgactgagctgaatcatgagtggaatggaacttttactctaaaccaaattgatttattccagaggaaactaaaatatttctggatagaactgtattcattcattttcaggcttactctaaatccaccagtcatgttaagtccaccaacaccctaccaataacattatcagaattaggggcttgaatttaaaaaaataaacaattggttagcaaatatgtagaaaatattccaggtatgtacactgcaatattgccttctcattacacaaataatttcagacttaagcaaattcctagtcctatgatattcaagtacagatattccaaaggcatttggacaaacataatccaaaggaaacatacaaatgacagagagctaggtacggatcacgtcagactgggctgtctgtgagagagacagagagagagagagagagagagagagagwgtgtgtgtgtgtgt

SEQ ID NO: 80873 - DNA, 573 bp, Homo sapiens
tttcttataaaaatacaagctacttggagcagaaatacatcacatctttacatcccagcaccaagcacagggcctaacacraagtaggcagacaaataatgttttaaataaataaataaataaataaattctaacttctaaatttgcaagagaacctcagattattcaattttaatttggacatatggtacgttaactctctaaaatactggatcacacaggttaagcaataaagttaatgaaagcaaatcgattcctccccttgtttctccctctctcactaccctctcccctcttcttcaccttctttttttttttttttggttccttcccgctgcatgttttattaagcacctactatgtactaggacctagagatactgctgaatattattttagaacaccatttattattttaataataaaactacagatctgccataaccagagaaattaggtggactttataaatactcataccaccacggcatacattttagttattattcacttaagagacaaggaatgtttttatatctctgaagaatttcttggaaaatttggagtgcatca

SEQ ID NO: 80874 - DNA, 573 bp, Homo sapiens
tttcttataaaaatacaagctacttggagcagaaatacatcacatctttacatcccagcaccaagcacagggcctaacacaaagtaggcagacaaataatgttttaaataaataaataaataaataaattctaacytctaaatttgcaagagaacctcagattattcaattttaatttggacatatggtacgttaactctctaaaatactggatcacacaggttaagcaataaagttaatgaaagcaaatcgattcctccccttgtttctccctctctcactaccctctcccctcttcttcaccttctttttttttttttttggttccttcccgctgcatgttttattaagcacctactatgtactaggacctagagatactgctgaatattattttagaacaccatttattattttaataataaaactacagatctgccataaccagagaaattaggtggactttataaatactcataccaccacggcatacattttagttattattcacttaagagacaaggaatgtttttatatctctgaagaatttcttggaaaatttggagtgcatca

SEQ ID NO: 80875 - DNA, 882 bp, Homo sapiens
aagagcttcagggtgttgcccgagatcacacagctcaaagtggtgaggccaggactggaacccaggcccatcaggctccacagccagtgccttcatctctccacaggcaccctgaggaaatctagctccctgaggagggggcctcagtagatcacagtgcacagatctcacacagctggatctggcctgcaggtgtgtttggcccacacatttaaaatttgaattagctgccaactgttagaagtcaggagctgtggttacctctggcttctcttggaaaaacagatctggagacaatggtatggacactcccatttcccccaggggcctctgctccctattagtgtctggctgatactgagctgtgctgccctccttgttcaccatctgacttcctggccaccttcaatcacctgggttacctacctggccacagaggcctcccctaccagtagaggactctaagcatctgtcatcttccaggggaagagaaacatttactaaacacctacactgagcctaccagatactgtttccacacacccattgtcacatttatttatttatttatttatttatttatttwtttttttaagagacaggtctcactgtcacccaggctggagtgcagtggtacaatcatggctcaacttcttgggctcaagtgatcctccaaccgcagcctcttgagtagctgggactatagacatgtgctaccacacccagtaattttttgatttggagagacaaggtctcactatgttgcctgggttggtcttgaactcctgggctcaagcgatcctctggcctcagcctcccaaagtgctaggattccaggcttgagccaccatgcctggccccatttcacatgtcatcctccca

SEQ ID NO: 80876 - DNA, 620 bp, Homo sapiens
tctgaccatctaagggggagcagytacagctgctggcagcagggctgggtttcctctgtaccatccacagcaattaaactgaaggacaaggagcaacctcaccctcttctgcagcatcacggagcactgtgtcctacagcccacagaccgtcagcactctctcctgtacctggccagggggagagtcggcacagcagttagcagagttcacagcacagttgagggtgaggcaaggctactgtctaccaagcaacctgtcctccccaggtggtgggcactggcttggatcaaagcctctctctcccatggcagaataacaggggaggagagagtatagccctggactaagaccccttggggactttcagaaggagaagttccagagggaagaaaatgtgatctgacctctcagagacaaagaatgacacatgaggatggtgaaaggatctagaagtacagtattcagtttccagaagggaagacttgggatgcccaaagcagctccccaaatcaggactggctggtagcagagttcccctgggcaaacacttggaaccagtgggtggatgtgactgcagagtagatttcttgtatacttgagaaagacttttctctcaccc

SEQ ID NO: 80877 - DNA, 597 bp, Homo sapiens
gttgtgttgggtggtttgtgagaacaggaggaaacccttttttcccctttagccattaacctaataaacatgttgtccctacattgtcttctgacaggttctcctccagattggcatgatgatcacatgtcaccgatggcttggaaatgttgagtgacttgcccaaggtctcatagagccctgactctagaatcagagctgggattaatcatgggcatggcagatgctgaagctcatgtcgcggctgcctggccctggctgctcccagctacaggccctggggcctcttcttttagtctcagtgcactgatttgtgggctccactccttggggacctggaagagctgttcagtttctcctcacytgctttggacctttggcagggctgctaaggtccccccataacttgggttctgtccttctagtccctgggactcttgtttttgtaacccatgtgactttctgcacgctccatctagtgtccattccatcatttgaaggcagcagagagacccctgggggctttattaacatttcacttgggtattttttttttttttttttttttgagagatggagttttgctctttttgccca

SEQ ID NO: 80878 - DNA, 1413 bp, Homo sapiens
ttcagtcaatttcctcccgagaccagggtcgggacaccctgccaaggatgctgggaacctgaccttcaccattaaccctgttggagacactctttttaatttccatttggcatggagctcatgtaaaytctgagcccctacttaatttctaattcatttctgtcaccccatcaaattcatcaggtgaggaaaggtttaaagatttgcttttgtaaagctccaactcacattcctttccctggatgagagaagcacggggcccaagatctattcctgagttttgttcagctctgacgtgctgtggttatttactcccagatggcagccgccaccacaccaaccacagccaccacagacatactccacaaccatcccccagggtagcgggtcacaggcagtgcaggaagaggaagccacacaggggaagggaattagggaagctagggcagcgtggcgagccatggcacctcaaaatgatagcagcccaaaccctgagccaacccatgaataggactgagccctgccccatcccctcccccagcccttgctcctgggcagagtcctgctgagatgagccccacctgactgacaagctgtcctaagtgacccttcctctatgtgactcctctgcagcctggtcggctttctcaggcactggccacatctattcctactcctgacttggaccagggaacctgattcaagttccttccaatgtctcaagattcagggaagtgactcacccaggatggcatctgagtctacaacccagggacagaatccacaccaccattgcaaaaccatgcgcctttctgaaacggctgctcagctcagaaggggcctccctgaatcagtggaactaaaccatatagccaacgatgatgccctcaaattgtgcacacagtgaaggaaagttgcacagaggagtggctaattcagcctatctggagtggctactttctgagaagtgaagaacaagtaattatgagagagacggagagaaaggaggaaagagtgcaagagggggttttcaacagggatgcctgagataaaaagcatttcaagagaagcttctgcttctcaaagtgggagtcaatatggcagaagctgcagacagacagactagggccatatctgacctgcccatgtgtcttgttcagcccaccaagcataaaagtgtgaatctccaacttgagaaaacttgccagtcctgcaggccagcaataggctggagacagtgctggctgcccctctcaggagggcttgggctcattcttttgttcaccagtttccaccactccttattgccttgcatcggcccacatcccatattcacactgtctagccttgttaggcaactgagtttaggacccctgagcatagaacaaggttaaggactcagtctctgcagct

SEQ ID NO: 80879 - DNA, 702 bp, Homo sapiens
ttagggtagaaaattgcagcaaggctgaaggtacagacgttcatttccagttaaccaaacaaaataggaaaatgtgcttttctacactcattcctatttatataatacattttattctattaaatatatttctagtgtatttaatttaaaaataagtcaaataattgaaataaaatgagattagtaagactttcaaagcatgcactaaaggattgcagttattgactttgcaataacaattcactcaacatccagtaatttagtcactatgctatacaaaggcaaatttacagaagaagaagcaatgacacctgtctttaaatatgtgcaaagatctttcttcaatttgttgagcgaaaaaatacatgctttaaagcattcagagcttttctctctaacaagcttgccttattttcttcagtgcatgttcaggatacttcactaaacattagtcttctaccccaagttctggtctattgtgtayagcaggcttactgtctgggaaccatttttggcctttgattgaaaactgcttttctcccagttgccttagctgttgatttagccagtttctgctaaggtctatggacagactctgactgaccagtgctctcagtagttgacctcagcattttatttcacagaattgaggaaggaggcaagtgcagagctcagtacttacataagctttccatgtatgca

SEQ ID NO: 80880 - DNA, 907 bp, Homo sapiens
tggtctttcttgctatgaactttagaaactttaaatgtccrtttactcacaatacacacacagcctcaatgacctaataagcagatttgcagagccataaccttgctggcttatgtcagctcgaagtaaaaggggaggtggtagtggtgaatctgtttttattactcagtgtttaatcataatgaatcagaggcttttatgagaaaccttctacatcccatgaaagatttgctgatcaaagatgtagagatttctgttttattagaaaaaattgtttagcacctcattgtggatacagaagacattgtttgttgaaaagtttaagtctttttacgctacattggatgtcacactgttctgagtttagtggtatcaggtcatcagattctgtaagatgtgattctaaaaattcagtcctagtcctaccgagtccattagagaaggtctgcagtatataaaactgtgacttaaaaaatgctcaatcttccatgcacataactgcctgatgactctcaagctcaggtgtgaccttcatagacaggctgttgtaaagtctagtaattccttcaacacaaggtaacttagtatttaaaccttgaccacacatcacttcagaattactaaaggaacttaaatatatgtcagagctcctcttcggaatataggacaatggagcttatgcagatagcattactttaattttaattgtacccatctgggttcttcgaaatggcaagtatttcgtttatgtgcctttctcatcttgggtcaactcagttccatgcactttaaaattattttaggaaagagccacatcttttttttttccttctttctctttctttctttctttctttctttctttctttctttctttctttctttctttctttctctttctttcttt

SEQ ID NO: 80881 - DNA, 907 bp, Homo sapiens
tggtctttcttgctatgaactttagaaactttaaatgtccatttactcacaatacacacacagcctcaatgacctaataagcagatttgcagagccataaccttgctggcttatgtcagctcgaagtaaarggggaggtggtagtggtgaatctgtttttattactcagtgtttaatcataatgaatcagaggcttttatgagaaaccttctacatcccatgaaagatttgctgatcaaagatgtagagatttctgttttattagaaaaaattgtttagcacctcattgtggatacagaagacattgtttgttgaaaagtttaagtctttttacgctacattggatgtcacactgttctgagtttagtggtatcaggtcatcagattctgtaagatgtgattctaaaaattcagtcctagtcctaccgagtccattagagaaggtctgcagtatataaaactgtgacttaaaaaatgctcaatcttccatgcacataactgcctgatgactctcaagctcaggtgtgaccttcatagacaggctgttgtaaagtctagtaattccttcaacacaaggtaacttagtatttaaaccttgaccacacatcacttcagaattactaaaggaacttaaatatatgtcagagctcctcttcggaatataggacaatggagcttatgcagatagcattactttaattttaattgtacccatctgggttcttcgaaatggcaagtatttcgtttatgtgcctttctcatcttgggtcaactcagttccatgcactttaaaattattttaggaaagagccacatcttttttttttccttctttctctttctttctttctttctttctttctttctttctttctttctttctttctttctttctctttctttcttt

SEQ ID NO: 80882 - DNA, 907 bp, Homo sapiens
tggtctttcttgctatgaactttagaaactttaaatgtccatttactcacaatacacacacagcctcaatgacctaataagcagatttgcagagccataaccttgctggcttatgtcagctcgaagtaaaaggggaggtggtagtggtgaatctgtttttattactcagtgtttaatcataatgaatcagaggcttttatgagaaaccttctacatcccatgaaagatttgctgatcaaagatgtagagatttctgttttattagaaaaaattgtttagcacctcattgtggatacagaagacattgtttgttgaaaagtttaagtctttttacgctacattggatgtcacactgttctgagtttagtggtatcaggtcatcagattctgtaagatgtgattctaaaaattcagtcctagtcctaccgagtccattagagaaggtctgcagtatataaaactgtgacttaaaaaatgctcaatcttccatgcacataactgcctgatgactctcaagctcaggtgtgaccttcatagacaggctgttgtaaagtctagtaattccttcaacacaaggtaacttagtatttaaaccttgaccacacatcacttcagaattactaaaggaacttaaatatatgtcagagctcctcttcggaatataggacaatggagcttatgcagatagcattactttaattttaattgtacccatctgggttcttcgaaatggcaagtatttcgtttatgtgcctttctcatcttgggtcaactcagttccatgcactttaaaattattttaggaaagagccacatcttttttttttccttctttctctttctttctttctttctttctttctttctttctttctttctttctttctttctttctytttctttcttt

SEQ ID NO: 80883 - DNA, 592 bp, Homo sapiens
ttcggataacggctgggcaatgaaaataaaaagccccatttccagaaatcaaagaacttggggagaaataaacacgctggttcaaaggaggggaaaatatatcagaactagtcggacctaagggagcagatattttccaaaaatatccttcccaccagccatgctgcagatgtgtcactgtggctcagaggcaggccatctgctgcagtgtttccctggaaacccccagcaacgcccctcccggagctcctccgcggtctcccccactccatccccgcgcagcggaggagcttgccggtgatgtcactgctgctagctgggagggaatcccaggacctgcgtccctcgggtagagccaatcatggtcggctctggatgctggaaacctggggcttttaaccagaaagaattgcaaaagcaatatgcaattcatcacagtccacaaagcacagttcctaacagattctgaaaacgtgatttwaaaaaaaatgagatttatccgtaaacgagggctaggctacagttggtagggcggctgtcaattcttctacggagttttaacctacactcaatggatgcatgaaaaaaagaa

SEQ ID NO: 80884 - DNA, 731 bp, Homo sapiens
tttacttgtctgtcattcaaatctttgttaccaaaacagtttgctctttttcatcattcactaagcattcctttcacagctaagctaaagtgtctatatggaaacatacatacacacacacacacacacacacacacacacatgcacacacactttttccaggccacagacaggaagatatgtgtaaatgtatacatgttttcagtagcatatatacacaagggtctccaawaagatttttctagaaacaaaggctgatactacttcatttcatattattgtaaagtgctaattctaagtaaaagtagactaaaaaagagataaaaataaagataaaaatgagtgggctctcacaaccttgtttttttctttttgtttttcacttactctcttggctttttaactccttccttctctgcctcttatgaatgacaccaggaagagttattgtaaacaattggaatttctaaagttctgtgtaactgttagtatattcactatatgcatggtataatttataaaattaatctttgaaactgttaacccctagaaacagaaagaaagaaagaaaaaaagaaagaaacataaagaaatcttgacccactataaatcctgttttctctgccatctcccccagttacacccagggcaagtctatcttcttcaaagacattcagtcagcccacagctttttatcttttcaaacctttaatggcaccattagctacgga

SEQ ID NO: 80885 - DNA, 573 bp, Homo sapiens
tgctcaggtgagagttcatgcagcaatagtctttgtggaagatggtttggtgtacagcagaaagtagagaacttagagtttagaacacataatttaaacaggaacccccaggttatggttattgctttgagaagggtcttcatctgtgtgtggctaaagacggaagataatcaagtgagggaaagctctctgtaaatgaaaacatgctagataagcatcagttattgattgtctccttgaagtgagtgaaataagagtcatccatgttcatgactacctttttctgaaaccataaatgaaaatcattcctttctaacatcattaactctacgttttcagaaataacattstcaccttctgtcatataaaagtttgaggccaggtatggtggctcatgcctgtaatcccagcacttcacgagccccaggcaggtggatcagttgacgtcaggagcttgagaccagcctggccaacatggtgaaaccccgtctctactaaaaatgcaaaaattagtcaggcgtggtggtgcgcacctgtaatcccagctactcaggaggctgaggcaggagaatc

SEQ ID NO: 80886 - DNA, 573 bp, Homo sapiens
tgctcaggtgagagttcatgcagcaatagtctttgtggaagatggtttggtgtacagcagaaagtagagaacttagagtttagaacacataatttaaacaggaacccccaggttatggttattgctttgagaagggtcttcatctgtgtgtggctaaagacggaagataatcaagtgagggaaagctctctgtaaatgaaaacatgctagataagcatcagttattgattgtctccttgaagtgagtgaaataagagtcatccatgttcatgactacctttttctgaaaccataaatgaaaatcattcctttctaacatcattaactctacgttttcagaaataacattgtcaccttctgtcatataaaagtttgaggccaggtatggtggctcatgcctgtaatcccagcacttcacgagccccaggcaggtggatcagttgacgtcaggagcttgagaccagcctggccaacatggtgaaaccccgtctctactaaaaatgcaaaaattagtcaggcrtggtggtgcgcacctgtaatcccagctactcaggaggctgaggcaggagaatc

SEQ ID NO: 80887 - DNA, 292 bp, Homo sapiens
ttgaaagctgaagttctctgaagaaaggtttctgcaaacaaggccaagaacactaaaacttcaaacccatgtaaatgggatcagctgtttgctctgaacctgtttctcactagtagccagtcagctacctccactcttccacacaccccagtatgtccttagaataataattatgtctcaagmgagttaaatcagtggccagaaatcatataactagagattggactaacagactgaggattagaatctatcccaacacccaagcctactcctgtctgccatgttgtttctc

SEQ ID NO: 80888 - DNA, 1313 bp, Homo sapiens
ctgactagaaaagtgaaaacactgcttcctttcactttgttcatttatgagagctatacgttcacttacatagagcacagtatttctctttrttgctcactatcaacttgaaaccgttgtgatttgcaaagaagtctttatgtatcattgcccagggaatgttttgaatgaatttttttttgttttcttcaaagacatatgtaaagcggtttggtgcttttaggaaattttattagtagatgttcaattttcattaagacacgatacacatgatggggcagaaggccacgtgccagctgcagagagagcaagcccttctctgtttcaggtgaaagctcgtgcttttgtttccatgagacttcaaggggaggttctgtggcagtatttatttggcttatggtaacctctcagatgtattgcatctgctctgtagtaaaggatgtgggctcccttttggtgacttgctgcctgactcagacaacaggcatgtttgtattcctcagctttgatcttttctgcctggtatctaaatgaagcctttcttgtgccttcaaagctaaatggcttgtttggtttccagttactaaacagctctgctcctgctactactggggttcccctatccttgattctattctaacaccttcagttggagagctgcagggatccaagccaaagtataactaacatgtaataaatctaataccatgtgcaagagagggcactagtgcttcctggggttgtgcacgccaagattcaacttaaccctatggtgggacctcggagttgaggttagagggtcaataggaaaagagaaaatgaaagaaaccttgatgttctcaaaagaatgcttagcactgtggctaagggtatggatgctggattttaacagcctgggctgtgaacaattgttgccaagcctgagatttcctgtctatgaatgaagagtgatgatagtacttacctaccttattgtgagtgttaaatgagaaaatagaaataaaatgcttaggcacaacattgcacacatagccgtgactcagggaatactacctttcggttattagtagtagttatgtgcatttttatccatccttaatgtccaaaagaaatggtctctcccattctctatctagggaaattgaatttattcataaaaatcaaattcaaatatctattgctgtgaatattctccaatagccttgtcatcgttcatagcaggtactcgagctacgcaaataaaaacacagtgtgctttaaaggattatttagtctcttttcattcttcctaaaactcattatttatagtttga

SEQ ID NO: 80889 - DNA, 1313 bp, Homo sapiens
ctgactagaaaagtgaaaacactgcttcctttcactttgttcatttatgagagctatacgttcacttacatagagcacagtatttctctttgttgctcactatcaacttgaaaccgttgtgatttgcaaagaagtctttatgtatcattgcccagggaatgttttgaatgaatttttttttgttttcttcaaagacatatgtaaagcggtttggtgcttttaggaaattttattagtagatgttcaattttcattaagacacgatacacatgatggggcagaaggccacgtgccagctgcagagagagcaagcccttctctgtttcaggtgaaagctcgtgcttttgtttccatgagacttcaaggggaggttctgtggcagtatttatttggcttatggtaacctctcagatgtattgcatctgctctgtagtaaaggatgtgggctcccttttggtgacttgctgcctgactcagacaacaggcatgtttgtattcctcagctttgatcttttctgcctggtatctaaatgaagcctttcttgtgccttcaaagctaaatggcttgtttggtttccagttactaaacagctctgctcctgctactactggggttcccctatccttgattctattctaacaccttcagttggagagctgcagggatccaagccaaagtataactaacatgtaataaatctaataccatgtgcaagagagggcactagtgcttcctggggttgtgcacgccaagattcaacttaaccctatggtgggacctcggagttgaggttagagggtcaataggaaaagagaaaatgaaagaaaccttgatgttctcaaaagaatgcttagcactgtggctaagggtatggatgctggattttaacagcctgggctgtgaacaattgttgccaagcctgagatttcctgtctatgaatgaagagtgatgatagtacttacctaccttattgtgagtgttaaatgagaaaatagaaataaaatgcttaggcacarcattgcacacatagccgtgactcagggaatactacctttcggttattagtagtagttatgtgcatttttatccatccttaatgtccaaaagaaatggtctctcccattctctatctagggaaattgaatttattcataaaaatcaaattcaaatatctattgctgtgaatattctccaatagccttgtcatcgttcatagcaggtactcgagctacgcaaataaaaacacagtgtgctttaaaggattatttagtctcttttcattcttcctaaaactcattatttatagtttga

SEQ ID NO: 80890 - DNA, 583 bp, Homo sapiens
aatcccagcactttgggaggccgaggcaggaggatcacgaggtcaagaggtcaagaccatcctggccaacaaggtgaaatcccgactctactaaaaatagaaaaattagctgggcgtggtggtgggtgcctgtagtcccagctactcaggaggctgaggcagaaggatcgcttgaacctgggaggcagaggttgctgtgagttgagttcgtgccactgtactccagcctggcgacagagctagactccgtcaaaaaaaaaaaaaaattgcggggaaatccttgagtgtaagacgggcaatggagaatatgcacagatggttccaaartaagtaagcatttcccaagtctgcaggatacccccatcagaaaattcagacccgaagtgatggatcaaggctttcttcagtccagtcccaaactctctcttctctctgttctctctaagtgaaatatcagttaggaattaacctatttgaattttcacctccagaacatatattaaatatttccacagtcagaattttctttgaaattttgatgttaaagacactactgctgctttgttacattttagactatttc

SEQ ID NO: 80891 - DNA, 1008 bp, Homo sapiens
ctggcatgcaccttccacaccgtatgggccagctcccaggccagggaaggaaaagaagggtctgcttacagctgggctctaatcggacttgcagagcaggccggtaaccacactggttacagggccgctctcagtttgtgtccctggagagtttgaagaagttgcagtggagatggctcctaccatcctttccagttggatcttcagctcttactctgcataggcccatgggggtggctatcaccctcaatcctgacttctttctcagatcttccactgtctgcctttgaaacggggagccctcttggcccagaggaaagccaggatgattggtctctagctgccctgttcttgctctgctaggcctggggaccagctctgttccaccttgccatcatgagctctggggaaggcagcccactggtgagcagaagaggcactgcctttctaagtggagctaggatagctgtcatctgaggttgcagctggaagatgggccagttctacttaaatgttgtytgactgctacttaacccaacactgcaggcttcctgccacatcagctgattgtaccccttgccccaaaggaaggagtaagcagttacttcttgcacactgtctccactcatggctcagctcttttccttgtcagtcttggagtctctaatgaaagggtatggctggactgagaatacttttgagggacagggaagtaaacagactcatggagcaggatttgagatgggaactcagattacagacttcataatcacagcttggaagagaagcgtcgtgtgtaaagggaaccaagaagaaaaggtacatcatgtcctttcgaaacatttcagcaaagattcttcaaacaagataactgaccacagaaccctagtcttgcttctttattattcttactattatgctagatcaggaggctaaatgcaatcccaagagctactgtgtattgatggcttactttgatccagggactgtgctgtgcacatcaatgca

SEQ ID NO: 80892 - DNA, 2184 bp, Homo sapiens
gatccctgactatgctaacagtttttggaatgtgaatttcttccctagacaccttctggagcccccatgggctgcctggatcagcctgaaatgtatgtcatctatgtggccttgcccaaactgccccatctgctcctgaacctgcaggggcttggagagcagtctaacctggccttggagcggaggccatgtctctctgcacaatcctcagggcccccacagctctctcctcctcctgaaatccttccagccatgaatctaaacccttcgctgataaatcctttatccttttaaatgactctgttaggttttgtctcctgctcaaggccagagtcagccctttagaaaaaggaaagaggccatccagagccatccattggccttcctgtcactattgtgccttaattgaatgcctttatgttgggggaggccattacgatcatttttccttattaattgcccatccatttttgcctctgaatagccttcttgggcaattttggacaccatccgctgccaccgccttggacgtagattctgctcacggagatgtgctggctccaatgaaacaatggttaccgggctctgagtctgcaacttaaagtgaacactccccgtccctggaggcattgtgattcagagcactgagaggtgaaggctgggtcagactgcaagtcccaagttggagcacagggaagctggaagaagggctgtgtctctaaatggttaggtttcagcagctcagggttgttttgatgatactggggcctgtggtgtctgcagagggaaagcagtccgcctgacctcatagggttgggggccacagtcagctgcaaatagctgcctcaatgctggctgaaaaagtaggtccccaaggggagctaagaggacacagcctgtctgtggcttctattgaaggagaatggatgttttcttcaggcccatcaccctgagcattggaggttaatgttaattgacatttactgtgtgctgggcctggggctttagacgaagtgtcctggactggaagatccctgaggacagggatcctgtttgtttgcaagtttgttcattctgagcattcttattgactgctcactgtttgccagcactgtgctgagctgggaggcaagacagacccagtccttctgtcatggagcctccaggaaggtgggccaggctgatgatggaacagaccagagactgtaaccgtgaattaatgggacacgtaactgaaagtaaaggaggtcaatggctaaagataatatttctaaggaaagggcaattgatttgagaaggagctagcaaggggagtgttgggaggtgggagcaccttccagaaagagagaacagcatgtacaaaggtcctaagataagacaaaactttgtgtcttcagggagcaaaaagaaggtcctgtggctaaaacagtggttcttactgtgggtctctgggccagcagcagcagcatcacctgcgaacaggttagaaatgcaaattmtcaggccccagcccagatttactgaatcacagactctgggggtcaggggtaggcagcaagccttccaggtaattcagatgtacctgagagctggagaaccactggacttaagcaagaggcagagtgactttagaagactcagagaactggtaggtcttggtagggccaggttgggtcaggtaactgccatagcgagattagattctaagtgcaattggaagacaccaaaagagtttcagcacttgggtgatataatgtaatatttatttacaaaaatgtttatggctgctatgtggaaaagtgatgggttggaaggttggagaccagcttggagtctgtttaccatatccctagcacctagaaccacaagtagtatatagtaggtgctcagtagctgtttactgacagaatcatcacattttaggccactatatgctctcatagcaccctgtaaattccattcatagtatttgctacatatgaaattgaatgaattgtacataatctctctcccattctgctgtaatttctacaaggcaagaatagctactagatataatgcctggcacttagggcctcagtgaatatttgttgaatgaataactgaatataaccacagcatctctatgaatgggcactattattatgccattttacatgacaagaggtaagtaaattgtctcag

SEQ ID NO: 80893 - DNA, 699 bp, Homo sapiens
taggcagggacccagagggcaatgtgcagaattctggccacagcccccagaatgtgttgttactggctatgtccattcttatttggcaagcagtctttggacaggcgtttggttttcaggctgggcttgatgtgtcctgggtcaggagggaaaggctggtggccatgctggatcacagggcttgaggctggggggaggctgcagagcttggcagggttccagcagtggtgcgggctgaagggagtcaccaccgggaacccaggcccgggcaacaagaggttctctcattstggcttctccctccagcaccacctgccaggccagaacagaaagaagggcgacggagactggcagagaaacagcaattactgctcagtgagaagtaaacagcgtctgcttccagaggctttacggaccagaaagcccacaggaaatagctcctgcttcccagcctggaggtcctcatgcactagccctccctgctacaattttgatggtttttcgcatatttacagaattgtgcaaccatcaccatgatcagtcttagaagagttaatcacccctgaccccagaaaactctgtattcattagcagtcactccctttcccctttccacccctctccaacattaggcaaccactaatctactctctgtctccataaactggtctattttggacatttcacataagcctccct

SEQ ID NO: 80894 - DNA, 699 bp, Homo sapiens
taggcagggacccagagggcaatgtgcagaattctggccacagcccccagaatgtgttgttactggctatgtccattcttatttggcaagcagtctttggacaggcgtttggttttcaggctgggcttgatgtgtcctgggtcaggagggaaaggctggtggccatgctggatcacagggcttgaggctggggggaggctgcagagcttggcagggttccagcagtggtgcgggctgaagggagtcaccaccgggaacccaggcccgggcaacaagaggttctctcattctggcttctccctccagcaccacctgccaggccagaacagaaagaagggcgacggagactggcagagaaacagcaattactgctcagtgagaagtaaacagcgtctgcttccagaggctttacggaccagaaagcccacaggaaatagctcctgcttcccagcctggaggtcctcatgcactagccctccctgctrcaattttgatggtttttcgcatatttacagaattgtgcaaccatcaccatgatcagtcttagaagagttaatcacccctgaccccagaaaactctgtattcattagcagtcactccctttcccctttccacccctctccaacattaggcaaccactaatctactctctgtctccataaactggtctattttggacatttcacataagcctccct

SEQ ID NO: 80895 - DNA, 650 bp, Homo sapiens
ctttttccagttccacaggcaacaataaccccggggtcctatagaacattcattatggtccaggacagttgagtttcactgtagagagctcaggtaacaggagactaattcagcagcatattctcattactagaggctcaacacaggagcagcaagggtccatggaggaaattcatcttgcagttgatcctggagctgatgtcttcctttttgtagggaacgtagatgggcttcagtttcactatctataaaatggcaataatcatggtacttgccttcttgggttgttgtgaaaatgtaatttagttagattatattaaatgtaaagttctgggcataatgcttacccacagcagactttcaataaatggattataaatttaaaattacaaacacataaagttattatccttctttgtkaaaagcagtaagaatcttccacctgagtcagacctcctatttatttgcctgggattctgtctttgaaagtaacatgaaggggcatgctgtggatgacagtatgaaagtcatcttaactgaccttttactattaaagtgcctgaggtccaacaagcgttcagtaagggatagattccatcttgtccctccccacctttgtgggccaactgtgagacattgtagatatttag

SEQ ID NO: 80896 - DNA, 590 bp, Homo sapiens
atgaggacccaaagtgattaaggaatttgcccagcctgacagcgtgaggctactacacccgccctgtattactccaggctcaataataacagcattattactcataataatattaatgacttatatttacatgatacatctattattggtatcgttctaggcactttacatgtatcaattactgaattctcgggacaactctataaggtaaatactctatccccactttacagatgaggaacctgaggcacagagtggtgaaataattgtccaacatcacagagcaggtagaagttgaagccaggacctaaaccaagaaccttactttggaatctatgtgcttatcctctataccrtaggacctctctgccccatgttcctgtctatacctccagcttactataagagaatttgaactgaaagggattgcagaaaacacagtctaatctcccattctacagatgaacaaactgagacccagagaagaaagaatacctgcccaacaacacagacaggagtaatgaagctaagagcaggactaaggaattaagatatacataattaagtttaaaagcaacccgttagttggg

SEQ ID NO: 80897 - DNA, 1291 bp, Homo sapiens
taaccaaggaattttaaaattaaataagcaaatgaacaaagaaaatataattcaggcttattagatcactggatgataaggcagtaagtgctctcagatgccatatcatttaacccgcaggttaaattccacaagagacatggtattaatgtagccgtttggcaagtgaagacattgatgccarcggaggttaagagacttgtccaaggtcacacagtcagcaaatgatggaaccagagtttgaaccgaggtgtatcattcaaacccagactcttacctgttagatccactgagcctggcaatctacggcttacgatgagtaaactgaatgttttgtttgtagaattgatttattttagccactgtgaagtaatctcttcacatgaatgtttctcctgctgaagtacatctgcccttgattaaatgttgtctatgcaattcatggacaatcgatggtactctaggctctgaatgagaaaactggaacttctggttgccacaagtctgctgatggcttaggcagggacattctgtctcccaggggccctatcagtgctcatgtggtcacgtagacacacttcaacttgagcttcaggtgggatgcttccctataagcagtgaacgcgaaaagccttggctaaaatgggatccacaccgaacacagaacagaactggggctgcacttccaggtgagaagcatagggtgggatcaagaggtggctgaagggatggcagattctcaagctgcattcctgcagtcaggatgtgtccaaacggaaggcttggacagtcagtggccacgtgggggcagcatcgagccagaatgacagagggcacttcgtctggtgaatatcatgtgagtccatgtggagcctcctctttggaagatggggtgctcttgtgggatgaacgttggggagggacaatctctttaataactctgagaggtactgctctttttatgaaggggcagtataacgtggtgcttataaacgtgggctctggatagttagcctatttgtatttaaaacctgctgttatttattagataacttacttaagttttctgtgcctcagtttctccatggggttgatatgaggactaaatgaatacacattaggcactttttcagttatctattgctgcgaaacaaaccaagccgaaacaactacgtatttgctcacgattctgcaattagggcagggctcagtgggacagcaactcgcttcctcatgtgatgttggctgggcacttccagtagggctggatgagccaagagggcttcctcaa

SEQ ID NO: 80898 - DNA, 808 bp, Homo sapiens
aggctcagagaagttaagcagcttgtccaacgtccgtgtgttgctaactggcgaaagccaaatgtgtggtcagcctccatcagcgttctatttgcttccttcatggggctgcttttcagatacctgtcctcagatacccacctggcgaaggaacctgttggctcgtgccccttcacttttctaaggctgggtgaaataccacaagggtagggccgctgacagggaagatctgccacgagggcgcagccatctgtgtgagccacctggcctctgggccctgaccccggctcctcctgggccccctagatgctcagtgtagccacttctccctctgtgtccttcaccacctatctttttcacagctctgtttcccctcttgtcagcagatctctcaacaaaatgttttccatcactgctgcctatttttagcccttttatcacagttatttcctttggtaaatagcttcctggcatggggtgagcagcctaactcgggagccagcaagcactgtgtggatgggggtgtgggttgggtgggcatctggggtgagagggaagaattgaggagccatggaccaggccccactattgggggctgctttctgttccaatggtggcagcagcagcaggagcaagatgctcattcattccatttcaattygttaaaaccattctttgagaaggcagcatgtgcacaggcctcggaagcagacaatcagcgacaggcgcccaaaatagactcaaaatcagcagcattttgttttgctcaaggcttttcatgcctgcaaggggaggaaagaaaggatcc

SEQ ID NO: 80899 - DNA, 1252 bp, Homo sapiens
tgcatgaaattctctggtcacagccagagaagctgcaattttgacctcatcagtcccagcaaagaggaccaatttgtgtaaagtctagtgtgccacagacctttaagtgagacctttaccaaattgggaaagttagtcacaattgtcatgtaggtcctttgccacagttacagtctgcccagctccagggcttcttaggggacatctcagagccgaaggaagcctggtaagagaacatkcccccttctggacctcagtctcccatctatgcactgacggtgatggatgagatgggagggttgggccccgcctgcaaagtgagaatattggctccagagacaggaaacctagttctaatccgacatatacctctccctgggtgtgccaccttggacaagttcctcaacctgagccttagtttccttgttttcaaaaaaaaaaaaaaaagaagaagaagaagaagaagagataatgataatatctggcagcccattccacaaggaggcataaacaaatatattcatgtgaaatgctctgtgttgggctggcatgtggcaaacacccaatagatgatggctactttaatcaccactggggagaatctcctgttgctgacactcttggagccagtatgtctccctcccactctggccccagggtttggctccctggatgctccccatccggtcaggaagtgcctcacagcctgaggcagcagaggagttggacttgtccggtgggagaggagccagtggacattatgttccttcccaggaatgggaaagggagaatgttcctgggtgaggagcaaggctctggggcaagcacacccaggaacatccactcccgcttccccactgcccagagccaagcgtagtgcagggccctgtgaggaggaagacaccagagcagaggtgccggcctgcctcaggctcctggcaatcagggcacactcgtacagagtatatgttctcacacattcacagatatccccacaccccgtacacacatggtgagtgacacagatatatattcgaaagcctctcagaaatgtactcatgcatccacgctcacgtggccatgcactcatctacattcaggtgtacacatgtaactcacagatcctgaagtccggattcctacacatacactcacacatacacaaggaaactcactcattcccatacacttacccatattcacaaatacagttgccaacacaatcacacaggtgtcgacattcatgaacaca

SEQ ID NO: 80900 - DNA, 1252 bp, Homo sapiens
tgcatgaaattctctggtcacagccagagaagctgcaattttgacctcatcagtcccagcaaagaggaccaatttgtgtaaagtctagtgtgccacagacctttaagtgagacctttaccaaattgggaaagttagtcacaattgtcatgtaggtcctttgccacagttacagtctgcccagctccagggcttcttaggggacatctcagagccgaaggaagcctggtaagagaacatgcccccttctggacctcagtctcccatctatgcactgacggtgatggatgagatgggagggttgggccccgcctgcaaagtgagaatattggctccagagacaggaaacctagttctaatycgacatatacctctccctgggtgtgccaccttggacaagttcctcaacctgagccttagtttccttgttttcaaaaaaaaaaaaaaaagaagaagaagaagaagaagagataatgataatatctggcagcccattccacaaggaggcataaacaaatatattcatgtgaaatgctctgtgttgggctggcatgtggcaaacacccaatagatgatggctactttaatcaccactggggagaatctcctgttgctgacactcttggagccagtatgtctccctcccactctggccccagggtttggctccctggatgctccccatccggtcaggaagtgcctcacagcctgaggcagcagaggagttggacttgtccggtgggagaggagccagtggacattatgttccttcccaggaatgggaaagggagaatgttcctgggtgaggagcaaggctctggggcaagcacacccaggaacatccactcccgcttccccactgcccagagccaagcgtagtgcagggccctgtgaggaggaagacaccagagcagaggtgccggcctgcctcaggctcctggcaatcagggcacactcgtacagagtatatgttctcacacattcacagatatccccacaccccgtacacacatggtgagtgacacagatatatattcgaaagcctctcagaaatgtactcatgcatccacgctcacgtggccatgcactcatctacattcaggtgtacacatgtaactcacagatcctgaagtccggattcctacacatacactcacacatacacaaggaaactcactcattcccatacacttacccatattcacaaatacagttgccaacacaatcacacaggtgtcgacattcatgaacaca

SEQ ID NO: 80901 - DNA, 1252 bp, Homo sapiens
tgcatgaaattctctggtcacagccagagaagctgcaattttgacctcatcagtcccagcaaagaggaccaatttgtgtaaagtctagtgtgccacagacctttaagtgagacctttaccaaattgggaaagttagtcacaattgtcatgtaggtcctttgccacagttacagtctgcccagctccagggcttcttaggggacatctcagagccgaaggaagcctggtaagagaacatgcccccttctggacctcagtctcccatctatgcactgacggtgatggatgagatgggagggttgggccccgcctgcaaagtgagaatattggctccagagacaggaaacctagttctaatccgacatatacctctccctgggtgtgccaccttggacaagttcctcaacctgagccttagtttccttgttttcaaaaaaaaaaaaaaaagaagaagaagaagaagaagagataatgataatatctggcagcccattccacaaggaggcataaacaaatatattcatgtgaaatgctctgtgttgggctggcatgtggcaaacacccaatagatgatggctactttaatcaccactggggagaatctcctgttgctgacactcttggagccagtatgtctccctcccactctggccccagggtttggctccctggatgytccccatccggtcaggaagtgcctcacagcctgaggcagcagaggagttggacttgtccggtgggagaggagccagtggacattatgttccttcccaggaatgggaaagggagaatgttcctgggtgaggagcaaggctctggggcaagcacacccaggaacatccactcccgcttccccactgcccagagccaagcgtagtgcagggccctgtgaggaggaagacaccagagcagaggtgccggcctgcctcaggctcctggcaatcagggcacactcgtacagagtatatgttctcacacattcacagatatccccacaccccgtacacacatggtgagtgacacagatatatattcgaaagcctctcagaaatgtactcatgcatccacgctcacgtggccatgcactcatctacattcaggtgtacacatgtaactcacagatcctgaagtccggattcctacacatacactcacacatacacaaggaaactcactcattcccatacacttacccatattcacaaatacagttgccaacacaatcacacaggtgtcgacattcatgaacaca

SEQ ID NO: 80902 - DNA, 685 bp, Homo sapiens
ccaaaggcctccctgctctccccaggrtctcatgcaggggtccagctggtggcctctgctccctccctccttcatctccccaccacaaccctgctccggggccctgaagcagctgatccccatcatctgatggaagggagtggcagccgggacttgcacgcctctgagccactgtccccaatgcccagcagaaaacaggtcagaaagatgcctgcagagggaggagttcacttaggagcttcccctccccagtgagaagctcagctcgggagactatagggcaagggttgctgtgggtcacatgtagagccggtgagaagctggaaaatacagcacagtctggagagggggtcagggaggaggtgggcagctccctcagtctctcttcacacctcttcctatagaatcttccattcccagctggaaaatacagcacagtctggaaagggggtcagggaggaggtgggccgctccctcagtctctcttcacacttcttcctatagaatcaacagccctaggaggtatgaagtggtgtctcattgtggtttggatttgcatttccttaatgaccaatgacatcgtgcatctttccatgggcttattggccatttgtatattttctttggctagatgtctattcaagtcctttgcccatttttttttaaagtgggttatcttttaatt

SEQ ID NO: 80903 - DNA, 569 bp, Homo sapiens
tggatttaatctttttaggaaaaatcacataactatgatttattattagcatcttaatgatgtgagctattttaaagagatagtgcttttctcagcagccacctggagggaagaagtggctcagacctcagaaattgtcacttgtgagtattcyggagacatggcctcttcctgcccctcagtacacaacagctttcacagcccattgtttcagggatatctttttttttttttttttaatggaaaggacagaagagaaacaagggccccttcctaccaaggtttgtgagaggttaaacatgaagtcaatgtatgtgaaagtgttcagtaagtgcctagcacatgacaggcacccaaggaatattctagaacttatgctgacattttctactatggtccaagtattttctcatgcattcatttattcataaaagtaattgagcatttacatacctggctttcttcaagtcacagatgatgaaggaatgaataaaatgaagtctctgctttcatggtgtttacattgtagtcaagggacagagaatatacaagttacacactgtcagtgg

SEQ ID NO: 80904 - DNA, 569 bp, Homo sapiens
tggatttaatctttttaggaaaaatcacataactatgatttattattagcatcttaatgatgtgagctattttaaagagatagtgcttttctcagcagccacctggagggaagaagtggctcagacctcagaaattgtcacttgtgagtattccggagacatggcctcttcctgcccctcagtacacaacagctttcacagcccattgtttcagggatatctttttttttttttttttaatggaaaggacagaagagaaacaagggccccttcctaccaaggtttgtgagaggttaaacatgaagtcaatgtatgtgaaagtgttcagtaagtgcctagcacatgacaggcacccaaggaatattctagaacttatgctgacattttctactatggtccaagtattttctcatgcattmatttattcataaaagtaattgagcatttacatacctggctttcttcaagtcacagatgatgaaggaatgaataaaatgaagtctctgctttcatggtgtttacattgtagtcaagggacagagaatatacaagttacacactgtcagtgg

SEQ ID NO: 80905 - DNA, 629 bp, Homo sapiens
ctctccctttctttatcaacagctttgatgatgtgccacgtaaagctgtctatagccattagctgctttgatgacatcagacatatactacctggcaacctcaactctgcattcctggaaaatctcaggaaacttaaaggatcatctaaaaatttattttgtatgttttgggagtttgattaagaattgtgggtcaaacatctatctttcagatgaggccaataactatattctaattttttcttcaaagccacagatactccaagctaaggaccaatgccagcaattatatgtgtgtatatacacacacacacatatgtgtgtgtatttatatgtgtatgtgtgtgtgtgtgtatttgcagaatttgtatgagggctttccatgtttcagtggctatggaagagagaaatagactaggctgggaccgatggatctcaggttttgacccatactctgccactgtctttgtcactttggacaaatgtcttctcatctctcagtcttctattttctaaattggatagaattagatgactggggttgaaagacttctctagaaatgagggtgcccaactgccttcattttagaagtgagaaaactgaggctttgtgtgrcaagcttttgctg

SEQ ID NO: 80906 - DNA, 981 bp, Homo sapiens
tgcataatgggtaaaaatgtatataacatacattccatgttcattttgaggtggggttttagcattaaaatgagctagagtttggctttttatgtcaaaagtgaactgtagaacacaaagacaacgtatatacagcctctgttagttgaatgaaactggcttaaggtcgactgttgtttatcatgaaagaatgttttaaggctgatcctctgtccagtcagagatataatggtctgggttgtgcatcacagcggatagctcctattgttagggagttaagccttaggaatttagaaatttgtcatgccagaggggtcctgaacccttgactataggtaactttagttcccttaaccttagaacccgtcttagttaagaaagttgcatctattctggtctctcagatcatggatctttacattttaaaattaatatttaaattataaaatattattgtacacatctaactaaaacacatctgtcttagtctattttaaatagtttaaatattttcctaatctaaatattgtctatttaatcaaaagacaaaataccattttgtttaaaaagttctttcatgtatcaacagaaggcttctgacacaactcttatatctaccaaaaccaaatttcattgcatatatatatatatgtatatatatatatatacacacacatttttttttctttgagatagaatttcactcttgttgcccaggctggagtgcaatggcgcgatctcggctcaccacaagctccgcctcccgggttcaagcgattctcctgcctcagcctccaaagtagctgggattacaggtgcgygccaccacgcccagctaatttttgtattttttagtagagacgaggtttcaccacgttggccaggatggtctcgatttcctgacctggtgatccgcccgcctcggcctcccaaagtgctaggattacaggagtaagccaccgcgcctggctgccgtaacgt

SEQ ID NO: 80907 - DNA, 981 bp, Homo sapiens
tgcataatgggtaaaaatgtatataacatacattccatgttcattttgaggtggggttttagcattaaaatgagctagagtttggctttttatgtcaaaagtgaactgtagaacacaaagacaacgtatatacagcctctgttagttgaatgaaactggcttaaggtcgactgttgtttatcatgaaagaatgttttaaggctgatcctctgtccagtcagagatataatggtctgggttgtgcatcacagcggatagctcctattgttagggagttaagccttaggaatttagaaatttgtcatgccagaggggtcctgaacccttgactataggtaactttagttcccttaaccttagaacccgtcttagttaagaaagttgcatctattctggtctctcagatcatggatctttacattttaaaattaatatttaaattataaaatattattgtacacatctaactaaaacacatctgtcttagtctattttaaatagtttaaatattttcctaatctaaatattgtctatttaatcaaaagacaaaataccattttgtttaaaaagttctttcatgtatcaacagaaggcttctgacacaactcttatatctaccaaaaccaaatttcattgcatatatatatatatgtatatatatatatatacacacacatttttttttctttgagatagaatttcactcttgttgcccaggctggagtgcaatggcgcgatctcggctcaccacaagctccgcctcccgggttcaagcgattctcctgcctcagcctccaaagtagctgggattacaggtgcgtgccaccacrcccagctaatttttgtattttttagtagagacgaggtttcaccacgttggccaggatggtctcgatttcctgacctggtgatccgcccgcctcggcctcccaaagtgctaggattacaggagtaagccaccgcgcctggctgccgtaacgt

SEQ ID NO: 80908 - DNA, 808 bp, Homo sapiens
ataagtttgaggctgcagtgagccagtttacactactgcactccagcctaggagacaaagcaagaccttgtctcaaaaaaaaaaaaaaagtatttttctatatcaacatgtatgttaatatttgcaaaagctttattaaaccacattattyttattttatggataagaaaactgatagagagtttagataaatataaaaagtagacaaaatggcagatttaatttcaccttcagtaatttttgaaaagattatggaagtgtcatggttacctgtgtgtttaatggcttaaaattagaatctagagaatcaagtgcagaacataatttatcacattattttaaagaatgacttctcttaagtactgagatgaaaacttgtttcaggggattgctgaagtctagtttgctgatcactgttttcatactgttttttttttttttcccctgatggcatgctcctgaaggttcttatgcagatatgtggtagtctcattttcaataaatacctagaaagtgtggttgtggtcacactagaacacatatcttaggcattcagattcaagaattaggccttctctgattacatggccttataagatattaacaaatgatggatgttcacttagaaacactcaactgagtgaattatcatatatacgaagaaaaatgtaaaccaaaaagcgttaaacctgtctgctgatcacacacaaataggtacatcagtgagcaatgcactttagatttaaaactatagaatttaatagcttttcaaaatgtaaatacacctataagtatcaagtttttgttt

SEQ ID NO: 80909 - DNA, 808 bp, Homo sapiens
ataagtttgaggctgcagtgagccagtttacactactgcactccagcctaggagacaaagcaagaccttgtctcaaaaaaaaaaaaaaagtatttttctatatcaacatgtatgttaatatttgcaaaagctttattaaaccacattatttttattttatggataagaaaactgatagagagtttagataaatataaaaagtagacaaaatggcagatttaatttcaccttcagtaatttttgaaaagattatggaagtgtcatggttacctgtgtgtttaatggcttaaaattagaatctagagaatcaagtgcagaacataatttatcacattattttaaagaatgacttctcttaagtactgagatgaaaacttgtttcaggggattgctgaagtctagtttgctgatcactgttttcatactgtttttttttttttycccctgatggcatgctcctgaaggttcttatgcagatatgtggtagtctcattttcaataaatacctagaaagtgtggttgtggtcacactagaacacatatcttaggcattcagattcaagaattaggccttctctgattacatggccttataagatattaacaaatgatggatgttcacttagaaacactcaactgagtgaattatcatatatacgaagaaaaatgtaaaccaaaaagcgttaaacctgtctgctgatcacacacaaataggtacatcagtgagcaatgcactttagatttaaaactatagaatttaatagcttttcaaaatgtaaatacacctataagtatcaagtttttgttt

SEQ ID NO: 80910 - DNA, 571 bp, Homo sapiens
aaatcatatgccctgcaaccatcaatcacttcagtaaaaaataccaggcaattaatacactattcacttttaaccttatacataaaggtttttgcctgatatatttacattttaatgttatataatcaataaaacatgtgatgactattatttataagtttatatgttttcacttccatcttctttagtaagtgtcagaataaaagaatatagtcaggcaaagagaaaataagaaaattatactagacacctatagattaagttcataactgaacgtatttcaatgagtgttatataatgagaatgacaggtaatagaggagaacgaagaaaggtcatcatggtaactagaaagcaaagaacattttattggtgttgaaatttgaattaattcatrttcatattctatattagtcacctgatcaattccaaagctatgaaacagaataaattgcataatgcagaattattttctttgcaggtgatggtattacttaaaaaagttctggttctgctagctaatgttgatgttgcactattgtttgtagacagaagaaattatcaaccttcca

SEQ ID NO: 80911 - DNA, 709 bp, Homo sapiens
tttctgctgctggctcctactgcagagaatagaaacttctttctaaatactgtatccaaaatgtttcctcttctctcaacttctcagctctatccaggacacttcactgctttcctccaaggcaaacttgaaccttcctctaaattccttccctgaaggctgttttgaggcagagggataggaccatggacagaggcttagcctaccaatcactcacacagcaggaaagtcaattctcttcctaccaggaatccctgggagagsgtgtttacatgaatagactcttctttaactataggtcacttttcccttctctaacttcctttggagtgatgctgtgtcttctagaaacactgactccttccagcaactctctgctccttagacatataagaaatactcattcttgcaaatgcagttcttaaaatatttcaaaacatcttcattataaaatatttcaggcaaacagaaaactatgaaaaatagtttaacaaacatctatgtgtaaaacagctaccttagctgggcgcagtggctcacgcctgtaatcccagcactttgggaggccgaggagggtggatcacctgaggttgggagttcgagaccagcctgaccaacatggagaaaccccatctctactaaaaatacaaaattagccgggcatgatggtgcatgcctgtaatcccagctactcctgaggctgaggcag

SEQ ID NO: 80912 - DNA, 732 bp, Homo sapiens
aaaaggactttggtggccagatttggcatgtccccctgtgttggcacaggggtccttgattcttggccccttctttcctctttctagtcttttctttccctcttcatccgcccctcctctgcacayatgcccgaatgtacaaggtgaatgcttctgggctctgctctctgtggaaaggcagggaaaagagcgacacccctacacggcggcaccctttcctccagcctttgcagctccgttctcatttctactcatttgattttacatcccaatgctttctgttttgtaagaggtggactagaagggacgaatgagaaaaggctttacgccttgttggtgcctcctgggcatataaaaaagcccagtgacatgatactaataagaaactctaaattcacggtcaaaaatatcagaaccaaatcactgttattaatttgttaatcttacttaaaggcctttgtaaaatggtgatacagtcaagtgctgcataatgacatttcggtcagtgacagactgcatgtacaatggtgatcccataagattattatacggtcttttttttttttttttttgagacagagtctcgctctgttgcccaggctgagagcagtggcgtgatctcggctcactgcaacctctgtctcctaggttcaagcaattctcctacctcagcctcccgagtagctgggattacaggtgcccacaaccacgcccagctaatttttgcatttt

SEQ ID NO: 80913 - DNA, 593 bp, Homo sapiens
tgattatttgttttattaatagttctggatccctgactagtctgtaagctccatgaaggacaggacagtgcctatttggttctccattgtatatccagtgcttagaacactgcccaacatgtgataggcaagcaacaaatatttgttgaatgaatacaaaaaaagagtaagacataattcctgctcttgagttgcacacaattttcttagagaaatgagatgtccaggtgtattgttaatgacaaagattacaaaattcagtgtcaaagtgttaagtagtaaggataatgctttgggagtttataggcagaatgactggggaaaaytacatgaagagtgtgaatatgagtaagttttaggtgaagaacatgaggatgagagcatgcaaaggcactgaagcaaacttgagttgtttaggggatagtgaggagaccactgcaacttcagaaatcttttaggaaaacgagtctgtcactacgcttaatttgattaatggacctattgggaggtagactatgtagcagtaggaagaagtacaatactccagcaaatgggaagaactctgtagcaatcatactgatagataccccaaa

SEQ ID NO: 80914 - DNA, 461 bp, Homo sapiens
ccggcatttgctgtaaagccaccactctctctctttgtgtctttctttaaccctagccttcccttcaaaacccaacaaaaactatttataagacaatttttcttcatcctccagtaagaacctaattttttgtttgtttgttttggtttggttttggagttttttgtttgtttgagacaaggttttactttgttgtccaggctgaagtgaagtggtgcaatcatgactcactgcagcctcgatctccccgggctcaggtgattctcccccytcaacctcctaagtagctgggattgcaggcgtgtgctaccatgcttgggtaatttttgtattttttgtagagatagggttttgccatgttgcccagactgatcttgaactcctgggctcaagcaatcctcctgtgttggcctcccaaagtgctgtgattacaggcgtgagccaccatgcctggcctaaga

SEQ ID NO: 80915 - DNA, 1151 bp, Homo sapiens
agctatggggtgttccaatgcctccagcttcatattgtgtcccttttctctttactctttgccttctgatattcaggaattgcttcaaaaatgagcctatatctctctggcatttcaggcactttcacacatgctgttccatctgtctggaaggcattctattctctatgtggctacttccaactgactgttgctcagaatctagcttaaatatcagttcattcatgtatacattcactcattcatttattcctccatttacgtatgccatctgtatttattgaacccgtgataaattcacgcactgtgctaaaccttgagtatgtgaacaaaagaaatgcagctctcacttccttggagcttaaaacaacagaaaatacaaacaatgaataattacataaattcacatgtaacacatgtatgataatgggtttgaagggacacaatggaatgctatgagagaaaaaaataaagatctaatttagatgagcctgagatgaggtgggagaggaggctaaggaggtctctaaaaagtagctgttagagtgagatctgaaaattagactagagaaatgatagtgggaagagtgttctaggtataggaaacagcacaaagactccatcgtccttctaaattcactctcatattttatgttcttatagcattttattctcctttgtaatattagtcacaktaaccattaaatagttatttggaaaacacttgcctctcccactagactgttactctcataaggccagtagtaatagtatatgcctttctctgccctttcctaagcaccaagcacagtgagagtctaacccatggtggatgcttacaaaggtctgctgatgaaatacagacagtattaatggactgggaggtcagcaagggaagcactgcattacaacttttaatcaatactaaagctctgcttaaatatgtgcaatgaaattaggtgcactttgcccatttaaaaaatttaaacttaagtatgcatgttagaggacatggtgggcataatactgaaaggaaaagatcaaaaggtagaaatatttattcattcgaaattgacatatcacttagttaacaaaacctgccatttgtgttgctatcactacgtagcacaatatcctttgggcacgtagta

SEQ ID NO: 80916 - DNA, 692 bp, Homo sapiens
gtctcatctgtgaaatggcctcacagggttactaggtggatttcatgaattacccctggcaagtgtgtagggcagagactggcacagagtatgtgctccggaaaagtaagcttttatggcccaaccatgccatggagcctttcttccaggagcaggctgtgagctcaagtgcacatcaccctatctctctaggtttctgtttctccttttgtcaaatgagggaggaggtcctgagcggtgctgcaggtccctaactgagtctctgcccctcttcccttgctccaaagactcaccactgggggagtggaggtcaccacatccttcacctgtgcacctagggattgggggatgaatatgtccttcctaggcccacatctgggctaggtgctggtggcttaggtccccgagggtgaggggaacccgatcttgtagggaggtgaaggccaaggcattaggtgctagtctctagagggggccagggctgggtgggaggacctgagtgactgggtctatggagggaaggaggtggatgtcagggttcaggaagaggctgactcaggctrcagagcctctgcctcatccttgagggcaacaggagctggtgtggggtggctggatgcctggccacccctagacctgtttactgagcacctcctgtgggctgggcactgttggaagcactttacgtagtt

SEQ ID NO: 80917 - DNA, 530 bp, Homo sapiens
agagccttaatttttttgttgttgctgttttttcgagatggagtctctctctgtcacccaggctggagtgcagtggtgcaatcttggctcactgcaacctccaccgcccgggttcacgccattctcctgcctcagcctcccgagtagctgggactacaggcgcctaccactacgcccagctaattttttgtatttttagtggagacggggtttcaccgtgttagccaggatgttctcgatctcctgacttcatgatccacctccctcagcctcccaaagtgctgggattacaggcgtgagccactgtgcccgaccccagggccttatttttaactacaacatagtacggcttcttacatgccacagaaagctggacttsaaacaagtcatgcttggaaatgttacagatttctatctaaagattatctgaaagtccccactcttgttggtgcaaattacaaatccctatgttcaaagctcaatcatatttccacccctaaaagcctcacaaagcagacaacattgtcatt

SEQ ID NO: 80918 - DNA, 556 bp, Homo sapiens
actggtactgggacaatgacaggagggatgaggcctggaggggagagggctgctcagaatctacaactatcagcatggtagaccacaaaataatacacagagacaacacacagtaccattaggcaacaggcgctgttctatgcactctcacccatttaatgctggcggcaatgttgtaaggttataccacacccaattcacaaacagggacgtagaagtagagagtattaagtcacttggtcaagctcagccgctatttatatgaactcaacacatgctcttaactccaatgctttattataacagcagctccagaaggaaaccgggaaccagtgctttaggaaaggaaaatgggaaccagaggtggaaacttacttttattgtatacagccagagaggtttgaattgtgtatgtacatgtaatacctgttcaaatataattttaaaaaacttttttttagaccagccacggtggctcacgcctgtcatcctatcactttrggaggccgaggcgggcggatcacttgaggtcaggagttcgagaccagcctggcca

SEQ ID NO: 80919 - DNA, 196 bp, Homo sapiens
atgggaaatgctatgtcatataatgtatgaaaaaagtgacataagtatgatatgatagaaaagactgctagctaagggaaaatgatgatcttggagtaaactgtccactctrtatgaggaaattaaagtattattctttttcttcaatacatgaagaaaataaatctgcataattttgccacacttctgtgtatgc

SEQ ID NO: 80920 - DNA, 628 bp, Homo sapiens
gtactcccccactagaaatgtcttgggattatgttataaattgtttccatttcaaccatcttaccaccaaatacaaactcagaataaaatgaacacacaggagaggtaatgagacaaatgaaaaagaagaagaagtaacgtttccttttcgatattttgaggcccaatgcacctatgagtcaaatcttccctcccctaaaaatatgttaacctaaatcaataaatgatccttctacttagtagttttagataggcctttgtcatttgtattcaaaagagtcataactctaacaaccattgctgtcactgacaattttgtcaagcccatggcgtatcagagaaggattcctctaagtcagtgagaagggaaagggaaaacaggttgagcgttaaaaacacataatgacactgtcatggttgtcacaacttttgaactactgaatttttcctcatagcacctctaaactactaattccaagggaaaatgaagagaaagattgactattcctccaaatggtgttgatttgaattcttccagtcttagacagtgaatataaattcatttttaataacttcartactgtgtcactttgtgtatgaaaatgagatagattatacacccaaaagg

SEQ ID NO: 80921 - DNA, 545 bp, Homo sapiens
ctaattctactcttactgattttaatgcaatcggaagttttataaaatgtcatatgcttgtcgtgcgcagtggctcatgcctataatccttgcactttgggaggctgaggtgggcagattgcttaggcccaggagtttgagaccagcctggacaataaggcaaaactctgcctctacaaaaaatacgraaactagccaggcgtggtggcacgtgcctatagtcccagctacttagaaggctgaggtggaaggatcatctgagcctaggcaggtcgagcctgcagccactgtactccagcctgggcaacagaatgagactctgtctaaaaacagaaaaacacacatacaacaacaaccagaaatcatatgccctttatgcctaagttaaaaagagtgaaagtatatgcatcaaaaattaacagcagttatgagtagaatagttgagagcttccaaaatgtatattgcttttgcttgctgatgtgcttgtttacattatgttttgcttttataacctattaaataaggtgaggtagaaggggaaata

SEQ ID NO: 80922 - DNA, 545 bp, Homo sapiens
ctaattctactcttactgattttaatgcaatcggaagttttataaaatgtcatatgcttgtcgtgcgcagtggctcatgcctataatccttgcactttgggaggctgaggtgggcagattgcttaggcccaggagtttgagaccagcctggacaataaggcaaaactctgcctctacaaaaaatacggaaactagccaggcgtggtggcacgtgcctatagtcccagctacttagaaggctgaggtggaaggatcatctgagcctaggcaggtcgagcctgcagccactgtactccagcctgggcaacagaatgagactctgtctaaaaacagaaaaacacacatacaacaacaacyagaaatcatatgccctttatgcctaagttaaaaagagtgaaagtatatgcatcaaaaattaacagcagttatgagtagaatagttgagagcttccaaaatgtatattgcttttgcttgctgatgtgcttgtttacattatgttttgcttttataacctattaaataaggtgaggtagaaggggaaata

SEQ ID NO: 80923 - DNA, 545 bp, Homo sapiens
ctaattctactcttactgattttaatgcaatcggaagttttataaaatgtcatatgcttgtcgtgcgcagtggctcatgcctataatccttgcactttgggaggctgaggtgggcagattgcttaggcccaggagtttgagaccagcctggacaataaggcaaaactctgcctctacaaaaaatacggaaactagccaggcgtggtggcacgtgcctatagtcccagctacttagaaggctgaggtggaaggatcatctgagcctaggcaggtcgagcctgcagccactgtactccagcctgggcaacagaatgagactctgtctaaaaacagaaaaacacacatacaacaacaaccagaaatcatatgccctttatgcctaagttaaaaagagtgaaagtatatgcatcaaaaattaacagcagttatgagtagaatagttgagagcttccaaaatrtatattgcttttgcttgctgatgtgcttgtttacattatgttttgcttttataacctattaaataaggtgaggtagaaggggaaata

SEQ ID NO: 80924 - DNA, 566 bp, Homo sapiens
aagtggtgagaaggtctaggagttgttgattgattaaagtcaatagttgattgattagagatttggcctctaatataatgagatctcctggactgcattcacagacgatgattccagaaaagagaaataatttatgtcacatattccccaaattacaacataaattattgtgttcagttctgacaaaaaaaatgtggacagactaagaacatccagaagagggagacccaagggctacaacatctggacgcctgctcttctgtgaaacagtatcgcacgttttaaaagcatggcttcagagccagatagacttgggttctagcatcggatgcgcctctaactatataagtcatcctgaacaaatcatctaacttctctaattctttcatctattaaatggatgttaaataagataatgcattgtatttattaaagtagaagtaactgccrtaacagataaaacttctcactgacccaatgcaattaaagtttatttcttgcccatatcacagtccaatatgggtgttcctgttagatggccttccatgaggtcattcagggacccg

SEQ ID NO: 80925 - DNA, 566 bp, Homo sapiens
aagtggtgagaaggtctaggagttgttgattgattaaagtcaatagttgattgattagagatttggcctctaatataatgagatctcctggactgcattcacagacgatgattccagaaaagagaaataatttatgtcacatattccccaaattacaacataaattattgtgttcagttctgacaaaaaaaatgtggacagactaagaacatccagaagagggagacccaagggctacaacatctggacgcctgctcttctgtgaaacagtatcgcacgttttaaaagcatggcttcagagccagatagacttgggttctagcatcggatgcgcctctaactatataagtcatcctgaacaaatcatctaacttctctaattctttcatctattaaatggatgttaaataagataatgcattgtatttattaaagtagaagtaactgccgtaacagataaaacttctcactgacccaatgcaattaaagtttatttcttgcccatatcacagtccaatrtgggtgttcctgttagatggccttccatgaggtcattcagggacccg

SEQ ID NO: 80926 - DNA, 884 bp, Homo sapiens
tttaacaggtcatatatcatcaatgctttctttgaaaaagtactgatgcttacaagttgctttacgagtaaagatgcttacaaatcttttctttcaagtagctcatcctctgatcattattctgttgtttgatatctactccctagcatttatccatgacacatattatttgattgtatttaatagtttattggcaaatactgttggtttccttataactttttttcccattgcattttcattgcaaaacctgtaccttgtttaaattcagtagttcacttttactgagcctaccaacaagcaacaaaacatggttggagaaaaacacattatgataactggtcataccttaatttatgaccaagaatgagtggtcatattatggcaatcctaccacagatctttattttcttcccagtctctaagaagctttacgtttaaacattctttccttgccacaaaattctaatgagtgtcttgccttcctcagtctcagctgatgactctgctttatagtgtagaaaaaaggtaaaccacttttttgtacaacaatatctactcttctttcttcatgggaactcacgtattttgctgaggtagttagcctccaaagatgaccctcaataattccacctattggctttatacatcgttgtgtaacccctgctcaaattgtaccagggatgttctgtgtgacccatagaatacagggtagtggtatgtcacttacaagatcaaatcatgaaagttattactttcctcccagtgtctttctctttctccagttttctagaagaagccagttcatggacagtcttgcgggatgacccayagtgtgaagaaaaataacttcctgctaagacacatgtgagggtgtttagatt

SEQ ID NO: 80927 - DNA, 1054 bp, Homo sapiens
  misc_feature (1)...(1054): n = A,T,C or G
tgttgtgttataggctatagcaagatccgtaattctagaaagaatctgcaattgagaatgcttcttggatgaatttgtgataatccattgttatccttcaggatctctctgggcttttgttgtagacaaattcatgaatttattgggaataaaaatgggggctactaccactgcacccttttagatctttaagagttgcattaatttctgctattttctccaggaagtgatattgtttttggcttactgacttgacaggtgagcagtttcaaagctgcagattggccttctgtactatgagagaacttaccccataatccaggtaacaatatggggattctgccaagcactaagtatgtctatttcaattacacatttgtaaattgattaaaagtctattgggtgagtcctaagacctggtggttccactctgtactgatcctggctcaggattacctttagtacttgcccaccaaaagtttccgttgtaactgaaatttgtgttctagatattaatgttgacttggactccaacagtccttaggatctttaaatactcttagtacatttcttcttagtaaatttaccctttgaagaagactggggaaatatttatcaaatacwcttttttacagttttgtaagattcttcctactttgggacttgaaagctagctcagatgcagaaattaggcaaggaatagtgacttcttttgtggtggctacactaagcctttgatctttcatcctgcatttattttggttgtacacagtgaaaattacatctgttgattttcatctacattttctctagagatgctatgttctattaactgtctccatgatgccgtaccaataaggtccccttgttgctattcaaaactttggtgctattatggtaattatgcccaacttgtttatgaattttaggtactgtcacctgatttctgtnnnnnnnnnnnnnnnnnnnnnnnnnnnnnnnnnnnnnnnnnnnnnnnnnnnnnnnnnnnnnnnnnnnnnnnnnnnnnnnnnnnnnnnnnnnnnnnnnnnnattg

SEQ ID NO: 80928 - DNA, 725 bp, Homo sapiens
cagaaaacatgagatatccattatgagattttaaaaggtaaaattcctaacaatttgaataactgatttgggtatagtgatgtacaaggaggtagtattaacacatgaagactccttttagccctgtaatggtaaaatatattcagtctgttcaatataccatcaagactggggttaagccgtgagttctcagtctttaatatctaaataatcactgtaagagttttatttgccttccaaatccagagggtcgtactacctagcatcttagcaagttaggatgctttgaaaagcatgatttccaaaaattaacaaatctttgatttataaataagtttatttataatgatatttacataataaaaacaaaacacatggaactcacaagttatacaaagaaactgatgtataataaaaacagcaatatagactgacaggcagaaatttaaagaaagatttaataaagagttaaatatcaaatagacaacttcacttctaaatttcactttgtcactcacactgaattggaattgaacaatggctctctcttcaggcggtcctgtactggaaattctggaaactggtaaaatatattttgataagagtttcaagttaatgacctatttccatgcagtacctaatgctgcctttagatgaagtcacattcagtctgctttgaartgaaatagctttaagtaatctgttctgccaggctagaaaaatgt

SEQ ID NO: 80929 - DNA, 1024 bp, Homo sapiens
tgaagtgttaagttttaactgccaaaaaacaataaactggccggttgtggtggctcacaccaataatcccagcatgttgggaggccaaggcaagagcaytgtttgagcctaggatttcaagacccgcctgggcaacatggcagaactccatctctaccaaaaatacaaaaaattagccggtgtggtggcacgtgcctgtggtcccagctactcaggaggctgaggtgggacgatggcttgagcccgggagtcagaggttgcagtgagccaagacgccactgcattccagcctgggtgatagagtgagaccccgtctcaaaaacaaacaaacaaacttaatctttcaccaattataatgaatttatataaaatacaccacatggtaaataatttctatagtatttctcatgcacagttctgagtaattaaatacgtaactattcacagtggttataaatgtataattttattcataagagttatgctttgaagatatgtgccagacacacatggagaggtaaatattcatctaataacatattcacaattcggtagaaatctaaagatgttactgtattgttgaaggttagtgcctaagcatattatgagtttagtgataaataacagtcaatattttctgagaaacagataaaaagtaaaatgtgtactgtgaagattcctaacatgtaagtcacacaaccattattaagaaaaccaatgttagattatactaagtggatatattcaaagtgaagctgaagcacactgaatctttataaagcaattacaggtttctttttttttttcacttaaaaaagaatatagtactattcaaatattttcaaaagctgtgttacacgagaggtaactctgaaaaaattagcatattgtgatctaatctgtcattatcatattttctgccactgaacagctttttgaagtgtaaaatttccttcatagctgaaacttcctaatataaaaaaaattacagcagacataaatcacaaattcacttaagctgtac

SEQ ID NO: 80930 - DNA, 730 bp, Homo sapiens
tccgtctgacctgtgaggttgagagctagaagcacagctggacccccagaactgacctgggagctcttccctgatgtcctttccatgcttgtgtgtgatttttagagcatcctcctcaagtggacaaaaggcttcaaggcatctggctgcgagggcgaggacgtggtgaccctgctgaaggaagcgatccaccggcgagaggtaggagacacatggcacgaggtctgatgtgtcagctcctcaatgattggcctggtctgtgtgttcagaaagtgaaggcaacagtaagtgtggctgcatgggttgggaggaagattaactcaagcgtcgttcagcagtttagtgtgcactgtgtgtcaagcaatgctctcagcactggcggttcaggagtgaccacaacaaagctttgttctataaagtccatgacctagtggcaggtgctgttaagagctgtgaaacacacacacacacacacacacacacacacacacacacacagtaaaggaataaaagaatggccactccataagcaaaacagccaygagggctgctggttgcacatttttatggttatttcttgattatatgctaaacaaggggtgtattattcatgccttccctttttagaccatatagagtttaaaaaaaaaaaagaaagaaaaggagtgaagtggggtgaggagagcagatggagcaagtgtgctggaaaggggcactgttaaatagcaca

SEQ ID NO: 80931 - DNA, 635 bp, Homo sapiens
ctggtgtctttgcatgctaattcacaaccttcagcaacactgaccacagtgcccgaggcccgtggggctcctggggaaataagccttggaaaggaacccacagggaaaggaactcatttcctttccaaggcttatttcraaatttcaagaagcaactcgagaaggaacacaccataaccccactggacttctcggagcaggggagaatgctgagtcttaatctttaacctcactaggcattcagtatacattctcttggacctaaccatcattactcaagtaactactgccagctgtagggcccccatcctggccactggaactaaacgttattatgcagtggcttgagggtcttttggtcctgaatcctgccttgaaaaaaaaacgaggtccctagtttcaaccaatagcccatcaccaccccatcttatcttgacccagcctgcttccttcattaatgttgcctgcctggcccctagaggcattttagtctgtaacttctattctagacacatgttttgcaaagcgtattctgcaggactagggtgtttgattaatctagttaggaaacactacagacaacatcttaatgagaagtgtgttagatcttaagctatgtctcttagctcagaccc

SEQ ID NO: 80932 - DNA, 635 bp, Homo sapiens
ctggtgtctttgcatgctaattcacaaccttcagcaacactgaccacagtgcccgaggcccgtggggctcctggggaaataagccttggaaaggaacccacagggaaaggaactcatttcctttccaaggcttatttcgaaatttcaagaagcaactcgagaaggaacacaccataaccccactggacttctcggagcaggggagaatgctgagtcttmatctttaacctcactaggcattcagtatacattctcttggacctaaccatcattactcaagtaactactgccagctgtagggcccccatcctggccactggaactaaacgttattatgcagtggcttgagggtcttttggtcctgaatcctgccttgaaaaaaaaacgaggtccctagtttcaaccaatagcccatcaccaccccatcttatcttgacccagcctgcttccttcattaatgttgcctgcctggcccctagaggcattttagtctgtaacttctattctagacacatgttttgcaaagcgtattctgcaggactagggtgtttgattaatctagttaggaaacactacagacaacatcttaatgagaagtgtgttagatcttaagctatgtctcttagctcagaccc

SEQ ID NO: 80933 - DNA, 635 bp, Homo sapiens
ctggtgtctttgcatgctaattcacaaccttcagcaacactgaccacagtgcccgaggcccgtggggctcctggggaaataagccttggaaaggaacccacagggaaaggaactcatttcctttccaaggcttatttcgaaatttcaagaagcaactcgagaaggaacacaccataaccccactggacttctcggagcaggggagaatgctgagtcttaatctttaacctcactaggcattcagtatacattctcttggacctaaccatcattactcaagtaactactgccagctgtagggcccccwtcctggccactggaactaaacgttattatgcagtggcttgagggtcttttggtcctgaatcctgccttgaaaaaaaaacgaggtccctagtttcaaccaatagcccatcaccaccccatcttatcttgacccagcctgcttccttcattaatgttgcctgcctggcccctagaggcattttagtctgtaacttctattctagacacatgttttgcaaagcgtattctgcaggactagggtgtttgattaatctagttaggaaacactacagacaacatcttaatgagaagtgtgttagatcttaagctatgtctcttagctcagaccc

SEQ ID NO: 80934 - DNA, 783 bp, Homo sapiens
agattggcttctgctgttgccctcccctgagcacctcaccatccctattgcattccttaattctgcccacatctctgaaaattgtccctttactaaagtctcttgaatagcctgagtgcctgtgttttctgccaggacgctggcagatacaaataacattgtgtgactttttaaaatattgtacaaactcaaattatagtctaaaaaatattaatagcctgttttcttaaaaaaatgtcaaaatcatgggaaacaaagtctgaagatctcatctactttaaagaagacaaaaagaaaaagacataaaaataaataaatggagtgatcctggattgcaattgaaccagaaaaaaaatgactgaaaattactgtaaaggacattattcagacaactgagagaatgtgaataaattccttagattaaataatagcattgtaacaatgataaatctcccgattttgagcatggtactgtggtgatctaagtgaaagtccttgttctgaggaaatagttactaaagtaggcataaaaggacatcatgtctgcaacttcctcttaaatggttcagaatgaaaatttcagtgataatatagtataggtaataaagagagtgagaaactaagctagatgatagaaattctttgcactaattttgcaactcgagtttggaattatttcaaagtataaagtttcaaaaaatatatattgattattttgaaattaaaagtaaacagtttggtrctagtccatgaatagacagatcagtgtaagagaatagagga

SEQ ID NO: 80935 - DNA, 783 bp, Homo sapiens
agattggcttctgctgttgccctcccctgagcacctcaccatccctattgcattccttaattctgcccacatctctgaaaattgtccctttactaaagtctcttgaatagcctgagtgcctgtgttttctgccaggacgctggcagatacaaataacattgtgtgactttttaaaatattgtacaaactcaaattatagtctaaaaaatattaatagcctgttttcttaaaaaaatgtcaaaatcatgggaaacaaagtctgaagatctcatctactttaaagaagacaaaaagaaaaagacataaaaataaataaatggagtgatcctggattgcaattgaaccagaaaaaaaatgactgaaaattactgtaaaggacattattcagacaactgagagaatgtgaataaattccttagattaaataatagcattgtaacaatgataaatctcccgattttgagcatggtactgtggtgatctaagtgaaagtccttgttctgaggaaatagttactaaagtaggcataaaaggacatcatgtctgcaacttcctcttaaatggttcagaatgaaaatttcagtgataatatagtataggtaataaagagagtgagaaactaagctagatgatagaaattctttgcactaattttgcaactcgagtttggaattatttcaaagtataaagtttcaaaaaatatatattgattattttgaaattaaaagtaaacagtttggtactagtycatgaatagacagatcagtgtaagagaatagagga

SEQ ID NO: 80936 - DNA, 1091 bp, Homo sapiens
catataatgagcaaggaggacgaccagaggtcactttcatcgccatcttggttttggtgggttttggccagcttctttaccatttgctgttttatcagcaaggtctttgtgacctgtatcttgtgctgacctcctatctcatcctgtcactaggaatgtctcacctcctgggartgcagtccagtaggtctcagccttattttacccagcctatattcaagatgaagttgctctggttcaaatgcctctgacacttatatttggacaaactttgtgcatgcaaactacaaacaaaaaaaaatctgtcagattgccacaaatcttcttaactgactgccttctagactctaaaggaaccagcttatagactactgcagacatttgtttttcttatttccatagaaatgcctctaattaaggatctttttgccaaatcatgtatggaggcctacctttgagatcccatctgcaatgccaaccatttattgaactggtctattcccaagagtgcgaggctggttgaatgggacccgttgccattcagctactaacttgatttttctgtccacagctactcacaaaatttttaatatataaaccttctaggaaagtttcagacagggaatgttgggtctcagaaaacaataccccaatataaggtgcatggacatgccaaataaagaagcagcttcaggagctctctatgctcccctcctgccccaagcctctgtctgtccaaagcataggatgaggcttttctctaatacccctttatctgcataaggacgatccaactgggagagcacaactgtcctctaacctctccctgatatttcattatctatttcagaaaagaagcctgaggaatgcaaccacacctggacagactttttcacaaaataatgtctgcctcttaggctcattcaatttcaaagggaattatttacaagttaatttctgtcttttgagtccagtcattctccctaataccgatttattatccctcaaaaaaattgccacattttccccatctcttcttcctttatgaagaagggtatagatgcacctggacctcattgggttattgggta

SEQ ID NO: 80937 - DNA, 1091 bp, Homo sapiens
catataatgagcaaggaggacgaccagaggtcactttcatcgccatcttggttttggtgggttttggccagcttctttaccatttgctgttttatcagcaaggtctttgtgacctgtatcttgtgctgacctcctatctcatcctgtcactaggaatgtctcacctcctgggaatgcagtccagtaggtctcagccttattttacccagcctatattcaagatgaagttgctctggttcaaatgcctctgacacttatatttggacaaactttgtgcatgcaaactacaaacaaaaaaaaatctgtcagattgccacaaatcttcttaactgactgccttctagactctaaaggaaccagcttatagactactgcagacatttgtttttcttatttccatagaaatgcctctaattaaggatctttttgccaaatcatgtatggaggcctacctttgagatcccatctgcaatgccaaccatttattgaactggtctattcccaagagtgcgaggctggttgaatgggacccgttgccattcagctactaacttgatttttctgtccacagctactcacaaaatttttaatatataaaccttctaggaaagtttcagacagggaatgttgggtctcagaaaacaataccccaatataaggtgcatggacatgccaaataaagaagcagcttcaggagctctctatgctcccctcctgccccaagcctctgtctgtccaaagcataggatgaggcttttctctaatacccctttatctgcataaggacgayccaactgggagagcacaactgtcctctaacctctccctgatatttcattatctatttcagaaaagaagcctgaggaatgcaaccacacctggacagactttttcacaaaataatgtctgcctcttaggctcattcaatttcaaagggaattatttacaagttaatttctgtcttttgagtccagtcattctccctaataccgatttattatccctcaaaaaaattgccacattttccccatctcttcttcctttatgaagaagggtatagatgcacctggacctcattgggttattgggta

SEQ ID NO: 80938 - DNA, 576 bp, Homo sapiens
atttgatcattaaattgaataaacaaacaagtagtttttataagtatgtacttaattttgagtgttaaatgtaaacatcaaaaatattcatctttcagtagaccaagtgaaattttatctgcggtagtattataagaggtattcatttaaactgaagaataaggcttacctgacgatagcttatgaaaacataaattttgtttatataatttttaaggcatcctgataaaaagtgaaaatgtgccatttagaattttttaaatcacctataaactcctggaattagggcracattctgataatggtctgatttgtacattttatctctatatatgacgtaagcaatacacagaaccatactctattaattgtcccctttagttacttctcttttgctttctttttgttttcatttacatgatctatttttgcttattctttttaagtatttctgatcatttagactcagcgtgtcgctgcattttttatttgtgttaatctgagccctttttccttttaataaggaaattgacctcatacataaattgtcataatgagtcatacttttgtattcac

SEQ ID NO: 80939 - DNA, 1727 bp, Homo sapiens
tatttagccttatgaaacttccctactttgtactcctaatctcagctagcccatcacaaaacattttgcacccccaaaatcaaacttactatagatcagtatgtcaaggtggcataggtaaatactcttttctcctatttcaccttataaattttttagtgcttacaaagttcaactcaaccacagtagaattattcatgttatcacattagtgacaggcaatattctcttcaaaatttgtattactctcctttgttttgagggctctaacaacacctacgtaccattcacttggtggagagcagggggagaatacctacactatgcaatttaaaacaccatatatgcctgataatttttccagacacagcctgtgaatacaggttgaggggcagggaaaaagtttatctagaggcaccaaaacatgcactgcaaccaaatgcatcactcatgatgaatagaaaatcatcattcttgctctatacatatttaatactctgcttatgtgcaagtcaatgatactgttttatccttcctatgatgaaagtaagctagaggcataaaagtaagcaatggcttcaattgcagactatgaatctgtaataaacaggatagttttcctaagttataattaaaggcaggaaacaccttctatagcatcatcttcaaatacatgaatcacatttatcttcccttgaatcatatttccatctaacagttattaataagtttccttgatcgacgatttacttgttttaaagggtacataacaggtcagctggagaagatccaatctacacatactgttttaagttgtgtacaaagtatgtcttctgttctaaacaacttagtgctttttaactgatactaaaagatactaaaaagaagaggttattaatataataaaacataatatggtctcccatttgcttagtcgctactagttatattttgaaaaactaaaaatcaatttatgaaagttaattcttattaatattttgcagagtccaacatggtttctcatttttgacttctatgccattgatattatgtcaggaactgatatgatttggctgtgtcctcacccaaatctcaccttgaattatagctccaataatccccatgttttgtgggaggaacccggtgggaggtaattgaatcatgggggtgggcttttcctgtgctgttctcatgatagtgaacaagccgcataggatctgatggttttataaaggggagttcccctgcaaaagctctcttgcctgctgccatgtaagacatgcctttgctcctccttcaccttccaccaagattgtgaggcctctccagccatgtggaactgtgaatcaattaaacctctttcctttataaattacccagtctggggtatgtctttattagcagcatgagaacgaactaatacagggactctttttaagttttaatttctatttatttattctacataaatggaatctcactatgagcaatgttataatacctaaagtttaacagtattttaactttgcccaagttatctggacaaagcacacaagaacaaggattaaacccattgatacaggggcctagaggatcagaagttaccccaggtgagcagctgagccacattwacaacacaggtctcctgcttagaaaccaaaattttagctgttggttttgtatgagttaagctgatgttaaattaccttatgatccctaacctacag

SEQ ID NO: 80940 - DNA, 569 bp, Homo sapiens
tggagtgcggtggcacaactggctcactgcaacctctgcctcctgggttcaagccattctcctgcctcagcctccccagtagctgggattacaggcatgcaccaccacgcccagctaatttttgtgttttagtagagacggggtttcaccatgttggccaggctggtcttgaactcctgacctcatgatctgcctgccttggcctcccaaagtgctgggattacaggcgtgagccactgcaccyggggagaagtggtttttaagctcagactgcatgaagcataaatatcaggaagacgaagaaactgggaaagcattcagagcaccaaagaacaacatgggcaaaggctctaagcatcaaatactgcatcaatactgggaactgaaagttgttcataattgccacagtgtgaaataccatggtgatagtgatgagagatgagtctggacatacgcatggctttatgacgctaaggggtttagactacgtcccaaaagatgtagagctgaagctgggagtggactggtggtgctcctgtggtcccagttactaggaggctaaggctgga

SEQ ID NO: 80941 - DNA, 1398 bp, Homo sapiens
tctcttatgttgagacacttaatgaccaggcttatgagtaatctaactgccaaatcactatttttgttcatttattcaacaaattattgtttaaggtgccagctgtgtgccaggtactattctagtcattagggagatagcagttagcaaaccaaagttctttcctacttaaggagtttgcataacaataaggcaagtatgttaggtgatagtaagtattatggagaaattaaagaagaataaagagaaaaggaaatatggggagttgggggtgttgagttgctatattatactgagtagtctaggttttccctttgcctatcatagtctcacctgttaaggtggaatttgagcagagactgaaaggaagaaagaaccaaagaaagctaaagtctttatcgtggtctgcaagactctaaatttagattcctagttatccttctaagttccttccttactttcccttcacaatattccagctacactggcctccttatttgtccttgaatactcactctaatcatgctccagcatgggacctttgctttagttgttccctctgcttgtaactctgagacagtgacctggccaagtctcacccctggtctttgcacttcctaaagaggcctcatttaatactgcaacctgtcctcagccccagtctagtatgtctagtcccctttactcttctctactttttctttttttcagagcacttattactgtcctatgactgctgtgctgctgtgtattttgcttatatttattgtttgtttgtttttgagacggagtctcactgtgtcgcctaggctggattgcagtggcgcgatctcagctcactgcaacctctgcctcctgagttcaagcgattctcctgcctcagcctcccgagtatagctgggatgacaggcacccaacaccacacctggctaatttttgtatttttagtagagacggatttcaccatgttggccaggctggtcttgaactcctgacctaaggtgatttctcccgcctcagcctcccaaagtgctgggattacaggcgtgagccactgtgcccggcccatgtactgtatattagctatttacctgctactagaacatatatttcacaagagtgggaatctttatttgatcttgtcactgttgtatctcaagcacttagatcaatacctggcaaataaaaggttaccaacaaatatttgtcagactagtaaatgaatctctgcatgatggttgtgtttaacgtatctattggctttaactatgataatcagttgaggttaatmattcttaaattatgatctagtctgaattatctataccttaaaaagtaaaactactattttattagctaaggcattaatttgccttatattatttttcattaggatcc

SEQ ID NO: 80942 - DNA, 1411 bp, Homo sapiens
cctcactgcactccagcctgggccagcctgggtgacagaacaagactccatctcaaaaacaaaaacaaacaaacaaacaaaatgtgtatatatagtgttatcatatacatataatataaattaaaatattggtaattaacaaacctctgaatttcagatatagaggaaattacttcaggatgtctgcctcactctggacaggtgacaaaagaattcagttccgtgttcatcatgtcagtaaacagagctttgcttcccataagtgttcctttagctacactgtatataacaacttttcaaaaattcagtgtcacacggagacaccgtgatttgactatcctctagttaaaagatttctctatagtatgacactaccacttagttggaaccttgacttgcaatgatagagttctaagttatctgagaaacaattttttttaatttatggttatcactaaaatatatatgaggttgacaatatagaatttgttattactatgtttatttatatatatatacatatatatatacacaaatatatatatacgaatatatatatatatatatatwttttttttttttttgagaagggtctcattctgttgcccaggctgaaatgcagtggcgtgatcacagctcactgcagcctcgacctcccgggctcatttgagccccatgcctcagcttctcgagtagctgggaccacaggtacacgccaccatgcccaactagtatttgtattttttgtagagagcgaatttcaccatgttgcccaggcttaagtgatccatccacctcagtgcccccaaagtgctggggttacaggtgtgagtcaccacactggcctatgttaatttctaatagatttcacatattgttattattgccatcttctctcctcagatcaactcatatttattaaatagaagacagcagaatgaacagaattccaggtcatggcaatccctccacctggctgggcctcaaatttcccatctgtgaaagagggatgtggactgctacaactgagggacttctcatcactgacattctataagtctataactgttgctacaaacttgttatctattttagcagaaaagacagatataagagtaaatatgaagctgtatgtctagaacctaaaagagatcaggatgggctcgcacgaaacttggctatgaacctacaaaaatccccttagaagatcagtgggaactctcaacaggtttctatgttggtttaatggatttaacatcgggaatttctcagggatgtcagtggaagtgagggatgatgttccacagacagctggttctcgttattaactgtggttatgttctataaagccactgtgaacaatgaattagtgaatactgaaccatcaccttgagggaaacacagggttagg

SEQ ID NO: 80943 - DNA, 281 bp, Homo sapiens
tcaataattgcatgtgtccccgagaatttccaggccagtgaggaagctctagaggcatctcaagttcactttgattcaaaaaataaaaacaaaatcccgggaaatacaaacaaaattccactgaagtggaccactaagtttccccaagatgaayccactcagcaaaacatgccagattttgaacacattggaagaacctacacttttgggactagacagattttaagaaggattcaatgagaggactcaggtgtgttatcctccacagcttctcttgcttt

SEQ ID NO: 80944 - DNA, 907 bp, Homo sapiens
catgtatgaagcactactgggagactaattcaagttctgctcctcagtttttctgtagagaacacatctaactcctggaggggagcacgggtgatgagatgtccaggtagagtgtgggggtatggattctaggaagtaggccaggaagcaacacttggctttcaaccagttgatttttagccacccaaaaagtactgagatgactgaatgcccacattttgtgtgcagccttgcagaacatgctgtacacatcccagacgtcacggatgacttgcttgtggggtgggtggttgagttttatctgaattctgcacatctgcaggaggcccagcctccgtaaaggcagtcttggtggtaaacagccatgactagtcttagggttcatcgtgagtatagtgtagagaccccctcaactgtggactccacatcatggcctcagggttgtgaggtcctcaactagggatggcggagggtggcagcaaaccctcatgggaatgccacccagtgttcctcagcatttaatgggactcacatagtctagaaaacccagggttcatktggactgtggaaagtatctaggttctcataatctttttctacagagtttcccccagcctgatctctgctttggggcacgaggtggtgtgcacgggagagagaacagatcagcaacatggtgctgatgcagtgatttctgcagcaagaaaagggcctctttcctgtccttctggcattgggagcgaaagggactttctgtccactgatagcgcgtgtgcaccaaggagcgctcacctgctcattcatgactgtggagagttcgctgagcatgtccttgtagtgggacctcagttcttcctggtactccagctggtcctctttgatgaggcgctcattcacgtcaagggcc

SEQ ID NO: 80945 - DNA, 695 bp, Homo sapiens
tgaatcaaatgagcttctgaatttcacacaatggaatgttccagattttcagcttgcattaatcgatttagaattattttgcttggagatggggggatggactcgtgggctggtggtttgcaggcatttcttccagattttaagattatattgggatttagcactacagggctcaatagaaactcaacagaaagcaactggcaccagttaggaactacttcctgctgattgcaagtttttctccctactttcttcacaatttacccaggacaatataaatgttacaaattatcagcattgattggattactgtgagtaggaggaaacaggatattaataaatgttttgtagcagcctttcagacctgaatgtgcccagcctcttgctgctgttttttagggttgtagtctctttctttgcattggcgatatcctgtccctgtcaaacgctttrcaacgtaaacacttcaacaagtgggtgtctttgggaggagcccttagtctttcatagcaataaacttcagcacttcctcattttggctgcctcctcattctgattctaaagaaaacaaacaagcctggcctccgcctcagctactgtgcacctgcaagaggtgaacggtgatggtaccagtctaggccctgatggtctaaccaggggtccagattggcaactaacaatgtttggttgagccc

SEQ ID NO: 80946 - DNA, 861 bp, Homo sapiens
tactcgggaggctggagtgggagaatcgcttgagcccacgagacagaggttggagtgagctgtgattgctcccctgcattccagtctgggtgacactgagaccctatcttaaagaawaaaaaaagaacaaatttgtgttttgatacattggaaaggctggaaactgagaatatggtttcattataagtctctgtaatagctgagggaaccattaaagtgccaactagaatttttactattattcctgaattggctgagacctaagaacagaaagtgttcctctatctaaagaaagcatcaatcagcctacagttggagaaagccacctcacatgtgtgccaactgaatgttagccatactcccaagaatattctaccaccttcctttctagtcataataaaaagggttagagagatacgcgtcgttggctttatgggttgaatagtattttagtgggagtttattccctctctttaaagggtataggtgctttttacagaataaaacctcataaggaaaatcctacgaaaatcaagattagaggtatctgagcaaaggcactggcatctcattctcttgttggaatcataataagttgccagcatgtagtaccaccctgatgttactcagatatcatagtaggtagtgtgggagtccttgggatgtaattttggagtcctgggaatatggggtaattttctgtttggttacatcctactactattggaaagaaaagggaattgtttgatgtgtgggctataaaatttgttgaaaatatctgtaacagccaaaatgagcaggacataaagtttaagaaaaacatctatcgcatattgactatttgcactgtttgaaggaccc

SEQ ID NO: 80947 - DNA, 861 bp, Homo sapiens
tactcgggaggctggagtgggagaatcgcttgagcccacgagacagaggttggagtgagctgtgattgctcccctgcattccagtctgggtgacactgagaccctatcttaaagaaaaaaaaaagaacaaatttgtgttttgatacattggaaaggctggaaactgagaatatggtttcattataagtctctgtaatagctgagggaaccattaaagtgccaactagaatttttactattattcctgaattggctgagacctaagaacagaaagtgttcctctatctaaagaaagcatcaatcagcctacagttggagaaagccacctcacatgtgtgccaactgaatgttagccrtactcccaagaatattctaccaccttcctttctagtcataataaaaagggttagagagatacgcgtcgttggctttatgggttgaatagtattttagtgggagtttattccctctctttaaagggtataggtgctttttacagaataaaacctcataaggaaaatcctacgaaaatcaagattagaggtatctgagcaaaggcactggcatctcattctcttgttggaatcataataagttgccagcatgtagtaccaccctgatgttactcagatatcatagtaggtagtgtgggagtccttgggatgtaattttggagtcctgggaatatggggtaattttctgtttggttacatcctactactattggaaagaaaagggaattgtttgatgtgtgggctataaaatttgttgaaaatatctgtaacagccaaaatgagcaggacataaagtttaagaaaaacatctatcgcatattgactatttgcactgtttgaaggaccc

SEQ ID NO: 80948 - DNA, 861 bp, Homo sapiens
tactcgggaggctggagtgggagaatcgcttgagcccacgagacagaggttggagtgagctgtgattgctcccctgcattccagtctgggtgacactgagaccctatcttaaagaaaaaaaaaagaacaaatttgtgttttgatacattggaaaggctggaaactgagaatatggtttcattataagtctctgtaatagctgagggaaccattaaagtgccaactagaatttttactattattcctgaattggctgagacctaagaacagaaagtgttcctctatctaaagaaagcatcaatcagcctacagttggagaaagccacctcacatgtgtgccaactgaatgttagccatactcccaagaatattctacyaccttcctttctagtcataataaaaagggttagagagatacgcgtcgttggctttatgggttgaatagtattttagtgggagtttattccctctctttaaagggtataggtgctttttacagaataaaacctcataaggaaaatcctacgaaaatcaagattagaggtatctgagcaaaggcactggcatctcattctcttgttggaatcataataagttgccagcatgtagtaccaccctgatgttactcagatatcatagtaggtagtgtgggagtccttgggatgtaattttggagtcctgggaatatggggtaattttctgtttggttacatcctactactattggaaagaaaagggaattgtttgatgtgtgggctataaaatttgttgaaaatatctgtaacagccaaaatgagcaggacataaagtttaagaaaaacatctatcgcatattgactatttgcactgtttgaaggaccc

SEQ ID NO: 80949 - DNA, 1041 bp, Homo sapiens
ggatattaggaagataacttctagttaggtaacagctgaatcttcatggcctaaaagccaaaggagacttcrtatatctccagcattatttgtagattttatttatttttgaatgttatattgtaatcttacttcccctgatggaagtaagtaatggatggcaataacttttcatttcttctccacaaattgtttgcattatgtacttctcaaccttaatcctaatgccaaacttttttggcaaataaaataatttgcttcaaaatatttaaatcctttccccacaaattgcttgcattttgtgtatctcaactttaatgctaatgctcactttttctgcaaataaaattaaaaatttactctgaaatattttaacattttgctctaacttgtcttcaccatgaccgatatcatttcttagtcatcagtagccaaaaatctatctacagaacgtttgaaagtgttttcagaagcataccataaacataatttcttctcaatttttgtaaataaccatttcctttgaataaaaatatctacttattgttgatcagttgaaaaattctgaaaagttaaagaagtaaattaaagttacctgtaaatacattgctaatagaattttaatatgtatttatttttatatgtgtagcatatatattactcacacaaaattgtctgtattcatcaaacatagatagtggggttataccatacttttgaaaaagtattgagtcttttcaatgatcagttcatggatatttttacatgccatttaaaatcattgtaagatatgtattataactgcataatattccatcatgtagatttttaccatgccactaaagtgtaaattagtaatactgtcagtattgtaacattttaaaagtctggtagatggtcagctcaaaggcatcctccaggccctatccattaaggctctatccatcatcatgactcctgatttcaattgatttgaagtgtttgctagtcacagtgatctgtgggagacaaaggcaacaaaacaatcttatctctagggca

SEQ ID NO: 80950 - DNA, 1041 bp, Homo sapiens
ggatattaggaagataacttctagttaggtaacagctgaatcttcatggcctaaaagccaaaggagacttcatatatctccagcattatttgtrgattttatttatttttgaatgttatattgtaatcttacttcccctgatggaagtaagtaatggatggcaataacttttcatttcttctccacaaattgtttgcattatgtacttctcaaccttaatcctaatgccaaacttttttggcaaataaaataatttgcttcaaaatatttaaatcctttccccacaaattgcttgcattttgtgtatctcaactttaatgctaatgctcactttttctgcaaataaaattaaaaatttactctgaaatattttaacattttgctctaacttgtcttcaccatgaccgatatcatttcttagtcatcagtagccaaaaatctatctacagaacgtttgaaagtgttttcagaagcataccataaacataatttcttctcaatttttgtaaataaccatttcctttgaataaaaatatctacttattgttgatcagttgaaaaattctgaaaagttaaagaagtaaattaaagttacctgtaaatacattgctaatagaattttaatatgtatttatttttatatgtgtagcatatatattactcacacaaaattgtctgtattcatcaaacatagatagtggggttataccatacttttgaaaaagtattgagtcttttcaatgatcagttcatggatatttttacatgccatttaaaatcattgtaagatatgtattataactgcataatattccatcatgtagatttttaccatgccactaaagtgtaaattagtaatactgtcagtattgtaacattttaaaagtctggtagatggtcagctcaaaggcatcctccaggccctatccattaaggctctatccatcatcatgactcctgatttcaattgatttgaagtgtttgctagtcacagtgatctgtgggagacaaaggcaacaaaacaatcttatctctagggca

SEQ ID NO: 80951 - DNA, 1310 bp, Homo sapiens
tagttttagtgatgctgatttctctcttaagactttaagggaggggataatatccttcccttttaaagtgtattgattgatgcctagactattaaartgagctgattgctcatctgagaaaggtgagcctcagtcatttctgaaaggtcaagattctctgtagctgcatgtgtggcttgggacagtttactgtttctcagttctggataaggaatgtttggtgttaagaatcacagctttgtgatcatgaacataactctgtcaattctgttctgatagtcacaagtgctgggcatgggagaacccaataaatagcatatgcctcaataccccaccccccagaaatagctgatatttactacctgtgaaaacttaccacctaacaataactttatgatcattgtcattttcacagtagcctggatggatgttactctgtgtccagtccacacactctggatttcctatattctgaaacatggctgacatattcttccttccatctcattgctatggtgaattgtctgtgttcctaagagagaccagaccctccacctgtgaactagattcccttggctgtcgcccactacagacctcatgtttgcatatgcttctctctctctggcctcactagcatcactcctcttctggattattcccattagcatgaaatcactcttggtgaagccaattctctttggaccaacaattcaattctttttccattttacaggaaaactccttaaaagtgatgtccatacctaatatctataatggttcatctctttttctcttttgaaccctataaaatcctattttcatacctataactcccccaatctggttttattgaagtcctgtcgtaaaccacaaggtccgttctgagatcaaattatttgacctccaagaatatttaaagagtagatttctccctcccccttggaccatttctttccttgccttctgagtaaccacacttgcctatcttttacctcacttcttattgtttctcagttttcattactgccacgtcttatttccctgatatttagggctgtaatcccctggtgcttcagcaccaggcttctcttcttcagctacgtgtgtgtacatatatgtaggtatggctgtatgctaccactctctacctcaatactaaatagcagattcttttaatctactgccactggacatttttacttggatgttgtattggttgcttatctgaaacttaacatttcccaaactcaacatctcatttttaccaacatcttagcagtaactattttagtgtggtaaaatacttattt

SEQ ID NO: 80952 - DNA, 730 bp, Homo sapiens
tttttcattgtattatatctccttatccctcagtgtatattaaaaggaaaaaaaatgtaattatcttctcccttggtggcatacatagctttattttttagccrcaccatttactgaatttgaggagtgctctttattttttcctcccaaaaatactataatattgtaagggttttaataattcccattttataatttgggaaatacatatgtgcctaaatggtgcattggtgtgtgtttgtgtgtgtgtgtgtgtgtgtgtgtgtgtgtgcatgtgtgttgatttcttaatgaaaccattatttttgcaaaaagtttactttgaattaatattgtgaaatggaaactagacagtttgcattactaccaaaatctcaagaatcaggagctgagggttagatgacacgattttggatttgttatgaaaaaacagtatgtttgacagaccttgttaatatccttggtgattaaccattcattgactctgtagtcctgagcaaggaaatgtaagctctctgcatctcaattcctccttctatattttgaggaaatgtaagttacaaattcaaagaaccaatgcaagatacacacacacgtatctctacactgtgtgtgtgtgtgtgtgtgtgtgtgtgtgtgtatatatatatatatgactgggtggggaaatatgactgagaaatatgtaactccactccccccacaaacacgcacattatatatgcgtgtg

SEQ ID NO: 80953 - DNA, 552 bp, Homo sapiens
catataaagttccttctatttcccatactagtccaattctcctgctttctccccagaaaaaaaaaaaaacgttactatgtgttttgatgtacactgcatctactatatatgtagtataaaaatatgtagtattatatacacatagtatatatatgaagtatatgtggtattaaaatacagattgggaatacacaaaacttgtatatctcatgcaactcatgtatctcatatcttttaaaatatattcttaaaattgcttctaacaatgagatatttcaaaggaaacttttcagagacagttgatatgactaaaaaccagtgaccatttctacttggaaaataattagaatccaaaygaaatttagagcaaggaatttattatagtgaattctgaaatctattttataaattctgagaagatagtatgaatgggaaaggatttctaaggtggtgaggtgattaaaaatgctaccaagaagcccacatttcataaacttaaaactagagatgaagcaagtccaaaatagatgtcaaaggtgaacccagatactg

SEQ ID NO: 80954 - DNA, 638 bp, Homo sapiens
ttgacttaatcacatctgcrtacacactccccgaagaaagcacactttttagaggcagttgggcagaattttgactattagtcaattgttaccttgttgaccttgaccaagctccttaacttctttgaactttactttcttcatccgcaaatggaattaatacatacctacctcagagagtttgaaagggttaagagaaatgatttgattgaaatactacctggatttctttttcctttccttagattcaaagctttatttggactcatctttttatctccagagcctgtccctggcacatagcggttgcccagtaaatgtttcctgattaattttctgtcctctgaaggacagcgtgctattgcactgtcatgtaccatgggggacacgggggggaacagctcggtggtgatggcccatctagaaacattctgtatgtgagaactatgtcattaatttagcaaagtgagagagatgtttgcaaagctgaacccctaatgctgtgatttctgtataaatatgctaaatggagtgcatatctgattcaagaaaagaactgttgatcccaaaagggaaaaattagacatagggtgtgacgtgtctagatacctccacctgcgctcatgcacacattcctg

SEQ ID NO: 80955 - DNA, 638 bp, Homo sapiens
ttgacttaatcacatctgcatacacactccccgaagaaagcacactttttagaggcagttgggcagaattttgactaytagtcaattgttaccttgttgaccttgaccaagctccttaacttctttgaactttactttcttcatccgcaaatggaattaatacatacctacctcagagagtttgaaagggttaagagaaatgatttgattgaaatactacctggatttctttttcctttccttagattcaaagctttatttggactcatctttttatctccagagcctgtccctggcacatagcggttgcccagtaaatgtttcctgattaattttctgtcctctgaaggacagcgtgctattgcactgtcatgtaccatgggggacacgggggggaacagctcggtggtgatggcccatctagaaacattctgtatgtgagaactatgtcattaatttagcaaagtgagagagatgtttgcaaagctgaacccctaatgctgtgatttctgtataaatatgctaaatggagtgcatatctgattcaagaaaagaactgttgatcccaaaagggaaaaattagacatagggtgtgacgtgtctagatacctccacctgcgctcatgcacacattcctg

SEQ ID NO: 80956 - DNA, 683 bp, Homo sapiens
ttgcaacattatccagaacagagaaaaactgggttttaatagaccattggaaaaaagctttatgacagtgcatttagcaacaatttcttggatatgacaccaaaagcacaggtaatgaaagtatataaatggaactacatcaaaatttaaaacttctgtgcctcacagaacataatcagcagagtgaaaaggcaaccaacctatggaactggagaaaatatttgcaaatcatatatctgataaggggttaatatccagaatacatagagctcctacaactcagcaacaacaaaaaacgaacaatctaattaaaaactggggaaagaacttgaatagacatttctccaaagaagatatacaaatggctatataagcacatgaacagaagctcaacatcactaatcactagggaaatgcaaatcaaagccacaatgagacacyacctcacacccactaggatagctactatcaaaaataaaacaaaataagtgttagaaaggatgtggagaaactggaacctttgcataccgttggtgggagtataaggtggtgcagccactatggaaaactataggcagtttctgaaaaaatagaattaccatatgatctagcaattccacttctaggcatatacacaaaagaattgaaagcagggactcaaacaggtatctgtacacccacgt

SEQ ID NO: 80957 - DNA, 1032 bp, Homo sapiens
tccgtctgaaaggctacagactctaagattccaactttatacaatattctgaaaaggcaaaactatggagatggtaaaaataagaatgtttgccagggatttgtggggagggggaataaacacgtggagcagatttttaggtcactgaaactgctccatatgatactatgatcgtagatacatggcattacatatttgtgcaaacccataaaattacaccaccaagagtgaaccctcatgtaaactgtggactctgggtgagtacgatgtgtcaatgcaggttcattagttgtgagcaatgtgctgtcctggtagggatgttgataatggggaggctgtgcatgtgtgggagtagaaggtgtatggaaaatctctgtaccttcctctcaattttgctgtgaacctaaaactgctctaaaagaaaaaagtctaataaaaatttttatagccctgtgtaatcagggaaagttttttgtttgtttgtttgtttttgagacggagtctcgctctgtcgcccaggctggagtgtagtggcacaatttcggctcactgcaacttctgtctcccaggttcaagtgattctccagcctcagactcccgggtagctgggattacaggcacctgccatcatgcccggctaatttttgtatttttgtagagacagggcttcaccacattggccaggctggtttcaaactcctgacctcagctgatccacctgcctcggcctcccaaagtgctgggattacaggcgtaagccaccgtgtccggcccaggaaaagtatttaagcatagatgatatagacacctataatgctagtaataaggcaaaaatattaccaatgcaaatttatcaggaaaaaatagatctctcccacacaaatatgcccaattaatttttgacaaaagtgcaacagcaatttaatggaggaaggacgatatatcaacaaatggtgctggaatgaatggatatccaaaggtgaaaaaattaaccttgacctaaaccacacaccttawacaaaacccaactcc

SEQ ID NO: 80958 - DNA, 540 bp, Homo sapiens
cacacacacacacacacacacacaaacgtggcatgtgcctgtactctcagctactctgggaggctgagatgggaggatcacttgagcccaggaggttgaggctgtggtaagtgtgatcaagccactgcactccagactgggcaacagagtgagaactcgtctcaaataaaaagattagtttcatgtatataatgactacttattgatactatggaaaaataagataatggaataacaaatgattgttttagaatatcactaattcacttaacagagtaatgatctaggttttcctttaaaagatataaatgtgtttaarcccactaacttctattttggaagtcattactaatattgttcatgaatagtctctcctgactcatataacatgtcatattaaacttcaatggaataagcacaacattgtttttatttcatgaatgattatacttaataaaaatacattatttagtttaaatcaattgaatgagagaagttatggtctaggaacaagaattatgaaataataagaatagttca

SEQ ID NO: 80959 - DNA, 533 bp, Homo sapiens
tcaatccagcatagggaatcttaagaacatcccatcatttttgccatgttggttagaagcaagtcacccatcctatccacactcaargaaagagaattacacaaaatcatgaacatcagaaggtggggatcatggaagataaggatggtggcagcacaatagtctgcccaccaaatttttcaaaaaataggtttttataagtatctgtttttaagttaaatttattttatttaacttgtacaacagcactgcctttcatggatgagaaaactagtttgtagtatatctaaggccaaacatcaaatattcaaagttaaaatacctttatggaactcttgctttaccaattagacggatagttttaagaacaagaactatgacatatacacctttggcactgctatgaagcattttaatgctcaatccgtgctttattgtttggtgtgctcatgtgaataatgagaagcaataataactctctatgaggttaacagaataatacaagttgaacccaggtgtttctggaatctgat

SEQ ID NO: 80960 - DNA, 1085 bp, Homo sapiens
atctaaaacctctgccagtaacggactattgttgacaaattccctttgttccatatcccccagcagattatctctgaagtgcccataaatcctatacttttataggttttagtaaattcccctgtgtttataggggatgtctcacttgtgcttccattatttaaaytgcctggaaagccacatctctaatatggccacatgcccagtgttgatgagtatagatcagaaatggcagagtcttttcattttctaaccaaaaaataaaattgccactccagctgccacattcctggatattttatcccatcaagttaaagaaaaatctattaccccagtactgctttgtctcctgtttttgagctctggtgctatgatctaactgcaagtgtatccatactcatgacaggccttccttcccaacttgattcattcccaggcttgtaaaagtaaatggcttatctacatgtgagattcagttcctctgctctctctgtaagtacagggaaaaaatgtgtgccctagtcagggaggaaaagtgtatgtctctttaatatcttcaattcaatattctttctaataatatcactcatataatattagctcaataaaagtattggaatttaatccacagtacaaagcaaaacacacatgagaagtaaaatataaatacacttaaatattaactttttaaatttatggcctttatctttgtatttaaataaccatgtttttatgtattatttaagttaaaagatagatttcttcacttataaaatagaagtaacactatctgtttcattttgttgatgtaaaaatttaatgtgataatataccaaagtttttcaaaccctggtttgcataagaatcacctggacacatgttaaaatgcagaataggtatccattagatattcttatgtaggatctgggacacagacaagataatgcactttttttttttttttgtaaggatcacattgatttggatgttagtagccagtggacaacttgaaaatcattgataaataaaaattaattatcacagtgctgccacatattaaggattctatagatgctaatgattat

SEQ ID NO: 80961 - DNA, 745 bp, Homo sapiens
ggctggtctcgaactcctgacctcaggtgatctgtctgccttggcctcccaatgtgctgggattacaggcatgagccattgtgcctggccaaaattaatactttttatattaaatttacatatatatatacgttttttctttttgatactgggtctcacactgtcacccaggctggagtacagtggcacaacctctgctcactgcagcctccacctgccaggctcaagcaatgctcctgcctcagcttcccgagtagctgggattacaggtaagtgccaccacacccagctgatttttgtgttttttgtagagacgaggtttcaccatgtttcccagactgttctgaaactcctgagctcaaagcagtccacccaccttggcctcccaragtgctgggattacaggtgtgagccatcttgctcattctagtttaaacttttgagtggtttgtgtctcctgattggactcctacaaatacagaattgatgctaggaagggtaccaggagatagacgcacacagatgggatttgggaataggtttggttatccaaggagcagtgctgagctccttgctaatgggatatgggaggctggtgatttccagaaagtgacctcacaatgactcaagctaccacatactgttgattgtgaaatgccagttgaagcatatgtcctgcgagcttaggggtgctacaagttgaccacagcagcagtaaagatgactctgaagaatggcatgggat

SEQ ID NO: 80962 - DNA, 1252 bp, Homo sapiens
attctggggggtggctagtttctctgtctcataaggctgtcccaaaagccttgattaatttcctggaactttctgactgtctcaactgtcctgcagtccctgaactgaccattcccagcatctcattctaccaccaagaagtattgaaatcccatcccactctcctgtggtacatatgggttggaaacttctaccaaaagctgcaaagagcagggaacatgacagaagacagctgtgtctactgaaagactatcttctccttagcctcgttgaatgcttgccctgtttgactttawtaaggttaattctaatctgtagcttttccggaggtgagagaatctcccctttctgaacatgactcactggcttctatttcagctcccaaagaagagtgttaatgtctcactcagcaggtgactgagagaagctttggccttatgagtcccatattcttcacccttttctatgcctcctgtcacccctatttctacaacaggagagcttcgtgcagcactctaagatacaactaacaataaaagtaatttatatcacttactactctccagatgcgaggctctgcataaagtgtttacatgcttcatttcatttattcttcacaagtccccacatgagatggtattatagttattaccatcatcattcccattttataaatgaggaatctgagtagactgtactgcctgttcctcttccttagcactggtccccacagtccacccattttctgaataatgtctgttttcctactagtctgtatgcttggctagagcagagaccgcatcaggattggctgatcacttaatccccaaactggcggagcagagccagaactgagacatgagcaggctggcccccagggccttgtgtgctcaccctctgctctcatggaaggtgagtctgcaaagctgagaagtgggttcctgggaggtgggcaggcccttggggtatgtatgggtcaggaaggcagtggaagagagagttttaggaggaaaagcagtcatcggcaccacgtgctgccaagacaccaaggcttcacccacatagagcttacctagtgccaatgagggtcattttggtggagctgtagggccagaagacagatggggcaagtggaatgtgtgaaaggtaagggtcagagtgaatgtgtggggacaactcactggagttgaagggcagtttttattttattttattttattttccacgagagagacacagaagcagacgggaa

SEQ ID NO: 80963 - DNA, 1252 bp, Homo sapiens
attctggggggtggctagtttctctgtctcataaggctgtcccaaaagccttgattaatttcctggaactttctgactgtctcaactgtcctgcagtccctgaactgaccattcccagcatctcattctaccaccaagaagtattgaaatcccatcccactctcctgtggtacatatgggttggaaacttctaccaaaagctgcaaagagcagggaacatgacagaagacagctgtgtctactgaaagactatcttctccttagcctcgttgaatgcttgccctgtttgactttaataaggttaattctaatctgtagcttttccggaggtgagagaatctcccctttctgaacatgactcactggcttctatttcagctcccaaagaagagtgttaatgtctcactcagcaggtgactgagagaagctttggccttatgagtcccatattcttcacccttttctatgcctcctgtcacccctatttctacaacaggagagcttcgtgcagcactctaagatacaactaacaataaaagtaatttatatcacttactactctccagatgcgaggctctgcataaagtgtttacatgcttcatttcatttattcttcacaagtccccacatgagatggtattatagttattaccatcatcattcccattttataaatgaggaatctgagtagactgtactgcctgttcctcttccttagcactggtccccacagtccacccattttctgaataatgtctgttttcctactagtctgtatgcttggctagagcagagaccgcatcaggattggctgatcacttaatccccaaactggcggagcagagccagaactgagacatgagcaggctggcccccagggccttgtgtgctcaccctctgctctcatggaaggtgagtctgcaaagctgagaagtgggttcctgggaggtgggcaggcccttggggtatgtatgggtcaggaaggcagtggaagagagagttttaggaggaaaagcagtcatcggcaccacgtgctgccaagacaccaaggcttcacccacatagagcttacctagtgccaatgagggtcattttggtggagctgtagggccagaagacagatggggcaagtggaatgtgtgaaaggtaagggtcagagtgaatgtgtggggacaactcactggagttgaagggcrgtttttattttattttattttattttccacgagagagacacagaagcagacgggaa

SEQ ID NO: 80964 - DNA, 790 bp, Homo sapiens
attcatgcttaattcaccagtgcttagctgagtacctggcataaaatagttactgtggtggccaaagtaataagccccaccgccaccaattgctcatgtcctatgttacacagcacaattacataggaagggggaattaagagtgcagataaaattaatgttgctcatcagctgaccttaaaacaagattatcctggagtatctaggagatcccatgtaattacaagcattctttaaaactggaagagggaggcagaaggttaagaaccagagayggtgggcacaatggctcatgcctgtaataccaatactttgggaggccagggcaggaaaatcccttgagtgcaggagttcaaggtcagccgtggcaacatactgaggtcccatctctacaacaaaataaaaacaaaattcactgagtgtcacgatgcttacctgtagtcccagctactgggaaggctgacatggtaggattgcttgagcctgggagtttgaggctataatgagccatgataggaccactgaactccatcctgagtgacagggcaaggtcctgtttctaaagaaaaaaaggacattggaatcagggtcctctccatcctgaggtgcctacaaggcatctgtctctgcaaacgagtaaacatcaccctccaactccttacagagtggagcagcaggaaaactccttcacctcatttctgtgctgcttgggaggcctggacagcccaataaccagctccttgctgatgaagcaatcaggaaatggctcgagttgagctaaggagaattt

SEQ ID NO: 80965 - DNA, 790 bp, Homo sapiens
attcatgcttaattcaccagtgcttagctgagtacctggcataaaatagttactgtggtggccaaagtaataagccccaccgccaccaattgctcatgtcctatgttacacagcacaattacataggaagggggaattaagagtgcagataaaattaatgttgctcatcagctgaccttaaaacaagattatcctggagtatctaggagatcccatgtaattacaagcattctttaaaactggaagagggaggcagaaggttaagaaccagagacggtgggcacaatggctcatgcctgtaataccaatactttgggaggccagggcaggaaaatcccttgagtgcaggagttcaaggtcagccgtggcaacatactgaggtcccatctctacaacaaaataaaaacaaaattcactgagtgtcacgatgcttacctgtagtcccagctactgggaaggctgacatggtaggattgcttgagcctgggagtttgaggctataatgagccatgataggaccactgaactccatcctgagtgacagggcaaggtcctgtttctaaagaaaaaaaggacattggaatcagggtcctctccatcctgaggtgcctacaaggcatctgtctctgcaaacgagtaaacatcaccctccaactccttacagagtggagcagcaggaaaactccttcacctcatttctgtgctgcttgggaggmctggacagcccaataaccagctccttgctgatgaagcaatcaggaaatggctcgagttgagctaaggagaattt

SEQ ID NO: 80966 - DNA, 599 bp, Homo sapiens
ggcactcgagactgcccactgctttgtactgcaggaaggtgagtgttcaaccctaaagaggcgctggtccaggaagccctggttcagtatcccagtggctgaggtctgacctgtagcctgttctcaaccaaatggaggaagatggggggtcactcaggcccagaccagaaagcaggctcaccgccctcttacttgctgtcaaatttcctaaccagtcattagaagagtcactctgtgggacacccagttgagtccatgctattaataacataataaatgtgtgcaactcagrataaaaataattctctgtacctacatagaaggatgtgtgcatgggcctgtatgtcctttgaagcaccattaatgattgaacaagaattcattgcaccttttttttccagagcagcctctgacactttataatctgagaaaaaaatggcagaacttctgcatctcatgtggagcagttgagtttcctgcccacttgttttctcagataaacccgagtcaggctcccaactctccagcccacccacccaggactttgcgcagagatttgccttcatttcctcatctgtacccggtgtgacaacacttac

SEQ ID NO: 80967 - DNA, 631 bp, Homo sapiens
gggatccaccccatgatccaagcacctctcattagaccccacctccaacactggggatcacatttcaacatgagatttggaggtgacaaatatccaaactgtaccaagctctgaaagtaaaactaaattgatgcacagtgcttacctctcctagactcagagggcggaagtcaatgccctctcgtggtgggggtggaggagggaaggaagacatgtgaaggtcaatttcatcattttatgaaaagcatgaatactaacgagaatttcttatgatgacatgtccaagtatcttttgctatttttttttttttttttttgagatggagtcttgctctgtcacccaggctggagtgcagtggcatgatctcgctcactgcaagctctgcctcccaggtttacaccattctcctgcctcagcctccccagtagctgggactacaggcrcctgccaccatgcccggctaattttttgtatttttagtagagatggggtttcgccatgttagccaggatggtctcaatctcctgacctcgtgatccgcccgcctcggcccccaaagtgctgggattacagacgtgagccactgtgcctggccttggtaatttaaaaaaaaacaaaaaacaaaacaaa

SEQ ID NO: 80968 - DNA, 744 bp, Homo sapiens
caaaggaagaatccattatttgtaactcacccctcctgtgggagccaatcctcagataatgcagaagccctgaggggtccctctatctgggctgctatttcttggcaagattcacctggaccattctggaaagaatgctgtttgccctcgtaccraaaaaacattcagaaagaaagatgcaccatcctccctgcaaagtcctcttgggctaaccaccctggggcctgttcctcgctctgtctgcctggcgtttagacctgtgcaaaggcagaagaaccttgtgatttacttgcaagagccaagcagtgactggaggagtctaacatcctgctcagtggccagctgccaggtggccagcagccaggtcgtgtttcctgatgtccactccctattgtggtacagtcttagtcatcacacctagtcaaagccttctggtctgacttggaggcagtgcctcctggataatcactcggacgcagacagtcagctttgggcccgctgggtgtgctgtacccctctcccgaatatctagcgaattctcagctcctactcttgaaccaggagatttgcaggcattagtgaatcactaagtagcaagtgttccttattaccaaaaggaaggatggaccctccacaaagaggggcagctggtggcacacacagatttaagaggagagggatttcttaaggtttaagtgatcttgaaccctgcagggctaggggtggggaggcgggaggaaggag

SEQ ID NO: 80969 - DNA, 1068 bp, Homo sapiens
caatgtgcggacgtccagacacccacgatgccacccctgacctcgtgccattatagccaccatgatgggaactcaaaaaatgacgactattgaacattgaaactattaaattactgggattgagccttaccacttagaacagggttgggctaactcaaaatcagatattgactgaaccttctttgagggtaacctgtacttcctggcctttttcatgataaagagggaaaaacaaggacctggttctctctggaaaactcagcctgtgtgtgaaaggtagtcccactccttggggattcattgaacaagtctttgttgaacgcccactatgtgctcagcaccttactaaattccatgaggttgttacaaagacattggcattcagttcactgagcacctactatgtactggcaccttgctgtgttctatgaggttgttctaaagcagctggcatttgtggggtagatgtctgtcgtgcctgctctgtgctgggcatttcagacatagtgagatattgaggataccgatcctcccatactttatacagggtgcagaggcaaactcacaaatggagaagacagtgcagtragtgaggcctgaggctagtgctcccaagaaggccagtgttctcagggtctgggtgggcttcccagaggggtgacctgtgtgccttcatctgcagggatggtggggatggcaaaggtacattcgggagcaggggaatgccctgcaggggcctggagctgaggaagagcttggccttgggggagtgtcagctgcacagcacgtacagagcacagctttgcaaggagcattcagcaagcagggaagctggagaggctggcaggcgcctgtccactccggggctgtgcgccaccccagcacacctggcacctggctttcagggtctactccagcaaccttgttgttttcatttccttggtcttaaatgaagttcactgtgacaaaacccccagctggaactcacctaacatcccaagcctgactcctgcccccatagccctcctgcttctgtcgggggcgaacctgcagcgtctcacgggctgt

SEQ ID NO: 80970 - DNA, 1068 bp, Homo sapiens
caatgtgcggacgtccagacacccacgatgccacccctgacctcgtgccattatagccaccatgatgggaactcaaaaaatgacgactattgaacattgaaactattaaattactgggattgagccttaccacttagaacagggttgggctaactcaaaatcagatattgactgaaccttctttgagggtaacctgtacttcctggcctttttcatgataaagagggaaaaacaaggacctggttctctctggaaaactcagcctgtgtgtgaaaggtagtcccactccttggggattcattgaacaagtctttgttgaacgcccactatgtgctcagcaccttactaaattccatgaggttgttacaaagacattggcattcagttcactgagcacctactatgtactggcaccttgctgtgttctatgaggttgttctaaagcagctggcatttgtggggtagatgtctgtcgtgcctgctctgtgctgggcatttcagacatagtgagatattgaggataccgatcctcccatactttatacagggtgcagaggcaaactcacaaatggagaagacagtgcagtaagtgaggcctgaggctagtgctcccaagaaggccagtgttctcagggtctgggtgggcttcccrgaggggtgacctgtgtgccttcatctgcagggatggtggggatggcaaaggtacattcgggagcaggggaatgccctgcaggggcctggagctgaggaagagcttggccttgggggagtgtcagctgcacagcacgtacagagcacagctttgcaaggagcattcagcaagcagggaagctggagaggctggcaggcgcctgtccactccggggctgtgcgccaccccagcacacctggcacctggctttcagggtctactccagcaaccttgttgttttcatttccttggtcttaaatgaagttcactgtgacaaaacccccagctggaactcacctaacatcccaagcctgactcctgcccccatagccctcctgcttctgtcgggggcgaacctgcagcgtctcacgggctgt

SEQ ID NO: 80971 - DNA, 648 bp, Homo sapiens
agccaaagtcatttttaaattctaaagttacaaggacagcaaggttatatatatatgtgtgtgtgtttatatatatatggaactataatatgtggaactttaaatgtggaactatagtaaaatatctgttatagaatccttataaaaacgttagcatgttagatttggaagggacttttgaggacatcctatgttgatgctggaagcaacatggaaatccctcaatgatattcctgtctgaaggtccaccagcatttgctcagccacttcataggaaatttctaacttcataaggcaatattctgcattagaacatctcttgttttagaaagaatttatcatattaagccaacatttatcttgtctccactttcaaagagacaccctcctaagctacacagcacgacamactactttacaacacagagtcttacaatttgcataattatgtgaaataatattttgatgttgcagtgtaactggttaattcaattgtttatatgactatcataatgaaatatgttaacaaatatgactcagtagcatttttggtaaaataattgtgacatctttatatacgcaaatgacttttatcagaataaatcaattcccaatttggtcagaactgtgtgaaagaaacaaaatgca

SEQ ID NO: 80972 - DNA, 524 bp, Homo sapiens
caccccagcgctatgcaatatacccatgtaaaaaacctgtacacatattccctaaatctaaaattaaaaaaaatgctgcatcacattcctctcacttcttataactgtctaacagggagaatagtgtgaaaggtatggccattaacagaaacatagatgtcaagaggaactactctgggtagagaawacggggagttcctatttctgtatttcagatgacaagatttgatatgatactcatggagttggtttaaagagttggagaaaactgtaatcttgatttggaaaataagtttatagagctgagtatggaataaatgaggtcgaagcagggacaaaggtagagagaggagagggtaaagaacaaattcttctcttcacttagaaaagaaagagcaggcaaagttactactgtgtcaaaacagcattcaacttctcacctgtccatcacccactgccagactttgtatctggcctgcagaacttgaaaatatttgcaaattaggttggaattaaaactaaca

SEQ ID NO: 80973 - DNA, 524 bp, Homo sapiens
caccccagcgctatgcaatatacccatgtaaaaaacctgtacacatattccctaaatctaaaattaaaaaaaatgctgcatcacattcctctcacttcttataactgtctaacagggagaatagtgtgaaaggtatggccattaacagaaacatagatgtcaagaggaactactctgggtagagaaaacggggagttcctatttctgtatttcagatgacaagatttgatatgatactcatggagttggtttaaagagttggagaaaactgtaatcttgatttggaaaataagtttatagagctgagtwtggaataaatgaggtcgaagcagggacaaaggtagagagaggagagggtaaagaacaaattcttctcttcacttagaaaagaaagagcaggcaaagttactactgtgtcaaaacagcattcaacttctcacctgtccatcacccactgccagactttgtatctggcctgcagaacttgaaaatatttgcaaattaggttggaattaaaactaaca

SEQ ID NO: 80974 - DNA, 590 bp, Homo sapiens
ccatgtgaatcaatcagccttggagtcagaggagagaagtacacattctgagctccgctgagtcgcaggaaagggagaggggtgcccagaggtcatcactctttccccaggcctgatttttggtccrtctgctgagcctgatttggacacatctctctgcctcctgcagcaagggaacattttcatcgtggactttgagctgctggatggcatcgatgccaacaaaacagacccctgcacactccagttcctggccgctcccatctgcttgctgtataagaacctggccaacaagattgtccccattgccatccaggtaggctgctggggggcacacctttctgagcagctcagtcctctgcgatccagggctcctgggtggctccattcacactccagctgaggaagctatgtcttgaaagacactagggcttcctgcaggccctgaggtgggctgtccataggggcggagagggttctactccccaaggcacacttgagaagcccctggccagtcgaggcacactgtggaggacctgccctgggatcatattctgcactctccaccccagcaccctgaccaagggccc

SEQ ID NO: 80975 - DNA, 590 bp, Homo sapiens
ccatgtgaatcaatcagccttggagtcagaggagagaagtacacattctgagctccgctgagtcgcaggaaagggagaggggtgcccagaggtcatcactctttccccaggcctgatttttggtccgtctgctgagcctgatttggacacatctctctgcctcctgcagcaagggaacattttcatcgtggactttgagctgctggatggcatcgatgccaacaaaacagacccctgcacactccagttcctggccgctcccatctgcttgctgtataagaacctggccaacaagattgtccccattgccatccaggtaggctgctggggggcacacctttctgagcagctcagtcctcygcgatccagggctcctgggtggctccattcacactccagctgaggaagctatgtcttgaaagacactagggcttcctgcaggccctgaggtgggctgtccataggggcggagagggttctactccccaaggcacacttgagaagcccctggccagtcgaggcacactgtggaggacctgccctgggatcatattctgcactctccaccccagcaccctgaccaagggccc

SEQ ID NO: 80976 - DNA, 1657 bp, Homo sapiens
tgattttgttgagtagatggaggatactttgctttttggatttttctgatttttttgagacacagtctcactctatctcctgggctggagtgcagtagcacttcactgcaacctctgcctcccaggactcaagcaatcctcccatctcagtctcccgagtagctggaaccactggcacgtgtcaccacactcagcgaatttttcatatttgttgtagagatggggtttcgccatgtatcccaggctggtcttgaactcctgggctcaagctattcacccaccttggcctcccaaagtgctgggattacaggcacgagccaccacacccagccagatggtggatactttgataagagaaaactacattgaggaacacagaatcctaataccatattaggccatacataacgcaggccaggtgcrgtggctcactcctataatcccagtgctttggaaggctgagattggaagattgtttgaggccagccattcaaaaccagtctgggcaacatagtgagacccccatctctacaaaaaaattttttttagttatcaggatatggtggggtgtactgtagtcccagctattctggaggttgaggtgggaagaacgtttgagccaaggaatttgaggctgcaatgagctatgatcaagctgaatgcactccagcctgggtgacagagcaagaccctgtctctaaaataaaaataataaacacaaatttgaaaaacctaattaatgttttttgctttcagtatctcatttaaccctcacaataaacatgtgaggtggtaggaggaatcactcccattttcagataaaaagcagtctcaaagaagttaagaactacattcgcatatttagcagacaccactgctgggtttccttacattccagaaaggcctttaagacagcaaactccaaaaatgtttaaactctttcattgcacatataatttacaatgaaagattaaatatagaatttccctttatcaaattctttcaacctgcccaaataatttcaaacagaaagagatattctctttgacatttatattctgtttgaaggacattcctaaggccctttgaaagatgattaaccctaaagaaactgcctacatttactaagctttttgaaaatactattgcccactctgcataaccattatgggctctctaagacaaagatctggctcatgaataagagtggaaaaagaaaagtatttatctaaggactttataaaatcctgtgttcatctaaactttaatgaaatgggttataggcacatcagaaataaaaatctgcaagtgacttttataagcatatatgtcagctgggcatggtagctcacgcctgtaattccaatactttgggacattgaggcaggaggatcacttaagcacaagagttggagactagcctgggcaacatagtgagacccatctctactaaaaatcacaaaaaattagccgggcatcatgtatgtgtctgtactcccagctacctgtggactgaggcaggagaatcacttgagcccaggagttcaaggctgcagtgagctataattgcaccactgcactccagcccagatgacagagcaaaaccctgtcttaaataagtaaataaaaataaaagtgtacatgtcaaagtttagta

SEQ ID NO: 80977 - DNA, 1064 bp, Homo sapiens
atgaatccaaaagattcccataatgtaaatgcccacagttactctaaagctacatggaacccagtatagagcagggcttggactcagaaggaccaatcaggagctcagaccagctgacaatattagcccaagacactttatttccaaaaatctcccttttctcaattgccaaatggagacactattactaccccaggattgtttttgaagactgaaggtaataagacttaggggtaataggctgtttggaatgagggattaggcctcctgaaaaaaacctgctaagatacttttatcgaattttacctttatttagatgcatgtttatagaggatgactttgggatagaactaatggtatttgaagctgggagatggaggctaaaggccccagcctcccttgtttgcaactgttgatactgaaagcagcaaagctcagtgccatattgcaggcttttcctgaagttttgctgaatctgaggcacaaattctgaaaatgttgccaccagtacctcatgttattttgtaataatgtcttgaggtttggttctggccataccaaataagaccctgatatgcacaatgccactgaaattcacttcccactgctctggcatcctggtgtcacggaaggagccataatctagtcaactcatgttcggaagagctcagttctggctctgactctgttataaccatttctgtggagtgggacaggccatttaacttctygttgctttgatttcctcagttgtaaagtggtcataactgcccttgccttcctgaaccagagttattaatcaagaagcctaagtgaggtagaccatgcagaagtcctacagttgtccttggtctttgtccaagggcaaaaaatccatttagattcactccaaaccacagtgaccattagctgacctcaacataccaggaaaaaaacaaacaaaaaacttttgctcaatagaaattaacttgttagctccggcctgtatgaaatacattaaaaatgaaattcttacagcctgcaaagtcttccaagggggtagagttccacattatatcacacac

SEQ ID NO: 80978 - DNA, 997 bp, Homo sapiens
ctgtagtcccagctgcttgggaggctgaggcaggagaatcgcttgaacctgggaggtggaggttgcagtgagctgagattacaccattgcactccagcctaggcaaaaaagtaactctgtctcaaaaaaaaaaaaaaaaaaaaaaaaaagtacatggaccaagaggtggcaaaaagaataagatttcaaatgtgaaaggatgaagttttgacacaggcgtagcattcacctccagcaaacacaattcagcatttctgtgtgtctaggacaaggtgtactggggaacaaggtaaaggctgtcatttagtgtgtgcccaccaagtgcagggtttgtgcaagggctttattgacactgatttctgtctcaaaacaactctagaatgcccctattattatcctggctttacagaggagggatgggggccagagaggatgagtgagctcagagaggcccaaacagctaaaaatccttctgcctccaaagtcctacaccctttatgctgcctaagaactttccaaaagagataaatataactgagcacatacactaagccccagtaaaacgcgagtaaatgtaagacttcyttgagtacgattagttttatagcaggaaaaatcaaaagaggttaacagaagtcctttatatctgcataacacatcatacttccaaggaacttccatatttatgaatttacagacgtatcagatttgataaaatctgatttagtaaaaaatgaacaaacacggtttggctgcacctcgccagagtggaccagagtccttaattcttagcttctgggagactcagaaagcccagagactccagagaagtgaatgtcttctgtaatgtcacttagaaccaggtctccaagagacccaaggaaccaaagcatccttataaagctgtgggctaagtggtttattcttccccaagtcagcctctgagacactggtccaaacagaaatggggttggtgaagccctccagtctgaagtga

SEQ ID NO: 80979 - DNA, 1918 bp, Homo sapiens
tgaaagcaaagtttcaaaacagggaatgagagccaaaaaatacagccacacgtatatatatatgttaaatcgacttttttggcaaaggtgctaaggtaatgcaatggaggaaagcaacactataggaacacagaattagtcttgcataaatggcacacgttatgaggcacccacattcatagtgaaaatggtgacatgagttacatcaaggaaatcactctaggggcatttggtggaacagtcctggccccgtccactttcttactgttgtcctcagtgttgacatagaaagatttggcttttggattcactggtaagttgtgcttttcatattgctgttctgtttaagtactttccctctgtgtttcttttttttaaattactttcttagagtttactgtttttttttttaatacttctttgtttagacctagcttttgtttaacttgttttgtttcaggttctaaaaaatgcagttatagctatatatttttctgagtccgattttggttatatcccacatgttttgacatttatagcatttattgctttttatgactttttaatgacttgagtttttttctttaaatcaagagttactwaaataatttttccaagtggattgttgcttttccccaccccacagcccacactcttgctttcttttaatattaatttcttattcagttttattatggtcagagaacaatggtttgaatgatttctgcttgtttgtaatttatcttaatttttgggtttaatacataatacaattttgtaaatgttctgtgagtgttaaaaagtttagggttatgaaagagtgtgtttgtgtgtatatcactgaggcttatttatttgttttgctcacactctccatattcttgcagatttctgttgatttgatctgtattttctcaaatagttgcgttaaagtcatcttctatgatcatgaatttttcagtttctgtgtttaaatatcaatattgctgcattttttcttttttttcttttttttttttattagctccacttgtctgcattttcctttttagttgtgtaagcctctatcttgtgcattttctttccatccctttattttcagcctttctgtgcagttttgttcagttgcatccctgaggacagctacatgctggatcttgtttaatcagtaaatcagagaaccatatcttctggtaggatatgtcaatttggatccttcaaaaagttaacacaaagaaggaataagacatgcatgttgtttattcgaagagtgcaagtaaagaataaagtcgaaagcagaagtcagggagggccttttgaaagtgaataggtctgaccactagggaagcagaaggggaaggaatgactggagaggaagagtctctgactgcagttcagatccaagaaagttccagcctggtcaaggtgagacttggagccaaatttcctgttagagaaacctcatgtcctgtaaaaacgggactgcatgtgtatccctgagagctgcctgaggctcaggtggccttggagggaacgcagtgggggacccagagaggccactggtgatgctgtcacccactgtgctcccatgcagcgagttttcatggctgacacataggaccacttagtccattcagtgatcacaaatatttaaatatccgattatttctcgcctccttatttaatcttttccgtttactatgattttttgtttgtttgtattgcttcctttcattttattgggttaagttttccttgttcaatttcatcacaaaagtgatttagcagttagacaacttattttttttattatactttaggttctagggtacatgtgcagaacatgcaggtttgttacataggtatacatgtgccatgttggtttgctgcacccatcaatgcgtcacttacattaggt

SEQ ID NO: 80980 - DNA, 666 bp, Homo sapiens
  misc_feature (1)...(666): n = A,T,C or G
tnnnnnnnnnnnnnnnnnnnnnnnnnnnnnnnnnnnnnnnnnnnnnnnnnnnnnnnnnnnnnnnnnnnnnnnnnnnnnnnnnnnnnnnnnnnnnnnnnnnnattgttgttgagtggaatacaacttgatttcaaattttgaaagataaattggactatctaattagccttggtcaatgcaaaatctttgrctaggaaagtaacattttcttctgatctggagcagagaaacaggtttttaaatcagtgggaacaagagaggggaaagacttccaagtgtgtccagagaagaagcagatttgttttacacaatcagtctgcagggagaacctctgagaacagacatgatcatctccagagacttttaagttactcacagccaagtggaacataagggcttcttattcaggaaaggcacttaaccatcttctaatataataaacagacagggacattttagcgttttaccaaagagaagtaagtaaacgtaaccgtacctaactctgtaatctgagctgatctgatgtgtaccatgtgactgtaacattggaagctgcaaggggacccttgcaaaatgcgggtaatgagagtcacctctgaatgaatgagcaagtctggggaagcaaacccaagcactgaaacgtttagtgaatggaaagggcctatg

SEQ ID NO: 80981 - DNA, 1125 bp, Homo sapiens
agcaagaaatccccccaaacttgatggaattctttctccaccactgctgcaagaggaccagatctccctctgccaacagatggggcggggtaacactggaaatatgtyacaggccaggttcagatgccacaagagtagcctcaagattttgcacataacttcggaagaaaccccagcataatagaaaggtcttctcaagaatttttctggatttactgtgcaacttccctggtcccttacttttcttgccacttttgttattacccctcacaagtgtagcctcgtgtttgcttttatttgatttgcaattctctgtcttataaagattgtcccggttcttaatttcgtgtttcccaaaaatctacctattgcgtccattgtggcattcctggcacctagaacaatatttgcctcataggacatgcatctatttgaccttgccttacgtacatcctgttctcttcttcacttttgtctcaggtccaacagttgaaactatgcattccaagtagaatctggttggaataaaaggatctgaaccagctttaatcatcaaaggaaaaatatgctgtttataatattgaaataaaaatagggaagatttcaattctttgggataattacccagaagtggaattgctggatcatatggtaattgtatttttaattgagaaacctccatactgttgtccacagcattatactatattgcactcccatcggtggtgtgcaaagattccaatttctccatatctgcattaacacttgtcttttttttaaatcactgttgttttgatttgtagttctttgatgactaggggcattgggcattttttcatatacctgatggtcatttgtatgtcttcattggaaaaatgtcttttcaagtccttaatccagtttttaatcaggtcattcatttttttttctttttctattgccttgtaggagagccttctaaatattggagatgaccctttatcagatatatgtgtttcaaatattttttcccattccattggttgtcttttcactctgccaattgtttcctttgctatgcataagctttttagtttgatatagtaccatttgtttattttgtttttgttaccagaattaaaatca

SEQ ID NO: 80982 - DNA, 571 bp, Homo sapiens
tgacctcttgtcttcctgagatcccaatctaaaatctaggggaataagatcataagacacatttcagcatttccytaatgaaggatttttcattaatcatgacaattgttattaaaacaactaatgacactgaacatggaaaactgtccactatggcccagatttggggtaacacccggctaacttctctggatgctgtccccttgcctcggccatacctaactcacctccccacttagctgttggttattcttaagttctaaaggatgggatgcaggctatactctaacaaataaaactatttgttcctggttgggcttctgccctcaaatcctatctggtcaccaaatgttggttgaactggttgactgtgaaagcctcaagcattctacttgtcctttctgttaaggcctaaaccagaactgaagagaccaggcccttgcatcacagtacctgatcccaatctgacttttctaaattctctgctaagaaaaggggcctcaaaagcaaacgaaaggggaaaagaatgaatcatttcagacatactttttgaataatttcatcgccgaag

SEQ ID NO: 80983 - DNA, 571 bp, Homo sapiens
tgacctcttgtcttcctgagatcccaatctaaaatctaggggaataagatcataagacacatttcagcatttccttaatgaaggatttttcattaatcatgacaattgttattaaaacaactaatgacactgaacatggaaaactgtccactatggcccagatttggggtaacaccckgctaacttctctggatgctgtccccttgcctcggccatacctaactcacctccccacttagctgttggttattcttaagttctaaaggatgggatgcaggctatactctaacaaataaaactatttgttcctggttgggcttctgccctcaaatcctatctggtcaccaaatgttggttgaactggttgactgtgaaagcctcaagcattctacttgtcctttctgttaaggcctaaaccagaactgaagagaccaggcccttgcatcacagtacctgatcccaatctgacttttctaaattctctgctaagaaaaggggcctcaaaagcaaacgaaaggggaaaagaatgaatcatttcagacatactttttgaataatttcatcgccgaag

SEQ ID NO: 80984 - DNA, 1249 bp, Homo sapiens
cagcatgaacatgagaatttcttgtggtacctgggaaatggggaaagaatgctcttatcttttggttgtcatggtgatatccagtatcctctttatccctgagagtggtacctctcatgcagctgcttcggcaactttcttggtgctgggagacacagcgcctagagtttatgcttctggtggaccccagagcctttcccctttgaagtcttgtcacttttctgaaggcttcccttaggttgaggcacaggtcactgctgttgaggaaatttgtcaatttctatgcctttctataaggaaataacctctttctctctctttctcttttttgttttgagacacagtctcaccctgctacccagggtggagtgtagtggtacgatctcagctcactgcagcctcaaccttctaggctcaagcaatcctcccgcctcagcctcctgggtacctgggactataggcacatgccacacacctgggtaatttttgtatttttttgtagagaagggttttgcgatgtttctcatgttgttcttgaactcctgggctcaaatgatctgcccaccttggccttctaatgggctaggattataggcataagccaccatgcctggcccatctctctttctgattagcatctctgaatacccctatgcccactccactggcttcccctagcaaagcaccctaaaagagctcaggcttttgggactccaaatccagaaaaggaatgtctttaccctctgctttctacctggaacccaaactttccttaaggcaagagaggacaatgagacccacctgyttgtcacgaggaaaaaattgtgcaaagacagctaaaatacatttcctctacagtacatagccttcactgactttcagttgtgagctgcttttgaaaaacacaggacagaaataatgagtgctccatccttcttgcctttacacctacaattcctgcgtaagcccagagtttccgcccagcccttgggagactgtcagactttgcctggcgctgaatctcatggtgaatttgctatggtgctgaccttgctctttgtctttttattcaaatatttgccactgtgcaacacaatcatatattgcatctatgtagtattgatattaaagtgtttagccaattaggtagtttggtattaggtaattcaaaaagacttcaaaataattcatttattaaaccgtattcttttctagtgaacatatgccttaagaatgcttccatttctcc

SEQ ID NO: 80985 - DNA, 464 bp, Homo sapiens
  misc_feature (1)...(464): n = A,T,C or G
gcatcttgcatattttttggctccctaatagtttctgagaaattccattccatttttattttttttggctgaagctgtggaaagacaaaaagagggggaggggagacagacrgacatttagaaagtgtattttaaattgcaaattcagattgctaggctgcgtttgtacatggagaaggaagggaggaatgaatcaataattcaatgttaaaactggaatcctgcttcaattatgtgactattttaaccagagttatttcaatctgaccatcgataatgattccatctcctcctagtcctgagcctagaagttagctgggccttcacctgttcaaagggcagggtcctcagcgtgttcccttcnnnnnnnnnnnnnnnnnnnnnnnnnnnnnnnnnnnnnnnnnnnnnnnnnnnnnnnnnnnnnnnnnnnnnnnnnnnnnnnnnnnnnnnnnnnnnnnnnnnna

SEQ ID NO: 80986 - DNA, 464 bp, Homo sapiens
  misc_feature (1)...(464): n = A,T,C or G
gcatcttgcatattttttggctccctaatagtttctgagaaattccattccatttttattttttttggctgaagctgtggaaagacaaaaagagggggaggggagacagacggacatttagaaagtgtattttaaattgcaaattcagattgctaggctgcgtttgtacatggagaaggaagggaggaatgaatcaataattcaatgttaaaactggaatcctgcttcaattatgtgactattttaaccagagttatttcaatctgaccatcgataatgaytccatctcctcctagtcctgagcctagaagttagctgggccttcacctgttcaaagggcagggtcctcagcgtgttcccttcnnnnnnnnnnnnnnnnnnnnnnnnnnnnnnnnnnnnnnnnnnnnnnnnnnnnnnnnnnnnnnnnnnnnnnnnnnnnnnnnnnnnnnnnnnnnnnnnnnnna

SEQ ID NO: 80987 - DNA, 528 bp, Homo sapiens
cggagaattaaaatcaaattcgcatagctctgtactctttcaggggatgattcttggcctattttaaatattctgaattaactttttcatttcctacattttttccctgacacaagcacattcccttagaaagagaagaatcataccrtatctctatggagataaatatattccttggtttaaaacaaaatcctttctttcttccttatttccttcatttcctttctctcccccttcctccttctcctcctctccatctctttctttctttcttttttttttttttttctgagatggagtcttgctctgtcgcccaggctagagtgcagtggcaccatattggctcactgcaacctccgcctcccaagtttgagcgattctcctgcctcagcctcagagtagctgggattacaggcacctgccaccgtgcccggctaatttttgtatttttagtagacatagggtttcaccattttggccaggctggtctcgaactcctgaccttgtgatccacccacctcggcctcc

SEQ ID NO: 80988 - DNA, 951 bp, Homo sapiens
tgcattatttgttctgtgtattagttttttataggaatatatatgatcctgtaaatagatagactatttgtctgtcttagatttttaagagacatattaataatgctacttgaagatttagacactaactaggtagaacatgaagtctctctgtaagttcagactctttctcttcctccctcgtcctcaacctgaaaaccactgaaagccactaggtgggctgagccaggcatctgcgaggtgggaccagtggcacagtgcaggtgcagctgcctgaacagacccagatggcctctgtgcaggctgcggggctgttgaagccctgggggcaagcagggtttttgcacagagagaggctggcgggatgcctatggatgttccatggatgggtgttgagtcggagcaggtgaagggccctccttgcaggaggcaggggtcggggtacagtgatgggcgtggaaggctgactggaagaggggaagtccataggttggggagggatgactgtgacctggcctggaaaggggtactggaacctaagagagagaacaaggttgtttgagtaagggtgttggtggagtgaccctccacggggtatgaasctgagaatggggtgaggagggcatcttgggtggaacaaagatgatggcatggcagccctgcatggacattggagtgcaagcaatgggaggaggcactggccctgggagcacagtggagaggccagaaagggtgaagagagcatcccagtgaagactgggggtggggacgcattacgcactggggcagtgaagataaagagagccgggtttctcactgttggaaataggaaaagggaaaaaactggagtgagccctgtggtattagatgggaattgcaggtgttggtttaaactcatggttttcagtgtagaactatagacaggtacctatggaaataactattgctgaa

SEQ ID NO: 80989 - DNA, 754 bp, Homo sapiens
atcccactggacttgatgggtttcagtctttgagcatggagaggctggaaagggtgtgtgggggagttccgttctgagctagtagacccttccacaggtatgaataatatttcaagactcagtgtaatgaggacaaaggagaagtgtggaaatggagagcttttcactcaaatctgcaggcccacyttctcttgcaaagctcttctagtctatgtattatctttgggttatctatggacttagagtaagtgcaatatagatttagtttggctttgttttgaacactatcttgactgactctaatagttttagaataaatatagctttacttctacttacattatttttgggatttttttttaaagaaaaaatacattcgtttagtttaagaattggtaaaacatatatattgaccaggttttatttttcatccagcaaagtatcacgatttgttgcaatgtgcacagccagcttaaaaaaaaaaaaagagctgttcttagggcttatactacctaatttcagcagcaccactaagagaaacaaggtgtagctctaacagaaggtgaatggggaaaacaggcacagagaagaagtgggtacaggcagccgcctggcctctccttattgcacaggacaggcagggcagggccgctctctgtggccaggcttcagcaactcaggcaccccagtgccagaatcagccccaccacacaacacgtacaggttagctggaaactgtttaggacacacagag

SEQ ID NO: 80990 - DNA, 1162 bp, Homo sapiens
tgcatttatttttattttttatttttttttagagatagggtctcactgtattgcctgggctgttcttgaactcctgacctcaagtgatcctcccaccttgacctcccaaagtactagggttacaggcttgagcactgctaatcatagtccttgtgaataaaagttgataagtatgggaagctacttttacagaacttgcaattattgttcctcttttgaaatattcagctttggggcttgagatttctctctcacctctggtgtcctgataccaattattaattatcaggaaagcctgcacagagaatgccctgtagatgctacagagatgagtattcctctgcataagctgagatttctccagggttcagctatggagacagatttaaaaacatacttcaaaagttaatctatcacacaacaaaatccctacagcacgaaatgaagtgtggcgggaactgtcctcctcccaccccgatctcctctgagcccagggcctctcagcctcagtcgcgctgccacggggcygggctgctcttgtcatggggctgttccatgcactgtaggacgttcagcaatgtccctggcccctacccaccagatggtgggaacagccctggccactccccagttgcaataaccgaaatgcccccagacattgccaaatgcttcctgtgtgtatgagtgggtggggcaaaattgcctctccccgagagccgcggtcctagaagcaggcagtgatgtcggtgtcttgtgttatttgagcgagagcctttgcatgtccaagcttgcgtgtgtatgtgtgtatctgagtgtgtgttcccacatggccaaaacccacaagtgctccttgactgtgcccactgccctgcttttctcactgaacaacatgacaccatctgtgtgctcacagctctggccccctccattcaaaggcacccatggcaccgtgtactatggactggcacacaggagctttctcaaccttactcttacaagccaagtcatcctcaacgccatttcatgctcatgttagaatccctgtaggaaaagttcctggaagataatctgtagggtcgcagggtatgtgcatttttagttttgggagatttttactgagaactttccaaagaagttggactagttttctctcccaccaata

SEQ ID NO: 80991 - DNA, 249 bp, Homo sapiens
gcatgtctatgatatgatacatgatatgtaacaaattctattttttgcagaaccctttgagaataarttgcagagatcataatggtgtcagcaaatattttctaataatattaagtgccttggctgggcatgctgtaatcccagcactttcggagactgaagcgggcagatcacctgagatccactgagatcaggagttcgagaccagcctggctaacatggtgaaaccccatctctactacaaataca

SEQ ID NO: 80992 - DNA, 511 bp, Homo sapiens
tcttcctctggtcaatttaactcaattaaattgctagatcttgagggtgctgagatgaatgaaacatagttctgccctccaggaatctgaagcgtagttggtagacagagatataaacaattaatgatggaacagtaataaaatatgattaaaatgataatagaaacatgtttaaaatttagtaggaaaacagatgagagagcgattacttttttaagaggtagagggctctcatgaaaaattatgtatygaaggtgacggttaagcttgaccttgaggggtgtttagaagttcaacagtgaaagtggtggagaaagaggtattacaggaaaggacccagtaggggtctttcttctcattcctgccaaaggcttaaagtttccagttgctattcagcattgcatttcccatgacctgactagatttctcactcgttcctctttgggtctgagggattaaagtgctattggaagagaggcattgggaaaggagagctggctggttttcggta

SEQ ID NO: 80993 - DNA, 511 bp, Homo sapiens
tcttcctctggtcaatttaactcaattaaattgctagatcttgagggtgctgagatgaatgaaacatagttctgccctccaggaatctgaagcgtagttggtagacagagatataaacaattaatgatggaacagtaataaaatatgattaaaatgataatagaaacatgtttaaaatttagtaggaaaacagatgagagagcgattacttttttaagaggtagagggctctcatgaaaaattatgtatcgaaggtgacggttaagcttgaccttgaggggtgtttagaagttcaacagtgaaagtggtggagaaagaggtattayaggaaaggacccagtaggggtctttcttctcattcctgccaaaggcttaaagtttccagttgctattcagcattgcatttcccatgacctgactagatttctcactcgttcctctttgggtctgagggattaaagtgctattggaagagaggcattgggaaaggagagctggctggttttcggta

SEQ ID NO: 80994 - DNA, 511 bp, Homo sapiens
tcttcctctggtcaatttaactcaattaaattgctagatcttgagggtgctgagatgaatgaaacatagttctgccctccaggaatctgaagcgtagttggtagacagagatataaacaattaatgatggaacagtaataaaatatgattaaaatgataatagaaacatgtttaaaatttagtaggaaaacagatgagagagcgattacttttttaagaggtagagggctctcatgaaaaattatgtatcgaaggtgacggttaagcttgaccttgaggggtgtttagaagttcaacagtgaaagtggtggagaaagaggtattacaggaaaggacccagtaggggtctttcttctcattcctgccaaaggcttaaagtttccagttgytattcagcattgcatttcccatgacctgactagatttctcactcgttcctctttgggtctgagggattaaagtgctattggaagagaggcattgggaaaggagagctggctggttttcggta

SEQ ID NO: 80995 - DNA, 511 bp, Homo sapiens
tcttcctctggtcaatttaactcaattaaattgctagatcttgagggtgctgagatgaatgaaacatagttctgccctccaggaatctgaagcgtagttggtagacagagatataaacaattaatgatggaacagtaataaaatatgattaaaatgataatagaaacatgtttaaaatttagtaggaaaacagatgagagagcgattacttttttaagaggtagagggctctcatgaaaaattatgtatcgaaggtgacggttaagcttgaccttgaggggtgtttagaagttcaacagtgaaagtggtggagaaagaggtattacaggaaaggacccagtaggggtctttcttctcattcctgccaaaggcttaaagtttccagttgctattcagcattgcatttcccatgacctgactagatttctcactcgttcctctttgggtctgagggattaaagtgctattggaagagaggcattgggaaaggagagctggctggttttcsgta

SEQ ID NO: 80996 - DNA, 961 bp, Homo sapiens
ggggacgagagaagaattaagaccaacaagtcaatccaccacagtgcactactttgatcataactttcctctaacatgcaaatgtccttacccccaacccagggtcccaaagggcttgattggatctgcaggatgtcatggagacctgtagactaaaatggcaagtcgtttgcaccttaaatacccaacactcagaggcagaacaggaaggaaataaccaaaataaaawcttccatctcacattctcctatttcttttcacatgccactggtcacagcaagtcacatggccaaaactaaagccaagggatactcatgatgaggccatgacacagtagggatacagaattggggacaatactttaccccagtataaacagaaatggaaggatggttgttcttccatttatatcatctgccttgaccaccacttctgaaacgggctttagaaaaatgccctttttttcatctgagcaagtttctcagaatgctttcagcctggaaaaagctgggggctcagaggtctttttacatttcaaagagccacagtcctttatattcaaggccagaagtatttttgtcaataatactttcgaaaaaactttctgagttttacaaattaaaaacaaggaattttaaaagtggcaagaaaacacatttttttttgttgccctagaaaggtgagctaaaggaacaaatttttcttaatgactatctaaaaaaacaattttgaagatgtggtcaaaaagattgaataggaatgtatcccatacatatttccttatagatagttttacggataagtaattcaagatttggaccaaaatatatataaactaatgtataacaaatattagcttggtagtagtgtattgaaattgatattttaatttccccaaatctttgtgaggatggcagattaaacagggtgtttttcagtgaaaatataatttgtatattta

SEQ ID NO: 80997 - DNA, 543 bp, Homo sapiens
tgtttactacagcccaatttcaatgatccttctgggcatactaagagcgtgtgatcctcaactgtatccattaaagcctgggagcatgacaatctcacraaggttcaataggcacagagtggggatggcctgtaggatttgtacctgaatatttctaaatggcttctttagatgcaaaagttatataaaatgactacaattgcctccactatctggttcaattaaatgaaaccaacttacctgagcacatagttatttggactgttgtctagaggagaaggaaagaagcaaatgacaaccagggaagccgtgatccagattttttttaatggaatgaaagccaataggtaagcaataactaaaatctgtcctagagtaggtcacatcaacacattgagtctagtcataatagatccttgggaaacacactgaattcctttgaattgaatctgcgccccctccacatttacagtattctacaggtgttgacatgaacatgctggagggctaagcagttcttgaatgttaatcgtggcataggtc

SEQ ID NO: 80998 - DNA, 1159 bp, Homo sapiens
attttttgactttaaaaaagtgacagagctgggcaattttatttggggaaagtgaggacttaataagcacacatatcttgttttcctcattcttttcccatctttaaaaatatgtattcgtatgttttcatatggctgtaatctgggtgtgtgcattgttttgtgttctatttcttgcatgccagtactttctatgcacatttccatataatgacatagactatatattttccatcattgcctaagtagcattctatcacgttaagataaatgtaatgtgcttttccatttctatagttgagaatttggattgtttcaaattagctacgtacactaataaacattgagcaaatcaggatttcactacctggattatcctctttcattttagtggttattttcctactaaatattatgaacagttctgtgtatcatattaaagctttctttgggaggaaagtcggaaggaaagctttattctgaattaattctttgtaagcaaattttaattcaaatatagaagcagcaattacttttcataaccactttatttttcaatctatggggcatttcagaatcacagagtaaaagcaagaactttggaagtaacgtatcgtacacttattacataccagataccaagttaaagaaaatgagccctgtaacaggaactctgcgagcgaaatactaatactttgcacttgtatttgcatatgacattttgcatttcaaatgttttatctttagttattatcttgaattattcctttatatcatccaggtggttttgtaaaataaaagaggacaaatccattgacttttgttttatattactctgccttgtggatgaggcactgaaaacatacggaacttatgcaaaatcacatggttaattcttggtcaagccagaataaaaactcattttagtgacttcttttcacaattttgtgcttgagactatatcaatctccccaaattaggaaggtaaaccaattcactcatgtgaaagcttaatttgtatgctacttatcataatcggattaataaactcctcttagtcttgccagcatagaatcctattattttcaaatatcttgtcattaaaaacattatttcccaatggaaaaatgagsaaaggccataatttaaaatttcattt

SEQ ID NO: 80999 - DNA, 979 bp, Homo sapiens
agacagaatgttcatctgtatcctctgactctaaagcttccaactacttcccataattttgtttccctgttcaataagcaaaatgccaatgtaacaaggtaccataaggcaaaattttctcttagaattttgctatcacaaaattcctgtccctttcccatacctctttcacatttagagtacttaatcagtggttaaaactaaacatagagcaggccttgcttcagttttctacctttgggataaactacttaaactgacatcyaaagtacttgaagactttgtgaaggaaaagatcaggaaacgttgaggacaaaccatatggaatttagaggaaaagtagctataagtaagagggatttttgaacatgttgacatttaatgaatatgtaatgttttatgcaaataaacatacataacttttttcactgaatcagtacttctgataatcagaatctgataccattgtcacttggtttaaacagaaatattttgagtaattcaataacaattcaaccacgtgactattctatttaggaagcagtctaattgttacaataatcaacatccataagctaacaatatgcgtctgaatttcttaagcagatcatgattatgcaatgttttcagcaatacagaacaactgaaatacaagatatttgaactggattattccctccatgattcttttctaatatttaaaatgatacttatttctgtcccattaatgttcctccttcaactctgatgtgtaaaggcatctcatacttcaaaataccaaaaaaacgaaatatgactgttggttctttttcctcccacccacaacaataacacctacttcacattaagtcatatttagtttgaacagctgtccctatttgcctaggactaagggttttcccaggacacagctctttcagtgctgaaactgggaaagtctgagacatgccaggatgagtaaatcacactaagccatcat

SEQ ID NO: 81000 - DNA, 979 bp, Homo sapiens
agacagaatgttcatctgtatcctctgactctaaagcttccaactacttcccataattttgtttccctgttcaataagcaaaatgccaatgtaacaaggtaccataaggcaaaattttctcttagaattttgctatcacaaaattcctgtccctttcccatacctctttcacatttagagtacttaatcagtggttaaaactaaacatagagcaggccttgcttcagttttctacctttgggataaactacttaaactgacatctaaagtacttgaagactttgtgaaggaaaagatcaggaaacgttgaggacaaaccatatggaatttagaggaaaagtagctataagtaagagggatttttgaacatgttgacatttaatgaatatgtaatgttttatgcaaataaacatacataacttttttcactgaatcagtacttctgataatcagaatctgataccattgtcacttggtttaaacagaaatattttgagtaattcaataacaattcaaccacgtgactattctatttaggaagcagtctaattgttacaataatcaacatccataagctaacaatatgygtctgaatttcttaagcagatcatgattatgcaatgttttcagcaatacagaacaactgaaatacaagatatttgaactggattattccctccatgattcttttctaatatttaaaatgatacttatttctgtcccattaatgttcctccttcaactctgatgtgtaaaggcatctcatacttcaaaataccaaaaaaacgaaatatgactgttggttctttttcctcccacccacaacaataacacctacttcacattaagtcatatttagtttgaacagctgtccctatttgcctaggactaagggttttcccaggacacagctctttcagtgctgaaactgggaaagtctgagacatgccaggatgagtaaatcacactaagccatcat

SEQ ID NO: 81001 - DNA, 995 bp, Homo sapiens
aaatattaattctatgaaagatggtttcacagcaggtataaatatctaaagctgtagttctttactgatgccaaggaatccatactatttgttgtttaaattgaaagtcagttctcttgtgactgtaccttattcagttatattttgactttgacagacagtatttttcctcatgcaaccttttctgaagctgaacagacaacctccataaacaaataattgatacttctctagaaaatataagccttaaggtacaatattctgtctttggaaatagtaaaaatatatacaaggaataagctggtttataacaagaaagccaactattatttcaaatctccagactaacactttcaccttttcactttattccagataactgctgcatgaaggtaagtatgggggaaaaaggaatctgacacaaacttggtttctagtgtactctggaatgagatgatcagtgctggatcggaccctgatccaacttgggtcaaccatgctcttttccatgggaattttaaagtcagactgagagaaagaatggctaaccctgctaaacataaagtcaacatctatgagttgttttcgacaaatcatctaccatatattttttctttaggaaaatcaggggaagcctatctcaaaggcaaaaacaaaataagcaaacaagcayagagtgacaaacaagatgtgcaaaaggaataccagggaaaactgcttatagttcacttctgtgttctggaaaaatccctgactcaaagttcattgagatacctctgaatcctgatattaaatatcacccccacattttgtatgtatagtctaacgcaagtaatgcagtttccctgactagcaacagcaatcttttctaatcattaattttaaaatgtggaaaaaaagatcttactgctagtgatcaaaaatgtaaaatctctggtaataataaacttaatacaatgttataaatgatatgggattttatatcaaaatataat

SEQ ID NO: 81002 - DNA, 1886 bp, Homo sapiens
gctttataggtaagtctggaaatagggtgatgagataggagactattgcaataatccagtcaagaaataatgatggctaattacagaattgtaatgatggaagtggtgagaagtcaagtcctagatatagtttgaaggtggagccaagagaattagattcaatggatagaatctgaggtctggaaaaaagagaggagtcaagacttattccaagatttgtccctgagaaactggaagggtagagttactattcattgtgatgaaaaatactatgtaaaaagaaaacttcaggagggaaatcaagagtatatgtgtggacatgttaactgtgagatgcctttgggctatccaagtggagatactgagtagaaaatgatgatatcctggatgataaaggaataaagtaattcagaagagggagagggatcaactgtgtcaaaggccactgatatgtcraaaacataaaagactgagaattgaccaagggatttagaaaacagaaggacattggtggtcttcataagaaaagttctagtatagcgatagtgtaaaaacctgatggagtgggttcaggaagaaataatataaaagatttgtatatctacatatagctgtcagtgcaggtatcaacctagataaatcctagctctggcaaaaaaaaaaacctagaaacaaaaaataactcagtagcaatgcatttctctagcacccaggtcgtagtcttcaaataccatttcccataaaaggtacaagggatccttagagaaaaacactgatgcaaaatctgcagccaaaatgtacaagattaactggagacattgtgtcatatcagctagcagagaagctttctggttcccagggtcatgccagaaggacttgtgagagtttcaccaggatgaactaactggttccacactaaacttcctgctacaaacacctaaaaaacagggtgaaatatttgaacctctatttttaaacactggacagcctgcaatacaggacaggatcctggagaggaaagaaacaaagttagtgtcccaggctctcaattcaaaagacagagattggagttagacagatggaaaaatctggaatttgacaggcagagtactggaaaggagttaagccaacagagagcttcagaaatatggctaggggtgtctgagtctatgactgaatattaagtccagatgcctaggtcaattctgagatgtaaggaaatgaacaagtcctggagagttggcagtgtgaacacatctaggagacattggagttttgatcaaccagagtggagaatatactagccattcagtacagatcccaaaatgtccatactttagaaataggacaaatctcatcctagaataaatgctacttctgacatacgttagtagaaaactggtaaataaaagaatatctagcatgtttctggtatttcctatccgaactgtaccaaaatgtatatgttgagaaatttacactttctaaagctcaccagctggaaatgaaggaataagaatactgctgttttacaaactgtaacaaactaaaagatctggactttgagcatcaatgactcctaatgtcacaaagaggaagccatcagacattatgtgcctgccgatggaagaatatatcaccatctatgagtatttttatcaaaaatctcaaaatgtataaacttgaatctgattaatcttctaaatacaagtaccaatgtatgacaaatacagaagaagaaagaagaacgtattaatgataccataaggatacaattggaaatacccagattcttagaaaatgcagaacaaaacatctgatttatttcacagatatattgaagaaaaaaaagacaaagggggagcctatagatgacaagaggcaca

SEQ ID NO: 81003 - DNA, 655 bp, Homo sapiens
tcaaagaaggttaatgtctgaatcatccagagagtgcaaactttgcagccatggcaagaatgcaatatatctgtggctgcagagtcaaggggtccctgaagtttgaaatagaagtaatgatgcccctgccacttgatakagagcttttggtggagaaaaaagaaaaagatgggagaggggaatttgtttggttgagctgtgagcttagtgtaaaagacaatgtttccttccagagcaaagggcatttatgtagacttcttactatgaaagatccaggtgttctatgtacaggttcttctcctgaaacacaacctactacatatttgggtgccatctagccctctttggctcatcctgtgggaattagggctcagggggctgagggctgtgttgctgctgttggtaataaactgtcctctgtctcttatccaagagtcttgtgtcctctgttcacatttatgaaatggtggcaggctaacttagcttgcaagtagggtaaaatttcagccccttaacagttcttgacaccagacaaatttatgacttctgtaagaatttaagaatttgaatacatgcatactgtgtgtgtgtgttctaaagttgttgtttaggaaaatgtataagatagaaacacttcacaaaggtaagtaaaatg

SEQ ID NO: 81004 - DNA, 860 bp, Homo sapiens
tgcatgagccaaagaaactggctcatgtgttatgaatagatttgttctctgtaaatataacttcaaaaatactatgaaaaaagtatatgtatttaggttcaggaattccagaactgggtactttgctttttcacccttcatttttcttttttctgaaagatttcatctcagacttataaatggaaacaaaacaccttgggaaaagaaagaagtagtattgattaatttcttctatatattattctagccccctttagtcagaaaatagctaagagtactgttcttttggcatttggagtaaaactagttcctaacattcttttttgagtgaacttatatctcagacaccaaggaacaaatgagaagtgtaaaaacagcactgcctctaccaactcccactatttttctgtcttgaaacactttttaaaagttcaatataaattacctgacaatggcatttgcagctgtggcaaggtgatgggaagtggatttcttttgccaagtttcctttgaggggtgccggtagcagtcctttctaactctgtggttatacccrgtgcagcacagatagtctccaggaactgttaatcctttccttgcagcaaatttacagtggcagccaaggaaaacagaaatcaatgtgacttgatgggaagaaggagatgattgccaactggaagatggcagtggaaagataaacttttacaaaagaaatagatctaacttgtcaggaaagcatgcacctgtatgaaaattcatgaagcaatgtgtagaaatgcgatgatgagttgggtgatgataaaaggagagagaaatagaattgatattgtcatggaagtcagctttacactaaatggcca

SEQ ID NO: 81005 - DNA, 714 bp, Homo sapiens
ggatcctttgtagtatttctttcttaactggtgtttttagcaccttccaattttgtattgtctgagaactaaacaaatgtgagcgtggtagaactcaagcagctgtatgtatttaactacaaggttggatgctcaattcgtgcactgagtatgcaaccatcaggaaagctctgaaaggaaaatctrcaaagcttccagcatattttattaatgaccagccagacaccatagcccacaccagggagatgaggacctaattaattaggcataatactacttagcacttaccattttcaataaatattactacatgaatgaaagaatcttcaaaagactcctgtgaagcaggaactattaatcctattttacagctggggaaacagaagcagaaaggttcttggattttcctaaagctacgaaaagtggtggcatcaattcccaatttggctttctcagagctggctccctaggctatttttagaggctggttttcacaaaggtcaaagggctatgtatcataacaatacactagatgcatggaagtgcaaggctagtgtcaaaagctttgtatgagcaaattgctcatttgcctctcccacttcctttgagggcagggattatatgttatatacatgtaccagcaagcagcacagtccctggcgcatagtaagtgctcagtaaatatttgttcattcattctttaaacaacatatt

SEQ ID NO: 81006 - DNA, 714 bp, Homo sapiens
ggatcctttgtagtatttctttcttaactggtgtttttagcaccttccaattttgtattgtctgagaactaaacaaatgtgagcgtggtagaactcaagcagctgtatgtatttaactacaaggttggatgctcaattcgtgcactgagtatgcaaccatcaggaaagctctgaaaggaaaatctgcaaagcttccagcatattttattaatgacyagccagacaccatagcccacaccagggagatgaggacctaattaattaggcataatactacttagcacttaccattttcaataaatattactacatgaatgaaagaatcttcaaaagactcctgtgaagcaggaactattaatcctattttacagctggggaaacagaagcagaaaggttcttggattttcctaaagctacgaaaagtggtggcatcaattcccaatttggctttctcagagctggctccctaggctatttttagaggctggttttcacaaaggtcaaagggctatgtatcataacaatacactagatgcatggaagtgcaaggctagtgtcaaaagctttgtatgagcaaattgctcatttgcctctcccacttcctttgagggcagggattatatgttatatacatgtaccagcaagcagcacagtccctggcgcatagtaagtgctcagtaaatatttgttcattcattctttaaacaacatatt

SEQ ID NO: 81007 - DNA, 1238 bp, Homo sapiens
tctcttaatctcccagggaagttttcttccctgcaagcctacttggttccaggtcccaaatgagcggggaggatgagcccgtgaaggtggggtggttgggagaagggctgcacagcggcagagactgagggaaaccccttttagctctggccaaactaggaagaacaaggaggaaggagtgggaagagtaggtgaaatgggtgggtcacatcttaccatgaactgaactccaagtcactgtacatgaaactgtgacttgaggaattatatagctgaccagggccatggccttcaaacccttcatagaaaaccctccacatatacaaaagcaggacattttggggtcaactgatgattatttttcttattactcttgcgagcattttatattatttacatcagttactgagcattttgttgttttttaaagcagagtcttgctctgtygcccaggctggagtgcagtaatgcaatctcagttcactgtaacctctgccttctaggttcaagtgattctcctgccttagcctctccactgggagtagctgggattacaggtatgcgccatgacgcctggccaatttttgtatttttagtagagatggggtttcaccctgttggccaggctggtctcgaactgctgacctcaagtgattcgcttgcctcagcctcccaaagtgctgggattacagggttgagtcactgagcccggccactgagcgtatttttagtgcaaaacatatctaacatgtttttaattgccacaacaaccacatgaggaaaataatataattcctactttatagattaggaaactacaggtttagcaacttgcggaaggccatacagctagtaagtttggtcttttccatagactttgccattaatctctattaaaaatagctttgttgaggtatgtttgacattcaataaatgtgtatctttaaaagggggtaaattgatacgttgtgacacatgtgtacccccatgaagccatcacttcaaagaagaaaaaggacatttgtcaccccagaaaggtctcctcaagcttctttgtaatctctccctgccctttccccctctgccaaccccaaaccattcccaggtgaccccgatctgctttttgccactacacatcagtttgcatttcccaggattttacataaacggattcatacagtatgcactctctctttctttaaagcctggcttctttcactcaacgtagtcaatttggg

SEQ ID NO: 81008 - DNA, 743 bp, Homo sapiens
tgtgtgtgtgtgtgtgtgcatgtgtgtcttctccttttctgtcttttctaaggacacttgtcattgaatttagggccagcctaggtaatctaggatgatctcgtctcaagatccatgacttaattacatctacaaagacttttttttcaaataaggtcaccttcacaggttccagggataagagtgtggacatatcttttggggggcaccattcagcccactgcagcatgttttttttaggagggcatgtagaggaaggagacaaagtgcctgggtggagaggaagccactgtgggtcttctgtgggaatggcgtcacacgcttctcccatgtgtggcttgtcatatgaccactctcaccctttcaactcagccttgtatgcaactatgtgccaaacactgtttatttcttttaagcatcatgaaaaggggacaagaaaggctttaytctccccagcttacaaataaggaaatagaagccaacggtgtctaagtacctgagggcactcagctagacccagtggagtggctctgagtctaggccacggactccaatgcctgaggactgggctttaatcattacatttgtctttgtgagtgtattagtctgttctcacactgctaataaagatgtacccgagactgggtaatttataaaggaaagaggtttaatggactcacagtccaacgtggctggggaggccttacaatcatggcagaagatgaaggaagagcaaaggcatg

SEQ ID NO: 81009 - DNA, 857 bp, Homo sapiens
cacttttctttctcagcttccccagggggagaggtgggtgtactggcctcctcctgcacagagcagacagggaggggatagtggggcagggccagacctgcatcttgggctgcccttgcaaaaaccgagtgccactccatgtcctgcagagaggcctgaagcatgggctttcccaagctgcttttaagttcccggtscagtgacagttaggtgagtgactgagatactgcaaagtgacccctttgcagaggcggcaggtggacttccaggctggataggaatatgacagacactcagccgagctgggagaaagcagactgtgtgttatacccaagctggaaatcagcatgaattccagcaaggccagcacaatcagccaaggaaggggcattgtcttagagaactgagaaacagaggacagaggcttgggaccccaagacgtcctctgggaccttccaggcccctatgagccactctcctcctgcacactcaggaaccatccgagagggggaagctgagggaggggacggctgcatgagagactcaacatgtcaatccagaaagagtgagtaccatctaaaaggactaatcaattactggattgggctaaattttaagccagagagagctaaaagttttacttttcctactatcatggaggaggggcgcagaagaaagacaagatgctttccagataacagaggggttttctctaaacacaagaaggatttgagtatgtgacctgtgaccacaccacagatccatgctacgatcacttgactgcttgaatgcagggaggtaagagaactgatcagctctgccctggtatttaatattcagtagtgtacacacacata

SEQ ID NO: 81010 - DNA, 857 bp, Homo sapiens
cacttttctttctcagcttccccagggggagaggtgggtgtactggcctcctcctgcacagagcagacagggaggggatagtggggcagggccagacctgcatcttgggctgcccttgcaaaaaccgagtgccactccatgtcctgcagagaggcctgaagcatgggctttcccaagctgcttttaagttcccggtgcagtgacagttagstgagtgactgagatactgcaaagtgacccctttgcagaggcggcaggtggacttccaggctggataggaatatgacagacactcagccgagctgggagaaagcagactgtgtgttatacccaagctggaaatcagcatgaattccagcaaggccagcacaatcagccaaggaaggggcattgtcttagagaactgagaaacagaggacagaggcttgggaccccaagacgtcctctgggaccttccaggcccctatgagccactctcctcctgcacactcaggaaccatccgagagggggaagctgagggaggggacggctgcatgagagactcaacatgtcaatccagaaagagtgagtaccatctaaaaggactaatcaattactggattgggctaaattttaagccagagagagctaaaagttttacttttcctactatcatggaggaggggcgcagaagaaagacaagatgctttccagataacagaggggttttctctaaacacaagaaggatttgagtatgtgacctgtgaccacaccacagatccatgctacgatcacttgactgcttgaatgcagggaggtaagagaactgatcagctctgccctggtatttaatattcagtagtgtacacacacata

SEQ ID NO: 81011 - DNA, 857 bp, Homo sapiens
cacttttctttctcagcttccccagggggagaggtgggtgtactggcctcctcctgcacagagcagacagggaggggatagtggggcagggccagacctgcatcttgggctgcccttgcaaaaaccgagtgccactccatgtcctgcagagaggcctgaagcatgggctttcccaagctgcttttaagttcccggtgcagtgacagttaggtgagtgactgagatrctgcaaagtgacccctttgcagaggcggcaggtggacttccaggctggataggaatatgacagacactcagccgagctgggagaaagcagactgtgtgttatacccaagctggaaatcagcatgaattccagcaaggccagcacaatcagccaaggaaggggcattgtcttagagaactgagaaacagaggacagaggcttgggaccccaagacgtcctctgggaccttccaggcccctatgagccactctcctcctgcacactcaggaaccatccgagagggggaagctgagggaggggacggctgcatgagagactcaacatgtcaatccagaaagagtgagtaccatctaaaaggactaatcaattactggattgggctaaattttaagccagagagagctaaaagttttacttttcctactatcatggaggaggggcgcagaagaaagacaagatgctttccagataacagaggggttttctctaaacacaagaaggatttgagtatgtgacctgtgaccacaccacagatccatgctacgatcacttgactgcttgaatgcagggaggtaagagaactgatcagctctgccctggtatttaatattcagtagtgtacacacacata

SEQ ID NO: 81012 - DNA, 857 bp, Homo sapiens
cacttttctttctcagcttccccagggggagaggtgggtgtactggcctcctcctgcacagagcagacagggaggggatagtggggcagggccagacctgcatcttgggctgcccttgcaaaaaccgagtgccactccatgtcctgcagagaggcctgaagcatgggctttcccaagctgcttttaagttcccggtgcagtgacagttaggtgagtgactgagatactgcaamgtgacccctttgcagaggcggcaggtggacttccaggctggataggaatatgacagacactcagccgagctgggagaaagcagactgtgtgttatacccaagctggaaatcagcatgaattccagcaaggccagcacaatcagccaaggaaggggcattgtcttagagaactgagaaacagaggacagaggcttgggaccccaagacgtcctctgggaccttccaggcccctatgagccactctcctcctgcacactcaggaaccatccgagagggggaagctgagggaggggacggctgcatgagagactcaacatgtcaatccagaaagagtgagtaccatctaaaaggactaatcaattactggattgggctaaattttaagccagagagagctaaaagttttacttttcctactatcatggaggaggggcgcagaagaaagacaagatgctttccagataacagaggggttttctctaaacacaagaaggatttgagtatgtgacctgtgaccacaccacagatccatgctacgatcacttgactgcttgaatgcagggaggtaagagaactgatcagctctgccctggtatttaatattcagtagtgtacacacacata

SEQ ID NO: 81013 - DNA, 857 bp, Homo sapiens
cacttttctttctcagcttccccagggggagaggtgggtgtactggcctcctcctgcacagagcagacagggaggggatagtggggcagggccagacctgcatcttgggctgcccttgcaaaaaccgagtgccactccatgtcctgcagagaggcctgaagcatgggctttcccaagctgcttttaagttcccggtgcagtgacagttaggtgagtgactgagatactgcaaagtgacccctttgcagaggcggcaggtggacttccaggctggataggaatatgacagacactcagccgagctgggagaaagcagactgtgtgttatacccaagctggaaatcagcatgaattccagcaaggccagcacaatcagccaaggaaggggcattgtcttagagaactgagaaacagaggacagaggcttgggaccccaagacgtcctctgggaccttccaggcccctatgagccactctcctcctgcacactcaggaaccatccgagagggggaagctgagggaggggacggctgcatgagagactcaacatgtcaatccagaaagastgagtaccatctaaaaggactaatcaattactggattgggctaaattttaagccagagagagctaaaagttttacttttcctactatcatggaggaggggcgcagaagaaagacaagatgctttccagataacagaggggttttctctaaacacaagaaggatttgagtatgtgacctgtgaccacaccacagatccatgctacgatcacttgactgcttgaatgcagggaggtaagagaactgatcagctctgccctggtatttaatattcagtagtgtacacacacata

SEQ ID NO: 81014 - DNA, 857 bp, Homo sapiens
cacttttctttctcagcttccccagggggagaggtgggtgtactggcctcctcctgcacagagcagacagggaggggatagtggggcagggccagacctgcatcttgggctgcccttgcaaaaaccgagtgccactccatgtcctgcagagaggcctgaagcatgggctttcccaagctgcttttaagttcccggtgcagtgacagttaggtgagtgactgagatactgcaaagtgacccctttgcagaggcggcaggtggacttccaggctggataggaatatgacagacactcagccgagctgggagaaagcagactgtgtgttatacccaagctggaaatcagcatgaattccagcaaggccagcacaatcagccaaggaaggggcattgtcttagagaactgagaaacagaggacagaggcttgggaccccaagacgtcctctgggaccttccaggcccctatgagccactctcctcctgcacactcaggaaccatccgagagggggaagctgagggaggggacggctgcatgagagactcaacatgtcaatccagaaagagtgagtaccatctaaaaggactaatcaattactggattgggctaaattttaagccagagagagctaaaagttttacttttcctactatcatggaggaggggcscagaagaaagacaagatgctttccagataacagaggggttttctctaaacacaagaaggatttgagtatgtgacctgtgaccacaccacagatccatgctacgatcacttgactgcttgaatgcagggaggtaagagaactgatcagctctgccctggtatttaatattcagtagtgtacacacacata

SEQ ID NO: 81015 - DNA, 1679 bp, Homo sapiens
ctgccataacatacatctgtatgtgtatgtatatatatatatatattttgagacggagttttgctcttgtcgcccaggctggagtgcaatggtgcgatctcggctcactgcaacctccgcctcccgggttcaaatgattctcctgcctcagcctcctgagtagctgggattacaggctcacaccaccatgcctggcaaattttttatatttttagtagagatgaggtttcaccatgttggccaggctgatcttgaactcctgaccccaggtgatccacctgccttggcctcccgaagtgctgggattacaggtgtgagccactgcgcccggccccggtatatttttaataaggttcgccacggaatttttatttatggtaagtagtcacagaagaaagtgctcaggatggtttgatagcagaatgtattctctttgtaatactactttaccatttattatatgtttattcattcagcaaatatttgtcaaactgaggattcaatgcttaacaagacaggcatggggcttctgtacacacttgttatttttatgattggaaaatgaattgatcctgttttaacagaaatagaaacatctgctgattgagtgagggaatgacagctttctgggctgtctgtagattgcttctatctggtgcccttcccagcagcctggcctctctagggctgccttggtatccctgtaattcaggggtccgttaggtgggtttctccaggccttcctaccagctgctccctttgaatgttactgagtatcccaggagaggaggctacacaatcaagtgacttcaggggccactgcacattgcagccttatcttggagatgataccatacacatcagcatattcaaggttctgataagtcctgcagcaagaatgacaaaaagccagagcaaacacctgcttttcttttttttccatctgtgtcttatccagtggtgttttgtgagcccccaaaaggaaggctttttatctagttcctaatgtacttgaccatggaaccttttttccatgtagaatctccttccttcaatcccaaaatatcatatatctactttgtggcaggcaccatgatggatcctgggaatgatgataatgaacgcaatagatacagcctctattcttagacatcttgcatgtatcagggaagacaggcaccaaggcatacttacaaccaaagcattccacgaccatgtgatccaggagaattccagggtcaagagccagggtattggaagccaacctgtctacaggtgaccaacactgaacttactttgggaaacactgttctagggtaagaggtctcatgtatttttggtggggagatcttttcatgactgaaagactcaaaaggccatttttatcctctgccgttgcatattcttctagaagaatgtttctgcttctgtgagaygcaaaaaagcaatgttcagatttgtattacctttatacgcaaatcatttcacatcaggaacgaatgcagcactttcaaattgggagtcacaaaagcctgctgaaaggtgtttgtggagtgcagggtgggaaggtccttgtattagttcattttcacactgctgataaagacatacccaagactgagtgattcataaagacaaagaggtttaacggactcagttccacatggctggggaggcct

SEQ ID NO: 81016 - DNA, 692 bp, Homo sapiens
aaggcatgaaaggacctgcagccacggccccatacgtttcaagaraggcaaggctttcaccctccgtgtctttcacagccatccgcccacagcctcttaacttcctgacattaaacaaaaacgaaaccgaggtttccctaattggggatcatcatcaagaatctgtcatggggtctcttagaaattaattcaactcgattgttcttcagacctccgctaaggagccggcgtgttactctcgacaccaacttgtcccatcttcatcctatattagctccctaacagggttgcacgatcagctcctaggctgcaaattagaaaaatgggcgatgattccagcagctacgcctcggcactctcacgccggattactgtgatggtctccttgcaaggcttccggatctttctatgtgggttgaaattggttccaactgtaacttcctgttgatctcccaccctgaattccctcattgatgcaacattttgttaaaaaagaacttcaccgaattacccatttcatggaaattgcaatagggtattgacttgtatagttaatgaagctttcaaaaaagcactcctgtagccatcatctaaatgcccctctggccaccaaaactgtgcatgtaattcactgtagtgaggattcctgagtctccctaagggagatccagtaggatcagttctgggtggga

SEQ ID NO: 81017 - DNA, 653 bp, Homo sapiens
cagaccccatggacaactggttacgtcttccatggcaaacctgaaaaggtgttccacgagttctttggtggaaacaaccccttcagtggtaagaggtcttcctcccccaccttgccttatagagaaaggacactgctataagtgatgttttcgttgagtagttttgtttttatttttactttattattttattttatttacttattttttttggagatggagactcactctgtttcccaggctggagtgcagtagtgggatcatggcttactgcaacctctgcctcccgggttcaaatgattctcctccctcagcctcccaagtagctgggactacaggcgcacgctgccacacccagttaattkttttatatttttagtagagacgaggtttcaccatgttgcccaggctggtttcgaactcctgagctcaggcaatctgcctaaggccttggcctcccaaagtgctaggattacaggcatgagccaccgtgcccggcctatttttactttaataaatatatataaaacacattgcaaaagaaaaagtaaaacagaattcattgaaaaagaaatacattccagccctccattttctttttctttctttcttttttatttttattttttagatggagtcctgttctgtcaccc

SEQ ID NO: 81018 - DNA, 1406 bp, Homo sapiens
tatcaaatggcattgcagaagttcccagggaggaggaaaaatttacacctgagagtgttagggaggaggtggcatttgaactcgtcttgaaggatggctaaaattgacagcctgtagatgatgaggcattccacgcagagggagcagtaagtgcaagaaaacgtggagcgtgtggagacagtgaggaaggcactggccatgrtcagtgtggtgctcaatggccatggcaggaggtccaggaggtctcaggattgctaacttcctctggagacaggcagtacttttacctattcctggagtgtttgttctcagtcaggcttccctaaccctccccatcaggtatggttcactttttttcttttacttgcatggttttttaaacttcttctttgtggcatttacatctgtactcttcaccgctacatcccaggttgacccacggtagccacattcgaaaagaaagaagcccctgttctctgggagggagtgctggaggcaggaggaggctcaccccttgtagaaggctgtggggcctcctgggccaccatctttatcatacagtcgagggggctgaagtactggcctggaggtgagttcatataccgggtcttcaccacgtccaccggggaggccaccactgtggcacagaagccggctccaaaggcagagacaaagtggcaggggaagttgtctgcagaggaaggacaagcaaatatcaaggagtgcatttgtgttctgtccatatgtatgcactgtttgtccccaactcaaccgtgaactccctgagcataggacagtattttccatatctctcacagtgccctgggctaagctcttggtaagtactggcaaactaggcctgggctgacccagaggtgggaggtcatgcaggctgtttgaggaaactgaagtcggagaaggtgagagacccctgcttaaagctatatagtgagaggtggtgctgggactggaacccaagtctccagcctcccagcccaggggtctttcctgcttgtcaccacaatgtacctggcactttttactaggcactgcttctctctctgctccttctaaaacccagttgcctctgggtggtgcccactccacggagttctgggttccctccctgctgagggagagctgcctgcctggagcccagggcctcaccagtgagcaggtggtagtccagcagcttctccttgaggatgtcgtaggtcaccacctcagcacagttgacgatagcattcctcatgatgttgggcaaagttcctgttaggaaggcggtggggagggatgtgaaatgggtggggagggaggaatgggaaatgggagaaatggatgccctggctgcaaggcacagccccagttttgggccatagtgccccattccaatggtctcagccaga

SEQ ID NO: 81019 - DNA, 909 bp, Homo sapiens
ccaaatattccaagtagtacaaagtccatactggcatacagaatatttagctgctacttgtttaagtagaatgcctgtagatttcatatgtgtatatgatttcctctaacagaataccagaaggagcaataaaagacagtatgtgttgaactaaatgtatgaacaggaaaaaaaagactcaagaacacaattctatatctggagaatagatgcagtgtcacataaactgcaaaggcttcaaaagccaaaataccaaaatatatctgcaaggttattggaggttaatttgcataactgggcataccgccygggcgtgcagtgatttcagtaactttccttcagaaaaacacctgcagatgcttgcctggaggcagaactatggttttaaaggatactgcctcttctctattcttaagtattagtagtaggataatgtatgggtcttttagttgcatggaaaaattacttttgcttgaacacagaaaaacagtaaatcaagaaatacctctcagaacttacaattactctatttttatttcttaaagaacaagaatgtgaataaaatcattatctctagttgaattacctgagataatatgtggaaccatcgagtaccatgcttggcattcacagatatttccaacagattgtaaataattttgttaagtactatttgtttctacatgtttgtttattttttatcattagattgaaaacttttggagtaagcaagtgcatctgaatgacttttttctgagggagctgacatagtaacgcagtaagcgtttggttaaacgaataagaatgtaagacaataaataaataaatccattagtttatggcttaaatcaaatacagatgctccttgacttacaatggtgttacgtcccaataaatctgtgttaagtt

SEQ ID NO: 81020 - DNA, 909 bp, Homo sapiens
ccaaatattccaagtagtacaaagtccatactggcatacagaatatttagctgctacttgtttaagtagaatgcctgtagatttcatatgtgtatatgatttcctctaacagaataccagaaggagcaataaaagacagtatgtgttgaactaaatgtatgaacaggaaaaaaaagactcaagaacacaattctatatctggagaatagatgcagtgtcacataaactgcaaaggcttcaaaagccaaaataccaaaatatatctgcaaggttattggaggttaatttgcataactgggcataccgcctgggcgtgcagtgatttcagtaactttccttcagaaaaacacctgcagatgcttgcctggaggcagaactatggttttaaaggatactgcctcttctctattcttaagtattagtagtaggataatgtatgggtcttttagttgcatggaaaaattacttttgcttgaacacagaaaaacagtaaaycaagaaatacctctcagaacttacaattactctatttttatttcttaaagaacaagaatgtgaataaaatcattatctctagttgaattacctgagataatatgtggaaccatcgagtaccatgcttggcattcacagatatttccaacagattgtaaataattttgttaagtactatttgtttctacatgtttgtttattttttatcattagattgaaaacttttggagtaagcaagtgcatctgaatgacttttttctgagggagctgacatagtaacgcagtaagcgtttggttaaacgaataagaatgtaagacaataaataaataaatccattagtttatggcttaaatcaaatacagatgctccttgacttacaatggtgttacgtcccaataaatctgtgttaagtt

SEQ ID NO: 81021 - DNA, 1213 bp, Homo sapiens
ggtataaggttaaaggtactaaactttggataagttactaaacaaaattcctctttakccacattacattgtaaaaattaaagcaagcaaataaaaaacagaacagcaaaacaaaaacaacaaacagccaaacaaatataccagagtgcgttcttccccatagttgccaatttgcttgctatctttgctttgcagtctaccatggcctccaagaataggttaaaaaaactacatgaccgaaagttgtggacctgactactggtaacttctgtcttaccagaagcagtataatagagtgggtcaagaacagtcactgggaccagatatcatcagtgttgtctcctgcccccatttatgtaactttggtcaaattacatgacaccttgtgtgtctgtttcctcatagggtcatggtgataatttcataggtaattagtataaaattctagctagaactgtatcaggtttggagtaatatatgagtccaattaagcttcagtatccttagctatgcaatgaaggaatgaacctaaatgatgatttctaacatatatttctgtctggaccctttatgtccctaagcatttttactcacattggatccagtgatcctaacaaaattattgcgagaaagactgaaagatattaataatcccagtaacaaataaggaagttgaggctcacaaaggttacaattgtttacctgatactacttgagcaatatatatacagttgaattcatatctttctatagtggcggctgtggtctgtaaccatctctcaccttcaagaccaagaccttcatttgctcagttactggaaattttggcaggtgacaggtctcagcagagtcctcctccagaatgaccatctgctgaagagagtcacctcacccaaagccctgctttcttccttgggcagtgcacatccaacatctggccatagtcggggtagaggtccagccctctacccttggtttgaaaggactctgcagggccttctatagctttccatgggttcctctgaggccactgctgtgactacatcttgtttgaactcctactcctgcttcctactcctttttttttttactgccccacaggtgtccattcaataaacttcctgcatacaaatatccacctcagagcatccttcttaaatcatctaacctgtaacactttggaatccttataggtctcttcttgtaagaatga

SEQ ID NO: 81022 - DNA, 1213 bp, Homo sapiens
ggtataaggttaaaggtactaaactttggataagttactaaacaaaattcctctttagccacattacattgtaaaaattaaagcaagcaaataaaaaacagaacagcaaaacaaaaacaacaaacagccaaacaaatataccagagtgcgttcttccccatagttgccaatttgcttgctatctttgctttgcagtctaccatggcctccaagaataggttaaaaaaactacatgaccgaaagttgtggacctgactactggtaacttctgtcttaccagaagcagtataatagagtgggtcaagaacagtcactgggaccagatatcatcagtgttgtctcctgcccccatttatgtaactttggtcaaattacatgacaccttgtgtgtctgtttcctcatagggtcatggtgataatttcataggtaattagtataaaatkctagctagaactgtatcaggtttggagtaatatatgagtccaattaagcttcagtatccttagctatgcaatgaaggaatgaacctaaatgatgatttctaacatatatttctgtctggaccctttatgtccctaagcatttttactcacattggatccagtgatcctaacaaaattattgcgagaaagactgaaagatattaataatcccagtaacaaataaggaagttgaggctcacaaaggttacaattgtttacctgatactacttgagcaatatatatacagttgaattcatatctttctatagtggcggctgtggtctgtaaccatctctcaccttcaagaccaagaccttcatttgctcagttactggaaattttggcaggtgacaggtctcagcagagtcctcctccagaatgaccatctgctgaagagagtcacctcacccaaagccctgctttcttccttgggcagtgcacatccaacatctggccatagtcggggtagaggtccagccctctacccttggtttgaaaggactctgcagggccttctatagctttccatgggttcctctgaggccactgctgtgactacatcttgtttgaactcctactcctgcttcctactcctttttttttttactgccccacaggtgtccattcaataaacttcctgcatacaaatatccacctcagagcatccttcttaaatcatctaacctgtaacactttggaatccttataggtctcttcttgtaagaatga

SEQ ID NO: 81023 - DNA, 1213 bp, Homo sapiens
ggtataaggttaaaggtactaaactttggataagttactaaacaaaattcctctttagccacattacattgtaaaaattaaagcaagcaaataaaaaacagaacagcaaaacaaaaacaacaaacagccaaacaaatataccagagtgcgttcttccccatagttgccaatttgcttgctatctttgctttgcagtctaccatggcctccaagaataggttaaaaaaactacatgaccgaaagttgtggacctgactactggtaacttctgtcttaccagaagcagtataatagagtgggtcaagaacagtcactgggaccagatatcatcagtgttgtctcctgcccccatttatgtaactttggtcaaattacatgacaccttgtgtgtctgtttcctcatagggtcatggtgataatttcataggtaattagtataaaattctagctagaactgtatcaggtktggagtaatatatgagtccaattaagcttcagtatccttagctatgcaatgaaggaatgaacctaaatgatgatttctaacatatatttctgtctggaccctttatgtccctaagcatttttactcacattggatccagtgatcctaacaaaattattgcgagaaagactgaaagatattaataatcccagtaacaaataaggaagttgaggctcacaaaggttacaattgtttacctgatactacttgagcaatatatatacagttgaattcatatctttctatagtggcggctgtggtctgtaaccatctctcaccttcaagaccaagaccttcatttgctcagttactggaaattttggcaggtgacaggtctcagcagagtcctcctccagaatgaccatctgctgaagagagtcacctcacccaaagccctgctttcttccttgggcagtgcacatccaacatctggccatagtcggggtagaggtccagccctctacccttggtttgaaaggactctgcagggccttctatagctttccatgggttcctctgaggccactgctgtgactacatcttgtttgaactcctactcctgcttcctactcctttttttttttactgccccacaggtgtccattcaataaacttcctgcatacaaatatccacctcagagcatccttcttaaatcatctaacctgtaacactttggaatccttataggtctcttcttgtaagaatga

SEQ ID NO: 81024 - DNA, 1213 bp, Homo sapiens
ggtataaggttaaaggtactaaactttggataagttactaaacaaaattcctctttagccacattacattgtaaaaattaaagcaagcaaataaaaaacagaacagcaaaacaaaaacaacaaacagccaaacaaatataccagagtgcgttcttccccatagttgccaatttgcttgctatctttgctttgcagtctaccatggcctccaagaataggttaaaaaaactacatgaccgaaagttgtggacctgactactggtaacttctgtcttaccagaagcagtataatagagtgggtcaagaacagtcactgggaccagatatcatcagtgttgtctcctgcccccatttatgtaactttggtcaaattacatgacaccttgtgtgtctgtttcctcatagggtcatggtgataatttcataggtaattagtataaaattctagctagaactgtatcaggtttggagtaatatatgagtccaattaagcttcagtatccttagctatgcaatgaaggaatgaacctaaatgatgatttctaacatatatttctgtctggaccctttatgtccctaagcatttttactcacattggatccagtgatcctaacaaaattattgcgagaaagactgaaagatattaataatcccagtaacaaataaggaagttgaggctcacaaaggttacaattgtttacctgatrctacttgagcaatatatatacagttgaattcatatctttctatagtggcggctgtggtctgtaaccatctctcaccttcaagaccaagaccttcatttgctcagttactggaaattttggcaggtgacaggtctcagcagagtcctcctccagaatgaccatctgctgaagagagtcacctcacccaaagccctgctttcttccttgggcagtgcacatccaacatctggccatagtcggggtagaggtccagccctctacccttggtttgaaaggactctgcagggccttctatagctttccatgggttcctctgaggccactgctgtgactacatcttgtttgaactcctactcctgcttcctactcctttttttttttactgccccacaggtgtccattcaataaacttcctgcatacaaatatccacctcagagcatccttcttaaatcatctaacctgtaacactttggaatccttataggtctcttcttgtaagaatga

SEQ ID NO: 81025 - DNA, 1213 bp, Homo sapiens
ggtataaggttaaaggtactaaactttggataagttactaaacaaaattcctctttagccacattacattgtaaaaattaaagcaagcaaataaaaaacagaacagcaaaacaaaaacaacaaacagccaaacaaatataccagagtgcgttcttccccatagttgccaatttgcttgctatctttgctttgcagtctaccatggcctccaagaataggttaaaaaaactacatgaccgaaagttgtggacctgactactggtaacttctgtcttaccagaagcagtataatagagtgggtcaagaacagtcactgggaccagatatcatcagtgttgtctcctgcccccatttatgtaactttggtcaaattacatgacaccttgtgtgtctgtttcctcatagggtcatggtgataatttcataggtaattagtataaaattctagctagaactgtatcaggtttggagtaatatatgagtccaattaagcttcagtatccttagctatgcaatgaaggaatgaacctaaatgatgatttctaacatatatttctgtctggaccctttatgtccctaagcatttttactcacattggatccagtgatcctaacaaaattattgcgagaaagactgaaagatattaataatcccagtaacaaataaggaagttgaggctcacaaaggttacaattgtttacctgatactacttgagcaatatatatacagttgaattcatatctttctatagtggcggctgtggtctgtaaccrtctctcaccttcaagaccaagaccttcatttgctcagttactggaaattttggcaggtgacaggtctcagcagagtcctcctccagaatgaccatctgctgaagagagtcacctcacccaaagccctgctttcttccttgggcagtgcacatccaacatctggccatagtcggggtagaggtccagccctctacccttggtttgaaaggactctgcagggccttctatagctttccatgggttcctctgaggccactgctgtgactacatcttgtttgaactcctactcctgcttcctactcctttttttttttactgccccacaggtgtccattcaataaacttcctgcatacaaatatccacctcagagcatccttcttaaatcatctaacctgtaacactttggaatccttataggtctcttcttgtaagaatga

SEQ ID NO: 81026 - DNA, 1213 bp, Homo sapiens
ggtataaggttaaaggtactaaactttggataagttactaaacaaaattcctctttagccacattacattgtaaaaattaaagcaagcaaataaaaaacagaacagcaaaacaaaaacaacaaacagccaaacaaatataccagagtgcgttcttccccatagttgccaatttgcttgctatctttgctttgcagtctaccatggcctccaagaataggttaaaaaaactacatgaccgaaagttgtggacctgactactggtaacttctgtcttaccagaagcagtataatagagtgggtcaagaacagtcactgggaccagatatcatcagtgttgtctcctgcccccatttatgtaactttggtcaaattacatgacaccttgtgtgtctgtttcctcatagggtcatggtgataatttcataggtaattagtataaaattctagctagaactgtatcaggtttggagtaatatatgagtccaattaagcttcagtatccttagctatgcaatgaaggaatgaacctaaatgatgatttctaacatatatttctgtctggaccctttatgtccctaagcatttttactcacattggatccagtgatcctaacaaaattattgcgagaaagactgaaagatattaataatcccagtaacaaataaggaagttgaggctcacaaaggttacaattgtttacctgatactacttgagcaatatatatacagttgaattcatatctttctatagtggcggctgtggtctgtaaccatctctcaccttcaagaccaagaccttcatttgctcagttactggaaattttggcaggtgacaggtctcagcagagtcctcctccagaatgaccatctgctgaagagagtcacctcacccaaagccctgctttcttccttgggcagtgcacatccaacatctggccatagtcggggtagaggtccagccctctacccttrgtttgaaaggactctgcagggccttctatagctttccatgggttcctctgaggccactgctgtgactacatcttgtttgaactcctactcctgcttcctactcctttttttttttactgccccacaggtgtccattcaataaacttcctgcatacaaatatccacctcagagcatccttcttaaatcatctaacctgtaacactttggaatccttataggtctcttcttgtaagaatga

SEQ ID NO: 81027 - DNA, 1514 bp, Homo sapiens
cccccccaccccacaaacacacacacttccccactgaccgtcatcttctccagctctgggtaagtgtacctcgggcctcagctccctcagatcctatgatggcctgcctaggggctcttcccacagccaggacctagaagattagggtagggatgagggtgggtgggaatttcgcttccatagaatatggccttggagctgacatgggattcttttctctcctcgacttgatatcaaagtggttgctctgtcagctgttttgacagcatctcacagccctagctacctacaagtgcrcatcttagtgacagaatcaggtgggcttgaagatacaatgccttctcttcccttggaggtcctgttgaaaatggctcttttgaaaaccagacagcaagtattatactcagtatggtgcctcctcgctcctcttcacctcttttgttccttccttctccctcccttactttctctttcatcctcagtatagagcactctaggcccaaatcacatacaagccaatcatacaagcattttgtcacttgatgctcccggatccatgctcggccttaagggacagagagttttctttctctttctgctgcttctcctgcttctccctgcagtgaagcagctcaaaccagagccctgaagaagacacccccttttggtgtgacttctctactttaaaccccgaaagtcacgccaggcagcccctgaccttacaaacagtagagctcccctggagcctccagaatattctagactgcagtgggagtagcctttccttgcgcagccctgcccatgggacccttccaaggatcgctccaggtgttctcatggcttcctcccgctgccccccctgagcccaggtgcccaacaagcagggagggttgcactgccttccatggtcttcttgtccttgaagccagccagaccatcaaacagtcacgacgctggcatttgattacttggaagaaaacagcattgccaatatgaggaaggtggctgggtgtggggaggagaagggagctgaagtgggaggtatttgggtggtgattattagaggtaatatgtaaatatctgatgattggaatccttgtgaaaagatgttgaagaaagtgatgttaaacagccctgtcatccgcagaaccatctgtgggtggtggagagggtggttaaaggcctttgatttttgtccagtgcctctgcagctggggaagcaggttcctctgccccctcccctcgttctccttgatgtcagatcctggctctgcactgggaggtgagagtggatggcccctctgccctgcctctcacacatgtagcttggcaggtttttcctaacaaggggttgaggggaatcatttcacctagacatgctcaccctggtgtctcattaggaactgggccattttaacagatccagagagggcccagactcttcactttgaagttttttgctccatccaggtactatgagacttccttaatccttaaggatgttgcagaaccct

SEQ ID NO: 81028 - DNA, 1459 bp, Homo sapiens
acacttagttcaggggctgggacctggtaggtgattaatatttggtgaggccttggggtgacttgggtgctgaagtccttctgttttgtattctgattattatggttgtagcaaatattttcagacattgatttaaattcctaaacttgaaactttttgaaacagtgttttgtttttgttttttgaacaacattcttgcttcacactgaatgatgagtaaaaattacctaagtgaaggaataaatgttggagtcacatgcagtggcaaatgtgaaagagaatatatttcagattgtgacaggaaatttgttatcaggctgccttaaaaagcaattacaataacaagcatgtttacataaaaatatcactttctatgacyacatgtgactttccagaaagtgactgagtgtatattgagcgcaaaagaagaagaagaagaaaaaaacccaaacagcagaataagtaggcagaaacaaagggtaaagatttagaattcatggaaatattaaaatgaaagaaaacaaattatgggtcttggaaccaagaaccaagtggataaggtttgacataaagggagtatgacaatcattctttgcgggagaattaaaaaaaaaaagtctgcccaggtgtggtggctcacacctgtaatcccagcactttgggaagccgaggcaggtagatcacaaggtcaggagatcaaaaccatcctggctaacacggtgaaacctgtctctactaaacatacaaaaaattagccgggtgtggtggtgggcgcctgtagtcccagctactctggaggctgaggcaggagaatggcgtgaacctgggaggtggagcttgcagtgagccgagatcatgccactgcactacagtctggttgacagagtgagacttcatctcaaaaacaaaacaaaacaaacaaacaaacaaacctgtctatatttctcctatttaaaaataaaatgtaaagtgagctgattacatttctattaacataatttttggttttacataaaactaaaagtttatttttaagaaaaaagtaacaattttaatttttctatgcacaaaataataaaagtattattgttttatggaaagatcaagtcttatgaatagcatgctttattttagcaatattcataacattaatgtgtaaaactcaaacatttactcgtttaccattgggtgttatatacattacagacattctttagggtatagaggaagaatttttcattgtgtagctgtttaattatatacattcataagaatgttaaaattataattttacgtagcgattttgagcaaaactaaattcaatatcagatatgtttcacacaaatgttttaaatggtcaaaatcaagtgtttctcctttatataatgtttttatttaacgtattattaaacaaaacatttaatttacttttatgctaaaatctaagaatcttctctag

SEQ ID NO: 81029 - DNA, 551 bp, Homo sapiens
gagaggcaaagtcatattgctcagagcatccaatacaaggaaaggakgaatctatggccatttattgcaatctatacaagcaaagaaacacatcctaatgagctctattctccctagcacctaatataaggtttggtacacatggacaatattttaagtctgttgttaaatgaatacataagtctttagaaatatagttaatccattgctgataagagaaatttcaaaattaaaactgccagtgcttttttaaaattagggtattaacctttatcaactctagtcttatgtcactatccttaccctttctcttacattggcatgaaaatttgttttctccaaataactaagctgagatcaggctaatttgacatcttcttgaaaatttgtgctagttctctaatctagcttctattatcatcaaaataacatgggccataccagatataattgtataatctgcttataaatataaccccaatgttctgtcccacagcatccaaaagcatacacaaccacaattcatcgtggcaggaatgcaggcttattca

SEQ ID NO: 81030 - DNA, 719 bp, Homo sapiens
  misc_feature (1)...(719): n = A,T,C or G
gggatcctccccacttggcttcccaaagtgctaggattacaggtgtaagtgaccatgtcgggacaagaacatgagacttctcttaccatttttttatatctargtggaatagcatagtattatgtgtcagtgttgaattattttaaaatattatgtaatgnaacatggtaataatctgggtcagtttctatcttgacctaggttaaacatattagctaacatgaggggcccaaaattaataatgattccataccatctccttgtttatttattcattgagacagagtttgatctctcacaaaggttggagtcagtagcaccatcttggctcactacaacctccacctcctgtgttcaagtgattctcctgccttagcctcctgagtagctaggattacgcccaccaccacaaccagctaacttttgtatttttagtacagataaagtttcaccaggttggccaggttggtcttgaactcctgatctcaagtgatccgcggccttggcctcccaaagtgttgtcattataggcgtgagccactgcctccagccaccatctcctttcattaaaaatatgtgagctgaaaataatttgagggcagttattttcatatagtcattttatcaaacggattatattaatgactagtattaatatttattttatctaaaattatgtctgatttttctaaattctctgacttgctaataatgttaaa

SEQ ID NO: 81031 - DNA, 719 bp, Homo sapiens
  misc_feature (1)...(719): n = A,T,C or G
gggatcctccccacttggcttcccaaagtgctaggattacaggtgtaagtgaccatgtcgggacaagaacatgagacttctcttaccatttttttatatctaagtggaatagcatagtattatgtgtcagtgttgaattattttaaaatattatgtaatgnaacatggtaataatctgggtcagtttctatcttgacctaggttaaacatattagctaacatgaggggcccaaaattaataatgattccataccatctccttgtttatttattcattgagacagagtttgatctctcacaaaggttggagtcagtagcaccatcttggctcactasaacctccacctcctgtgttcaagtgattctcctgccttagcctcctgagtagctaggattacgcccaccaccacaaccagctaacttttgtatttttagtacagataaagtttcaccaggttggccaggttggtcttgaactcctgatctcaagtgatccgcggccttggcctcccaaagtgttgtcattataggcgtgagccactgcctccagccaccatctcctttcattaaaaatatgtgagctgaaaataatttgagggcagttattttcatatagtcattttatcaaacggattatattaatgactagtattaatatttattttatctaaaattatgtctgatttttctaaattctctgacttgctaataatgttaaa

SEQ ID NO: 81032 - DNA, 246 bp, Homo sapiens
ttgagaacacccacctcatgctggagaagytggcagaatgcaggtgacataaaggcatggaggggcagggtgtggtggctcaccctgtaatcccagcattttgggaggctgaggcaggcggaacacctgaggtcaggaattcgagaccagcctggccaggatggtgagaccccatctctactaaaaatacaaaaattagccgggcgtggtggcgggtgcctgtaatcccagcattttgggaggctg

SEQ ID NO: 81033 - DNA, 246 bp, Homo sapiens
ttgagaacacccacctcatgctggagaagctggcagaatgcaggtgacataaaggcatggaggggcagggtgtggtggctcaccctgtaatcccagcattttgggaggctgaggcaggyggaacacctgaggtcaggaattcgagaccagcctggccaggatggtgagaccccatctctactaaaaatacaaaaattagccgggcgtggtggcgggtgcctgtaatcccagcattttgggaggctg

SEQ ID NO: 81034 - DNA, 835 bp, Homo sapiens
aaatccaacaaatgaggttggtgggggagacaggattagacgggaaggaaacgaaagcttttctacatctccaaatatataactaaactgtttgcttttacttgaatgcttagaattccttattaatttcatagttcagtaaatattaggtcttaaagcgggaagcaactggaaagacgtttcttaacaaaagggatcatgaatcagcttagttctgcttatgcccaagaaacagtaactgctatagaaactgccctactataataacttaaaaagtctatgtaagtatataaaacaaaactttttagacatttcaaaacagaaaacattggattataattctgaagagaaagaaacaaatgagttaagactggcttactgcttagagaaagagtctcggttccaacagtggaagagggtacctaaacagagcctgtgagtcatgctgagttgaggaggtaagaaaggagtttagtgatgcggagataagaaaggagtttagtgatgctgagagggctagaatttgtagagcygcgtaaaacagaggggagagttacaaaaacagatggttctgaagacctgcagaggatactctgctcttggctgtagcatcgatcttagcactagtgaaaggaaataattcaaggcatgggaaaaataaagtagtgggatggacaatttcaagggctcacacagggctaagaagaatttatgttttcatcagctagagtggatagactgtgtaatacatgccatattggaaagaggctgaagaagaacaagaatgccttattaatggaaatatttaaataagtcccagaataaagactgctct

SEQ ID NO: 81035 - DNA, 835 bp, Homo sapiens
aaatccaacaaatgaggttggtgggggagacaggattagacgggaaggaaacgaaagcttttctacatctccaaatatataactaaactgtttgcttttacttgaatgcttagaattccttattaatttcatagttcagtaaatattaggtcttaaagcgggaagcaactggaaagacgtttcttaacaaaagggatcatgaatcagcttagttctgcttatgcccaagaaacagtaactgctatagaaactgccctactataataacttaaaaagtctatgtaagtatataaaacaaaactttttagacatttcaaaacagaaaacattggattataattctgaagagaaagaaacaaatgagttaagactggcttactgcttagagaaagagtctcggttccaacagtggaagagggtacctaaacagagcctgtgagtcatgctgagttgaggaggtaagaaaggagtttagtgatgcggagataagaaaggagtttagtgatgctgagagggctagaatttgtagagctgcgtaaaacagaggggagagttacaaaaacagatggttctgaagacctgcagaggatactctgmtcttggctgtagcatcgatcttagcactagtgaaaggaaataattcaaggcatgggaaaaataaagtagtgggatggacaatttcaagggctcacacagggctaagaagaatttatgttttcatcagctagagtggatagactgtgtaatacatgccatattggaaagaggctgaagaagaacaagaatgccttattaatggaaatatttaaataagtcccagaataaagactgctct

SEQ ID NO: 81036 - DNA, 1522 bp, Homo sapiens
tccttccagtgtcgttaacttcaagtaaactgtgtctgtacacctgcaggtacccacatacatttttatgaaaaggccaagctccaatttgtggtacatttttaaatcgttagtattaagaattgaagatgtgggggcattatttacgtttgagaagcccttttcaatcttaaaatctatagggttctaagcttcacattatctcatatgaacaaaggtgacaccgccatttaaaaactgaggctatgcatacacaggtagagagagagagcaagcaggcacatggatgcaagcacaaacatgctgagaaaatatccatgcctaagggcatttctttcagtcctcactgaatgtgcccttctattcatttgctacattaaatcacaaccctggcatttaccctcttaggatacaaattaataattaagaccaaccagtccatgaaaactcaaagtggaaagtataaacagtaacaaatgaacctaattgtattacaaattaagtattttgtaatttacactaaagggaatggaaaaggaaagaacgaacataaataattttgaaaaacagttttttaactgtatgccgtgtggttgaagacaaaaagaacagtacacaaacactgtactccagttagtaaatttgtcttttacaggggtatgagctattaattctgaaactattactgatgcagaatttttcttcttggtcacttcgcaaggtggggacccctgaccagcaacaccccmcctggacctcccttggccacgctggtgtgccccagcttacctgtgttagagcttgtacctttgtttggtgtttccgaactcttagactgcactgaagaagaatgaggacacgtggggcatggaagggtgaggaggatggagaagaatgttttcgagttatgaaaacggctttcagcaagggtcagcaggggagggagggggttcctctgtgtggctgggtctggggccctttatggactcagaatggggagtgcatgctgattggtttgtaagtatgcaaaaaagattaaagcaaaaacaccactcaaaggtgggcaggacagtgtagaaaaaccaattaggaaagggtaggaaaccaattaggaaagggtatatgtaaaatacgtgaagggtggggacccatcagaggaaagtatgccagacaggaagacactctcagtttggtccaaagatttaacttgtagctcagctttcaggctttaaactatctttggcctgaaggtaggattttgcaggggacctgcctctgtctgtctgtctaggcatttgtctgcctctatcattactttatctgtatactaggatatgcaaataaacaaacatactatagatgataagaggcagttttctctctatgggagaaagaaattatgaataaggaaccctgtggtattggattccagttgacgttattcatatgaacttgtaatttttaatgtatggattgatgcagaaacgtaggtgagtttgcatgatgggtatgtatatatgca

SEQ ID NO: 81037 - DNA, 625 bp, Homo sapiens
tctcgatcagtgaaggattacatcagttatactttattcatgtaattaatacagttgttaaaaagaccacgtagagttatgagtagtggtatggatggcaaagtgaagagaaggggttaagagtatagcttctttattcatgctgcctggattctctsatacttagcaccaattctgtgaccttggggaaattattcctctatcagcttcctcatctggaacttgggaaaagtaaatatacctacttatgaaccaggaatgaggtttaaatgtgaaaatccatgtaaagcctacaggatgatacttggcacataaaaaatacttcataaaatatgattacctaattattattttcaaggaattgatggtggggaacatcaatacaaaattaagtatggaatgataccatttatgttaaaattcatatgtgagaatctagaagatgaatgtgttaatagtggtgatgtcaggggagcagcatattagggaacttctgggtggtggtggtggtggtggtggtggtggtggtggtggtgagagacagagtttgcactttcacccaggctggagtgcaatatagcgatgcaaccatatctcactgcaaccacaaattcctgggctcaag

SEQ ID NO: 81038 - DNA, 625 bp, Homo sapiens
tctcgatcagtgaaggattacatcagttatactttattcatgtaattaatacagttgttaaaaagaccacgtagagttatgagtagtggtatggatggcaaagtgaagagaaggggttaagagtatagcttctttattcatgctgcctggattctctgatacttagcaccaattctgtgaccttggggaaattattcctctatcagcttcctcatctggaacttgggaaaagtraatatacctacttatgaaccaggaatgaggtttaaatgtgaaaatccatgtaaagcctacaggatgatacttggcacataaaaaatacttcataaaatatgattacctaattattattttcaaggaattgatggtggggaacatcaatacaaaattaagtatggaatgataccatttatgttaaaattcatatgtgagaatctagaagatgaatgtgttaatagtggtgatgtcaggggagcagcatattagggaacttctgggtggtggtggtggtggtggtggtggtggtggtggtggtgagagacagagtttgcactttcacccaggctggagtgcaatatagcgatgcaaccatatctcactgcaaccacaaattcctgggctcaag

SEQ ID NO: 81039 - DNA, 625 bp, Homo sapiens
tctcgatcagtgaaggattacatcagttatactttattcatgtaattaatacagttgttaaaaagaccacgtagagttatgagtagtggtatggatggcaaagtgaagagaaggggttaagagtatagcttctttattcatgctgcctggattctctgatacttagcaccaattctgtgaccttggggaaattattcctctatcagcttcctcatctggaacttgggaaaagtaaatatacctacttatgaaccaggaatgaggtttaaatgtgaaaatccatgtaaagcctacaggatgatacttggcacataaaaaatacttcataaaatatgattacctaattattattttcaaggaattgatggtggggaacrtcaatacaaaattaagtatggaatgataccatttatgttaaaattcatatgtgagaatctagaagatgaatgtgttaatagtggtgatgtcaggggagcagcatattagggaacttctgggtggtggtggtggtggtggtggtggtggtggtggtggtgagagacagagtttgcactttcacccaggctggagtgcaatatagcgatgcaaccatatctcactgcaaccacaaattcctgggctcaag

SEQ ID NO: 81040 - DNA, 1357 bp, Homo sapiens
  misc_feature (1)...(1357): n = A,T,C or G
ttagccttctagacttttagactaaagatccctagcagagggagaaagcttccttgcaaagaacagcaacgacaaaggcctgatgagagctaatgttacagtaatattgagatcacaacttgggctggctatrtgaaggctgacaatctaaatgaaatcttaatctctctcagaggaaactgcagacacaacagtcattgatacctgtcagccccaaatcagccttgcagacataaaagtgcatgcatgaagtaaaaagataacagcatctttgatgcctcctgtcatgtcataaaccaaactaggtagtatatcaaatactgtagaaacaaactattagacttcttccatgtatgccagaagacccctgaaggattccatagaactgtggataactttgatctattcccccttaaggggcatttttattatgtaataactgacacatacgaaacaatacatataatatttacacaagatattagaaataataaaaaacacccttaaacattcctccaagtacatgaaacagaacataaccatcaccattaaacttcttgaggacaccaatctcaacggttttgctcttcctgggtatatacacataccagaaaataattttgcattatcttgtaaagttgaatttatctaccttgtaacctcacagttcttttccaaggactacactctagaaagaccattacagaaacttggaacagatgagttaaaaaatgttgtctgtaacatgagaaggagtatgaaacaagtcaaatggatatttttacaatgataacttcatgtgaccagaacagtaccctctctcatgtgnnnnnnnnnnnnnnnnnnnnnnnnnnnnnnnnnnnnnnnnnnnnnnnnnnnnnnnnnnnnnnnnnnnnnnnnnnnnnnnnnnnnnnnnnnnnnnnnnnnntaaaaatgatggcaaatgatgaaattctattgctgtatctatcatattttacttattaaacattttattggccattaaactgtttctaaaatgatgttattttgtaactaaaataacaactggattccttctatgtaccaggcagtgtactacacaccataacaggtattagccgtatttgattgctctcaccttaaggtttttgcattttttttttctaatgggatattcttttcttttctatttttgtaagacggagtgcagtggtgtaatcatggctcactgcagacttaacatcctgggctcaagcaatcctcccaccttagccccctgactagctgggtctaggggcgtatgtaccatgtttggctaactttttattcttttattttgtagagatggggtcttaatatgttgctcaggctgtgg

SEQ ID NO: 81041 - DNA, 1357 bp, Homo sapiens
  misc_feature (1)...(1357): n = A,T,C or G
ttagccttctagacttttagactaaagatccctagcagagggagaaagcttccttgcaaagaacagcaacgacaaaggcctgatgagagctaatgttacagtaatattgagatcacaacttgggctggctatgtgaaggctgacaatctaaatgaaatcttaatctctctcagaggaaactgcagacacaacagtcattgatacctgtcagccccaaatcagccttgcagacataaaagtgcatgcatgaagtaaaaagataacagcatctttsatgcctcctgtcatgtcataaaccaaactaggtagtatatcaaatactgtagaaacaaactattagacttcttccatgtatgccagaagacccctgaaggattccatagaactgtggataactttgatctattcccccttaaggggcatttttattatgtaataactgacacatacgaaacaatacatataatatttacacaagatattagaaataataaaaaacacccttaaacattcctccaagtacatgaaacagaacataaccatcaccattaaacttcttgaggacaccaatctcaacggttttgctcttcctgggtatatacacataccagaaaataattttgcattatcttgtaaagttgaatttatctaccttgtaacctcacagttcttttccaaggactacactctagaaagaccattacagaaacttggaacagatgagttaaaaaatgttgtctgtaacatgagaaggagtatgaaacaagtcaaatggatatttttacaatgataacttcatgtgaccagaacagtaccctctctcatgtgnnnnnnnnnnnnnnnnnnnnnnnnnnnnnnnnnnnnnnnnnnnnnnnnnnnnnnnnnnnnnnnnnnnnnnnnnnnnnnnnnnnnnnnnnnnnnnnnnnnntaaaaatgatggcaaatgatgaaattctattgctgtatctatcatattttacttattaaacattttattggccattaaactgtttctaaaatgatgttattttgtaactaaaataacaactggattccttctatgtaccaggcagtgtactacacaccataacaggtattagccgtatttgattgctctcaccttaaggtttttgcattttttttttctaatgggatattcttttcttttctatttttgtaagacggagtgcagtggtgtaatcatggctcactgcagacttaacatcctgggctcaagcaatcctcccaccttagccccctgactagctgggtctaggggcgtatgtaccatgtttggctaactttttattcttttattttgtagagatggggtcttaatatgttgctcaggctgtgg

SEQ ID NO: 81042 - DNA, 863 bp, Homo sapiens
taatcctttattggtaatatgctacaagtatcttaatctgtgaattatctttcatttttaagtacaattttaatataaagtctttacttttagtgtaattatacatatcaatttttttttactgtttttgtaaatatgtatgtatataygtatgcctgtttatatgtagagatgatgtcttgctatgttgcccaggctggtcttgaattcctgggctcaagtgatcctcctgtcttggattcccaaagtattgggattacaggtgtgagccactgtacccagctgcttttataaatcttaagaattcactttctacccaaaagtcatgaagttactgtcccacatgttcttctaaaaatcttagaaccttgtttctcaaatttttatctttaatctacgtgaaactggtttttgtgttagaactgaggtggggaatacacacacacacacacacacacacacacacacttctcaacataaattacggaagaatttttgcttctaattatctgacttactttctatatcatccatcaaatttttataaacactggagactgctgcttctgggttctcttttccaacccatcatcctatctgtatgtcttattatcttggaaaatgtcaacatggccctactgtacttctcccccttaatgtatgaggaagtttggtataaggctacagggagctgtgaaaactatggtcaaccagaaaatgcctacatccaggcaattcagtgtttaaacagcactgtgttggccaagtaaaagaaatgttcaggcttcactgtccctagcttgagacctccagttatctaaatacatgctacacagtgacagactgtcccaactacacaaaaa

SEQ ID NO: 81043 - DNA, 863 bp, Homo sapiens
taatcctttattggtaatatgctacaagtatcttaatctgtgaattatctttcatttttaagtacaattttaatataaagtctttacttttagtgtaattatacatatcaatttttttttactgtttttgtaaatatgtatgtatatacgtatgcctgtttatatgtagagatgatgtcttgctatgttgcccaggctggtcttgaattcctgggctcaagtgatcctcctgtcttggattcccaaagtattgggattacaggtgtgagccactgtacccagctgcttttataaatcttaagaattcactttctacccaaaagtcatgaagttactgtcccacatgttcttctaaaaatcttagaaccttgtttctcaaatttttatctttaatctacgtgaaactggtttttgtgttasaactgaggtggggaatacacacacacacacacacacacacacacacacttctcaacataaattacggaagaatttttgcttctaattatctgacttactttctatatcatccatcaaatttttataaacactggagactgctgcttctgggttctcttttccaacccatcatcctatctgtatgtcttattatcttggaaaatgtcaacatggccctactgtacttctcccccttaatgtatgaggaagtttggtataaggctacagggagctgtgaaaactatggtcaaccagaaaatgcctacatccaggcaattcagtgtttaaacagcactgtgttggccaagtaaaagaaatgttcaggcttcactgtccctagcttgagacctccagttatctaaatacatgctacacagtgacagactgtcccaactacacaaaaa

SEQ ID NO: 81044 - DNA, 618 bp, Homo sapiens
tatccttattttcatttctgcattgcagacacatgaattacttaaaaagamcccctcccatctcctatgaacttttttttttttttttttttgagacagggtcttgctctttcacccaggctggagtgcaatggcaagatcttggctcactgcaacttccacctcccgggttcaagcgattctcctgcctcagcctccagagtagctgggactacaggtgtatgccaccatgcccagctaatttttgtattttcaatagagatggggtttcaccatgttggccaggctggtctcgaactcctgaccttgtgattcgcccccctcagcctcccaaagtgctgggattacaggcgtgagccaccgcgcctggctgaacttttttatacctttgttcattccacaggttcttttggacgtttcttatatttttatccctctaatttgacagatacgttgtttaaatattacttctatataaaattcatgtcttgtgtccctttagataactgtagaaggatacgtataagatgctactataattattaattttattatttttaatttcaacgtactatgaaattctaatgggaaagagtcttatttggaatattgatatta

SEQ ID NO: 81045 - DNA, 823 bp, Homo sapiens
tgtttttagttttctctcttactttgtatgacttgaaaattttcattctcaatttcctgcacacattgggagtgtggaaaataaagattgctataacactgtgttcatttttattatcacaagagacagtcaactgtgtttaaacgtccctttctacattacatcctttactgtcgaggatctctaccatgcttcagggtaactttttcagtgagggtaatyaaataaagcagcaactactctgcggatggaaatatgagtatataatcaaaagatcaacagtagaatgatacagacctattttagcaggtgatttatacatagcaaattgttgtaggtctttaagaagcagatctaaaaattaatgtggttttgtttccaatggagggtgtccagattcttagcgttttgaacaaagtattggacaagacacaaagcaatgaaagaaaagcacagatttgttgaaatgaaagttcactccacagagtcgtagcacactcaagcaagatgctcaagagcactgattacagagttttctggggttcaaatattctgcagaggtttcccgttggttacttgttttaactctatataaatgaaggagtggccaacaaccagtctgattggttgcagaagatgaccaatctgaggctgacgtgaagtaacagagttccatcctatgcaaacatctgattggttttaaaaggggtcaaatcagaggctaaagtgaagttacaaagttacacatgaagacttggcccacgaccagtctgattggttgtgggaggcgaccaaacagaggtactttccatttttcctctgg

SEQ ID NO: 81046 - DNA, 823 bp, Homo sapiens
tgtttttagttttctctcttactttgtatgacttgaaaattttcattctcaatttcctgcacacattgggagtgtggaaaataaagattgctataacactgtgttcatttttattatcacaagagacagtcaactgtgtttaaacgtccctttctacattacatcctttactgtcgaggatctctaccatgcttcagggtaactttttcagtgagggtaattaaataaagcagcaactactctgcggatggaaatatgagtatataatcaaaagatcaacagtagaatgatacagacctattttagcaggtgatttatacatagcaaattgttgtaggtctttaagaagcagatctaaaaattaatgtggttttgtttccaatggagggtgtccagattcttagcgttttgaacaaagtattggacaagacacaaagcaatgaaagaaaagcacagatttgttgaaatgaaagttcactccacagagtcgtagcacactcaagcaagatgctcaagagcactgattacagagttttctggggttyaaatattctgcagaggtttcccgttggttacttgttttaactctatataaatgaaggagtggccaacaaccagtctgattggttgcagaagatgaccaatctgaggctgacgtgaagtaacagagttccatcctatgcaaacatctgattggttttaaaaggggtcaaatcagaggctaaagtgaagttacaaagttacacatgaagacttggcccacgaccagtctgattggttgtgggaggcgaccaaacagaggtactttccatttttcctctgg

SEQ ID NO: 81047 - DNA, 1791 bp, Homo sapiens
gaaacctgtttgtcatcataaaagctattagtagacttggctacacttaacgatagatttcataattaaagacctcagatgtgagacacctaagagagtaccaaccccccagtgttacccttttagcattaaccacaaagggggagagggagggagggagggagagaaagagagagagagagagagagagagagagagagagagagagagagcagttaaaaataagacaagaagacaagacaaagcaaacaaagagaaagcatgttcaactaacaagagtgatctctcctctctatttcttggcagataatgaacgattcatttttctcccaacagagcccattcttttcattctctgtcacttttcctgagtgaaagtattatgccatttgcctcagacataagaaatatcccttatctagcctaaatgttaaacacacatcaaactrtctgagtgtcatgatggagtcatctggcattctgcttcttcctacgctttcattgcacctttgcttagttcagacatctttgatttctgactgtgagaaaaaaaaattggaaggtctccagatgtcaacctccaccacttcctgaaattactaagataagacacaggactctaatttctcagctttttctttagggacatagccagctgagatatttgacacttaatggaaaataactacggagctttgctatgagattcactgaagagttaaaggtcctatggacattattgttacagtactattcatacccagatctctttcatcatggtgagtcagaaaaggcctttttatatttcaattcagcacttacctaattcagtataccagttgactaatatttaggggatagtcatctgttcaatgcataacaatctgctcagtgctttaggggaatccctttaaaattatcagccagttacatgaatgttcacagaatgagtacatctgtaagtgatttccttcatagaatcattaaagaagtgaaacttattctgatgatactagaatagctaaaaatatagtcaaactattcacttgaaattataacccaatatacaagacatgcaatactcaatctcatgtttgcatagttgtagctaatagaggtcattacatacaaagatctatcatcctacagcaatttagagtaggacaaaatcatttagttagggattgggcaaagaatgacaggagtacctcatctatgcacagcagcctactcagtgctttaagaaatatcttaaaatgataaggtaatatcttaaaagtatttttctcattataaaattgttagcagaatgtgtgcattcataagtaatttccttcacaaaatcaccccaggaagcaataaaatactatgattagctaaaatattcttgaaatctctgtttcgagttttctttagacccaatttgccaataatacaaaagacttctcatttttgtctggttatagttaacgtagcacactaaaggaaaagataactcaaactgtatgtagttcagagcaaaaagaaagcatttcaataggcattggccaaaatttgacctatgaaagaggtaaaatttaaactgggacatgaataccagtagtgtttggaactatgtagagagaggtaggtatcactctatgcagggacaaatgtgtcaacaaaggtatcaatggaagtcagcacaagctctgctcatgagagagtgaataaatgtaagctgaaaaaaaatatgtaggggaagtgttataaacacaattagggtgatagtttgtaccaaattatggagag

SEQ ID NO: 81048 - DNA, 681 bp, Homo sapiens
aagggtctgcataatagtcttagacagcataaatgagcctgtttcttctactgagacaaaagcttattttatacctttatagagtctgtgaaaaagttttaactttaaatggattttaaaaggtcctctttttcttcctttaaaatcaacatttcctgcatcttgtctttattttgtgaagtgttaaccaacaaattgaatacagcctgtgcttggcaaatgaatattaaatgctttttcctggaaaatgtgtttgctcattaaatttgacagtcattgcttatgtggtaaatgttgtcagtgccaagaactatctggcatggctgccagctacaggtccattattttaattgcctttaacctataatcaatatttactgctttccatagaaagagactgcatagctaagcagtacaaaaagtgagtttattcttctgcatgttagtttttgcttttacatctaaaaggtagaattaaatgcttcctctgggtactacctttttttttwatcaaaactatctcctactacttattttgtgaaatgctcacatcatccaaatcatgtctatttcaaacaaagcaatttgaatttatgactgagactcaaattctgctttatcataaattacctacatctttttttttgtcattgtaagaaggtactgaattttaatagcatt

SEQ ID NO: 81049 - DNA, 891 bp, Homo sapiens
acagtcattttaaaaaaatattatgcagtggattttctcttagagcaaaatacctttgatggggaaccagaacaacaaactactgagacagcatggcagagttttgaacttttttttcttttgtcatttttgatcttttatttaacaaactcatgtgctgacattcaatatcaaattgattttaacttgtttgttctaggtttttttctctgtctctctctgtctctttctctttctttctaattttgtttcctgaaatgtaaaatgttatgatttatttgaatttccatatctcgtggaatatttttgggagacttaagttctcattatgaattgttgaataatacatggctttgatgtgctgatgaaagtgtgtttttttctggtgtctgaaacaatattgagggctaaaatatccctgaagcataagtcactacmtgttattaagttaagcaactagaaaggagtccttttatctgaaccatttcagtttcaggtgacagaaatttaaactgaagatggtgagagacagagaagtgagagaaaaataatatattgactggcttgtgtaacaaaaaagcctacaagtagaccttgatttgcatctacaataagctcacacagtgttgtcagaacacaatttctctacattttttagctctgctttgctctgtgttaggtgtagtctcagtcaggctctctctttatagtgaaaggatatttagcagcagtttcacatatacttcctacaagttcagcatatttaactgaaaggcagtgcatccttcttaaaagatccatagtcttggaatttatcctgcttagcccatacagagccacttgatttctgaactaaccacagaggccagtgcctgggtcatgtgggaatca

SEQ ID NO: 81050 - DNA, 891 bp, Homo sapiens
acagtcattttaaaaaaatattatgcagtggattttctcttagagcaaaatacctttgatggggaaccagaacaacaaactactgagacagcatggcagagttttgaacttttttttcttttgtcatttttgatcttttatttaacaaactcatgtgctgacattcaatatcaaattgattttaacttgtttgttctaggtttttttctctgtctctctctgtctctttctctttctttctaattttgtttcctgaaatgtaaaatgttatgatttatttgaatttccatatctcgtggaatatttttgggagacttaagttctcattatgaattgttgaataatacatggctttgatgtgctgatgaaagtgtgtttttttctggtgtctgaaacaatattgagggctaaaatatccctgaagcataagtcactacatgttattaagttaagcaactagaaaggagtccttttatctgaaccatttcagtttcaggtgacagaaatttaaactgaagatggtgagagacagagaagtgagagaaaaataatatattgactggcttgtgtaacaaaaaagcctacaagtagaccttgatttgcatctacaataagctcacacagtgttgtcagaacacaatttctctacattttttagctctgctttgctctgtgttaggtgtagtctcagtcaggctctctctttatagtgaaaggatatttagcagcagtttcacatatacttcctacaagttcagcatatttaactgaaaggcagtgcatccttcttaaaagatccatagtcttggaatttatcctgcttagcccatacagagccacytgatttctgaactaaccacagaggccagtgcctgggtcatgtgggaatca

SEQ ID NO: 81051 - DNA, 1062 bp, Homo sapiens
tggcaccaccttaatcagaaaatcttaacaatgtcatcttcttaatttagctgttcagatatcagttgataccactaaatcaatgggtgaatgtagtaattaaggtctttgttaatcacagaactatgagtaacaaaacatgaagtagaaaaaattggggggattgcccatataagtcattgttgatggcatttggttgaaaagtctctatggttgcatatgaaggaaaatatatgtaaaaaggtgagttcatttctctttatatcatcatttagcagttttactaaatgtgttactactaagcctatttaaatttaactttaaactctatttttggtttagctttttttttcttttagtaaagaaattttaaatatcccaacactttcaagcagagtcagtggctgtgatccaaacttcttaagtcatatttgaactctgtagcttcactctattcatataaacatgtcaagagtgaatgccatgatgaaaatccagacttgaaaattaatcttcttttatgattctttccattaactgcccaagccactgtggcagccagctggaacaccagcttatgccagcttatataatgctgttaagaactcggaaagagggacaatattcataccaccaggaaaaattacatagatttatagacctatgtagaaattaacaatcataaagtcccaatctcttgtcttttagatcactaaactgaagcatgaaaaggtgaaatagtacctaaggtcagatttcaagtttatctcagagcagcacctggagccctgcttttcatccttccacgcccatgtgcttcagtgaaaaggaatgactttttcattcaataattttttcaagcactactctgtgtgtgtagataaactgataaatagataaatacagacagayatttctcctgagtctagtgcactttttacagctatttttaataatagatttattatgactttgaggggtttatttttgctttccttacagtagtaattaattattttttatttcaaattcaattatttcaatttagtgaagtgtgataca

SEQ ID NO: 81052 - DNA, 1062 bp, Homo sapiens
tggcaccaccttaatcagaaaatcttaacaatgtcatcttcttaatttagctgttcagatatcagttgataccactaaatcaatgggtgaatgtagtaattaaggtctttgttaatcacagaactatgagtaacaaaacatgaagtagaaaaaattggggggattgcccatataagtcattgttgatggcatttggttgaaaagtctctatggttgcatatgaaggaaaatatatgtaaaaaggtgagttcatttctctttatatcatcatttagcagttttactaaatgtgttactactaagcctatttaaatttaactttaaactctatttttggtttagctttttttttcttttagtaaagaaattttaaatatcccaacactttcaagcagagtcagtggctgtgatccaaacttcttaagtcatatttgaactctgtagcttcactctattcatataaacatgtcaagagtgaatgccatgatgaaaatccagacttgaaaattaatcttcttttatgattctttccattaactgcccaagccactgtggcagccagctggaacaccagcttatgccagcttatataatgctgttaagaactcggaaagagggacaatattcataccaccaggaaaaattacatagatttatagacctatgtagaaattaacaatcataaagtcccaatctcttgtcttttagatcactaaactgaagcatgaaaaggtgaaatagtacctaaggtcagatttcaagtttatctcagagcagcacctggagccctgcttttcatccttccacgcccatgtgcttcagtgaaaaggaatgactttttcattcaataattttttcaagcactactctgtgtgtgtagataaactgataaatagataaatacagacagatatttctcctgagtctagtgcactttttacagctatttttaataatagatttattatgactttgaggggtttatttttgctttccttacagtagtaattaattattttttatttcaaattyaattatttcaatttagtgaagtgtgataca

SEQ ID NO: 81053 - DNA, 1558 bp, Homo sapiens
ccacagttgctctgaccacatgattccatgtttcagaaagataaaatctcattaacatataggaagaacaagaggataaaccaaggaaaacccaagatgactaatggtgtgcccacaatggaaaataaataataagaattcagtagtgactgtgattttgaataactgtcatcaaaagatatatttaactataaggcaaaaatgtaattgaaaatacagtctgcctcttacatgttagcaacttaaacaaaccaactttgctatatttcttttctttgaattgttgcatataatatatttgaaacaaaagaagataaagtttttttcatcattctatattccaaaatgcaagtcactttggttcaattacttattcatctctatttcctgatctgctagataaagatggaatagctatcaataaagactgcagcaacttcgattccatcattttcttaactgttctccatggaatttagatgtctgggatgttatattacttagcaaaagtaacctagctttggtcagtttggtgaaagtacactccagggaacagcagatgtaagtaagtgagaaataatatgtgtatgcagaagaaatcccactatgctccatttgcaacaaaagcttcagccaatcacactaggagctctaaattgagatgttcattcagagttgtccctttgtatataactccttgaccagccaatggatgcaggctgtcccaagccacgggttttgagggcgtagcagcaccctcttctgaggtcaatttaytgagagaaacagctgtgagctatcagcagcccacatcccttgcaggatgggaataagggcctggatcctgaaaagggactgctgagaagtacaccacaatatccacaacacctggtggcaaggagtgctagaatgtggtagaacacatggaacacaggcactgagattactgaactgggtgggaaccatgactcttacttatgacattttgagttgactttaaactgacctaatcaattttacagtctacaaagtaagtttgatgagtaaaagtcagcttacacaaagatactctctattccattcctgcttatgtcttcttaaagatagctcagaatggaaagccagatgcagctggtatttttgaagttctatgactcttattggaatttttagaagtgtccacatatattacacaagggtatgatcctcgtcttcccttccactccgtaatggaaataggtctagggttagcttgctcactctttttccctagattatctgtctttgtccaatggataatcatgcttaaggctactcttctcactaaaaggccctttgagacccaggccagttatggacgaggcactgctgcaatttttatcttcacagcttctggcacagcaggtaagatgtttgggccatgctgaggagcattaaaacagagtttaggactttgtgaagataatagaaaaagcagatcattctcgaccattcaggaaaaatttgctcaagaaaagagttttccccttcaaattaacctaacctatttgaattttct

SEQ ID NO: 81054 - DNA, 601 bp, Homo sapiens
gtcaccgacagcatccacgtgagtgatgtggacacagtggggctgtggggtcccagcaagcgggygtgcatgtgtgagtgtgagagtgtgtgtgtgtgtatgtgtgagatgggggtggccatgagtgaatctgagtgtgctggggattctccctttgtgtgaggaagcacgacagctctgtccccacgagctgcatgggtggcggtgcgtgcatcgcctccacacagcaccctgccatgtctctgcctcacaggccacggacccagacacgggcgcgtggggccaaattacctacagcctgctcccaggaaatgggtaagggctcagggtgggccgtaggcaggtgggtgagcagggcccaggcccacctctctgcctctctgcagagatagaatagctggggaagaccgaaggcactcagttacatttcaatttcagataaacaaggaatgactttttgaaataatgaatatgttgcatatactgcatgggatatgctgaaatatttgttgttgtatatctgaaattcacactgaaatgggcatcctgtgtctctatttgctgaacctggcccctctgagcagggcagacctcttccaag

SEQ ID NO: 81055 - DNA, 601 bp, Homo sapiens
gtcaccgacagcatccacgtgagtgatgtggacacagtggggctgtggggtcccagcaagcgggcgtgcatgtgtgagtgtgagagtgtgtgtgtgtgtatgtgtgagatgggggtggccatgagtgaatctgagtgtgctggggattctccctttgtgtgaggaagcacgacagctctgtccccacgagctgcatgggtggcggtgcgtgcatcgcctccacacagcaccctgccatgtctctgcctcacaggccacggacccagacacgggcgcgtggggccaaattacctacagcctgctcccaggaaatgggtaagggctcagggtgggccgtaggcaggtgggtgagcagggcccaggcccacctctctgcctctctgcagagatagamtagctggggaagaccgaaggcactcagttacatttcaatttcagataaacaaggaatgactttttgaaataatgaatatgttgcatatactgcatgggatatgctgaaatatttgttgttgtatatctgaaattcacactgaaatgggcatcctgtgtctctatttgctgaacctggcccctctgagcagggcagacctcttccaag

SEQ ID NO: 81056 - DNA, 601 bp, Homo sapiens
gtcaccgacagcatccacgtgagtgatgtggacacagtggggctgtggggtcccagcaagcgggcgtgcatgtgtgagtgtgagagtgtgtgtgtgtgtatgtgtgagatgggggtggccatgagtgaatctgagtgtgctggggattctccctttgtgtgaggaagcacgacagctctgtccccacgagctgcatgggtggcggtgcgtgcatcgcctccacacagcaccctgccatgtctctgcctcacaggccacggacccagacacgggcgcgtggggccaaattacctacagcctgctcccaggaaatgggtaagggctcagggtgggccgtaggcaggtgggtgagcagggcccaggcccacctctctgcctctctgcagagatagaatagctgggraagaccgaaggcactcagttacatttcaatttcagataaacaaggaatgactttttgaaataatgaatatgttgcatatactgcatgggatatgctgaaatatttgttgttgtatatctgaaattcacactgaaatgggcatcctgtgtctctatttgctgaacctggcccctctgagcagggcagacctcttccaag

SEQ ID NO: 81057 - DNA, 1534 bp, Homo sapiens
gcgaaggggagggggcctgtgtgagcagcaggctgtgtgcctgtgtgcccaggctggggctctcatgaccatcagtgcagcactgtgagggcccggggrtagtgcatgtgaggagatcagggtgggaaaggtgacccgatgtgcatcagttatctgggctgactgaggaggtagagtttcctcatgtgtgtgcatatgtgtatgtatgtagcatgtgcacatgtatgagggcgttgtgtgggtgtctgagtagggctagagtttgactcccaactttattactttctagttgtgcaaccctggcaagttacttaatgtctctgaactttttagtttcctcacctatgaaatgggaataattgtattgtctcagatggttttctttaggattaaatagaatgaggtgatgactgtaaaacactaatgtacagtaagtggtatactaccatcgttatcatcatctggggggtgctgggttatacacggcacacaggaggatgggtgtggatccgagtattcagagggtgcaggtgtgtggggtctgggtaagtattttttatttttatttttaaataaaaaaatataaaaaattcttcaatcttcatagccaactacaactacaggtaagtatttcttgaaggagtgtgtgtttgtatgtggtgtgtgcatccctgaagcaaacacaagaactttacagaaagttgggtttatatggcactgcctgccctcccccctcccccccccacacacagagcacacaccttctctagtggcttcaatttgctgaaatatggcctagaccagggccagtatccaggcaacgagttcaggaactgtggatgctgttgtcttgggagtctcagacctcaaaagttttagcctcaaacaaagctagaatgggagtagctgcctgggtgtgagaaggggattgtgctttatggaggagatatgaacatgatatgaatgtgaacgagaggggaaagagggcaagatacatattttgtgtgtgtgtgtgtgtgtgtgtgtgtgtgcgcgcgcaggggtggctttggggggtggctgctgtctctgctctggtacagtctgcttgtctccatggtgcctgttgccacacacgcttgcttttcagaaagtcactgggattgtttattccacccccggcctgggcgccagccaaggagctgcaggcacttgtttatcttctggtgcgtacgagtgtgtatggctccccagtggcagagcaacccgagatacatacacacactcacacgggtgtgggtgaccatgtcatttgtcacagggtgagcctgaaccctaggatgagtcacaacctgggaccagatggattctctccacacggggacaaagatgacccccagcaattccaggtgtatgcaacaccgattcagcaaggcccaaaattccaggagagtatgagaagcaggtggctttggttccgtgctccatccctgagtccccctccccccagaacaaatcagtgatctgggtcacgcccaccctagagctggcactg

SEQ ID NO: 81058 - DNA, 704 bp, Homo sapiens
tatttcctcatctgaaaaaatgggtccaagtttcgggcaggtaggctattgagaggtgcaagtgaaatcatggtgcccttgaggagccaggaaggacttcccaaaggccgctgcttgtcacattttgttttctctttttaaaaaacacgatgggtgctgggcagagggaggggtgggcttctaggagcctgggggtggtactaagaggggagtgggtgacagctcttccttcccctgcctgggctcgcctggccttcccccaccctcagcccagagcctgtttccaggcaacaggatggatgcagggatggtttgaaggggagagagctataaatagggaagggagaaaacaaaaataaagttccagagaaagctgtggagctgcattgctgggggtgggrgtagggagaccgacgaacagcggggacgggggacagtccccagccctccatcagtgggagagggcagttttcaggttagccacccagcaatggtcctcagggtgctgacatgggtgggaaggcagtctctgtgtgcacagcaaagcaggatgggggtgaggaggagaaatcacttccagtcagaggactaacaaaagctcagaagagggagggttgcggcaggcagaggtgacggccgctgtctggatggaggaggaggcaggcagacaaagggaaatcatgggccaggtaaggtggggttgg

SEQ ID NO: 81059 - DNA, 631 bp, Homo sapiens
gattataagaaatgggaagtcatggccgggtgcagtggctcatgcctgtaatcccagcactctgggaggccgaggcaggtggatcacctgaggtcaggagttcgagaccagcctggccaacatggtgaaaccccgtctctactaaaaatacaaaaaattagccgggtgtggtagcgggtgcctgtaattccagcaacttgggaggctgaggcaggagaattgctagaatccaggaggcagaggttgcagtgagccaagatcgtgccattgcactccagcctgggcaacaagagcaaaactccgtctcaaaaaaaaaaaaaaamaaaaaaaaacaaatgggaagtcatacagatagtaaaatgcagagacagggcttgaactagaacttctgagtcaagatcctgacttccaacagtggaaggaaccaactgtgcaaaatgacaggagtggagggcagcgtggggtctcccacagcctggtggatgcactcatgctgaacgtacactgatcacccaaaccagacgctgcagaaggagcccccatccccatggaggcagggtctgcacgcgtccatggacagacacagagcattcacagcgaatgcctgcacacacatgtcatgggggatcca

SEQ ID NO: 81060 - DNA, 820 bp, Homo sapiens
ccagattctaattattcagaaatatattttaaaaggatgattcagaaagggaatcaccaggtgtcaaaagcaaataagaatctcaaaattcaaacatttaaaggaagaaacaaaatcacagatgcctatcagatccagattgagatcttagggactgggaactggggtttcaatgttcatrtgacaaaacggcaccattggggcaacacaaagtgaaagaaactggcacttttatccttgcatagtggtggaactctcttaaggtgaccacttctgccacaagaagactataaaaaaccttggatgctgagctactaaaaaagtaaggtaaatttggtgagaaaaattatgatctgttgaaaaatgtaagaaggccaaatctgggccacacatgagtgttggggaaaaaaataaacctatctgcaaggtgcagaaagcccaagataagaaattaatgtaagaacttgtcccagatagtaaaaccataggtatcccaccacacggtcacatgtcaaaaccacaatataaaaatactttcacaactcagggcacaagagacttcttcaaggaaaaagaaaaaaaaaaaaaagtaaaagaaaataattgtccaccgcataaaatggattaatgtggagactcaaaacacacacacacacacaaacagtattattaatacccctaggaacttgagatactgggacaataagaagaaaattaaaaaatattaacgaataaaatttttaagacaaaaaattaaatagaaacaaattatcaaaatatactatacaaaaacaatcaaaattaaaactttcctaaaaat

SEQ ID NO: 81061 - DNA, 820 bp, Homo sapiens
ccagattctaattattcagaaatatattttaaaaggatgattcagaaagggaatcaccaggtgtcaaaagcaaataagaatctcaaaattcaaacatttaaaggaagaaacaaaatcacagatgcctatcagatccagattgagatcttagggactgggaactggggtttcaatgttcatatgacaaaacggcaccattggggcaacacaaagtgaaagaaactggcacttttatccttgcatagtggtggaactctcttaaggtgaccacttctgccacaagaagactataaaaaaccttggatgctgagctactaaaaaagtaaggtaaatttggtgagaaaaattatgatctgttgaaaaatgtaagaaggccaaatctgggccacacatgagtgttggggaaaaaaataaacctatctgcaaggtgcagaaagcccaagataagaaattaatgtaagaacttgtcccagatagtaaaaccataggtatcccaccacacggtcacatgtcaaaaccacaatataaaaatactttcacaactcagggcacaagagacttcttcaaggaaaaagaaaaaaaaaaaaaagtaaaagaaaataattgtccaccgcataaaatggattaatgtggagactcaaaacacacacacacacacaaacagtattwttaatacccctaggaacttgagatactgggacaataagaagaaaattaaaaaatattaacgaataaaatttttaagacaaaaaattaaatagaaacaaattatcaaaatatactatacaaaaacaatcaaaattaaaactttcctaaaaat

SEQ ID NO: 81062 - DNA, 741 bp, Homo sapiens
ttgagaatgtttatagcagaattctcaaattaggcttacatttcatgaatgtggaaaagatcaggactgtggactagacatttgtattaactcctgggacttgatttgtagaatcaatataatggactatttctttcccccaaagcactaatctgctagcagatgaatagtaaagcctggccctgtaacacaatgacaaccctcttgcaggtgtaatgatatgagtcgatctgattccaacgaattgttatgttttctattaaaatgctgtgttaatcttcaaagcaaaacaatggacattattatatataaatttgaatgctatgtgctgtgtatgtatactattttgagcatgattttaagaaaaacacctagtaacacttagctttaatcttyactaagttacaatatttttttcatcactctctaattcccttgactttttctaagacttaggtaggaaactgccttcttagctgtttcaaacacggagtagtgggtctcgacgttggccctatataagaatctctgtacttcaaaatgctcaggctatgccacagaacaatgaaatcaagatttctcgaagcaagacacaagtgtattagtatcctagggctaccagaattgccacaaacgtggtggcttaaaacaacagaaatgtattctctcacagttctggaggctggaaactgagatcaaagagtcagcagggccatgcaccctctcaagcctctgacggaa

SEQ ID NO: 81063 - DNA, 741 bp, Homo sapiens
ttgagaatgtttatagcagaattctcaaattaggcttacatttcatgaatgtggaaaagatcaggactgtggactagacatttgtattaactcctgggacttgatttgtagaatcaatataatggactatttctttcccccaaagcactaatctgctagcagatgaatagtaaagcctggccctgtaacacaatgacaaccctcttgcaggtgtaatgatatgagtcgatctgattccaacgaattgttatgttttctattaaaatgctgtgttaatcttcaaagcaaaacaatggacattattatatataaatttgaatgctatgtgctgtgtatgtatactattttgagcatgattttaagaaaaacacctagtaacacttagctttaatctttactaagttacaatatttttttcatcactctctaattcccttgactttttctaagacttaggtaggaaactgccttcttagctgtttcaaacacggagtagtgggtctcgacgttggccctatatwagaatctctgtacttcaaaatgctcaggctatgccacagaacaatgaaatcaagatttctcgaagcaagacacaagtgtattagtatcctagggctaccagaattgccacaaacgtggtggcttaaaacaacagaaatgtattctctcacagttctggaggctggaaactgagatcaaagagtcagcagggccatgcaccctctcaagcctctgacggaa

SEQ ID NO: 81064 - DNA, 1086 bp, Homo sapiens
attaattaaaatatggtgatactttgggattaagtggattctccaataagcttgtaccaaatagttttaggatctgtyagtgttcctcacttgactcaattattacactgttaattacagaacgtagattttctaattatattatttcttctacatgtatgacttgatactctttttctttttttaaagaagagctgattatggtcttgatgtagtaattctgaagccattttgtgtataaaccatttttgtataaccattttatgttataaagctgaacaaatgacttacatacgttgatgtttgggggaactaagattgtgacagtaggagaagaaaaatacaaacatgccatggggtaatgtgaggaaagcaaatattacattaaggtataaattgtcaatgttaatatttatttaaaatacatttcttcagctctgtccacttacaggatttaaaggaaataaaactatggttgtcatgagcatgcccctagcagtcagatcttaatttctaaatattattctccacagcagagttccttggagaaataagtggctgatgtcaggtatgtatcagaaaaaagaccaaatctcatgttatgcgaaaaagcaaggtagtgcttaaataattatgggggcatatcaaaagggcaggagctagcttgaaggggctgccacaggccacatttgggataagacaagtaccaaaatgaataatggctgtaaggaataactttgagtaaaagaaaaattaggaggaaagggatctgtgttcaacaaacatatatatttttggaaattgattaaatgacagttattggccagccactcgggaggctgtgtatttcattattttaaaagctgaagtaatgagaataactgtcaaatcaatttggacatttaaacagtagaattggatcacttataatacagaaaattgcttttcatttgaagattgaatagtagcaaaaatagttacttgagataagcagaatcaatggaatattaagaattgactgcaggcaagcacttctgttttaattccttactgatataaaagcaatgggagaaattgacaaagacc

SEQ ID NO: 81065 - DNA, 1569 bp, Homo sapiens
caagataaaaccaaacagatcactttgaaataaaagccacagggaactgtagtcagtggggggcacataggataaatgaacaaatctcttcaatctctactttcagtaattctgtaataattgtctgatacgattgttaattagactcaattatgggattagtttgaattatattatgaarcattgatttacagactataaccactgaaagcctaagtgctgaatgtagtaaatgtattctaatcttgtgttataatattgcagcagggagcagagaggaatatcgatctacttataataaatttatttccaaattattttttatttccagttaataaatgtaactttgctagggaataattttttttggaagtggtaatccattcctcagggaggaacagagaaatgtactgatttgtttgacttcgagaggcatctgaactagaaagtttctgaaaaggcaagcttaagagagaattggggaagatgtaagtctccatttcctttatgaatctgatattgctgtaatctttgagaaacttcccaagttggcatatgtaacgatgggctaggaggcatatatacggcataatctggaaagctcatccaaaactaattcctaggatgcatgatggtcacagtccaagtgtgaaaagtcaagagagggcccagcatggtggctcacacctgtaatcccagcacttcgggaggctgaggtgggtgggttacttgaagttaggcattccagaccagcctggccaacatagcgaaaccccgtctctattaaaaatacaaaaaatggccgggaatggttgtgcgcacctgtaatttgaactactcgggaggctgaggcaggggaattacttgaacccgaaaggcagagcttacagtgagctgaaattgcaccactgtactccagcttgggtgacaaagtgagatgctgtctcaaaaaagaaaaaaaaaaagaaaagtcaacagaagtattatatattttaaccctatgccaaaagtagtaatattgataatactaacctttgtcaactgggtaatatgtgccccaggctctgggctaagcaatttattcctttcaacaatatcattatcagacatattttacagataaggagacagataagttatatgacccatctcctggggcatctattttacatttggttgtagagggaaatgttgttaatttgcctaggtcatttaaaacatgtttatattcgtggtggtttgcattaatgcaataaatagagtgtatttccttgcccttgactttgcttgggtttggccatgtgacttgtcttggctgatgaagtgttagtggacaggacatgagcaaaggcctgaaaactacttacatgattgggcttacttccctgaatcttagttatagttctgcttcttcactgatcccaagaggaggatgagagacacgcagattccggttaagcctccccagtaaggacccgcctacatgggtcaactcctagctgcttcagatgtgtgtgagagaagccagctgaactcaacagtcactcatctgagcccagatgaccacag

SEQ ID NO: 81066 - DNA, 1340 bp, Homo sapiens
tcattcaagggaaatgagttttcttttcttttctttttttctttgagacagagtctcactctgttgctcaggctggagcctgatggcaccatcttggctcactgcaacctctgcctcctggattcaagcgatcctcctgcctcagcatcctgagtagctgggatttcaggcacatgccaccacactcggctaatttttgtatttttagtagagttggggttttaccatgttggtcaggctggtctcgaactcctgacctcgtgatccacccgcctcggcctcccaaagtgctgggattacagacatgagccatagcgcccagccaagttttttgttttaatttcttcttagttcatttaatgaaagtctagctcatttgtctctgaacacttttttaagagctgaagttttgctaagtcactcaatctgagttggaaatttggacaactttttttaagctatgaataaatttgcaacttctgataattcttgaaatgtgcattttctccttcacccttaagttaatataacactttgtattttttaaagtactttttttgtatattatttaacatgctttttgtaataattctgccaggcaggtaaatcaggtcacattatctgcattttacaaacagaaaactgagtttcagagggattaactggcctacccaaagtcacacaaccagttagtcacagagttagaattactagatcttctgttcattaattcagtagttttttttaaatgtactatctttcctttccttacatcaattttgttaggggaaatatgcaatagcatttcttctcaactctgccagaagagcctataatttggttagcgtatgttttaggagatcaaagctaaattctaatgatgttaatgcctagtatgccacaggcattgggggatggttaccaacattattttaaatctttatagtaacactgtattttacagaagagaaggtttacagatgttaatttatttgccaaagccacatatctgataaccttctgctttccttggttctccctcaggctacatggctgtattggtaaatgcacctagtctggcatattctctggaacacacatgaccaaagatcctatcaaattacctctaaatattttccaacaacattatcattgctctcattgtcaagataaacatttatctaatgtttatacctagcaaacaccatggtagacactcaaaacacaagaagtatrtgtatatgtttgccctccagaagtttgtcacccaataaagggatatgttgcatatataacagcataggaatcaagtgataaaacaacagagtttgctgtcctca

SEQ ID NO: 81067 - DNA, 1972 bp, Homo sapiens
tttatttctgccacttgggatttttgccatccttggaagagggctttggcatgagaacagtgagaggaaggatctaccagaactcaaaaccctggtttctgattctggagttccagttctttctatgacggttttctaaccagtgaggacttctgagaacagcaaagggcttcttcaccatcatcatgagaccttatcagtaactaacatatcaccaggagattatatcacaatgtctgtttgcagaacactttacagtttacacatttcacatatattatttcagcactctggcgattgctgtgcaaatctggctgcctagagaagttacctggcattctgtacatatggtattttatgacatgatattgatttagtgtgtggatggtgtctcatccccccatatataaagacagaggtgaggcttgggtttggtttttctttttttttttggacagggtttctgtcacccaggctggagtgtagtagttcgatctcagctcattggagcctcaacttcctgggcatcgatcctcccaccttagcctcccaagcagttggaactacaggcgcagrccaccacgctgggctaattttttttttttttttttttgagacagcgcctcactctgtcacccaggctggagtgcagtggcgcgatctcggctcactgcaacctccgcctcctgggttcaagcaattctcctgcctcagcctcctgagtagctgggattactggcacaccaccacgcccgattaattgttgtatttttagtagagacagggtttcaccatattggccaggctggtctcgaactcctgacctcaagggatccactcgtctcggcctcccaaagtgctgggattacagcatgtgacaccatgcccgcttgaggcttgagtgtgtgtgtgtgtgttttgttttgtttttttggtatttatgaagctatttgacacttccatcactatccaaatttatatatatatgtatgtatagttgttgtttttgttttgtttgagacggtattactgtgtcgcccaggctggagtgcagggactcaatctcggcccactgcaacctttgcctcctgggttcaagcaattctgccccagccaactgtgtagctgggactacaggcacatgcccccatgcccagctaatttttgtgttgttgtttttttgtttgtttgttttttgtttggttctttttttttgttttattttgttttgttttttgagacagagtctcactctgtcgcccaggctggagtgcagtggcaagtctcggctcactgcaacttctgcttcccgggttcaagtgattctcctgcctcagtcttgcgagtagctgggattgcaggcgctcaccaccatgcctggctaatttttgtatttttaatagggacggggtttcaccgttttggccaggctggtcttgaactcctgatctcgggtgatccgcccgctttggcctcccaaagtgctgggattccaggcatgagccactgtgcccagcctaatttttgtatttttaatggagacggggtttcaccatgttggtcaggctggtctcaaactcctcacctcaagtgatctgcccacctcagcctctcaaagtgctgtgattacagccatcagccaccgcgtccaggcccaaaattgtatttttgacactgattgctgctcccagagtgtgggactcctgccttcattcagcactgttatggatttgctcctgttagggcatttaaatatgtgttggagatgccaagcagcaaggactctggatgcctgtattcagtctgtttccaagccttgaggaggaatttaatcttcagtttgctgcaagttctgcagaatccttgaggctgttatttgcaaaccactggatgcagtgactgtgtggaaagctcacacacatccatgtggattattgatgattttgcagactcagcaaaacatttggatcca

SEQ ID NO: 81068 - DNA, 1972 bp, Homo sapiens
tttatttctgccacttgggatttttgccatccttggaagagggctttggcatgagaacagtgagaggaaggatctaccagaactcaaaaccctggtttctgattctggagttccagttctttctatgacggttttctaaccagtgaggacttctgagaacagcaaagggcttcttcaccatcatcatgagaccttatcagtaactaacatatcaccaggagattatatcacaatgtctgtttgcagaacactttacagtttacacatttcacatatattatttcagcactctggcgattgctgtgcaaatctggctgcctagagaagttacctggcattctgtacatatggtattttatgacatgatattgatttagtgtgtggatggtgtctcatccccccatatataaagacagaggtgaggcttgggtttggtttttctttttttttttggacagggtttctgtcacccaggctggagtgtagtagttcgatctcagctcattggagcctcaacttcctgggcatcgatcctcccaccttagcctcccaagcagttggaactacaggcgcagaccaccacgctgggctaattttttttttttttttttttgagacagcgcctcactctgtcacccaggctggagtgcagtggcgcgatctcggctcactgcaacctccgcctcctgggttcaagcaattctcctgcctcagcctcctgagtagctgggattaytggcacaccaccacgcccgattaattgttgtatttttagtagagacagggtttcaccatattggccaggctggtctcgaactcctgacctcaagggatccactcgtctcggcctcccaaagtgctgggattacagcatgtgacaccatgcccgcttgaggcttgagtgtgtgtgtgtgtgttttgttttgtttttttggtatttatgaagctatttgacacttccatcactatccaaatttatatatatatgtatgtatagttgttgtttttgttttgtttgagacggtattactgtgtcgcccaggctggagtgcagggactcaatctcggcccactgcaacctttgcctcctgggttcaagcaattctgccccagccaactgtgtagctgggactacaggcacatgcccccatgcccagctaatttttgtgttgttgtttttttgtttgtttgttttttgtttggttctttttttttgttttattttgttttgttttttgagacagagtctcactctgtcgcccaggctggagtgcagtggcaagtctcggctcactgcaacttctgcttcccgggttcaagtgattctcctgcctcagtcttgcgagtagctgggattgcaggcgctcaccaccatgcctggctaatttttgtatttttaatagggacggggtttcaccgttttggccaggctggtcttgaactcctgatctcgggtgatccgcccgctttggcctcccaaagtgctgggattccaggcatgagccactgtgcccagcctaatttttgtatttttaatggagacggggtttcaccatgttggtcaggctggtctcaaactcctcacctcaagtgatctgcccacctcagcctctcaaagtgctgtgattacagccatcagccaccgcgtccaggcccaaaattgtatttttgacactgattgctgctcccagagtgtgggactcctgccttcattcagcactgttatggatttgctcctgttagggcatttaaatatgtgttggagatgccaagcagcaaggactctggatgcctgtattcagtctgtttccaagccttgaggaggaatttaatcttcagtttgctgcaagttctgcagaatccttgaggctgttatttgcaaaccactggatgcagtgactgtgtggaaagctcacacacatccatgtggattattgatgattttgcagactcagcaaaacatttggatcca

SEQ ID NO: 81069 - DNA, 854 bp, Homo sapiens
gtgtgacaaagatgaaaagataagacagaaaactatgctgtataaattctgataaaagataattaccaaggattgaagagacttatgagaacatttttagagaaaatgagattgtggtgggttttgaagtagagagaaataaaagagtgggtgcttgctcacaggaagaacaatatggacatttgataggaaaaaggatgtaagtgaagtacttgccttacatggcttatctgcccctgctgcatctcaagataataaataatagtatttactattatgggtaacatttcaggttataaaatattttcatttacattcacttgatcatagtattcacctcctaataatctatattacagcaacctaggtgtactgactccaaaacaagttcttgccaccacatggccttgcccgagcattataacttttaaaataacatttgatgtcccactttatacccttggataaggtagagctgaagtgatctggatatcagatgtcaagaaggaatgaaaacaggataaagcaaatgttattcgagttgggggccaaataaacactatgctattcaaataaaccctaaacacaatgggygtctgagctatttttattgtatgtgttaagatgtaattaagagtttttttctcttcatatttttcctgtatatatttgaatctagagaatccaagtcattctaaaagatgtcactcctgtcagcttccagctattttgtatagtgtttaatcaactgatgaagttgggtgcatgtcttaagatatgaagtcattttgtctgatttgaagttcctttattatctatgtgatatatactgtatatgtattctgtaccaggaa

SEQ ID NO: 81070 - DNA, 938 bp, Homo sapiens
ttgtcacattgtcaaccttaaatttatactatttttatttaattattaatataacccaaaaaagctggataaacacataaaatccaataaataaaatccaaatctaataaaataaatatctcaatagtgttattacccaatgcctagattagcacttaaacacagtatgtgactgataattatttattgaaaatgaaagtaatgaataaacatataaaaaatttagcatggtacctagcacatattaggcattcaactaatatcagtccctgtcccttctttcatagcaaattcctaaagacattctctctgatcttggtcttctttcatatgaataactccagatggagtcaattgctgatactgttgattaatttacaacaattttccacatatatatcgttattttgaatkatgaatagacaaattccaaacaatcatttgctgaacaagttttttgtgtcaactgcaacaaatatgtgagacctataatactgctcccattttatagatgcagaagctgaacacagataagttacgtgacttactcagttatgtgacaaagatataattaaaatcaggttttcagactttatcttcaataccctttcccctacatttagctaccattgcactgtcataggcaactacaacagtcctcatctgggctctctctgatcgtcaaaggaccttatattaagcagagggctgaaatatgcccgactggatatgaggcgatgacactaattatggaatttggtaagggaaaaagagagaagcacgaagttgccctttgatgacagcataaaaagctatccaatattaaactctgactatcacaggaaaatataacattaaaaatgctttggacaatcttaagaacagcattatcttaatagacagctttcatagactccaacacatgtgcacctatgcat

SEQ ID NO: 81071 - DNA, 1420 bp, Homo sapiens
tttattttgagaaaatactggcaaattagaaaatactggcaaatgtttttgcacgtggtctcttaagaaccatagctcagaaccctgggatgtgatacagtactattcacatcagtactactcagacacattgaaaacctggtcctgtgtcaagtcccatgaagggaatccctaagggaatagagaagagaatgctatttaatgatttgatgcatgatagtaaccacaggagaataaaacttcgaaagagtctttataaactgggtttaatgaaactgatcatttccagttctattgtatatcatttactgccttagctggcaagactctagaaatagaaatagagaagattcttccttctcatatgtgtacattttaatatcttgaatatagaggactacttatagaattcagtgaagtcaccaaaggttgaataattagctatttctgccctttactagttgttagatttawcattatcaacctttgcagtgaaaagtagaaaaaatacaaactgcaccaacagttgggctagtcatacattttacacagtgacaatatcccattaaaatggtattcttaaagaggagatgtgtgaattaatatgcagtggcacatagaattaaccaggcatcatcattttatttcagaagcactcatatgattaaatttctgagctaaaaattcatccttaaaagttatactttagcagaatgactgattttattttatagctgtcaatttgattgacaagtaggatccatcaagtgtgtttctattcttgtaatccagggacaccttgaaaagatttcgcaagagaaaagaaagaaatattatagaaaaaaaaaaggaaatcgcatgtctaattaagagcttaatttgtgatgaaaatacataattttttttttacatccactatggtgctaaaacaactacactggaaaaatcccttagttatggggtaattggtatgaatcaaatatctttcttatttagaaaccatttatagtgctgaattcatttcatttatagtagtgtcattttgtatttttatgcagtttgaattggtactgttttctaattgcagcaaggactttactgcataataatttaaaattttagctttgtaatagctcatgaaaatattcaatattttgttttgttgtgatggttaatattaggtgtcaacttgattggactgagggatgcctagatggctggtgaagcattgtttctgggtgtgtttgtgagggtattgccagaggagactgacatttgcctcagtgagctaggagaggaagacccaccctcagtgtgggttagcatcatccaatcagctgccagcatggctagaataaagcagggggaagaaggtgggataagctggcttgctaaatctgccggctctttttcttttgcc

SEQ ID NO: 81072 - DNA, 1292 bp, Homo sapiens
caagagaggactgataatatttctaagagagattccctgattgccttcgatatccaagtttgggcatctcattgccaaggttccttctcctggcctgcttcctcagtctttctccccagctgttgagggctgtattccctgtccaagctcctcctcctttccaaattagttccaatcagttcccctggcctgtccccaccactcggtcagctcgctcagtacttctaaacctcatgtgtctgctccgtatctctgttcttcagagccagtctttctgtatcttcagtctagtaagtgctgctttcataaactagacttaaaatttcatcgcattttaataaaaagtaattactttatatatgatctttaagcagctattctcttaaagaggtactaaatggtgagactttctggtaagggaagaagagagaatgatgccttgaccagtgtttgaggagttaacttcttgagaaaatattgcttacagtctggtaccaacatattattggcagtaatattcattaaacattgttagcatattcgtagtctctaaacaatggctttcaaatattttgactacaactcataataaatacattttacatcctgacccagagcacacatatatgtttatgtatataaaaagtacatctaactaaaaaagattcatttaaaaaaataaaactcctagccttacaactcactaaaagattgcaaccagcagtttaaaaaaccgtgatacataacatgtccttttggcaagtttgaacagcaatgtgtttggtggtttatgttactcgctggaaaacaagcrtttttgaaaccattatagtgttgaaagaaagtataacaaataatcttagattacagttgtctgtgattattccaaatctgaattttccattcctgtgttatttttctcagggactaaatttctaaatgtgattttgtagcagatgaatgagacagggaaagtaaggctattgtttttatgaaatctaggctacattttattccaatcttgtttctgatatcttttctcttaaattgatgttatcattcagcttccattaagaaatgacttctgcatccatttgccttgtgtgtatatgttcacaaatgagtcaatcatatttcattccttaatttctgtagtgagaaaaactgtccatcctaaaggaagaacttgaagaatttcttgctctcctaatggtttttcactaaatccaattctactaaacatgtcattgttaggaataacattttgttttgttttatttcaaggatatgct

SEQ ID NO: 81073 - DNA, 1292 bp, Homo sapiens
caagagaggactgataatatttctaagagagattccctgattgccttcgatatccaagtttgggcatctcattgccaaggttccttctcctggcctgcttcctcagtctttctccccagctgttgagggctgtattccctgtccaagctcctcctcctttccaaattagttccaatcagttcccctggcctgtccccaccactcggtcagctcgctcagtacttctaaacctcatgtgtctgctccgtatctctgttcttcagagccagtctttctgtatcttcagtctagtaagtgctgctttcataaactagacttaaaatttcatcgcattttaataaaaagtaattactttatatatgatctttaagcagctattctcttaaagaggtactaaatggtgagactttctggtaagggaagaagagagaatgatgccttgaccagtgtttgaggagttaacttcttgagaaaatattgcttacagtctggtaccaacatattattggcagtaatattcattaaacattgttagcatattcgtagtctctaaacaatggctttcaaatattttgactacaactcataataaatacattttacatcctgacccagagcacacatatatgtttatgtatataaaaagtacatctaactaaaaaagattcatttaaaaaaataaaactcctagccttacaactcactaaaagattgcaaccagcagtttaaaaaaccgtgatacataacatgtccttttggcaagtttgaacagcaatgtgtttggtggtttatgttactcgctggaaaacaagcgtttttgaaaccattatagtgttgaaagaaagtataacaaataatcttagattacagttgtctgtgattattccaaatctgaattttccattcctgtgttatttttctcagggactaaatttctaaatgtgattttgtagcagatgaatgagacagggaaagtaaggctattgtttttatgaaatctaggctacattttattccaatcttgtttctgatatcttttctcttaaattgatgttatcattcagcttccattaagaaatgacttctgcatccatttgccttgtgtgtatatgttcacaaatgagtcaatcatatttyattccttaatttctgtagtgagaaaaactgtccatcctaaaggaagaacttgaagaatttcttgctctcctaatggtttttcactaaatccaattctactaaacatgtcattgttaggaataacattttgttttgttttatttcaaggatatgct

SEQ ID NO: 81074 - DNA, 544 bp, Homo sapiens
caaagtactaggtaattagattcaaggctatggcactcctgtgtacttgataccaacggttcggactgggaaggccctattttagattagttatctgtgtacttgaaggaggagaaaagggaaaccggggagctaatgaactgtacttagaaccaggagaatgcttcactcggggctttcaggaagaagcattttttggccagatgaaggaatgacagcaagccccagagaccctgtgaacataagtgtaattgtgatgatgggggaagtatgagcaagataaaagtgttactgaaagatgctatgggaaattttgtcagatatgcagaggagctggacaaaaaaaacagcttgggaaattacaacctgggaaggcttcttgattttttctcctccaaaagaataggtaagaggggctgggtgcggtggctcacacctgtaatcccagcactttgggaggctgaggygggcggatcatgaggtcaggagattgagaccatcctggctaacacagtgaaaccccatctctactaaaaatacaaaa

SEQ ID NO: 81075 - DNA, 1030 bp, Homo sapiens
gagttcttgtcttttaaaatttattcactacccatatttggcttaatttagggatgaaaaatacagattctagtagcaataaaatacccagacaatgaaaacaaaataaaaacagtggtttttataataacattaattctggacctggagaatactaaaatttttgtgagaaaacaaaaggtcatcttagaagacagaaaatactcatatttaaaaataaagacttagaaatttaaaacaatacagagtttccctaccatagatctccatgcctaatcaacttgaaagacacagagatgtctgtgctaattatacacactatacatttaagagaggggttaaattatttacctggcaaaggtccttcagtaactttaataacttgtgcaatgtacaagtatagggccctggttagggcagatttagtggagtattttagacatcctttctatggaaatgatggtattacattagatatacatcctctttgagttgagagaacatataaattagtgaaaaaawttctctaaatatcaataattgatgcaaggtggctattacagcatatcacatacaatagggagtaaataagttttaataaaaagttgccatgacttctttgttatcactgaatctagaaatgtaactgctttacctgaaatttcgaacgagaaagttcttctatgaaatatagcaagtgataaaaaactatgaggcaactgttaagatacttcaaaggtgccaataagagtgctacagcctaggaatcaatcgtggatctgtccagtgcattgataagacagaaatcagattaccaaatcattttgcaagtactttaatataagatgttgacaaacttgagggagcttagagaaaagctgattgattaagaggctgggaaaatgacttaagaggcaagattataaaaactaaatatattgttcattgactaaggaattaagtacttgatgtacagtacatataacatttttcagagagtgacttaggggtatatgacacaaatttccaa

SEQ ID NO: 81076 - DNA, 1223 bp, Homo sapiens
atggttgaactaacttacactcccaccaattgtgtataagcattcctttttctccataatcttgccagcatctgttattttttgactttttcataatagtcattttgacgggtgtgagatggtatcttattgtggttttgacttgcatttctctaatgatcagtgataccaagctttttttcatatgcttgttgaccacatatatatattcttttgcaaagtgtctgttcatgtgctttacccccatttttatagagctgtttgtttttttcccgtaaatttgtttatgttcctatagatactggatattagacctctgttggatgcatagtttgcaaaacatgtctcccattctgtaggttgtctgtttaccttgttaatagtttctattgctgtgcagaagctctttggtttaactagatcccatttgtcaattttcatttttgtttcaattgcttttggcatcttcgtcatgaaatctttgcctgtgcccatgttctgaagtaatgmcttggttgtcttccagggtttcatattacgtattaatattgccatgtagcctcaacataaattgacttctcagtggctacatttttcctatagttaaaatgggaaacctttgagaatgagttactgtgttgcaggttagctcctacaactcaggtaataaaaaagtctctaaaaatcatggagaagagggacaagatgtttgactagatgcagtcacaaagcactgctgccatcaagggagtccaaattatccagcaaatcaccataatttggagaaattatgctcagagtggaggttgaggcaacgctgaagctgagactctttagtctcagtttcacagcagggacaaagctgtgaaccctgcacagtgtggccaaattacagggcttatccttggcctcaaaaggttcctggtaaaggaaggagctgaggaatagctcactctcactatggtcctctgagagcctagctacaaggaaccccacatcccccatggacatgttagctgtcaggggactctccctggggagcaggcagaaacaggtcttcagacagcatggagcctaggagcttttttgttctgagcagctccagtggacagcagtcatagacacccattccccagggctccacatgccccaccaggtgatacgggccccagctgagttctgagccagcagagagtagggctagccttcttgtggaagttcaa

SEQ ID NO: 81077 - DNA, 1047 bp, Homo sapiens
gaatatgctattaaaacacctattttattggctttgggaatagtgtaacttwacatgtataaagatttttggagaactctcactttcttccacgaggatactaaggttcaaaagtataatatggcatggccaggataaccagctaattaacagaaatgctggaaccagcagctgcatcagtgacaagtggtgtttccaccactccatgctgttgacaggacagtcatcatgcctacagccaagaggaatacctttgaattcatggcagaggtttttagtcatgtagatccctgatgatgcaacttacttcggcagactttatcaccaaagaatgaaagcttcaatcaatgtcaaaaagttgtgaaaaatgaccattaccttccttttctttttctggaaatttcgttattgtcgtttttttttcttttcttttgagacaaggtctccctctgtcacccaggctggagtacagtggcatgatcagagctaactgcagcctcaacctcccaggttcatgtgatcctcctacctcagcttcccaagtaactgagaccacaggcatgtgccaccacacttggctaattttttgttgttgtttcttgtagagacagattcttgctatgttgcccagacaggttggtcttgagctcctgggtttaagtgatacttccacctcagcctcccaaagtgctccaaggcggatcacaggcatgagccaccacacctgaccagtcttctttaactttcaatcacctccattgtttttcggtcagcctctgagatgttgactgtaaggtcttgcaggacaaaaagtatgtcttctatgtgttactaagctaatagtaatgtttctattattagggaaaacacagactcatgggaaaattataaaaataggatatttgtgaaatgtgccaggcacttttatgtgctgccttgacatctgccaatgtcaagcttggttcagccatgtttgagggaaatattatataagagatatattgcaattgtaaatatagtttagtaaattcatttcttagaattgtt

SEQ ID NO: 81078 - DNA, 1047 bp, Homo sapiens
gaatatgctattaaaacacctattttattggctttgggaatagtgtaacttaacatgtataaagatttttggagaactctcactttcttcmacgaggatactaaggttcaaaagtataatatggcatggccaggataaccagctaattaacagaaatgctggaaccagcagctgcatcagtgacaagtggtgtttccaccactccatgctgttgacaggacagtcatcatgcctacagccaagaggaatacctttgaattcatggcagaggtttttagtcatgtagatccctgatgatgcaacttacttcggcagactttatcaccaaagaatgaaagcttcaatcaatgtcaaaaagttgtgaaaaatgaccattaccttccttttctttttctggaaatttcgttattgtcgtttttttttcttttcttttgagacaaggtctccctctgtcacccaggctggagtacagtggcatgatcagagctaactgcagcctcaacctcccaggttcatgtgatcctcctacctcagcttcccaagtaactgagaccacaggcatgtgccaccacacttggctaattttttgttgttgtttcttgtagagacagattcttgctatgttgcccagacaggttggtcttgagctcctgggtttaagtgatacttccacctcagcctcccaaagtgctccaaggcggatcacaggcatgagccaccacacctgaccagtcttctttaactttcaatcacctccattgtttttcggtcagcctctgagatgttgactgtaaggtcttgcaggacaaaaagtatgtcttctatgtgttactaagctaatagtaatgtttctattattagggaaaacacagactcatgggaaaattataaaaataggatatttgtgaaatgtgccaggcacttttatgtgctgccttgacatctgccaatgtcaagcttggttcagccatgtttgagggaaatattatataagagatatattgcaattgtaaatatagtttagtaaattcatttcttagaattgtt

SEQ ID NO: 81079 - DNA, 1047 bp, Homo sapiens
gaatatgctattaaaacacctattttattggctttgggaatagtgtaacttaacatgtataaagatttttggagaactctcactttcttccacgaggatactaaggttcaaaagtataatatggcatggccaggataaccagctaattaacagaaatgctggaaccagcagctgcatcagtgacaagtggtgtttccaccactccatgctgttgacaggacagtcatcatgcctacagccragaggaatacctttgaattcatggcagaggtttttagtcatgtagatccctgatgatgcaacttacttcggcagactttatcaccaaagaatgaaagcttcaatcaatgtcaaaaagttgtgaaaaatgaccattaccttccttttctttttctggaaatttcgttattgtcgtttttttttcttttcttttgagacaaggtctccctctgtcacccaggctggagtacagtggcatgatcagagctaactgcagcctcaacctcccaggttcatgtgatcctcctacctcagcttcccaagtaactgagaccacaggcatgtgccaccacacttggctaattttttgttgttgtttcttgtagagacagattcttgctatgttgcccagacaggttggtcttgagctcctgggtttaagtgatacttccacctcagcctcccaaagtgctccaaggcggatcacaggcatgagccaccacacctgaccagtcttctttaactttcaatcacctccattgtttttcggtcagcctctgagatgttgactgtaaggtcttgcaggacaaaaagtatgtcttctatgtgttactaagctaatagtaatgtttctattattagggaaaacacagactcatgggaaaattataaaaataggatatttgtgaaatgtgccaggcacttttatgtgctgccttgacatctgccaatgtcaagcttggttcagccatgtttgagggaaatattatataagagatatattgcaattgtaaatatagtttagtaaattcatttcttagaattgtt

SEQ ID NO: 81080 - DNA, 753 bp, Homo sapiens
ctagaatattttcaatttagttataaggtatataaagatacagatatggatacggatatggatagatttagatttatacatttttcgctatcaatagcttctgttattagtattctttgtatttacatttataaaaaacaattttcctttctcataatgcccttataaggctttggtaagaaggtcatggaggcctcatgtaaatatccaggaaatatttatttgtagctgtactggaagagatattgttaagtcagttgttttattctccctcatagattaggaaggtttactattaaaactacctgtgcctggtatagtttgtgagaagttttttttttcttttttgaatgtcatagattgattttttctcactagtcatagagctattgtatttttcaataattttatattaattttgataagttttactttttcaggagtcaatttcaactaatcattcctcattattttaatgcttttatcttcttgaacatatgattccaatttacaaaagctgtgtgattatactcatattctaattctctaatctctgtcatttttagktctgtttctattaattttttttcctagttatgggcacatactactgttttgttatgcccaggaatttctgacttttggatacttcgaattttatattgtttggtgctaaattttggtgtattcctttaaatatggctggacatcttttctgacttacagttactaaagatcactgtattcttttcc

SEQ ID NO: 81081 - DNA, 1041 bp, Homo sapiens
acccctcacccttgatgctgccttaaataaggataaatgttctctgagtttgtataaataaatgaaagagaggcagagagagaaaaagatatgggaaagaagagagaaataaaataatatgggaatttaagcaaattcttcggggaaagaaaatctattccagtattgactccttcattgaagtaaccaatcgatatatacaagaagtccaaaaatatttttracatattggaaatattgctggatgttttagatgaactgtttacatataggaaactggtaaaatacaggtgtcctcatacacgtcttcttttatcatcatggttactcttacttaaatttattagcatggatggacacttagtaatgtgctcacatggaagaggctacatgtgtttacacagtatggtgactgctcaccaatttttttcccaattgatcaaagtgacaccaatttttctttcctattttttttttcttttaataaaggaaacacatcaagtgtttctcttgtgtttgagatggagtctcactctgtcgctcaggctagagtgcagtggtgcgatcttggctaactgcaacctctgcctcctgggttcaagcgattctcctgcctccgcctcctgggtagctgggattacagtcgcatgacatcacgcccagctttttttttttttttttttttgtatttttagtagagacagagtttcaccatgctggccaggctggtcttgaactcctgacctcaggtgatccgcccaccttggcctcccaaagtgctggaattacaggcatgagccactgtgcccagccatcaagtgttttctgaagacattctgttccatcccaaaggagctccgcaataatgttcttttatcattaattgctggatgttctgaaatgttttctcccctgaagtcataagtcgcaagtttctgatgttttatcttctctctctctctctctctctgtctctctctcagcatcctggttctctgaagacaagtgtcatggaaatacttttggataggcaaaaatgca

SEQ ID NO: 81082 - DNA, 1041 bp, Homo sapiens
acccctcacccttgatgctgccttaaataaggataaatgttctctgagtttgtataaataaatgaaagagaggcagagagagaaaaagatatgggaaagaagagagaaataaaataatatgggaatttaagcaaattcttcggggaaagaaaatctattccagtattgactccttcattgaagtaaccaatcgatatatacaagaagtccaaaaatatttttaacatattggaaatattgctgsatgttttagatgaactgtttacatataggaaactggtaaaatacaggtgtcctcatacacgtcttcttttatcatcatggttactcttacttaaatttattagcatggatggacacttagtaatgtgctcacatggaagaggctacatgtgtttacacagtatggtgactgctcaccaatttttttcccaattgatcaaagtgacaccaatttttctttcctattttttttttcttttaataaaggaaacacatcaagtgtttctcttgtgtttgagatggagtctcactctgtcgctcaggctagagtgcagtggtgcgatcttggctaactgcaacctctgcctcctgggttcaagcgattctcctgcctccgcctcctgggtagctgggattacagtcgcatgacatcacgcccagctttttttttttttttttttttgtatttttagtagagacagagtttcaccatgctggccaggctggtcttgaactcctgacctcaggtgatccgcccaccttggcctcccaaagtgctggaattacaggcatgagccactgtgcccagccatcaagtgttttctgaagacattctgttccatcccaaaggagctccgcaataatgttcttttatcattaattgctggatgttctgaaatgttttctcccctgaagtcataagtcgcaagtttctgatgttttatcttctctctctctctctctctctgtctctctctcagcatcctggttctctgaagacaagtgtcatggaaatacttttggataggcaaaaatgca

SEQ ID NO: 81083 - DNA, 1190 bp, Homo sapiens
tctgtttgagtccatctgttttacagaacgggttgaaaattactttttatatatctattttaaaaattttaattttgtctttccctaatgtactctaagcttcatttgggctaggtttgtgtccatcttgttcacatctccattcacagcatctggtaaagtacgtggcctatagaaatcacacaatcaacattatctgattgaatgaygggtagtagtatagtcaggatttgatcttttggatgtgagacaggccaggaggagaaaaagtaacaggttccatggtagtaccttctctgagcaaactatatacatatataaaaagagctcatatatatataaatctctatatatatatatatatatatatatatatcttttgggggtttgaaaatgacaatgagtttcatttttgatattttgtttatgaggtgtttgtaggacatccaggtagagacttctaagtagacagtattgcatgtacacgagcagcttatgttaaggatgtctggcagtcatcaatacccatgatacaggtagagccatggtagtagatgatctcacacagaagagattataggaactgggatggaaagaaggctgaatagacgactctggggaactaaccattcattcaattggcaggggaagacaacttcttgaaggaaactcagaaaaatgcagcagacaggtagcagaaaatatccaggagtgaaatcagaaacatcactgtaggaaagtttctagtatctggacaaagtataagaaattgaggcaagcttccaggtattttatcattacaacatcaaaaccacttacctgccaagaacttggagtcaaggctcatatccttagaatcttcacaacttgacctttgcttggataattccggtgaaatggagtttactatcatatcaggtaaacgatttgtgaccacaataaaatatatatacagaaaattaaataaaagttgacttattttatttcagtttttatttgggcttctatatataaagtcagaaacagtaatttattaaatgatatcccatccaaggagaagaaatatagggaatgaagtcctcattcaaagcaaatgtgccacaggggaaaacttccaaattgccgaattctgacttaataaaggtctgagatcgggccatcaataatgagttaaaccttgcccaagagaa

SEQ ID NO: 81084 - DNA, 706 bp, Homo sapiens
ttctgacaaatatctgatggagggcagggagaatttcctgagaatgcagacttaatttataccactgcaaaaataataggataaagagattatgaaaaccaaataccatcctcaaggtgcattcagtgttctggaaggaccaaacagagcactacactgagcattctcagattaaagtcaaagctctattaagttcagtttccttgcatgcatggtagctttgggtggtctgctccattaggcctgtgctctagtcatgccatctctcctaagcactcatcaattgagggaggtagaagccagtgagaagaaactaattattaacagtaaaaattgtagctaatccttacagaacacttaccatgtgtcaaatgctattaaaagtgttttcatrtatcattttatcattgcaccaccttatgaggtagtgtattagttgttttcacactgctgataaatacatacctgagactgggcaatttacaaaagaaagagatttaatggacttacagttccacgtgtgtgggaagacctcacaatcatgagggaaggtgaaaggcatgtctcacatggaagcagataagagaagagggcttgggcagggaaactcccatttttaaaaccatcggatctactgagactcaatatcaatgagaacagcatggggaaaacctgcccccatgactcaattaccttccactggatc

SEQ ID NO: 81085 - DNA, 706 bp, Homo sapiens
ttctgacaaatatctgatggagggcagggagaatttcctgagaatgcagacttaatttataccactgcaaaaataataggataaagagattatgaaaaccaaataccatcctcaaggtgcattcagtgttctggaaggaccaaacagagcactacactgagcattctcagattaaagtcaaagctctattaagttcagtttccttgcatgcatggtagctttgggtggtctgctccattaggcctgtgctctagtcatgccatctctcctaagcactcatcaattgagggaggtagaagccagtgagaagaaactaattattaacagtaaaaattgtagctaatccttacagaacacttaccatgtgtcaaatgctattaaaagtgttttcatatatcattttatcattgcaccaccttatgaggtagtgtattagttgttttcacactgctgataaatacatacctgagactgggcaatttacaaaagaaagagatttaatggacttacagttccacgtgtgtgggaagacctcacaatcatgagggaaggtgaaaggcatgtctcacatggaagcagataagagaagagggcttgkgcagggaaactcccatttttaaaaccatcggatctactgagactcaatatcaatgagaacagcatggggaaaacctgcccccatgactcaattaccttccactggatc

SEQ ID NO: 81086 - DNA, 848 bp, Homo sapiens
tagggcagtaaaattgtttttagtgcctctgcttgttacaggcaaaacatacctaggaaaaaataatacataattactgttgtctgatctaacttccttcacttcaggtccagtccaagacatatttttcttccaagtgagacggtagttagcactatgagactttgctctttaaccccgggcacgtggctctttgtctactgcctgtgccttttagagaaaattaaatcaytgaatgaagttaatgtcataaagaagcctcgaagaggagtagcagagatgacttgctattctttggtcagagctgtcgtgaggagataatgtccattaaatcgtgatgtttgaagctttcaaacttactgacttggaagacttaccctggtatttagagctttcagagcatttaatgcaactgccactagaatgaccttaggacaagaatctaaaaagtcttatcagtttgtttacctagtcctgtgatccaaaatatttaagagattggttccaaaacccagagaagaaaatcacaaaggccgacttgtctattgtttttaattcccgaaggaaatggacctcccctagatcactgggaatcttcagctcacagaacatttttggtcgtagaactcaaaaggaaggcaggaaaccaggaagccaggagggcaggaatgcagaagggcaggagggtaggcagagaaggaggaaaagaaggagggagggagggagggaggaatatctggatttcatactttattctgccacttcaaatggtataaccttggaaaatttcatccttttattggatctcagtttgtcagtgaaaacattatagccctaacattgatgca

SEQ ID NO: 81087 - DNA, 848 bp, Homo sapiens
tagggcagtaaaattgtttttagtgcctctgcttgttacaggcaaaacatacctaggaaaaaataatacataattactgttgtctgatctaacttccttcacttcaggtccagtccaagacatatttttcttccaagtgagacggtagttagcactatgagactttgctctttaaccccgggcacgtggctctttgtctactgcctgtgccttttagagaaaattaaatcactgaatgaagttaatgtcataaagaagcctcgaagaggagtagcagagatgacttgctattctttggtcagagctgtcgtgaggagataatgtccattaaatmgtgatgtttgaagctttcaaacttactgacttggaagacttaccctggtatttagagctttcagagcatttaatgcaactgccactagaatgaccttaggacaagaatctaaaaagtcttatcagtttgtttacctagtcctgtgatccaaaatatttaagagattggttccaaaacccagagaagaaaatcacaaaggccgacttgtctattgtttttaattcccgaaggaaatggacctcccctagatcactgggaatcttcagctcacagaacatttttggtcgtagaactcaaaaggaaggcaggaaaccaggaagccaggagggcaggaatgcagaagggcaggagggtaggcagagaaggaggaaaagaaggagggagggagggagggaggaatatctggatttcatactttattctgccacttcaaatggtataaccttggaaaatttcatccttttattggatctcagtttgtcagtgaaaacattatagccctaacattgatgca

SEQ ID NO: 81088 - DNA, 848 bp, Homo sapiens
tagggcagtaaaattgtttttagtgcctctgcttgttacaggcaaaacatacctaggaaaaaataatacataattactgttgtctgatctaacttccttcacttcaggtccagtccaagacatatttttcttccaagtgagacggtagttagcactatgagactttgctctttaaccccgggcacgtggctctttgtctactgcctgtgccttttagagaaaattaaatcactgaatgaagttaatgtcataaagaagcctcgaagaggagtagcagagatgacttgctattctttggtcagagctgtcgtgaggagataatgtccattaaatcgtgatgtttgaagctttcaaacttactgacttggaagacttaccctggtatttagagctttcagagcatttaatgcaactgccactagaatgaccttaggacaagaatctaaaaagtcttatcagtttgtttacctagtcctgtgatccaaaatatttaagagattggttccaaaacccagagaagaaaatcacaaaggccgayttgtctattgtttttaattcccgaaggaaatggacctcccctagatcactgggaatcttcagctcacagaacatttttggtcgtagaactcaaaaggaaggcaggaaaccaggaagccaggagggcaggaatgcagaagggcaggagggtaggcagagaaggaggaaaagaaggagggagggagggagggaggaatatctggatttcatactttattctgccacttcaaatggtataaccttggaaaatttcatccttttattggatctcagtttgtcagtgaaaacattatagccctaacattgatgca

SEQ ID NO: 81089 - DNA, 665 bp, Homo sapiens
ggatccttttcttcaaaccatctcttaaaatttacatctggaataggaaaatagaggattctaaatatgtctttgaaaattaattttatagtaagtctttttgccatcccgggaattgaaacttagctgcagagtctctttaagtgggctctctggatgcagggcaggcttcagtcggtgaatgagaagactgtattgaaaacaagggaatgttagtgatggcaatcagcaagcattaaacagctcatgttttaaaaaatgagctctgaatcagaagtcataatcactcagtcacctgctgggttcatttgcccttcagagataaggacatctcaaagtgtagaacattttaatagaatagcrgcagacaagcttgttacttagaattttatttgacaggctggagcttgttttcaatattctttttctgaattacatgaaaaactttattatagggtacattgtggaggcataaattgtagatgatataaaaataaaaaaaaatttttgtttctctgtttccttacagagattatcttcctgtggctgtgacttaccagatcccatgataatgcaattaagcagtcagttcatttaaaaaggttactctaatatcaggctggaaaaataaaataccacaaatagatgtgccttttgagcatgga

SEQ ID NO: 81090 - DNA, 594 bp, Homo sapiens
gagcagcctgcttagcagttgcgcttttcattataaattgtttaattggcttttggtataaatcagtcctgagtttgggtaccatgacctaacatcctagggcctcatgacccttggaaaaactgaatgttgatattttagcccttagtaaatatccctcatctttatgtctcctgtttttttttttttttttttkttttttttttttttttttaaactaagaaaaaagattcctagttgataacctctaggcaacctttgaaaaaaaggaaaagcattttactgttttcaatctttgcaaaaatccttttgctatttttaagtccttgagagccctctcttcttaaacctctttaacctatctgaattgtaaccctcctattctactaaaatagtgctatttaaggtgtaggggtgaaaaggcagtatcttttttgtcacctatcacaagggtcgtggctgaataccttataacaaaacacagattaacaagagaaaagcgtaacaaatttattataaaaacttgaaggaagttttacatgacatgggtgccttcagaaataaatacctgaagatccagggaaaactgtgtgg

SEQ ID NO: 81091 - DNA, 594 bp, Homo sapiens
gagcagcctgcttagcagttgcgcttttcattataaattgtttaattggcttttggtataaatcagtcctgagtttgggtaccatgacctaacatcctagggcctcatgacccttggaaaaactgaatgttgatattttagcccttagtaaatatccctcatctttatgtctcctgttttttttttttttttttttttttttttttttttttttaaactaagaaaaaagattcctagttgataacctctaggcaacctttgaaaaaaaggaaaagcattttactgttttcaatctttgcaaaaatccttttgctatttttaagtccttgagagccctctcttcttaaacctctttaacctatctgaattgtaaccctcctattctactaaaatagtgctatttaaggtgtaggggtgaaaaggcagtatcttttttgtcacctatcacaagggtcgtggctgaataccttataacaaaacacagattaacaagagaaaagcgtaacaaatttattataaaaacttgaaggaagttttacatgacatgggtgscttcagaaataaatacctgaagatccagggaaaactgtgtgg

SEQ ID NO: 81092 - DNA, 1157 bp, Homo sapiens
tcactgtgttagcaggatggtcttgatctcctgatctcgtgatccgcccatcttggcctcccaaagtgctgggattacaggcataagccaccgtgcctggcctgtttgtttgttttttgggctttggggggatttatgtcacagcactttatctaatatatggggacaataatatttaataataatatatacctcatattgctgtaaaatattaaatgcattaatagaatataaagcagttggaacattacctgacatatagtaagaactaaataaatattagttatttacagcagtggtactcttgtcacatttagttgtcattgatttaccgtgtaacagctgcagaagaccgaacggattggggtaaaggcttggcactttcatctcagtattatactcgaaagaatactaaacattccattactgtttaaagaagaaatgcaactgaacttgrcacatcaaacattatcctaggaactaatttatcataaaggtgcatattgggcccaacaagtctacatgtccttccctacaggcacaaatctctcaggccaaatgccatctcaattaagaagctttcctcatcactcgaaacaggaaattaaaatcttcatcctcccacaacatgtcaccatatcttttgatttagcccttatcactttctaccttgtgttatattatatatatataatatacacatttatatatattatatataatacatgtattatatatattatatatataatacatgtattatatataatatatataatacatataatacatgtattatatataatacattattatatataatacatgtattatatatataatacatgtattatatatatatatgtatcttatcttcttcattagattataaattccttgagagcagcattcatttctgactggtctgaactgtagcaactacttcatacactgaattgcacatggtaccgtatgtgcacatggtgtatattcgataaatctgctaaatgtatccaatatctttttttttctttttctttttttactttaacttctgggatacacgagcagaacatgcaggtttgttatataggtgtacatgtgtcatggtggtttgctgcgcctattgacccatcatctacattttaagccccgca

SEQ ID NO: 81093 - DNA, 973 bp, Homo sapiens
tctcagttcttaaaaagagaatgaagttaaagaatgatgtgttgttcttagtgcatttatatagctgtatcttaatttttggaatgtctcgtgaagattcataaaacagcttcagtgacatcatcgaaagctgcccctttacaatttttctgatcctttccacattgcctctaaaatctatgatgaaaagttcttcctctttttagggaattttgttcatagaatgctatctggacacacatggaaaaaaaatagatgagaaagtcccccattcttttttttttwaaaaaaaactgcaatttgataatcctttacttttctctctacctgcttcctcattagtcaagtgaaatgataatacttctgcactttggaagtttgtagaaagactcgaaatcagaatttttctgtcttaaaatgtatagaaggagatagttatattaattatctttgaaacatagtgataatgaacataatctccccatcaccaatacaggaagtctcaaatgagaattagacagtgtatatttcaaatttaaacaattaaatggactcttaacctttctgatttcatctaaaaatcctgcttcccattgtgttcttaatttgatcccattgcttatgacatttttggcttcaagtgtggttttacagtttggatgagctgctaaacttggcactgaatacgttacaaaaataaagaggaatttctccctaggatcaagggagtttgaaagagtatgaatatattatgctaatatatgtgtgtaaatttgtgaaaggaaatatttaacatttatttttttcaatgtgtttctatggaaagtagtggaaacatctcatcttatacatttgttttgtaaatgtggagaaacactgactcaacaacagccgatatataaaatgggaacataagcagaagaacgaagcaaaggtttcacactgagcttcatatctatccaccgagctggca

SEQ ID NO: 81094 - DNA, 1215 bp, Homo sapiens
tttaatctgctccaccttttttaatgaataagataattataagatgtgattgtatttgctcattatacaccaccgatagcagtttgctttagaaatactgcataggtaaagtaaacttcctaagctgatcaaagcaaggagaagggcgcacctgccaagcactgggaattttcccatctgtctgtaccatgaaccatgttacctttgatctttttctttggtgattgacaggctggtgaaaaccatagcaacttctgaaagtgcctatcaaygtggcagtgggagcaaaattaatgtgtgttttcccccaaagaagatactaggtgtgtaaaggaatggtttagaagcatcagggagacagggtagcactgtggttaagaacatggaccctagagccagataagcttaggtttgagtccaggctctaccgcttagtagatgtgtgacaagtatattagttatctgttactgtgtaataaattactccaacacctagtgacttaaacagcaaccatttattatgtcacacagttgctgaatgtcagacacccaggagtggctcacccgagtggttctgtttcagggtctctcacaaagctgtgttaggatgttgactggggcagcagtcatctgaggcttgactggggccagaggatccacctcgaggttcactcccatggctcttggcaagaggcctcagttcctcaccacgtgggtctgctcctggcattttactcagagtgagtgcctaacttctctgagcctctgtttcttcatatatcatataaggaaaagagtagtacttcaaaggattatagtgaagattgaatttcaatgaaagtgcttagcatgtcatctgattcatgattaaattctcccttactcttcttaccatttttatcatcattgtgatcgtcacctaccccataattcctataatgtttaaatgggcctatgtatctccaatttctgtttttttttttcctctttgccaccaacaatcttcccattcctctgaatttcaaattctttcttgactgcctacaattagaacccatcaaaatgtcaatacccaaagacagatggagccctcctggggtctcagttggctgccaggacatggaaggatgtggctaatggtagaatttgcagagaacttgcaccaaatattggccctgtcattaaaacaaagagaaaaaaaaatatttctgcgaa

SEQ ID NO: 81095 - DNA, 860 bp, Homo sapiens
cctactgaacattgtagcttatcctagcctcccttaaatatgttcagaacactttcatcagctgcagttgtgcaaaatcattaaacgcaataataaaattttgaatatctcatgtaatttaatactgtactgaatgtgaaaaatagaaggattatgtggataccgaaagtgcagtttctattaaatatgtatctctttcactgtaaaagtgaaagatcataagtcaaaccatcataaattggagatcatctgtatagcaaaatatgctgtacatcttaagtataaacaatagaaaataaaaatattttttaaaaacaaagtccaacctgaagcctccaagagtcagcatagcctgcccttgcccatgcttccaggcttaacgcatgatagtctgcaccccactcacgtgcaccagcagcccatcagttgtaccaggttttctcctaccacaggacctttgcacatgcctttccctctcctctcttcctccccacttaaatcctgccctttggattggtgctctacacctgttcctcaggggacctccctctccctgccaggttttctttccttctctcagtagtgggattcctagcatccttctccttcaccagactgtcaacttcctagggacagcttccatttctagtcttgcccaccmctatattggcagccccaggccgtgtgctgagcatggagacattcgcaatcattatttgaccaataaacaaatgaatgagccattgaatgtacagtgccaagcatactgcatggtacgtagaaaataacgcggaagtgttaagcattgctagagattcaaagaagcaaaagatgattcctgcaataaagtggctttagtc

SEQ ID NO: 81096 - DNA, 603 bp, Homo sapiens
gaatgaggctgtgtgagcacaagaatctggctacaagccaaaaggacaaactaaaggtgtcacagaggtgaaagaaaggtagaattttggaatgctgcagaagaaaaatccagaggcagaggcttcaatctctgggggaacctgacattgctctttgtgaatgaaaactgattgctaacttcaactagtgattcttagcagggcctatttctggacaaagtttaaaagagtgtaaagattgtcatcttttttgcyacttgcattcctgcccttctttccattcttttacaaggaccttttccctaagttccctagttacccaactggcccttgatgcatgcttatgttggaaagaatcatccaatatgtcacacaaatatttaagggattgctatggtttactgtgacgcttttttctggagaacttggatttgaatggaggataatatctcaattaagagaaataaggcttgactggtgactgtttgctcctcttgatccagactcaattgcggcttagtcagtctagagctagaagtcatttcctcatgtgttggtgagaatagcatgtgaacaaagctcatttaaagctaataacaatca

SEQ ID NO: 81097 - DNA, 740 bp, Homo sapiens
tcctaaagaggacaaggtgcaatgaaaaagacattttcctatctctacctcaaagtgagttacatttaactwcttctcatgctgtctctcaggacttgactaaggccaaagttaaatttagtaaaagcagtttcacaatttggggactcccagcccccaaaacaaagtgtggtctaagcatgtagcctttgtgatgatggcttgatttagggaaatggatgggcagcccatccttgatgctcttttcttgacctgtccttgaatattttccttgattatgtcatacttgtacatttgttcagaggtggagagtagatagtttaaggttatattctctggtaaggagtgaaataacaacttagcgtttattgagcatgtactgtgtgccagagattctaagtgcttaaggtgtattatttcatttaatcctcatgacaatcctatgaggctaacattttcatttttacagatgagataaagaggtatgagaggttaaaggtggaatagttgttaggtattaaggaatagaaagtaggcagcctgactccactgtgtgatattgacttcaggaatttgtctgtggtaggtcgctggggtaggtcagaacctagacagagaaggagaggtttggcttatggctccccaaacttagaagcctgaccagagccagtgcctgaatacactcatcccacttctgcacaaatgtgattttgttaatttttttttttttttgagatgga

SEQ ID NO: 81098 - DNA, 740 bp, Homo sapiens
tcctaaagaggacaaggtgcaatgaaaaagacattttcctatctctacctcaaagtgagttacatttaactacttctcatgctgtctctcaggacttgactaaggccaaagttaaatttagtaaaagcagtttcacaatttggggactcccagcccccaaaacaaagtgtggtctaagcatgtagcctttgtgatgatggcttgatttagggaaatggatgggcagcccatccttgatgctcttttcttgacctgtccttgratattttccttgattatgtcatacttgtacatttgttcagaggtggagagtagatagtttaaggttatattctctggtaaggagtgaaataacaacttagcgtttattgagcatgtactgtgtgccagagattctaagtgcttaaggtgtattatttcatttaatcctcatgacaatcctatgaggctaacattttcatttttacagatgagataaagaggtatgagaggttaaaggtggaatagttgttaggtattaaggaatagaaagtaggcagcctgactccactgtgtgatattgacttcaggaatttgtctgtggtaggtcgctggggtaggtcagaacctagacagagaaggagaggtttggcttatggctccccaaacttagaagcctgaccagagccagtgcctgaatacactcatcccacttctgcacaaatgtgattttgttaatttttttttttttttgagatgga

SEQ ID NO: 81099 - DNA, 740 bp, Homo sapiens
tcctaaagaggacaaggtgcaatgaaaaagacattttcctatctctacctcaaagtgagttacatttaactacttctcatgctgtctctcaggacttgactaaggccaaagttaaatttagtaaaagcagtttcacaatttggggactcccagcccccaaaacaaagtgtggtctaagcatgtagcctttgtgatgatggcttgatttagggaaatggatgggcagcccatccttgatgctcttttcttgacctgtccttgaatattttccttgattatgtcatacttgtacatttgttcagaggtggagagtagatagtttaaggttatattctctggtaaggagtgaaataacaacttagcgtttattgagcatgtactgtgtgccagagattctaagtgcttaaggtgtattatttcatttaatcctcatgacaatcctatgaggctaacattttcatttttacagatgagataaagaggtatgagaggttaaaggtggaatagttgttaggtrttaaggaatagaaagtaggcagcctgactccactgtgtgatattgacttcaggaatttgtctgtggtaggtcgctggggtaggtcagaacctagacagagaaggagaggtttggcttatggctccccaaacttagaagcctgaccagagccagtgcctgaatacactcatcccacttctgcacaaatgtgattttgttaatttttttttttttttgagatgga

SEQ ID NO: 81100 - DNA, 716 bp, Homo sapiens
ccccagacctactgttttggaaactgcggggcagcagcccagcaatctgagtttcaacatgtcctccagtcgattccctaaagtttgagaaccactgacctaaaccactttggcataaatagccgaaccaggacatagctattaatattacctctcagggagtaatagtgtgttggaattaaaaagtagcatggcaaggacaacctagggctcaattcctttttttttaatagatgagaaaactgaggctcagggaagtggagagatttgcctgaggtcacacaggaagttaaaagagtcaatgggctcgaacccagttttcctgactccaggccagagggtattttttcatttctcctgtgacagtgacatttccttgagaggcgattttcctcttactcttttttagagtgtctccatgggtggaagcttatacaagtggtttttacatttcactaccctgagtccttctacttattttctccatttaaaaacccaaaaaaaaaaaaaaaaaaaaaaaaaaaaaaaaggtgaatgaacaagttttattatgggtaattcactcttccatgttctatatacattaaaaatgcatcaaacaagtgaacaccctttagaattcctgacactcaatttttttgaatgcttgtagaaygacttacattctattctctgaaaaagtataggatgagttttcaaatcattagttgtaagga

SEQ ID NO: 81101 - DNA, 1127 bp, Homo sapiens
ttccatggcttcaaatgccaaggtcttcttaatgccaaagctcctgtgtggtgtggcaactgtcccctcctcttgttcgtttggttggagtagtggtacggagttagtgtaatggcttcccactgttgctaggacctgggtgcagtgccatctcccatttatttaatgtgtccaatctattgaagtactatctttattaaatttattaaattcagtcccattttgagtrtaccatgtgtttcctgtgaggacccaactaataaactaataataataataataataataactaacacttactttgcactctttacatgccaggttctacggggtgcattcacacacaagctggttcactttgtcctcacagtgactgaacgagattggcactctttctgtaattcccattttgcagatgaagaaactgatcctcagagagcacccctgactcccaccaggtcatacagctagtagctagcagaaccagcgtttaaacctccttggcttgcatataggatccatgcttcagcccatctgtggggttccaagttatgacatgagaatggctcaggctggtgactttcctaagcaaaatgttggcagtgggatccatgacactatttagcttttattattcatcattaattgtaagagtgcatgttcaatgtcactagctgaggttctcaagcttgcacagggagactttcaattaatccactaaaaaagctctttgtgccacaactaatgcatgcctattaatgtgtgattactgtagaaggcccagtgttctttgtctgagacgatgtgaaactgaccaggagcggggatgatttagacacaatcagagtgcattacacaagctcattttcacgttaataggaacaataaaaggcttctcaccatatttacacccagaccttctcatattttagaataaaagcaggttataaaagaagttgttctacacagcacatttactattttccagagctatctgcagcttcctgcagtgctggcagaatgcaaatagcccccataatttgttagggatttttaaaatacatgtgcagtaaattagattgattagtagctttattaaattgtatgagtcacaattttagggttta

SEQ ID NO: 81102 - DNA, 1127 bp, Homo sapiens
ttccatggcttcaaatgccaaggtcttcttaatgccaaagctcctgtgtggtgtggcaactgtcccctcctcttgttcgtttggttggagtagtggtacggagttagtgtaatggcttcccactgttgctaggacctgggtgcagtgccatctcccatttatttaatgtgtccaatctattgaagtactatctttattaaatttattaaattcagtcccattttgagtgtaccatgtgtttcctgtgaggacccaactaataaactaataataataataataataataactaacacttactttgcactctttacatgccaggttctacggggtgcattcacacacaagctggttcactttgtcctcacagtgactgaacgagatwggcactctttctgtaattcccattttgcagatgaagaaactgatcctcagagagcacccctgactcccaccaggtcatacagctagtagctagcagaaccagcgtttaaacctccttggcttgcatataggatccatgcttcagcccatctgtggggttccaagttatgacatgagaatggctcaggctggtgactttcctaagcaaaatgttggcagtgggatccatgacactatttagcttttattattcatcattaattgtaagagtgcatgttcaatgtcactagctgaggttctcaagcttgcacagggagactttcaattaatccactaaaaaagctctttgtgccacaactaatgcatgcctattaatgtgtgattactgtagaaggcccagtgttctttgtctgagacgatgtgaaactgaccaggagcggggatgatttagacacaatcagagtgcattacacaagctcattttcacgttaataggaacaataaaaggcttctcaccatatttacacccagaccttctcatattttagaataaaagcaggttataaaagaagttgttctacacagcacatttactattttccagagctatctgcagcttcctgcagtgctggcagaatgcaaatagcccccataatttgttagggatttttaaaatacatgtgcagtaaattagattgattagtagctttattaaattgtatgagtcacaattttagggttta

SEQ ID NO: 81103 - DNA, 1355 bp, Homo sapiens
aattctgaaatagtatcctgaatctgctatgcatgggtttttcaaaagaaataatacttttttttcacaattattgaaatcttttatttgctttaagactttagaagctttgagaggtgaggaagaaagattcttggaggtatattatctttgaaaaatcaattgtgctgttacctctattccctccaaagggagagaaagtgcccatcttcttatcccaaaccccccaaaggaagaggatccgacagggcgggctatttgtaggcattaagatgcaacccctatgactgggggagatggtggcctgagtatgattttccagggcagtgaaagggagatgtgcctataaaagcttagctctggggagcagccctgggctttcagattttcccaagaccagagacacaggtatgttttatctctaagcaaggcaagtgatacaatctacaaagacattggcacaaaagttgaaggcattttaatttttagcatcaaagaataaaataaaacaaagcgaagagcacatgaaaagaatagtcaccttttctttggaaatgaagctgatgagaatatcagaaggaacatgcattgctcagtaagttgttttcctgcaaaggttcctaatcatctcaacaaatcatagttctattaatttgaaattgatgtaaagttggaggaagaatcaggtctaggaatacgtgtgtgtgtgttcactttttcttataaatgcctccagaaagatacagctcagcaggacatccaagctgattgcttatgtaaaaattctaatccaacttgtattaggccattcttgcattgctataaagaaatacccaagattgggtaatttataaagaaaagaggtttaattgtctcacacttctgcaggctgtacaggaagcatagctctggyattagcatctgcagaggcctcaggacgcttgcaatcatggcagaaggtgaagtgggagcagggttttacatggtgaaagcaggagcaagagagagttggcagggggaggtgccatacgcttttaaatgagcagatctcctgagaactcactatcatgaaaacagcaccaagccatgtgggatccacacccatgacccaaaaacctcccaccaggccccacctctagcactgaggattacaattcaacatgagatctgggtggggacgaacatccaaaatatctcacaattattatatactgggtcaagtacagtatatgaggtttaccaagagaagtttggctaaaagtgtcaatatctcactagataaaaatctcaggcttcaaggggcagtgcgttgaaaagaaaagccttattaagatataattcagtctctactgaaa

SEQ ID NO: 81104 - DNA, 661 bp, Homo sapiens
cagattgaatttgtccctcagaatatccagcaaacacattgttgtggtttgttgatgttttctgtactatgtttttattgagagttttaagtctttgtgtacagcattcctgatactcaggcacagtctttatcaccccttactgtgatacactgatctgctttgcttttgtatgttgcttgcttagccaccttagccactctctataagtaccttcatattcctttctcctcattattatcactttaagaactttcttgttcaagaacaacatggaatgttcctcaggtcccattgaaggcctcattagctctatgrccttctctgatctttagcatctttgagctcagaagctaacctccaacataaaaggaaatgagtgcattaaaaaaatgtatcactgttagctatcaagggtaggtcctagaactagggccacggtgaattgaaggaagagagaagttatgtatgcatcactcaatggtgggagagctggaatgtaacaatgggtgtcaccatctggttacttttgctggctgtcttgatgtctgaccactagggtatcaatccagactcttattttattttattttattttattttatttttgggacggaatctttctctgtcgcccaggctggagtgcagtggcacgatttca

SEQ ID NO: 81105 - DNA, 559 bp, Homo sapiens
tcctccctgtccccaactatcaaagtatccgtttccagcaagatgagattcctcttcagttaaacaaaacttgctactttttatattttaaaaatctttatatatagatatacacacacacacacatcatacagtatagcgtacagcagttggcacagagtatatgtatatatttgaaaatttgctggatgtggtgactcatgtctgtaatcctagcactttgggaagctgaggttggtgggtcacctgagctcaggagttcaagacaagcctggccaacatggtgaaaccccatctttactaaaaatacaraagttagccgggcatggtggtgggcaccggtaatcccagctactctgtggctgaggcaggagaaccacttgaacccagaaggcagaggttgcagtgaaccaagattgcattactgcactgcagcctgggcgacagaacgagaccctgtctaaaaaaaaaaaaaaaaaaaaaaaaaggaagaaagaaaagatctggggaaaatgacaacttttttttattagcatgtagtttcttgcgagtctctgtt

SEQ ID NO: 81106 - DNA, 559 bp, Homo sapiens
tcctccctgtccccaactatcaaagtatccgtttccagcaagatgagattcctcttcagttaaacaaaacttgctactttttatattttaaaaatctttatatatagatatacacacacacacacatcatacagtatagcgtacagcagttggcacagagtatatgtatatatttgaaaatttgctggatgtggtgactcatgtctgtaatcctagcactttgggaagctgaggttggtgggtcacctgagctcaggagttcaagacaagcctggccaacatggtgaaaccccatctttactaaaaatacagaagttagccgggcatggtggygggcaccggtaatcccagctactctgtggctgaggcaggagaaccacttgaacccagaaggcagaggttgcagtgaaccaagattgcattactgcactgcagcctgggcgacagaacgagaccctgtctaaaaaaaaaaaaaaaaaaaaaaaaaggaagaaagaaaagatctggggaaaatgacaacttttttttattagcatgtagtttcttgcgagtctctgtt

SEQ ID NO: 81107 - DNA, 559 bp, Homo sapiens
tcctccctgtccccaactatcaaagtatccgtttccagcaagatgagattcctcttcagttaaacaaaacttgctactttttatattttaaaaatctttatatatagatatacacacacacacacatcatacagtatagcgtacagcagttggcacagagtatatgtatatatttgaaaatttgctggatgtggtgactcatgtctgtaatcctagcactttgggaagctgaggttggtgggtcacctgagctcaggagttcaagacaagcctggccaacatggtgaaaccccatctttactaaaaatacagaagttagccgggcatggtggtrggcaccggtaatcccagctactctgtggctgaggcaggagaaccacttgaacccagaaggcagaggttgcagtgaaccaagattgcattactgcactgcagcctgggcgacagaacgagaccctgtctaaaaaaaaaaaaaaaaaaaaaaaaaggaagaaagaaaagatctggggaaaatgacaacttttttttattagcatgtagtttcttgcgagtctctgtt

SEQ ID NO: 81108 - DNA, 2105 bp, Homo sapiens
tgcatcgctctagtcctccatcttcacacgaagttcttcttgtgcctctgtgtcttcacatggcatcctttttataaggatgtcagtcatattggatagcaccctactccagcataataccatcttaacttaattacatctgcgatgacctgtctccaaatcaggtcacattctgaggaacccagggtttggacttcaacatatgttttttggaggaagcagtttgatctctaacgccatgttaaaatcaatggactgtagatcctggtaatgttaagcagtttatcaaccttggcattattgacctgttgcactgaataattctttgcactgaattatgttttgtactggaaaattcaggaggtctgtcctgtatattgggagatgtcaccagcatctttggcctttacctgttagatgccagtaacaccctcttggtgtgataaccaaaaatgtcttcagacatctctaaatacctgctggaggggtggacatcaacattgcccttagttgaaaaccacagatgaaagaaaaagaataaagaaaggcatacataaaggaaagccagagaggaagcgaacaggaaaaataggaaattttcttatggcaatgggaagtgtgtaaatgaggtaacaaaggggtattagtttctgtaagaaaaagattaggatatgattataggagtgaggcaagtgccagatgtaggatgaggactgggttggtagaggggaaaaagcctgggaattaaaaggatcatgtgtgtacacattgatatatagcgaataattttatcacagaagtagttttggaggctgactgttaaccaggaactaaaatcttcaagaaatgtgggaggcaggggtgatctggggaagatgaatgactataacaaagggaaggagaaggtaaaatatctgattatttgagattcaagcaagtccttttatggagtcagaaaagacagcagcctagaagtggcaatgggggacaaaaaggacatcccttccccccatgcatatgtctgcatccagtgatacaagaaaggcaaaaccactgcagggggctgcaggggatactgtcctccaggggcaccaagttcagttagtgcaagaagaggtggaagggaacttttaggaaaaaacttgaggccacagagaagtttgctgattattggagttccagggaacagarttggaggagttcagtggttgaggactgatcaaaaacaggaattaacagagccttatcaaaatgagtgtaaggaggaatgagcaatttcctaagaatcagtccttggtttcttgcaatgactgatgtaaatatggataaagacatattagataatggtgacaaagctggtgtttttgagagatgagggaggagggatcttgtcaggagcatgcaaagtttgagggctctctcttaatctttgatggtggatttttcagggtcatttttcactgggccctgaatggcagcttagaggaaagcagttttctgccagcaagatatttaaaaaagaaagaaaaaagcttgagtgttggaacctgaaccctctgagtttgtatgccagctctcagctctgctacaaagaagaagggagatgtcttgtcttttttttttttttttttttttttctgagatggagtcttgctttgctacccaggctgccatgtagtggctccatctcagctcactgcaacctccgcctcctgggttcaagcaattctcgtgcctcagccaccggagtagctggagtacctgggattacaggtgtgcatcaccaagcccggctagtttttgtattttctagtagagacggggttttgtcatttggcaagactggtctcgaactttatttttaacaaaaaagttactgaaatatatactgaactgtctgctgagttgtacagacattaataactcagtcacattttaaatcaatgttttttgcactttcacataacccatggggagaaataccttttatggcataatccaaagtacatatttgtgagcattttattaatgaatacttgcccttattgcatgttatgcacactggtaatttatttatcatattattattttgtatgagacagggt

SEQ ID NO: 81109 - DNA, 580 bp, Homo sapiens
tttttttaattattgtgcaattatgtgatcactcaattctaccagaagcagggagaaagggatcaaggtagaccttataagtaatgcttgaattgaattgtgatcttaaaatatttgaggggttcattaaattgattggaaggaggggctgtagaaaaacatttttgacagagtaagaggtggaactctcaaagatttgtctagagagataaacaagatgagaatagagggtcatcacaaagcctctacaaagtctggactttatttgawcagctagaggctattctactgcaaaatctatgacagttgatggtgaaatgttgaatacatatgcctggacaatcccagattctgagtgaaataataacaatgacatcatgacaagcactggtgggaaatgccacatggtgtagcccacaacttagaaaagattggctgctgatcattcacaaccccaaagaataatggaattcaaaattgtaaaatttacacttaaaaagtaaattattcccaatctttaacactgaaactcagctaatagcagatatgtggtacacagtttacaagttatcctaatgca

SEQ ID NO: 81110 - DNA, 859 bp, Homo sapiens
tagtcctcaatccagcctatctcctaattatcaaatgaaacccaacagttgaaccctacctttgttttcatgagatcaaaagatacatcttcctgtatcaaaattcctactgtcagcctcttacagctttgtattttcttattctgttttaatacacatacaagcttcattcataaggaaaactatgtcacaggcaaattgcactgacataccaacctgcatcaatggtcaggaaatcggtagattcctcctacttttgctcacacttccattttcagtatttaaagattgattatttaaaatccctcattactaacttttaccaaataccccaaacatgagactaggaaatcaaaggaatctcatgatcaaaatcatcactgtgttcagttcatgatgcctatggagttctactggtgtcagtgacctagcacggtgctagatataagagtaagtttcaataaatatttcttgagcacaaaccatgatcagataaatgacgaattcagtctatcaagaccagagcacattctcaatcatctcctttctgaattaaaaagcactcatcttgcattcacctgaggaaatcattgaagaaacggttcctacagctcagcacrgaaggctgtggccatccaggacagagtactcacagacaagaggctcaacttagaatcccttagaggtcgtaaagatgatttctctctatcccatatggatcagagactgcaaacttaaatgcccacaggggcaggcatttaaggactaaaataagggaggtataagatttatagtcctccaattttttcatactttatttttagttccacaaaacacactcagtctcagtgttgccgaa

SEQ ID NO: 81111 - DNA, 656 bp, Homo sapiens
cttcctttttatatattgagtaagtctattccaagagtctattctccaggtttcaccatccataattgcttcttttaacccagaaggcaaagagaaaactttgcaagagaataactcccttaaagtaattcagaaaacaaaaaacaaaaaacaaaaaacaacrctctttcatctcagggcataactgtgctgccacttgatacaaactcactgcagttatgaaaatattaaatgtgactagaagataagattaaatcttgggtaaatttcacaagggcatcttcatgagaaaaaatacaaagaccaaaccacaacgatgcagtaaaacaagacaaagaaaaaggagacaacaaagatttttcaaggacaggttttgtctgcatttccttcaatggactttgagctgagagtaagagaaagaattgtgtatgtggctggcagcttcatcacattgcattcccacctctagacttcagtttatttactgtgtgcgtacagatgtgattgctctaggagtttcttttctaacagaagggacagctgcaacacccagctgatgactcaaaggcctctcagagcagagagaggacatgcacagtgttttcctttgtggttctttgcagagtatgctgcgatttgcacatttgcctccagct

SEQ ID NO: 81112 - DNA, 1417 bp, Homo sapiens
  misc_feature (1)...(1417): n = A,T,C or G
tccaccttggtgagactgtgccatacaaacagggcttcagggaaagatagtagtgttatcagagtatggctcagtctctttcatgggctcataaatttcttcccattacaatacaacaacacaaaacttcagggtggtgttagcttttactgaaaatttagaataaacaaaaatgaattagagtgtatttttaagacatatatctgatttattaccccttatctacacttggaaaaagtcagttgccacttactggagctcagtcaaatttagataggaaacttccttgtgttcatttttagtgaggtatgtatgtgttgggacaatgcaaggtggagagaggcaggagacactggacataaagcaaagatgaaagaaaggtagaaaagatgtatcctttggttaagagttaatgcataaactattaatgttaaagggtgtaaccctatgctaaaacacctatacataacaaatttgtgtgtttctcctcctctttggaaggcatatcaaataccagcagatcaaaatgataaaataaacagggtggtcttttttgtacaaaattgccttggagttatgtattcataagggttgtcttgaaaaactgaaccagtagggtctatgtatatctgtatatatctatgtctatctatatctatatctttacctatatatctatatctataatgagtgttagttcacactctcatggaccctgagatgccccacaatattctttctgcaagccagaggcctaggaaggtagttcttgttcatgtccttaggcccaagaaccaggagtgctaatgttgaaggaaaaaagaagaatgttcacgctcaagaagagagaacaagttcacccttcctctgccttttgttcaactgggaccctcaacagactgggtgatgcccgtcctctctggtgagagccatctttttcactcattctactgatacacccagaaataataattttctagctatctgagcctcccttagttcagtcaaattgacacataaaattaaccagtataggttaccactgaggtatmtaattgttagaactccagagaaatcacaaaattaaactgaatccctgttgcccatggcatgtataaaacatttgccactttacctaatttcatttttccaccaggaagtgaacactgtgagactagaaggcacttacatattagaagatgtaaagattccaggtgaccacaatgtggatattctaaatgcaagaaatataattgctaatttaatcatttgagtttgaatatttttattacaatggtcagcctgggtgngatatatttagaaggtgatccatgtggcctttgctttctagtctatagtttctgagatttgtgtanacaatgtatattacctcactagggaatgtatatgtgggtct

SEQ ID NO: 81113 - DNA, 806 bp, Homo sapiens
ttggtcatttgtatttcttctgtgaattactagaaagtatttatctcttattttataaggttcattttaatgaagtttaattagggataataactctttgtcagtcatattagttatatttatttcttactgatttactggcttttatgttttcagaataattttctttcagcacctcgagatcatttaaacactcacctagattttcttctggtgtgtaatgaattcagtttttgtatctaattatataatctttccatgtcataatgcaaaaataataagaagaaaagttctgatgcttcatctgtaaagacatattccaaaatttagtgtaacagcaatccatgagggcaggatttgcaggaattataggagggtgctgtagagcatgggtcacagagaaagttttagtagaagagattagggccaaaatctagccatcttcaaggccagatggggtatgtgaatgagtgatctaggggctggtgaggttgggacagtctgacgttcctcttccaaagcagggagccrttactcacttccgctgacttgccagttgggcttgcaggccctggatttccacttcttccaatatttcaaaagaagcctatattttgaaattttgtgaaaatgtggaatctcctaacttttaaaagttggcagatcattcaagatttttacaaacactgaacaggccaaagaaaactcagcagcaagctgaatgcagccctcgatccatcagtttaccactgtggaggaaaggatttacatttcttgttctttctttcattgagtttcacagatgc

SEQ ID NO: 81114 - DNA, 416 bp, Homo sapiens
  misc_feature (1)...(416): n = A,T,C or G
ccaccacgcctcctytgcatgatccaacaactgaagggttaatgcctgatacagccagaggcctccagagtcctagctcacttcagttggcttctattttgagttctaactggcccattatacatattttatcaatgggtacattgaagtacagaggagataagtaaagtcactaatcttgtaaatggaaatcctaagaaatcaaacttcagattcatatgctcaggtttgttccttcacacggaacttctccttaaacactgattagaaaagctaaacaaagccacttggggtctgtaactctgtgcccaatcacccgaacactagcagatctacagtttctgatcaatttcngaagtaacctaaaacattctaggttcagggcctttaactgcctttccctcaattcttaatct

SEQ ID NO: 81115 - DNA, 607 bp, Homo sapiens
tgagcggaagtagaggaaatgtggaaacacgcccactagtgtgtggaggtccagggtccacccagggccaccatctggtgcacgagcgtcttttctcatccacttgattcaaccccataaacatcacgaacaygtgctggagcccaggcagtggaggagggcaggggcaaaaagagggcacacagcactgcacccacctggaataggggtgagggacaggcagcccccagctcacttccatcagctgtgaagagagctacctcaggggtctgtgcaggaggttccagagtaaagaaggattaattctgccggggtgcagaggtaaaagaggaagtcacggaagagaatccacgtgtacttcctttttcctgaggcatggctttgaactgtagtgactgtttttacagaccttacgatgtcttcaggaaagcttggcccatgggctctgcccgtgtggctccccttagcaaggatgcctcaagtttcatctgcaaatactggtagtgggctggaagcgctatggcgaagattctgaggcccagcccaggctcagggggaaaggagctggatcaggcagctcgcgtagggggctgtgttcggcccgcct

SEQ ID NO: 81116 - DNA, 658 bp, Homo sapiens
gagtcttgggatcccagtacaaagtakatttttatttcttttgttcataatgactgagacttcccaaacaaattaaaattccctgaaaactaagaggaatgaagagagggagacaacatggggtgaaacactgagaagcataaaagttttgtcagccccgcagcactccaactgtgctgtccaagatgtggcagccagccacaagcgaatacggagtctttaaaaattggcaataaaaattgagatgtgttatgagtgtttgaaaatacaccctgaatttcaaagacttcgtattaaaaaatgttaaaatatcacattaagaattattttatattgattacatattataataatattttgaaatattcagttaaagtaaaaattagaattaataaaattaaatttttggcttttctgattttttttgtttaatgcggtgcagtgggttaaatagtgtgtgccctaaagttcatgtcccagccaggtgcggtggctcatgcctgtaatcccagcactttgggatgccgaggtgggaggatcacacatgaggtcaggagttcgagaccagcctggccaacatggtgaaccctgtctctaatagaaaacaaaaattagccaggcatagtgacacatacctgtagtcccagctacttggaag

SEQ ID NO: 81117 - DNA, 658 bp, Homo sapiens
gagtcttgggatcccagtacaaagtatatttttatttcttttgttcataatgactgagacttcccaaacaaattaaaattccctgaaaactaagaggaatgaagagagggagacaacatggggtgaaacactgagaagcataaaagttttgtcagccccgcagcactccaactgtgctgtccaagatgtggcagccagccacaagcgaatacggagtctttaaaaattggcaataaaaattgagatgtgttatgagtgtttgaaaatacaccctgaatttcaaagacttcgtattaaaaaatgttaaaatatcacattaagaattattttatattgattacatattataataatattttgaaatattcagttaaagtaaaaattagaattaataaaattaaatttttggcttttctgattttttttgtttaatgcggtgcagtgggttaaatagtgtgtgccctaaagttcatgtcccagccaggtgcggtggctcatgcctgtaatcccagcactttgggatgccgaggtgggaggatcacacatgaggtcaggagttcgagaccagcctggccaacatggtgaaccctgtctctaatagaaaacaaaaattagccaggcatagtgacacatrcctgtagtcccagctacttggaag

SEQ ID NO: 81118 - DNA, 474 bp, Homo sapiens
gaggggaggggaggggaggggaagggagaagggaaaggaaagggaaaaagaaaagggaaaggaaaggaaatcaggaagctttctgggtaaaataatttgccatattgccrgaaatagaagtagaaaatggtagcatgatgccacaaatttagcaggatgtgttaaaactaagcatcccttttttcaccaaactgatgaaaaaaagaaaaagaaaagcaaactaagcatttcaaatctaaagaaaaactactacaattattcagggatttataaagtcacacaacactaatatagaatcttacaaagtatcatgaaatatagtaataaaaatgtagaagcttctttagagatttatcattttacagcaagggtaaaagcacagccacgtccattggggcacacttgttctttctgtcacggtaaaaatggctgacacaatacaacagacagagcatatgatgaagcctaaatgca

SEQ ID NO: 81119 - DNA, 547 bp, Homo sapiens
tcggctcgcgcacggtgcgcgcacccactggcctgcgcccactgtctggcrctccctagtgagatgaacccggtacctcagatggaaatgcagaaatcacccgtcttctgcgtcgctcacgctgggagctgtagagcggagctgttcctattcggccatcttggctcctccggcttacattcttgtatgtatgtatcttctgtcttttctgctctccaagttagttctgaatattttctgatgagttatttttagttcttatattccttttatcagctacctgcagttaaactaatttatgatctattaatttcagatattatgatgtttatttctcaatttccactcggattttttaatacagattcttaattctccgtgaattcctatattctcctcatccattttcttgaaataatgacagtgagttttaattaaagtctgatcactacaatatctgtatcatctgtatttctatttgtgttcactcttggtatctctttctgcatatatgtgtgtatatgttatccattcattcatttattta

SEQ ID NO: 81120 - DNA, 547 bp, Homo sapiens
tcggctcgcgcacggtgcgcgcacccactggcctgcgcccactgtctggcactccctagtgagatgaacccggtacctcagatggaaatgcagaaatcacccgtcttctgcrtcgctcacgctgggagctgtagagcggagctgttcctattcggccatcttggctcctccggcttacattcttgtatgtatgtatcttctgtcttttctgctctccaagttagttctgaatattttctgatgagttatttttagttcttatattccttttatcagctacctgcagttaaactaatttatgatctattaatttcagatattatgatgtttatttctcaatttccactcggattttttaatacagattcttaattctccgtgaattcctatattctcctcatccattttcttgaaataatgacagtgagttttaattaaagtctgatcactacaatatctgtatcatctgtatttctatttgtgttcactcttggtatctctttctgcatatatgtgtgtatatgttatccattcattcatttattta

SEQ ID NO: 81121 - DNA, 659 bp, Homo sapiens
cccttaagcccaggagttcaaggctgcagtgagctatgatcatgccactgcactccagcctgagygacagagccagactttgtcacaaaaaaagaaaaaaaaaattactttgcaaaaaaaaatctacattctcaattatccatttcactgatactaggtgtacatgctgaagctccttaagaagattgtactgacacatgaagtattcacttttaagcatctcatgccaacttatttatttgttgtctacagttgatatcttaaaaatcacatgcatggcaaattgcctattggctatggaaattcaaatgttcatgagcaattataagcatcttagcaaatgtgctcaaattctatcaaaaaagaatagcaaaattgtatcatggattttctaattcattaattaatctctaaataagtctttattgagctcctaccatttgtcaggggatacaagaaaacaaagcagacttgtttcttgccctctttgaatttatgtttttgaaggacaactagataataagttaaataattagttaatttcagtttatgataagtactataaaaaataagagtactgagataagaatactttgtgtgagagagagaaggtagcctattccttcccccgcctccccaaccctccctggcccccaccc

SEQ ID NO: 81122 - DNA, 1971 bp, Homo sapiens
gcaattattaaaaaatagattttaaatgtttccaccacacaaaaaatataagtatgtgagctgatggatttgttaattagcttgatttactcattccacaatgtaaacatatatcaaaacatcacgttgtaccccacaaattattataaaattatttgtcaattaaaaataaaattttaaaaaacaagggctcaaattagaaaggggaaaaaaaagaagtcaaggagagatggactagttggaaaaaaagagagtcacttagcaatacgggcagaagcattagaaaaataacatcagaagaaacagaaattaggaatccacagtcattgattctactttccatttctactggctttccttgctggtggctgctttgattctatgcgtgtacttcccaataaaaatggtgctgttttcatttatgataaattagtaataaatgtgtttttatttgtctaatgtattactactatcccaagaaatcaaccttgactactcacatcccctactcccaatattacacaggccacctagtctcactagatttcctaaatatgtatctctctaatctctccctcttttctacccccagataactgcagaacccttgtaattggtgttcctgtcttcagtctcctttcacatccccacctgcttccaagtcatctatcttccattcaataattcattcaacaaatatttaagcccctactaatccttctgaaaatgttagtctactgtacccaatgcaattttccaactgaaaagggctggaaacaatctaaatgtccatcaatagcaggctcattttaagtaaattgtgggccttcaataaaatggaaaattaagcagccataggaaagaaaaaagaagagggggataaaaaaggatgcttttgatatattgatatggaaagatctcaccatgatgagctacaagaacaaagcaaggtgcacaaatgctaagtatggtatgctgtcattagcgtgaaagtaggttgagggatacaggtacactatttttgtatttacttatatttgcagaacatagctctgaggaaatatataagaaatgcatgcagtggttgtctgaggggaaagttactgggtaaatgagaaattgttcactatatactcttctatatgtttttwaatttttaaaccacgtaaatatactacctgttttaaaaaataaagtgtcaatctgaccatactactttcctacttaaaactgtcaggaattcctatcgcctttcagaataacatatataaacatcagagctcatctctcacactctctcttgccctgtctttcacccgcatttccataaaccactttgtctcttggtaaatattgtcatggttcaaggatcagctcctccaggaggcctttcctgcctgcatatccctctagctcatgtgccctcacacacacagtgtgtgtgtgtgtgtgtgtgtgtgagagtgtgtgtgtgtatatatatacatatatatatatatatattttttaagagatggagtcccactctgtcaccccacgctggagtgcagaggcgtgatcacagctcacagcacccttgatcgtctggtctcaagcaactctcccacctcagcctctacgcagctggcactacaggtgaacaccaacacaccctgctaatttttttttttagtagacacgaggtcttgttatgttgcccaggctagtctccaacttctgagttcaagtgatactcctgcttcagcctcccaaagtgctgggcttacaggcatgagccaccgcatcccacccaaagtatcttaattctgtgttttcatcttccctagaacctaggctctttgaggaccagaaatgaatcttttatttctatatccccactgcctagcatggtgcatggtccacagcagacacaaaaatctttaccaattgaatgaggtcatgactgtaatgaggaatttatcatttgaatta

SEQ ID NO: 81123 - DNA, 1971 bp, Homo sapiens
gcaattattaaaaaatagattttaaatgtttccaccacacaaaaaatataagtatgtgagctgatggatttgttaattagcttgatttactcattccacaatgtaaacatatatcaaaacatcacgttgtaccccacaaattattataaaattatttgtcaattaaaaataaaattttaaaaaacaagggctcaaattagaaaggggaaaaaaaagaagtcaaggagagatggactagttggaaaaaaagagagtcacttagcaatacgggcagaagcattagaaaaataacatcagaagaaacagaaattaggaatccacagtcattgattctactttccatttctactggctttccttgctggtggctgctttgattctatgcgtgtacttcccaataaaaatggtgctgttttcatttatgataaattagtaataaatgtgtttttatttgtctaatgtattactactatcccaagaaatcaaccttgactactcacatcccctactcccaatattacacaggccacctagtctcactagatttcctaaatatgtatctctctaatctctccctcttttctacccccagataactgcagaacccttgtaattggtgttcctgtcttcagtctcctttcacatccccacctgcttccaagtcatctatcttccattcaataattcattcaacaaatatttaagcccctactaatccttctgaaaatgttagtctactgtacccaatgcaattttccaactgaaaagggctggaaacaatctaaatgtccatcaatagcaggctcattttaagtaaattgtgggccttcaataaaatggaaaattaagcagccataggaaagaaaaaagaagagggggataaaaaaggatgcttttgatatattgatatggaaagatctcaccatgatgagctacaagaacaaagcaaggtgcacaaatgctaagtatggtatgctgtcattagcgtgaaagtaggttgagggatacaggtacactatttttgtatttacttatatttgcagaacatagctctgaggaaatatataagaaatgcatgcagtggttgtctgaggggaaagttactgggtaaatgagaaattgttcactatatactcttctatatgtttttaaatttttaaaccasgtaaatatactacctgttttaaaaaataaagtgtcaatctgaccatactactttcctacttaaaactgtcaggaattcctatcgcctttcagaataacatatataaacatcagagctcatctctcacactctctcttgccctgtctttcacccgcatttccataaaccactttgtctcttggtaaatattgtcatggttcaaggatcagctcctccaggaggcctttcctgcctgcatatccctctagctcatgtgccctcacacacacagtgtgtgtgtgtgtgtgtgtgtgtgagagtgtgtgtgtgtatatatatacatatatatatatatatattttttaagagatggagtcccactctgtcaccccacgctggagtgcagaggcgtgatcacagctcacagcacccttgatcgtctggtctcaagcaactctcccacctcagcctctacgcagctggcactacaggtgaacaccaacacaccctgctaatttttttttttagtagacacgaggtcttgttatgttgcccaggctagtctccaacttctgagttcaagtgatactcctgcttcagcctcccaaagtgctgggcttacaggcatgagccaccgcatcccacccaaagtatcttaattctgtgttttcatcttccctagaacctaggctctttgaggaccagaaatgaatcttttatttctatatccccactgcctagcatggtgcatggtccacagcagacacaaaaatctttaccaattgaatgaggtcatgactgtaatgaggaatttatcatttgaatta

SEQ ID NO: 81124 - DNA, 1017 bp, Homo sapiens
tcagatataggactagaaatcttgagaaaacaccatcaacagaagaggaatttcttatattttgaaagacatgttaggatcaattttttaaaactttccgtaagaactagaaggcagacatcttacgtgggtgaaagagaggactgtcaaacaaaaagtacatatatatatatatctcatatacatgttatatatatgatttatataaatattatatcttttatatgagatctatataaatatcatatatattttgtatatgatatatatatataaatatgcaatacatattttatataaatattatatatgacatcgtatatacatatatgtatatatgcacaygtatacaaatacatatataagtgtgtgtatatatacatacatatagtatggatatattggggtattcattcaagaactaattaaaaggctactcatactcttattctcttatttctaaagcaactaaaataaaataaaatatttgccttcaagttaaatctgctgtcggatttatcagagttcagtaagaaaaacagaaaccattccatgtattatatgaataaaatggcttttatgacttttggaaaagctggaggggtaagaagttcatagaagctgctcttgagagtcaattacttgattgtgaatatttcagcttgaatgatcaaagtgaatggttcttacaaagctagcatgaatccatagcaattctcaagtatctctgagaagctcccagatgtaagtctgcagcatgatatgagatattctccaaagcttgctaggagctgctgggactctctcctctacccatgtgtctagctgtcatcacctctggaaaacaataaaatctgttttatctcagctgcctcttcagtcttgaggaagttcctgtcattgaaaaacttcaactggggagcacacagaaatgagatttctgtgacctattgttccaaagcgtagaaggtggcagtgccctgccaaattagcaataagcaaccaagcagagtaatt

SEQ ID NO: 81125 - DNA, 760 bp, Homo sapiens
caaaaagtatagaaagagaccaacaaagtcattgtgtaatgataaagaagtcaattcagcagaatttaagaattctaagtatctatacacccaacactggagtatccagatataaagtaaatattattagagctaaagagagagatagactctaatacaataatagcagggcacttcaacactccactataagcattagacagatcatccagatagaaaatcaacaaagaaacattagacttaatctgtactatagaccaaatagacataacagacatttacagaacattttctccaacagctacagaatcaagttgtatacttataactcttaaaggagttagactaccaaaatgcactttaaaaaattatttatttatttatttatttatttattgagatggaggcttgctctgtagcccaggctggagtgcagtgacacgatctcagctcacagcaacccttcgccttgtgggtcaagcarttgtcccacctcagcctcctgagtagctgggattacaggtgcctgccaccacacccagataatttttgtatttttagtagtgacagggtttcaccatgttgtccaggctggtctcaaactcccgacctcaggtgatctgcccaccttggcctcccaaagtgctggaattataggcatgagccaccacgcccagctgcactttacaaattaataggtcagctatcaaactatcaataaatataaacattaaaacaggttatatgtagcctgattatc

SEQ ID NO: 81126 - DNA, 1276 bp, Homo sapiens
tttatgtactaatgaatagcacattgagagattacataaatataattttttggtttaacttcattcactgtcgcaagaacttctaaagtaaaacaagaataaaaacttctcacgtcttgaacagaatcacyttcacttcaggtttctaaaattgtatgaaactattatgattctcataatatttatttaattattagtatatgggcgtagtgaataattatattcatgtattcaataaccatgtcataaatttctaaattgctcaagaaactgtgaagcatacaaagacaaattcaatgcggattcttctttcagagattatacagtgaaattcagtaggcatatagataaaagcaactataatttgagataggatgtgctcaaagtaaaaataaagttctatgggaccccagagcaagacgacagaatttccaactagtgaaagaggtgattttataggaatgcaaaaatttaaagccacttgcagagaagcacacatggttcagaaatagagcacagtatattttggaatgtaaggatcactaaggaggtatttcaattcgtttgaaaaggatggtctaatttagtaagtgaatgttacaactaactacccactaaaagaaaacacattagatccttgtgtcacccaattccagttgattaaagatgtaattataaaacaataaagcccttagaggacaatttgggagataaataacaatagaaataatttaaaaataaaaataatgcagataataaaaatattttgtattatatacaaaagatttaaaaattgataagaatgctgacatcctagtagaaaactgggccaaagaaaaacaatatacgagctattctacaaataaaaatggcaatagttacatggaagtatgatgaacaaccccagagtgtaagggaaatataaatgaaagtaatcacgcaatagggctttttgcctcagtagatggctacgtggccaatagcattgcaatgcctaatattctccatgtaatagagtactctcatacattgctcaaagaaatagctgtcacagatttttaagaaagcaatgtgaaaacgtgttcaaattaaaaacatacatagcagtgactccactcccatagagattaaatcactgctatgtacaaagacgttaattgatgaaccatgttggtggtgaaactacataagaaaaaggtgaatgtttcttaataggaaaatggttgaataaattatggtttatctttgctaatattataaaattatttaaaaatgc

SEQ ID NO: 81127 - DNA, 1276 bp, Homo sapiens
tttatgtactaatgaatagcacattgagagattacataaatataattttttggtttaacttcattcactgtcgcaagaacttctaaagtaaaacaagaataaaaacttctcacgtcttgaacagaatcaccttcacttcaggtttctaaaattgtatgaaactattatgattctcataatatttatttaattattagtatatgggcgtagtgaataattatattcatgtattcaataaccatgtcataaatttctaaattgctcaagaaactgtgaagcatacaaagacaaattcaatgcggattcttctttcagagattatacagtgaaattcagtaggcatatagataaaagcaactataatttgagataggatgtgctcaaagtaaaaataaagttctatgggaccccagagcaagacgacagaatttccaactagtgaaagaggtgattttataggaatgcaaaaatttaaagccacttgcagagaagcacacatggttcagaaatagagcacagtatattttggaatgtaaggatcactaaggaggtatttcaattcgtttgaaaaggatggtctaatttagtaagtgaatgttacaactaactacccactaaaagaaaacacattagatccttgtgtcacccaattccagttgattaaagatgtaattataaaacaataaagcccttagaggacaatttgggagataaataacaatagaaataatttaaaaataaaaataatgcagataataaaaatattttgtattatatacaaaagatttaaaaattgataagaatgctgacatcctagtagaaaactgggccaaagaaaaacaatatacgagctattctacaaataaaaatggcaatagttacatggaagtatgatgaacaaccccagagtgtaagggaaatayaaatgaaagtaatcacgcaatagggctttttgcctcagtagatggctacgtggccaatagcattgcaatgcctaatattctccatgtaatagagtactctcatacattgctcaaagaaatagctgtcacagatttttaagaaagcaatgtgaaaacgtgttcaaattaaaaacatacatagcagtgactccactcccatagagattaaatcactgctatgtacaaagacgttaattgatgaaccatgttggtggtgaaactacataagaaaaaggtgaatgtttcttaataggaaaatggttgaataaattatggtttatctttgctaatattataaaattatttaaaaatgc

SEQ ID NO: 81128 - DNA, 608 bp, Homo sapiens
tcccagtgagtggcagagtcggggacaatgttcttcacctggcccagcgccacggggtggacctggaaggtaggaaccgggcagagggaattaaggaggtccttatacatttgtccaaaaaaaaaaaaaaaaaaamccacaaatcaggtgtgtctcttcacgtctttttcccaccaaatatggactaaaatccaaacccctcaccatggcctcatctgttgccaagctcttatttgttaagcatttattagagatcactaggactcctggctcccaggattttgtgttctcttcccccttcctccctgtattctagccacattggctttctttttgttgttgttgttttgagatggagtttcactcttgttgcccaggctggagtgcaatggcttactgcacctcagctcactgcaacctccacctcccgggttcaagcgtttctcctgccccagcctccagactagctgggattacaggcgcccaccaccaagcccagctaatttttgtatttttagtagagacggggtttcaccacattggccaggctggtctcaaactcctgaaaggtgatccacccgcctcagcctcccaaaatgctgggatta

SEQ ID NO: 81129 - DNA, 693 bp, Homo sapiens
gtgctgctgaaacattctcatttggggaggagacattctaaatttaattgctggagtctgcaatgaactgtgaaaaactggataagcagatagcattttttctaagaccagtgatgtatgattgccatttatttaatgaactgcaggctctgaaagagaagtttaatttactaatccctcaaagcctacaggactttttgggtcttaaccccacctgctccttttttgtctcactcttctctaactttgcatattgtctttcccttctccctaaccctgtgcacatccttttatttgtacctttcatcctcagtatgtctcttccctcatatcttttctctttccttttgttatctttcaactttatttctgcttattgctcttatttctccatttgctattttttcacatatttcctctatgtctactctctctctctctctctctctttctctgtctctctttcatctcttgtgtcccagcaggcactattgatctccatctggctttttatcatcatctgtatacactttcccttgctttttcttaatctgcttttgttaacattgattttttttctatttttccagtttattttttgctattcctttcttcaactgtccatgacacaaaaccaaagtacacttcaatatcmtctctgtggctccagacaaattattcttccatgtctgt

SEQ ID NO: 81130 - DNA, 579 bp, Homo sapiens
gtaatttatggacactgaactttgaaattcataaaattttatgtgtcacaaaatatttttattctttagatttttaaaatccattaaaattaaaaaaaatcttagcttgaagattgtataaaaacaggtagtaggccatattgggcccataggccacagtttgccacccttagctgtaaattcagagcccaaggcaggtgtttctcttgatagaaaaatatttctggatccttaaaaaaatccagtgcaggagttgtttcacccacaataaattttgaataaatttttccctacaaatactgttctggtaggatttatktcaccacctagttttcatattttatacttattaaactttgtgactatgtggtagagaactattctctttgtttttagagcagtgttgggcatacagagagtacagagagttcccatctatttccttctcaacccccttcctctgattgtcttccgttatcaacattttacatcaccatggtactttggtcacaattgataaatgaatattgatatattattactaagttcagaatttacattagagttcactttttgtgt

SEQ ID NO: 81131 - DNA, 687 bp, Homo sapiens
aacacaaatagccgtgtgctgaacatttatctttttttgacatataggtacttatttatttgacaaataaaattatatatctttttatgtaaaacatgttgttttgaaatatgtttacattgtggaatggctaaatcaggctaaataacatatgcattgcttcacatgctaatcatattttgggggtaagaatacttaaaatctagtctctcagcagttttcaagaatacaatgccttgttactaaccacagccactatgctgggttacgtttctcttgaacttactgctcctgtctagctgaaagtttgaatcctttgaccaatgttggctgagtagctcttgagttatgagcarcagggaggaagggaagaaagtcatagttcctgcttgcataaaattcagacactagaagcagagacagaaaggtgaacacatcatgaacgcccttgtgctcagggatactagagagacataaataggagcattggatggttggggatgaactcgccagggctcatctggataccatgtattctgtgctttctgggggcagccctgacccacagcttcatgtgtattaactcactcagcctgcaaagggccccatgacagagacacctgcactgcccttgtttcatcaatgaggaaatgaatggtgcagagaggttgggtgacttgcccagga

SEQ ID NO: 81132 - DNA, 687 bp, Homo sapiens
aacacaaatagccgtgtgctgaacatttatctttttttgacatataggtacttatttatttgacaaataaaattatatatctttttatgtaaaacatgttgttttgaaatatgtttacattgtggaatggctaaatcaggctaaataacatatgcattgcttcacatgctaatcatattttgggggtaagaatacttaaaatctagtctctcagcagttttcaagaatacaatgccttgttactaaccacagccactatgctgggttacgtttctcttgaacttactgctcctgtctagctgaaagtttgaatcctttgaccaatgttggctgagtagctcttgagttatgagcaacagggaggaagggaagaaagtcatagttcctgcttgcataaaattcagacactagaagcagagacagaaaggtgaacacatcatgaacgcccttgtgctcagggatactagagagacataaataggagcattggatggttggggatgaactcgccagggctcatctggataccatgtattctgtgctttctgggggcagccctgacccacagcttcatgtgtattaactcactcagcctgcaaagggccccatgacagagacaccygcactgcccttgtttcatcaatgaggaaatgaatggtgcagagaggttgggtgacttgcccagga

SEQ ID NO: 81133 - DNA, 689 bp, Homo sapiens
tgcatggaacactatattcacaaatcataccaatggtctaccaccaggagagccagaacagtacataaaattaacagaagtagaagtggactttcaatgatctgtggaaactccctccttcrgactcctggagactcgctggagagtgaattgcaggaggtgggaaggacaggctatggctgctaaagagagcaaagttaactgattctggaggaaactgatcacgtgacctgggccagtgggctacattcccctcaaggcacagggctggttttgttatgttaccaaactccagaggcttttctgttcctggtattgagtaaatgctcaactagaatttgtgtaacctgaatttattaaccgcctattatagtgaatatgggacatgtatatactgtccaccaaaagccatgctttggaaggaaattggttttggaatcagagaaaataggatgggaggatccaaggaaagattagagtgaaaagaatcacaatgtctctgtcatgacaatgaaaatgtattcctctacaaggcagaggtgaggacagcacgatgatattcctgggtagttattaatccctcttacaatatagaagtctggggcttcctagaaaaccatggcaaaccaagtctacacatacacaacttcttctttcccatggcttcccatcaccagtagactatagga

SEQ ID NO: 81134 - DNA, 689 bp, Homo sapiens
tgcatggaacactatattcacaaatcataccaatggtctaccaccaggagagccagaacagtacataaaattaacagaagtagaagtggactttcaatgatctgtggaaactccctccttcagactcctggagactcgctggagagtgaattgcaggaggtgggaaggacaggctatggctgctaaagagagcaaagttaactgattctggaggaaactgatcacgtgacctgggccagtgggctacattcccctcaaggcacagggctggttttgttatgttaccaaactccagaggcttttctgttcctggtattgagtaaatgctcaactagaatttgtgtaacctgaatttattaaccgcctattatagtkaatatgggacatgtatatactgtccaccaaaagccatgctttggaaggaaattggttttggaatcagagaaaataggatgggaggatccaaggaaagattagagtgaaaagaatcacaatgtctctgtcatgacaatgaaaatgtattcctctacaaggcagaggtgaggacagcacgatgatattcctgggtagttattaatccctcttacaatatagaagtctggggcttcctagaaaaccatggcaaaccaagtctacacatacacaacttcttctttcccatggcttcccatcaccagtagactatagga

SEQ ID NO: 81135 - DNA, 897 bp, Homo sapiens
ttattcttctaagtcttataatttttttataaatagtgtccatttctgtcttgttttatgtgattattaaagacattcttcccttaatttgtagccttataagttaaaagttcatattgaatcatttgagaatagataactatactcaaagttgctaaatcatagactatttgataagactacctaacagcctttagggtattttgctgctgttaatactgctgataatgatgaaaaataatgattaaaatttattgaacatttttctatgctgaaattttgtgagatatttttgtagtttcaacaactcttattgtatgcactttgccccattccatatttacttccagaggataggctaaaattraaaacaaagggatgtattgagactagttttgacatgatgagagttttttttttttgagatggagtctcactctgtcacctaggctggagtgcggtggtgtgatcttggctcactgcaacctccgcctgacagattcaaacaattctcctgcctcagcctcccgagtatgtgggactacaggcgtgcaccaccatgcccggctaattttttgtatttttagtagagattgggtttcaccatgctggtcaggctggtctcaaactcctgacctcatgatctcccctcctcagcctcccaaagtgctgggattacaggcatgagccactgagcccagcctacatgatgagagattttatctcttagaatttgtatttttcctggccaccctgggagctcaggccttacatgttgccagaatctctatgttaaatgagatttaagcctatctctcaattaaaagttggctttgtctggaaggtccaaggagaaagggctaatcataaattttttaatttaagccttaggtcaga

SEQ ID NO: 81136 - DNA, 589 bp, Homo sapiens
tgccccacgttctttaaaacaatacaattaaatggaacatccaacagtataatatatattgccatgttcagcagtcagtgaaaataaccatttcaagaagcaagcaaatgtgactcatacccagaagaaaaagtaggaaacaaatacagatctagaaaacttagaggtgatagaayaggcagatttgcattttaaaacagctaaacattatgttcagttgtttagaaaacaacataaaggtaagagaaataaagggaaattctagaataaaaatatggtattttattaattgtaatgagtaaaatttgataaatgaatttaataaattcaataaattttattaataaatttattaaatttatttaataaaaataataattttaatttaataaaaatctcactggatgaaattgacctctaattagagattgtacaagaacacattagtgaacttgaaaacataaaaatagaaactgtaaaactgaaacacaaagagaaaaaataaagactgaaaccaacttttcaaattcaaaaaatgctgggaaaggatgttagtttggcttgacctataagcctattcctggaacac

SEQ ID NO: 81137 - DNA, 589 bp, Homo sapiens
tgccccacgttctttaaaacaatacaattaaatggaacatccaacagtataatatatattgccatgttcagcagtcagtgaaaataaccatttcaagaagcaagcaaatgtgactcatacccagaagaaaaagtaggaaacaaatacagatctagaaaacttagaggtgatagaacaggcagatttgcattttaaaacagctaaacattatgttcagytgtttagaaaacaacataaaggtaagagaaataaagggaaattctagaataaaaatatggtattttattaattgtaatgagtaaaatttgataaatgaatttaataaattcaataaattttattaataaatttattaaatttatttaataaaaataataattttaatttaataaaaatctcactggatgaaattgacctctaattagagattgtacaagaacacattagtgaacttgaaaacataaaaatagaaactgtaaaactgaaacacaaagagaaaaaataaagactgaaaccaacttttcaaattcaaaaaatgctgggaaaggatgttagtttggcttgacctataagcctattcctggaacac

SEQ ID NO: 81138 - DNA, 575 bp, Homo sapiens
atatttataaatttcattcacacttcagggaagaggattatattggggatatttaagcagaggggcagaattttggagaccatcttagaattttgcttactaaatttgtcttctatgcttacttactgtatatagagccctttgctggggggttgatgctccaaaatctaaaattaatgagtattttaggaagtgattttgatagtgatggtgtyattataattttttttctaaaagggagataataggactgtatcatatggtttccacaatccagatgtcaaatcagaaaacattctccccaccaaaaaaattaaaacaaatacagaggtaaatgtaggtataatttatgtagcaataatttgatttctatgattcttttttttcctgatgtggaaaatgggtataagattccccctctcattgggttgctaaaaggattaaagaaaattattagagaaatacctgacagataataggtgcctaacaattggaaggtactttatcttattccccacacagaatgacttaactaaattttgtagaaagaaaagctatttttaagaacgtgtgga

SEQ ID NO: 81139 - DNA, 626 bp, Homo sapiens
gacttacttaaagctgacagtttgcatgtgtggaatttaaacccgctagaaatctggcgaattcccttagatgtgattagttcgtaattttttgaaagatgcagtaacatcctagcttgaaaagatgttggtgatacgaaagagctctcttaatatcaaaacaaatctcctgagtcggggtcagtactgtatctaaatggtaattctcctgaatccaggtgtagaattgtggattctatactcctttcttgttccaaatcacttttacataactttgaactaattttccctcaggactttaggaatcttctataacataggggccatatttatatgaaagctaacagatgtgattgggaagagtttacatatgtgggtatacatatgtgagtattgtcacagaaaatagtttaatgtgctactaaaattgtaaactaaactatatttttacgaagaagtttcttgacaacactttactctgccctatttgggtagataaaacacaaacgttttacacagtcwctaagagaaaacaaatagaaagttaatcagaaatagttgcccatgtagaatggccacactatcttacacatgaaaggcatacactggttatcaaatgtaaatgg

SEQ ID NO: 81140 - DNA, 751 bp, Homo sapiens
ttttaatttctctgggataaatgggctgttaactgctgagctatatagtagtcgcatgttaggttttgacttgggtgaactcatcctccagattactctcctgcggctggagtcagttgaaatgtttgttcagttctttgagtcttagctgggctctttggaatccacgttacatacatatagttcagagatcagctagagatttgggccaagttataagtagatttgggggatttatctgttaggctttctcccatattcctagcctcactttccagtttctgattttaccccaaactctgttcttctggttgttagtagggcaaattgttgtcctccccaagtggttccaactagggcctgcccttgggtatacagccataaaagcaagacatttacccagtggcattccatctttttgagtgtagacttccctctaggttctgcctgcttttcatatctctccaggcttttcaggtagtttaaaaatattttatccagggtttatggttgttatctgcagaagagttacccyaataggagattctctgccatttctcaaagtacacccattgtgaattcttttgaatttcatccagatggtagcgtactgttctttaccttgcttaagatgtttttcctttcaatgtatgtaatgatgtcttgtttttatagttgtataattacctactatatgaatataatctaacaagtcccactattgatggacacttggtttgtttccattttt

SEQ ID NO: 81141 - DNA, 1705 bp, Homo sapiens
caaaagttataaggtaggctaggtgtggtggttcagatctgtaaccccaacactttgggaggctgggcagattgcttgagcccaggagcttgagaccagcctagtaagcatggcaaaaccccatctgcacaaagaatacaaaacctagccgggtgtggtggcgcacacctgtagtccccactacttggaagactgagtacgagggtcacttgagcccgggaggtggaggctgcagtgagccgagatcgtgccaccacactccagtctaggtaacagagcaagaccctgttaaaaaaaaaaaaaaaaaaaagagagagagagaaagaaaaaaaagtatgcagtagtctccataccgctgaactgtcattgacaaatcatggtaataactcagaatgggcagcctaatccagtgctaaagtcagaaactgcccatcatggtcaccctttatttcaaccaagcacactttttccttcccatcattcttttgcctgaaaagaggtcttcaagtagccatacacatcaaaacatcttgcatctgactttaggtttgatatgagtgttaggaaacacccatgtttatatctgttccagaatttgttggtattctccatgtttataaccttgttgtcacagagattaaaatttaattgggggaaataaacactctcctgtcagactttaaaggacacagacatactctatataagagcccaaacatgatgtaaaagaataaaacaggaagcatggacaggccagttgatgtggcagttgtcagggaggaaacagtgggkgttagtatttggtcacaagtaatcacccctctcctctccttgagaattactccgtcacactctccagccatgtagctctgatctgcctgccaatcatagcaatcattcacatatacaaataatacacacagctactgaagatttgagtgccaagataaagcacttggtgtatatttaataggcaggaaggaacccgtttaaaaaatatatatatatatatatatatatatatatatatatatatatctcatcattatatgcatcctgtagattcttaaaatactgacatagtaaggatagtgttttaaaaagatttgggtatcagaataattcatgcttttcactgggtgggcttaaaagcagatttgaccaccccaccaataaatgacctgtgggaaaatatcaaaagatctaacacaggtataattggagtcccagaaagaggtaagatggagacagatcacaaaatattcaaataatagtctaaattttccaaacttgatgagaaatgtgaatttccacattaaagaagtttagtcagtcctaagcaggataaatacaaataaaccacaccttagcaaaccacactcaggtgctaaaaatccaagttaaagagaaatcttgaaagcggctagaaaaagaaatcttatatgtagaacaaaattaggaattgttgttggcttgtcatcagaaacagtggaggcaaaaagtcaagtgtaatgacatctttaaagtgttggggttggaggtagcagggaaacccagtcaacccagaattctatatacagccaaaacatctttcaagaatgaaggcaaaataaagacattttcagataaacaaaacctaagaaaattgccagtagacctattctacaagaaatgctaaaaattcttcacactgaaggaaaaatca

SEQ ID NO: 81142 - DNA, 1705 bp, Homo sapiens
caaaagttataaggtaggctaggtgtggtggttcagatctgtaaccccaacactttgggaggctgggcagattgcttgagcccaggagcttgagaccagcctagtaagcatggcaaaaccccatctgcacaaagaatacaaaacctagccgggtgtggtggcgcacacctgtagtccccactacttggaagactgagtacgagggtcacttgagcccgggaggtggaggctgcagtgagccgagatcgtgccaccacactccagtctaggtaacagagcaagaccctgttaaaaaaaaaaaaaaaaaaaagagagagagagaaagaaaaaaaagtatgcagtagtctccataccgctgaactgtcattgacaaatcatggtaataactcagaatgggcagcctaatccagtgctaaagtcagaaactgcccatcatggtcaccctttatttcaaccaagcacactttttccttcccatcattcttttgcctgaaaagaggtcttcaagtagccatacacatcaaaacatcttgcatctgactttaggtttgatatgagtgttaggaaacacccatgtttatatctgttccagaatttgttggtattctccatgtttataaccttgttgtcacagagattaaaatttaattgggggaaataaacactctcctgtcagactttaaaggacacagacatactctatataagagcccaaacatgatgtaaaagaataaaacaggaagcatggacaggccagttgatgtggcagttgtcagggaggaaacagtgggggttagtatttggtcacaagtaatcacccctctcctctccttgagaattactccgtcacactctccagccatgtagctctgatctgcctgccaatcatagcaatcattcacatatacaaataatacacacagctactgaagatttgagtgccaagataaagcacttggtgtrtatttaataggcaggaaggaacccgtttaaaaaatatatatatatatatatatatatatatatatatatatatatctcatcattatatgcatcctgtagattcttaaaatactgacatagtaaggatagtgttttaaaaagatttgggtatcagaataattcatgcttttcactgggtgggcttaaaagcagatttgaccaccccaccaataaatgacctgtgggaaaatatcaaaagatctaacacaggtataattggagtcccagaaagaggtaagatggagacagatcacaaaatattcaaataatagtctaaattttccaaacttgatgagaaatgtgaatttccacattaaagaagtttagtcagtcctaagcaggataaatacaaataaaccacaccttagcaaaccacactcaggtgctaaaaatccaagttaaagagaaatcttgaaagcggctagaaaaagaaatcttatatgtagaacaaaattaggaattgttgttggcttgtcatcagaaacagtggaggcaaaaagtcaagtgtaatgacatctttaaagtgttggggttggaggtagcagggaaacccagtcaacccagaattctatatacagccaaaacatctttcaagaatgaaggcaaaataaagacattttcagataaacaaaacctaagaaaattgccagtagacctattctacaagaaatgctaaaaattcttcacactgaaggaaaaatca

SEQ ID NO: 81143 - DNA, 619 bp, Homo sapiens
tgcagtgtcttgcttattaaaggcaaaccacaagtatttatagaattcatttgatactgggttctcctaagtcagggctaccatacaaggttgcacagaatgtcgattgcaaagagataccacattgaaaaggctgtcttccacattgcagccatcaaaggcttaagtataaaagtgaaaaccacaaagctcttagatgaaaacagagatgtaaatcyttatgatctaggattaagcaatgatttcttagatatgccactgaaagcacaagagacaaaagaaaaaataaaatcgggcttactcaatatttaaaaacttttgtgcttcaaaggacaccatcagaaaatgaaaagacaacccacagaatgaaagaaaatttgtgaaaatcatatatctgataagagacatatctagaatatgttttttaaaaaatcttctagacctcaatactaagaagacaaataacccaattttttaaatgggcaaactgtctgactagatatttctccaaagaagatatgcaaatgttcaatacacacaggaagatgactaacacaattagccactggagaaatggaattaaaaccacaatgagattccacttcatacccactagtat

SEQ ID NO: 81144 - DNA, 619 bp, Homo sapiens
tgcagtgtcttgcttattaaaggcaaaccacaagtatttatagaattcatttgatactgggttctcctaagtcagggctaccatacaaggttgcacagaatgtcgattgcaaagagataccacattgaaaaggctgtcttccacattgcagccatcaaaggcttaagtataaaagtgaaaaccacaaagctcttagatgaaaacagagatgtaaatccttatgatctaggattaagcaatgatttcttagatatgccactgaaagcacaagagacaaaagaaaaaataaaatcgggcttactcaatatttaaaaacttttgtgcttcaaaggacaccatcagaaaatgaaaagacaacccacagaatgaaagaaaatttgtgaaaatcatatatctgataagagacatatctagaatatgttttttwaaaaatcttctagacctcaatactaagaagacaaataacccaattttttaaatgggcaaactgtctgactagatatttctccaaagaagatatgcaaatgttcaatacacacaggaagatgactaacacaattagccactggagaaatggaattaaaaccacaatgagattccacttcatacccactagtat

SEQ ID NO: 81145 - DNA, 961 bp, Homo sapiens
ttagcctaggcctacagagaacaaggatgatcaatatcactgtcttccacctccacatcttgtctccctggaaggtctatgggtcaatcacaagtatggagctgtcatctcctatgacaataatgcctacttctggaataccttctggaggacctgcctgaatctgttttacacttaactttaaaaaaatataagtaggagtacactctaaaataataataaagtacagtaaatacatagaccagtaacactaatttattatcattatcaaatgttatgtactgtacatagttgtatgtgctatacttttatatgactggcagcgcagtaagtttgtttacactagtatcaccacaaacatatgagtagtgcattgtgctctgacattataacagctaagatgtcactaggagataggaatttttcagctccattataattttatgggatcaccatggtatatgtggtccatcattaaccaaaacatyattatggggcacataactgtaatggtttgaagtgggagcacagaaaggggcagagggtataaagatacagttttcaaagttatatactgtaaaatagactaagaatattcatgattgtgttgcttgtgtttgaaagcacaatagggcaactacagttaacagaaatgtatagcatatttcaaataaccagaagagaagctctggaatgtccctaatacaaagaaatgataaatgtttgaggtgatgaatatcccagttaccctgatttgatcattatacatcgtatacatgtatcgttaaaactcatgtactctgtaaacatatacaactattacacatcaataaaaaaagtgaaaagctggattgttctggggtcttcctatatactaacaggatctgctgtcaatcattgcatgaagggtgaagttcagtagctattcagggcaccagatactgctattctcttgagcctt

SEQ ID NO: 81146 - DNA, 961 bp, Homo sapiens
ttagcctaggcctacagagaacaaggatgatcaatatcactgtcttccacctccacatcttgtctccctggaaggtctatgggtcaatcacaagtatggagctgtcatctcctatgacaataatgcctacttctggaataccttctggaggacctgcctgaatctgttttacacttaactttaaaaaaatataagtaggagtacactctaaaataataataaagtacagtaaatacatagaccagtaacactaatttattatcattatcaaatgttatgtactgtacatagttgtatgtgctatacttttatatgactggcagcgcagtaagtttgtttacactagtatcaccacaaacatatgagtagtgcattgtgctctgacattataacagctaagatgtcactaggagataggaatttttcagctccattataattttatgggatcaccatggtatatgtggtccatcattaaccaaaacattattatggggcacataactgtaatggtttgaagtgggagcacagaaaggggcagagggtataaagatacagttttcaaagttatatactgtaaaatagactaagaatattcatgattgtgttgcttgtgtttgaaagcacaatagggcaaytacagttaacagaaatgtatagcatatttcaaataaccagaagagaagctctggaatgtccctaatacaaagaaatgataaatgtttgaggtgatgaatatcccagttaccctgatttgatcattatacatcgtatacatgtatcgttaaaactcatgtactctgtaaacatatacaactattacacatcaataaaaaaagtgaaaagctggattgttctggggtcttcctatatactaacaggatctgctgtcaatcattgcatgaagggtgaagttcagtagctattcagggcaccagatactgctattctcttgagcctt

SEQ ID NO: 81147 - DNA, 961 bp, Homo sapiens
ttagcctaggcctacagagaacaaggatgatcaatatcactgtcttccacctccacatcttgtctccctggaaggtctatgggtcaatcacaagtatggagctgtcatctcctatgacaataatgcctacttctggaataccttctggaggacctgcctgaatctgttttacacttaactttaaaaaaatataagtaggagtacactctaaaataataataaagtacagtaaatacatagaccagtaacactaatttattatcattatcaaatgttatgtactgtacatagttgtatgtgctatacttttatatgactggcagcgcagtaagtttgtttacactagtatcaccacaaacatatgagtagtgcattgtgctctgacattataacagctaagatgtcactaggagataggaatttttcagctccattataattttatgggatcaccatggtatatgtggtccatcattaaccaaaacattattatggggcacataactgtaatggtttgaagtgggagcacagaaaggggcagagggtataaagatacagttttcaaagttatatactgtaaaatagactaagaatattcatgattgtgttgcttgtgtttgaaagcacaatagggcaactacagttaacagaaatgtatagcatatttcaaataaccagaagakaagctctggaatgtccctaatacaaagaaatgataaatgtttgaggtgatgaatatcccagttaccctgatttgatcattatacatcgtatacatgtatcgttaaaactcatgtactctgtaaacatatacaactattacacatcaataaaaaaagtgaaaagctggattgttctggggtcttcctatatactaacaggatctgctgtcaatcattgcatgaagggtgaagttcagtagctattcagggcaccagatactgctattctcttgagcctt

SEQ ID NO: 81148 - DNA, 961 bp, Homo sapiens
ttagcctaggcctacagagaacaaggatgatcaatatcactgtcttccacctccacatcttgtctccctggaaggtctatgggtcaatcacaagtatggagctgtcatctcctatgacaataatgcctacttctggaataccttctggaggacctgcctgaatctgttttacacttaactttaaaaaaatataagtaggagtacactctaaaataataataaagtacagtaaatacatagaccagtaacactaatttattatcattatcaaatgttatgtactgtacatagttgtatgtgctatacttttatatgactggcagcgcagtaagtttgtttacactagtatcaccacaaacatatgagtagtgcattgtgctctgacattataacagctaagatgtcactaggagataggaatttttcagctccattataattttatgggatcaccatggtatatgtggtccatcattaaccaaaacattattatggggcacataactgtaatggtttgaagtgggagcacagaaaggggcagagggtataaagatacagttttcaaagttatatactgtaaaatagactaagaatattcatgattgtgttgcttgtgtttgaaagcacaatagggcaactacagttaacagaaatgtatagcatatttcaaataaccagaagagaagctctggaatgtccctaatacaaagaaatgataaatgtttgaggtgatgaatatcccagttaccctgatttgatcattatacatcgtatacatgtatcgttaaaactcatgtactctgtaaacatatacaactattacacatcaataaaaaaagtgaaaagctggattgttctggggtcttcctatatactaacaggrtctgctgtcaatcattgcatgaagggtgaagttcagtagctattcagggcaccagatactgctattctcttgagcctt

SEQ ID NO: 81149 - DNA, 654 bp, Homo sapiens
gttctccctttctcacctttgtttctcttcatacttgtttctctctctgtgtctctctcattctcttcccttccaaatgtagtatttggagactgtaatatcgattgaggcagacaatagaaaactgtcgaacctccactgtaaattcattcttaatcctatgaaaaaatgcatcctgaaacgtgttgcatgcacagtgagacaaaaacctgtgtctttaggtttcctgcgatctagcttggaggcgggttgggggggtgtggagggaagtgctggagaaattatcccattattgactgagcagcaaagaattttcaagaacagtgattctcctagaaaaagtattgctgctgccatttcaatgcaaaatttggcttttgagtaaaaggcttaggtttttatcttccggggagaaaaaaaaaacccaaaagmcaaaaaaaaaaaaaaaaaaaaaggtcatagcgtccctgggtgggctcgaaccaccaacctttcggttaacagccgaacgcgctaaccgattgcgccacagagaccgagtcgactaccggtgtagtagtgagccgagtcaatgggagcgagcctggacggcgcagacgccgtaagagatgccgccatcgggcgaaataagtggaacccgggggagaaagggaa

SEQ ID NO: 81150 - DNA, 604 bp, Homo sapiens
cgctgacttgcctacttcttgatgtctctacattgatgtcactcaggtacctcaaactcaacatgtcccacctgaaattttcatctttttcttcaaatgttcttatggtgrattgaaaatggctgtgtattctttgccactctacccatcaagagatggaaggctatttctgttcccattgaatctgggctggcctgtgacaggctttgaaaaatggcagactgtgtaacttttgaggccaggcattaagagatgtatagtttccatcttcacctcttggagtcttccttcttcaaacagatgccacgttgtggggaaacccgagcagctatgtggagaggccttcataaggagaatggggcccactggctaacagtcataactcagctcccaatggcagtggcactgcctgccagccctgtgaaggaggatatttttcagctgtactcaaactgtcccagccagtgctacatgaaagagtcaggccatccctgcagggtcataaataaatataggttgttgtttttaagcttccaagtttgtttgtttgtttgtttgttttttgttttttgcttttttttatagagacagggtctcgctatgt

SEQ ID NO: 81151 - DNA, 653 bp, Homo sapiens
cttagggctaccttgaactcttgttaagatgggctcagagtggatatgggaggctcatccctaagctatcactgacaacttggaagtggggtcctgtaggaagggagcagcttccatttggactttatggtaggagccattggaggtgtgattcctccaacaacggagggcctatttcccagaagaataggggaacagtgctgggagcaaaataattgagataaacaacattggactcactacagaggcgtccaccgagggtgtaagtgtctctaagtgccctcctccattttgacattcatgggtccacttcccctcagctcctccctgtggcttcctggtcccattgagagaccaggatcacttttgtcattgtccaatttactttcacttcattctcaaagtactgcctgctctaaggttcttgtgtctcaatgttcctcccactcaaactgttaytcagctacaaaacatatttatctctgatactgtgttgccctctccacacagaaccaggccaaaattccctaggggacaagggagggcctcaacccacgctgcctcctcttcaccaatccccagacagcatccctagcccaggcttgtgcacctcctctttgcccacctagtatatttattggaatttagggttt

SEQ ID NO: 81152 - DNA, 653 bp, Homo sapiens
cttagggctaccttgaactcttgttaagatgggctcagagtggatatgggaggctcatccctaagctatcactgacaacttggaagtggggtcctgtaggaagggagcagcttccatttggactttatggtaggagccattggaggtgtgattcctccaacaacggagggcctatttcccagaagaataggggaacagtgctgggagcaaaataattgagataaacaacattggactcactacagaggcgtccaccgagggtgtaagtgtctctaagtgccctcctccattttgacattcatgggtccacttcccctcagctcctccctgtggcttcctggtcccattgagagaccaggatcacttttgtcattgtccaatttactttcacttcattctcaaagtactgcctgctctaaggttcttgtgtctcaatgttcctcccactcaaactgttactcagctacaaaacatatttatctctgatrctgtgttgccctctccacacagaaccaggccaaaattccctaggggacaagggagggcctcaacccacgctgcctcctcttcaccaatccccagacagcatccctagcccaggcttgtgcacctcctctttgcccacctagtatatttattggaatttagggttt

SEQ ID NO: 81153 - DNA, 750 bp, Homo sapiens
ggatccagtcgggacatctttactcaaggcaggaatatggggcagtgccaagcgtatgtgttcccttttgtctggaaagcaaaagcttcccaagaggcccagcagatttttgcttgtatcttattgaccaaaactgtcacaaagcaacttctagctgaaaggaagctggagaaatatttagctgagttcattatcttcccaaataaatgaattctgttagcggtagaagagggggaatggatgttggattagcaatcaacagggtctgcccaaataatgaatgaatttactaaatcacagaaacttagctaactttcaagaacttttaaacattttttagtcatttttaataaaaatatttttcggaygctttcataaaaagaagatgctgattatgatgtgaatgttgttaatataggctcctcaataaaatgaaggactatactctgcgttcagtagatttatttcttccctggctaccagctgtcaatcatgctgccagaaatccagtgttgaagctatccttacaaatgtgctcttttctttctgccaacccaaatcaatccaaattattagaatttcatattaagtaataatagccagtaaattcataactgtgtttatttctacatggatacctagtttctttttgcctgtctttgtgatagttatttcacagggctgttttcgcatacttcctgatttttcactacattcaatggtgtgagtagtcagaaatctgatgcccag

SEQ ID NO: 81154 - DNA, 750 bp, Homo sapiens
ggatccagtcgggacatctttactcaaggcaggaatatggggcagtgccaagcgtatgtgttcccttttgtctggaaagcaaaagcttcccaagaggcccagcagatttttgcttgtatcttattgaccaaaactgtcacaaagcaacttctagctgaaaggaagctggagaaatatttagctgagttcattatcttcccaaataaatgaattctgttagcggtagaagagggggaatggatgttggattagcaatcaacagggtctgcccaaataatgaatgaatttactaaatcacagaaacttagctaactttcaagaacttttaaacattttttagtcatttttaataaaaatatttttcggatgctttcataaaaagaagatgctgattatgatgtgaatgttgttaatataggctcmtcaataaaatgaaggactatactctgcgttcagtagatttatttcttccctggctaccagctgtcaatcatgctgccagaaatccagtgttgaagctatccttacaaatgtgctcttttctttctgccaacccaaatcaatccaaattattagaatttcatattaagtaataatagccagtaaattcataactgtgtttatttctacatggatacctagtttctttttgcctgtctttgtgatagttatttcacagggctgttttcgcatacttcctgatttttcactacattcaatggtgtgagtagtcagaaatctgatgcccag

SEQ ID NO: 81155 - DNA, 541 bp, Homo sapiens
tgctctgttgcccagactggagtgtaatggtgtgatcacagctcactgtagctttgaactcctgggctcaaccaatcctccagcctcagcctctcaagtcactaggactatagatgtgcaccaccatgcccagctaattttgaaaatttttttcctagagacggggtcttgctatgttacayaggctagcagaaactgtctaattattagtaaaatctgctattttaccttcatttttaacattgcttgtctgtaaatctgtgggatggccttgaagtgaaaggcgaggttgctgtaagcggctaatcataggctgtggggacactctactatattctattccccgagcaggagatcgtgaacgaggtgaatttctgggtgactgcttaggtgacggtcgaggtgaattgcgtggtgatggtgaaaacctgttaacagcagggtatactgcatgatgcatattgtcatcttcatcatctaaactttgtgcatcaagttcctgatcactaaaagtaccccgtcttgtagaattgcaagatga

SEQ ID NO: 81156 - DNA, 770 bp, Homo sapiens
tcaactgcccccgcctgtggcttgtcttgtctagccccagcggccacctagctgcagagaggacacacctcagcagcaggggagagaggggtgatggttctaattgcgtatgtttagaattaaagaaggggatggccaggtgcggtggctcacatctgtaatcccagcactttgggaggtcgaggcaagcggatcacgaggtcaggggttcgagaccagcctggccaacatggtgaaacctcatctctactaaaaatacaaaaattagccgggcacggtggcgggcacctgtaatcccagctactaggaaggctgaggcaggagagttgcttgaacctgggaggtggaagttgcagtgagccgagatcatgccacttcgctccagcctgggtgacagagcaagactccatctcagaaagaaaaaaaaaattaaagaaggggaggaaaggaaggggctaggaatttgatttgtaccttgatactgcaaacttgaacaaaggtagatccattgagagccatgaactcgagagctagaaaaaaccttgcagaaacccacccctcatttcacagatggggaaactgaggcctagggagggggagttactctcagccttacaaaccatcctggagcatcacacagcaccrccacttgcccttaccacagccctcacctgggaaaagaatgattatttcatgccagtcactgtccatgtgcccacagcttgtcctgatccagattttacccaccctcgtgctcaccgtggaagcag

SEQ ID NO: 81157 - DNA, 818 bp, Homo sapiens
gggatcccatcaacatctgacctgttcgctgccttgttaagatgcgtactgcctgtctcctgcattagaatgtaaactccactattttgttcactacttatctctagggcctagaatgttattcagcacatagcaggtactcaacaaataattgttagggaagtgaatgaatggatgaatgaatgagtaaaggggaggatggaatgaatgacccatgctgggatttgaatgctggtcttgctgagggaagcagggaggtcaagtccaaggattcttcccagccccacagctgctgtccctggcaaatcagtggccactccgtattcagtgtatactactgggtgtagggaaggagctccaggcttaacctctcttggccatcttctctcttgtccctctacccttccaagacacagagccttgtcctatagctcaaacttatcccaccctggcctctcctcatagatggaatttgaaacttcaggagcacttggtctggagtcagacagatctagattcaaatcccaatgctgtggcctccttgctgtgcgactttggggaaagtgacttgattgtctaagcctttggctcctcttttgcaatatgggtccaatcacaagcctgacttgctagcrttgtgggaactaagcttgatgacagacgcagaacccttattgtggcttgtgagaaggacttaataaaagaaatcgaaaccaaccagacagacaattattgagtgcttaccctcaggcggacatggtgctaagtgcgttatgtgcacttagttctcccacccaccccatggggtagatactagc

SEQ ID NO: 81158 - DNA, 1265 bp, Homo sapiens
cctaagccagaaggcctggcccctgtcccctcccaccccctcctccatatggtcaagcttgctggaggagtgckgtctttgtctatggctacgcctgatgccacttcgtgctggtgatcttgaaggatacatgagagaacaatgcctgggcctttgcctctactttcttctccagccaggcctgctggctcttaggcggcccccagcctggtttaaaagtcctccatgccccttggcatggaggagtcactttggctgactccttgtcacagctggggcaaggtccaggctggggtgggggatccccggcacctagtgtcccctcccccagaggtgagctgttccagccacggagggggaagacagagtgctctttcttactaactggatcaggaaggggtgccagctccactccgcatggtgcatatacacatgctgccacgtgcacatatgttagcacctaggccacacgtgtgctcacccaccatgtgtacaagcatccaccaggatgtacgctgtgtggaggcagggacttcgtttcattcaccgaatgctagcacagtggtgggtgcatagaaggtgttaattaaacatttgtcaagtgataactaaatgaatgatgaaatgagtggtaatacttgtgcatgtcagtggctatgcagagggacactccagtgtccattgacaggcatatgtcaggctcatacacatacaggggtatgccagcacacaaacatatgctcaaagacacgtgcacacaggtgtgtgctagtcacactagttgatgtgcacatctgtgcatgcttgcttatttgaacacatgagtatgtgggcacacaccagtgcaggcaaggagactcacatgtgtgtagccatacccctagtgcaaatatgcacacataaacctgcatttaaaactgaagacattttaacaaaattgagcaagtcacttgttccgaatcctgtgctaagtgctgggtagggctcaggggtggagaattgaaggtggactgaattgggctccatccccaagatgcttataatctatggaggatgacagatattaatttaaacagtacaaaggggtgaaggaaaccatgtgtacgggtgtatttgtgtgtgcacatgagtgcaagaaatcctagaaccttcagaatggagtgttgggttcccaggtgtgtctccaggtggctcgtctaaatcttgtttccaggttgatctagggacactgagtgacttgagtggggactcacgagcaaagacgg

SEQ ID NO: 81159 - DNA, 603 bp, Homo sapiens
aggaccagcaagaccccaggaagccagagccccagtaacttccagtggcctagccgaagcctttcaccagatgtatgaagttaggcaacccttccagccacagggcaaatggagcaggtcaaccctgcatgcaggatacttctctgggtgaccttggaccgacccagtccgccctgctctctcacttgtagttctcaagaataactgcaggatgttctgggaatgcagcatgctgagataaaggggtcagagcagctggggtgctgttctggtttcccctagaaacacagtgtccttcaatgctttagcccagcacatcacattcccttggggtataagactctgggcaggctgcttttcagggttccttagctgtagtgtaagtgggatacatgactccatccactctgggcagcttttctargccttggggacccactcaacatgaatcctgggcttctgttgttctttgctgtctggaagcaataaatatttttcctgtaacttgttgcgtgtgagtgtggtctgcctcgctggactcagacaagttagtaacctctggacagtgagcctgcttcacaaacccctgttggtggagggagg

SEQ ID NO: 81160 - DNA, 603 bp, Homo sapiens
aggaccagcaagaccccaggaagccagagccccagtaacttccagtggcctagccgaagcctttcaccagatgtatgaagttaggcaacccttccagccacagggcaaatggagcaggtcaaccctgcatgcaggatacttctctgggtgaccttggaccgacccagtccgccctgctctctcacttgtagttctcaagaataactgcaggatgttctgggaatgcagcatgctgagataaaggggtcagagcagctggggtgctgttctggtttcccctagaaacacagtgtccttcaatgctttagcccagcacatcacattcccttggggtataagactctgggcaggctgcttttcagggttccttagctgtagtgtaagtgggatacatgactccatccactctgggcagcttttctaagcyttggggacccactcaacatgaatcctgggcttctgttgttctttgctgtctggaagcaataaatatttttcctgtaacttgttgcgtgtgagtgtggtctgcctcgctggactcagacaagttagtaacctctggacagtgagcctgcttcacaaacccctgttggtggagggagg

SEQ ID NO: 81161 - DNA, 603 bp, Homo sapiens
aggaccagcaagaccccaggaagccagagccccagtaacttccagtggcctagccgaagcctttcaccagatgtatgaagttaggcaacccttccagccacagggcaaatggagcaggtcaaccctgcatgcaggatacttctctgggtgaccttggaccgacccagtccgccctgctctctcacttgtagttctcaagaataactgcaggatgttctgggaatgcagcatgctgagataaaggggtcagagcagctggggtgctgttctggtttcccctagaaacacagtgtccttcaatgctttagcccagcacatcacattcccttggggtataagactctgggcaggctgcttttcagggttccttagctgtagtgtaagtgggatacatgactccatccactctgggcagcttttctaagccttggggacccactcaacatgaatcctgggcttctgttgttctttgctgtctggaagcaataaatatttttcctgtaacttgttgcrtgtgagtgtggtctgcctcgctggactcagacaagttagtaacctctggacagtgagcctgcttcacaaacccctgttggtggagggagg

SEQ ID NO: 81162 - DNA, 572 bp, Homo sapiens
ggcaatataacttgtaaggcatccactatttaaaataataatccttattggaataaagtacaacaaatgttgttggtcaacatataaatatatcttgctgcattggcaaggatctcaatgcctaaccttctcatatctgcttatacaacccttctacragatacttatctaataaaaatcactaatgactctacctgacaagtaggtggaaaggccaatgttggttaactttttttattttattttattttttgagatggagtctctctctgttgcccaggctggagtgcagtggcacaatctcagctcattgcaacttctgcctcccaggttcaagcgattctcctgcctcagcctcccgagaagctgggattgcaggtgcccaccaccacacccagctatcattattattattatttttagtagagacacggtttcaccatgttggccaggttgatctcgaacttctgacctcaggtgatctgcctgtctcagcctcccaaagtgctgggattacaggcatgagccaccacgcccagcccttggttgactattaactgcatgccatgttc

SEQ ID NO: 81163 - DNA, 1325 bp, Homo sapiens
taccttacatacatgtcagggtacagtttgtatttatgaagatgtattagttcaggctgccctgtcaaattgtcatagatagggaagtttaagcaacagcaatttattttttgcacagtttaggaggtagagaaatcaatcatccaggggctggcaaagcaagttttacctgaggcctcctctcagctggtaggcagtcgccattttgctgtgtgctcacgtgacttctttgtgggagcaaagagagagcaagctctctggtgtctttccttatgaaggcactaatcctattatgaggattctaccctcatgacctcgtctaactcattacctcccaaaggccccatttccaaatacaatcacattggaggctggggttttgacatgggaatgtattgagacacaaacattgagtccataacaggggagaaggaaagaaacagaagagcagccgtgaggtgaaatcagtgggtttgaatggtcatttgattgattgattgattgattgtagctcagagagaagatacagtctacttttttctctacccattgtaacccatcaactctatgccaccaggtgaggctactgcactagtcttcatcctagttcccttcctgctctttacccaacccccaccatcgtctccactaccagccctcattccaccaccctcctcagcactrttcagctcctttctagtacctgattctctcccaatttaggacatttgcacattctagtggagaaaataggtaagtatacaaataaatgcaactcagtatgctaagtactactgaatcacagaagttactaatggtagtatagtcagttctgttataaatatgacatacatgttcctgaaaaattatcacaccatgtagaattacacaatttaaaaaacacagggctaatgatcaaatgggcttggagttcagcattcaaaaattttgtcactgccatatttttaaaaataagaatctaatgaaaatgacaatgtttgtgtgtgtgtgaatagttaagaaacacatacatgatacaataatgtgggtatttttaccataaaatctggtttgcttttggaagtgagtattaaaagggttgcagcttgtgaattattaggaagtaggaggacagtgagctgaaatcagaggaaaggttgtattaggtgcagataggtgtggcttataaaacacccagtgaatggagagagctggtgcatgtttgtggtatgtgtggattagggtacattttgtgtatctccacttagcttggacacagctggtgcagtttttttgcattccccacatgtttctcatggaggaaa

SEQ ID NO: 81164 - DNA, 680 bp, Homo sapiens
ttttcaccctaaaaaacatccagcttatgctctctaattcattctccttactctgtaaataacctaaacacactgaaacagaataatcttctgcttgatcagatggtgcatcttcccactgaggctcttgagagcattgatgctgatcccagacgagatcagcaatcttggttgtcacaatcttggttgtcataaattagaggacacagatagagtatgattaaattgattatatcttcaaaaatttttctcacctgccagagctaaacaattgttaattgcctttaacatattgcagaagtcatttttaattcaaatattaaattcagctgtactctatattgttatttcataagtctggcaactataccatagaagaattatggaatttgcattaatatgatgccaaagtagatgaaacaaaatagggtaaaaattcatagatgctacttttaggttgttcagagtgcaaagaaaaattttgttccatgtgacccattaaaaatttcaaaatctaaatgtacagcttagctcttggcattagaagtgacaacctaaggcygctggggctgagggtgaagctcctgagcactctccataaacacataatgcagctcaagtttattctcattatactgcctttcactttagtgtatttcaattcttaagtcccaaagtgt

SEQ ID NO: 81165 - DNA, 680 bp, Homo sapiens
ttttcaccctaaaaaacatccagcttatgctctctaattcattctccttactctgtaaataacctaaacacactgaaacagaataatcttctgcttgatcagatggtgcatcttcccactgaggctcttgagagcattgatgctgatcccagacgagatcagcaatcttggttgtcacaatcttggttgtcataaattagaggacacagatagagtatgattaaattgattatatcttcaaaaatttttctcacctgccagagctaaacaattgttaattgcctttaacatattgcagaagtcatttttaattcaaatattaaattcagctgtactctatattgttatttcataagtctggcaactataccatagaagaattatggaatttgcattaatatgatgccaaagtagatgaaacaaaatagggtaaaaattcatagatgctacttttaggttgttcagagtgcaaagaaaaattttgttccatgtgacccattaaaaatttcaaaatctaaatgtacagcttagctcttggcattagaagtgacaacctaaggccgctggggctgagggtgaagctcctgagcactctccrtaaacacataatgcagctcaagtttattctcattatactgcctttcactttagtgtatttcaattcttaagtcccaaagtgt

SEQ ID NO: 81166 - DNA, 680 bp, Homo sapiens
ttttcaccctaaaaaacatccagcttatgctctctaattcattctccttactctgtaaataacctaaacacactgaaacagaataatcttctgcttgatcagatggtgcatcttcccactgaggctcttgagagcattgatgctgatcccagacgagatcagcaatcttggttgtcacaatcttggttgtcataaattagaggacacagatagagtatgattaaattgattatatcttcaaaaatttttctcacctgccagagctaaacaattgttaattgcctttaacatattgcagaagtcatttttaattcaaatattaaattcagctgtactctatattgttatttcataagtctggcaactataccatagaagaattatggaatttgcattaatatgatgccaaagtagatgaaacaaaatagggtaaaaattcatagatgctacttttaggttgttcagagtgcaaagaaaaattttgttccatgtgacccattaaaaatttcaaaatctaaatgtacagcttagctcttggcattagaagtgacaacctaaggccgctggggctgagggtgaagctcctgagcactctccataaacacataatgcagctcaagtttattctcattatactgcctttmactttagtgtatttcaattcttaagtcccaaagtgt

SEQ ID NO: 81167 - DNA, 491 bp, Homo sapiens
atttttaatacacataaaattagtagaaatatgaactctttttagatgatacattttaatgttatgtagtagaaactctaagctgatttttaaaaacctttttattgatacataataattatacatttaatggggggtatatgtgatattttgataaatgcatacaaggtgtaaygattaaatcagggttactaggatatccagtacctcaaacatttatcttttctttgtattagaaatactttaaatctcttctttagctattatgacttattattaaatatcattattaactatagtaacccaactgtgctattgaacactagaacttatttcttctatctgattctgtttgtattcattaaccaactcttcttcatccccaactgctgagaccagctcagtcggggagaccctaacccagcggtgctagaggaattaaagacacacacacagaaatacagaggtgtgaagtgggaaatcaggggtct

SEQ ID NO: 81168 - DNA, 770 bp, Homo sapiens
tcccaaattagaaatacatcttatattgttatatcagtgttcctgcctcattgggataattgtgacattatcactcgtcactgagccagaaggcagcttcacagaagctctggcttcaaaactgtagcttcatctttacttcctttcttgatattctggtagtattagacagcagttttttgtttttgttttttttaagcttccttttatgsagtggtactccacctcagaccctgatttcaaacaatgatccaatgtctggttgccacctgcttggcacttttagatcctgtcaccttgtgagtgctgaactcctaatcatctctgcctgcctacagtgctacagcccagcagacactcatctccagccctactgctttgcatttctgttcttttctagtcaaagacatatttagtttgttccttaaagtgttattgtattttaaattttctcttttgttattttatctatagttactattatccaaagaagagggatagctcagatgttgaaactttgtcttgaacagaactatagtagttctcattacccaatataagaagcatgctacttctttagaagttttttttttctcaaagacacattaagataatggaaaaatactttgggggtgattcttcagtagtaggcatctttttatcaatcctgcacaaaatcagaaagcacaggccgggcaccagtggctcacgcctgtaatcccagcactttgggaagcccaggcaggcggatcacgaggtcaagagattga

SEQ ID NO: 81169 - DNA, 641 bp, Homo sapiens
tccttaaaacccttctcaaccaggaatccttaaaatgccctagaaaacccatgggccacccctttcccgtggcccagtctctcagttctgtccctgggcttgaatctgcctccatggcacacactcctattcgaggacctgtggaacttgctattctctgtccaaaaagctcttcttccaaaagcccacaggacttcctccctcccctccctcacctctttcaggtgtgcactttaacatcactttgacactgaggccttccctggccatcaaaatctaaaactggaacacctactcttactgctttatgttttccttagcacttctccccatctgtcagccttatattttacttgaaaaaaaaaaaaaaaccttttgatttcctcctttgccccccaatactagataccatcacatgagggtaaggactttgcgtttgtttactaatatatccccagggccaagaacacacagtggacaaggaataagcgccactgagtgcatgaacagaaagaggaggaacacatttttccatacacggtagaaaatatattttgaactcgtaatatggcraatccagaaaaagaaaaataacacggatacccacgttgatggcagatgcctgatgtgttcctaattca

SEQ ID NO: 81170 - DNA, 696 bp, Homo sapiens
actttagaattgccttggctcattccggatatttctcttcctggttacatctgaatacaattttaagactttttttctcttgtagagaaaagcacactgtaaacatatttggggtagtttaacttgtgcttttttgctgatttgtatagtttttgtaggatgtaggaatgtaggaaagatttcagtctagactgctgctattattccatgagaatcaggaagtttctgtacctcagagcttttatttatttatgtatttatttatttttgagatggagtttcactcttgttgcccaggctggagtgcaatggcgcgatctcagctcactgcaacctccgcctcccgsgttcaagcaattctcctgcctcagcctcccaagtagctgggattacaggcatgtaccaccacgcccggctaattttttatcgagatccggctggtctcgaactcctggtctcaggtgatccacccacctcggcctcccaaagtactgagattacaggcgtgaaccacctcccctggccacttttatcttaagacaagggtgtgtagaacttacctcccagtgtcatttttggtaccaagtgtcttaatgcatatggaactcctagcacatagtaagtgctcagcaaattttgttgttattgttatcctgattcatgttgtgagtcttccctactttgcttgctgtccca

SEQ ID NO: 81171 - DNA, 696 bp, Homo sapiens
actttagaattgccttggctcattccggatatttctcttcctggttacatctgaatacaattttaagactttttttctcttgtagagaaaagcacactgtaaacatatttggggtagtttaacttgtgcttttttgctgatttgtatagtttttgtaggatgtaggaatgtaggaaagatttcagtctagactgctgctattattccatgagaatcaggaagtttctgtacctcagagcttttatttatttatgtatttatttatttttgagatggagtttcactcttgttgcccaggctggagtgcaatggcgcgatctcagctcactgcaacctccgcctcccggsttcaagcaattctcctgcctcagcctcccaagtagctgggattacaggcatgtaccaccacgcccggctaattttttatcgagatccggctggtctcgaactcctggtctcaggtgatccacccacctcggcctcccaaagtactgagattacaggcgtgaaccacctcccctggccacttttatcttaagacaagggtgtgtagaacttacctcccagtgtcatttttggtaccaagtgtcttaatgcatatggaactcctagcacatagtaagtgctcagcaaattttgttgttattgttatcctgattcatgttgtgagtcttccctactttgcttgctgtccca

SEQ ID NO: 81172 - DNA, 696 bp, Homo sapiens
actttagaattgccttggctcattccggatatttctcttcctggttacatctgaatacaattttaagactttttttctcttgtagagaaaagcacactgtaaacatatttggggtagtttaacttgtgcttttttgctgatttgtatagtttttgtaggatgtaggaatgtaggaaagatttcagtctagactgctgctattattccatgagaatcaggaagtttctgtacctcagagcttttatttatttatgtatttatttatttttgagatggagtttcactcttgttgcccaggctggagtgcaatggcgcgatctcagctcactgcaacctccgcctcccgggttcaagcaattctcctgcctcagcctcccaagtagctgggattacaggcatgtaccaccacgcccggctaattttttatcgagatccggctrgtctcgaactcctggtctcaggtgatccacccacctcggcctcccaaagtactgagattacaggcgtgaaccacctcccctggccacttttatcttaagacaagggtgtgtagaacttacctcccagtgtcatttttggtaccaagtgtcttaatgcatatggaactcctagcacatagtaagtgctcagcaaattttgttgttattgttatcctgattcatgttgtgagtcttccctactttgcttgctgtccca

SEQ ID NO: 81173 - DNA, 1082 bp, Homo sapiens
tttctggaaaacttgatctttcaggaattgttttacagattctcaacgatttttttctttaaagtaaaaaaaaaaaaaggctccctaatgatccttcctcttggtattcattgcctttgtataatcccctctccgtgagtgtggatgtgacttctgactcacctcaaatcaacagaatatagtaaaactgataaggtacatgggattctgtaattatattacatcagcttaaagcacctatcttgctggagtctctctccccactcccagtggctttgaggaagaaagtggccatgttagggaacccccaagtgacaaagaactacaggtggcctctaggagctgagggcagcctcaagcctgcagtggtctccagctgactgccagcaagaaaatgaggtctccagttcttcagctgtaaggagctgatttctacccacaagcacctgagtttggaagcagaggcttccctctttgagcctcagatgatgcttcagcccaaaggaacacctttatttcagccttggagaagacccagattcctgacccacggaaactgtgaggtaataaatgttttaagctactacgtttgtcttgttatgcaataacggataacggataactaatattccatctgttgctccttacctttcctctgtatctttgccctttgacccatccccatccccagggctatatgaggcttataggctctaatagaaaataacaaccgaccccagattagtctttactgagatgtcatgttttgagggtagatttaatgccttcctactacatctctcagagccctctaaaaagttctgagtgtgcttttgtatcccctcatacacttacagggactagttygagtgatgatagtggtcatatgtttcttggcttataattgtaggtaatgttttaaaattaatatttagttacatatgtaataaatcatttttgtttgtagactattaagacatttagatcaagctaaattgacctttaactatcttccttagttgttaatccttccttctcagataaaaccgtcatgataaatttggcatagtgtcttccacagt

SEQ ID NO: 81174 - DNA, 1082 bp, Homo sapiens
tttctggaaaacttgatctttcaggaattgttttacagattctcaacgatttttttctttaaagtaaaaaaaaaaaaaggctccctaatgatccttcctcttggtattcattgcctttgtataatcccctctccgtgagtgtggatgtgacttctgactcacctcaaatcaacagaatatagtaaaactgataaggtacatgggattctgtaattatattacatcagcttaaagcacctatcttgctggagtctctctccccactcccagtggctttgaggaagaaagtggccatgttagggaacccccaagtgacaaagaactacaggtggcctctaggagctgagggcagcctcaagcctgcagtggtctccagctgactgccagcaagaaaatgaggtctccagttcttcagctgtaaggagctgatttctacccacaagcacctgagtttggaagcagaggcttccctctttgagcctcagatgatgcttcagcccaaaggaacacctttatttcagccttggagaagacccagattcctgacccacggaaactgtgaggtaataaatgttttaagctactacgtttgtcttgttatgcaataacggataacggataactaatattccatctgttgctccttacctttcctctgtatctttgccctttgacccatccccatccccagggctatatgaggcttataggctctaatagaaaataacaaccgaccccagattagtctttactgagatgtcatgttttgagggtagatttaatgccttcctactacatctctcagagccctctaaaaagttctgagtgtgcttttgtatcccctcatacacttacagggactagtttgagtgatgatagtggtcatatgtttmttggcttataattgtaggtaatgttttaaaattaatatttagttacatatgtaataaatcatttttgtttgtagactattaagacatttagatcaagctaaattgacctttaactatcttccttagttgttaatccttccttctcagataaaaccgtcatgataaatttggcatagtgtcttccacagt

SEQ ID NO: 81175 - DNA, 1133 bp, Homo sapiens
cacatagacaattacaattcattcattgtgatggatggaaaagctggcagcattgctgagtgggcatgaaatgggaaagccaaggtgtgcagcttccatgctagctgcttaactgttcagctggtgacatgcctgtcagggcatctcttaaggcctggtcccaactcaggggcatttacacctgataaagagctcggaagccatttggttttatgacaagggacctagttaaagaggttggccttgattgccatcccgggaaggaatatatgaaatatgtggacaggggcgtgagaaagctggaaggatgtggcagcagaggcacattgggctgttttagtgaattaaagtcattcagcacaggggattttttaaagtatgctgtgctttgttattgacttgttttttttttgaacgctaaatggcatcacgatttcctgcaggaggagcaactgaagtcacatgaaagtaagctgaagcagatcaccaccgagctggccgagcaccgctcatatccccccgacaagaaggtcaaagccaaggacgtcgatgagtacaaactgaaagaccactatctggagtttgaggtgtgttgcacccaaatgttagtaaatgctgatttctgagttttcttatgatctgtccatgaggcggtatctttctttgcagtgtcactgagagaggcgtgtcttgcccytggctctaatttgggagctcctggcaaggtcatggtggcccctcttgtttgtgattctgtttaagtgccaagcaaacatcaaagagtaacctgccagtttatacacttaaaagtaaatagcctgcctggttggaatagtgtgcgcccgctgtgaggggaagaaaaagaacagtagagggacacaccagggtggacagctgctttctgtatccctgtgtctcttccggcagaattggagtcaaaaaaagcacaagggaggaaatgagccacatagttgatgtgaggcatcagcttttccctgcacattcttgctgttcggcaacactatgcgtttttcttcttgtcacccactgcccttcagaagggggttgataaattaagttgtggcacatccatctatacagtgagtgtgcttattaaaaagaatggtgaggat

SEQ ID NO: 81176 - DNA, 1133 bp, Homo sapiens
cacatagacaattacaattcattcattgtgatggatggaaaagctggcagcattgctgagtgggcatgaaatgggaaagccaaggtgtgcagcttccatgctagctgcttaactgttcagctggtgacatgcctgtcagggcatctcttaaggcctggtcccaactcaggggcatttacacctgataaagagctcggaagccatttggttttatgacaagggacctagttaaagaggttggccttgattgccatcccgggaaggaatatatgaaatatgtggacaggggcgtgagaaagctggaaggatgtggcagcagaggcacattgggctgttttagtgaattaaagtcattcagcacaggggattttttaaagtatgctgtgctttgttattgacttgttttttttttgaacgctaaatggcatcacgatttcctgcaggaggagcaactgaagtcacatgaaagtaagctgaagcagatcaccaccgagctggccgagcaccgctcatatccccccgacaagaaggtcaaagccaaggacgtcgatgagtacaaactgaaagaccactatctggagtttgaggtgtgttgcacccaaatgttagtaaatgctgatttctgagttttcttatgatctgtccatgaggcggtatctttctttgcagtgtcactgagagaggcgtgtcttgcccttggctctaatttgggagctcctggcaaggtcatggtggcccctcttgtttgtgattctgtttaagtgccaagcaaacatcaaagagtaacctgccagtttatacacttaaaagtaaatagcctgcctggttggaatagtgtgcgcccgctgygaggggaagaaaaagaacagtagagggacacaccagggtggacagctgctttctgtatccctgtgtctcttccggcagaattggagtcaaaaaaagcacaagggaggaaatgagccacatagttgatgtgaggcatcagcttttccctgcacattcttgctgttcggcaacactatgcgtttttcttcttgtcacccactgcccttcagaagggggttgataaattaagttgtggcacatccatctatacagtgagtgtgcttattaaaaagaatggtgaggat

SEQ ID NO: 81177 - DNA, 783 bp, Homo sapiens
acctttatagtcacctgattttctttcttccctaaaccaatggttgtttttactataagtaaaaacagtaaattacattctgtgctgttaaggtacattttttttttttgagatggggggggtctcgcttcagtttaagatacattctttttttttttttttttttttttttttgagagaggggtcttgctctgtttcccaagctggagtgcagtggcgtgacctcggctcactacagcctccacctcccaggttcaagcaattctcccacctcagcctcccaagtagctaggattacaggggtgcaccaccactcctggctaattttgcattttttaagtagagacagggtttcaccatgtcgaccaggctggtctcgaactctcracctcaggtgatccacccgcctcagcctcccaaagtgctggggattacaggcgtgagccaccgcacctggcccaagacatattcttgacacagacagtatggcaataaaaggaagacataaatttcttttaccataattaagattttgaatagtacacttgggacaagtaaccagcacatgaaaagttttggtttgagatttttaattactttgataaatcagaattgtttaaaaaaaattaaaagaatgtaaggttaagctaatcatagtattatattcaaaagaccctcagaacatagtttaggatgataagtttcatacctgacaccaactgccttaaagtgatagtgacttctttaagtactatgttaaggaggattctgaggcagtatctg

SEQ ID NO: 81178 - DNA, 718 bp, Homo sapiens
gtccaacagttccctaggactaaagtcttttctgggagcaagttgagcctaggggatggacatccctggctatgcttcactacagacactcctgtaccaaaccttctgggttgtgcccaggctggaattctgcctctacctcttctctaagcagctttccttaccaactcaagtatctgtggtagtcgaggggtctcttcctgctaggaatccaaaggcctatgatgacaacaggttgctccttgcctgttcgattcaccacctccgcagcagtaattgggtgctaggaacaaattccagtgtatggtagccccatgtcaggttcccaactttctccctcttcagccaagcctctgtgtctttcctctgtgtgctctcagtgccttgcctctgaagatctgctagaattgcaccagtctgcacaatgtctctgtccctcagtgtgagatgtgccacttggctgtggctagtcagcaatcttggagaagaaggagttttgttttttaaatttagttttgccattagaaagatgtatagaaaataaaatatttagtcataaaagttggcatttatttatattttcaagactgtcatttcaaatgtaaaatttaagactaatacaaagtayttttacgtcagttacttaagaatgaataacttcagaaaactgaaaaagtttaaagtaacaaataataaattttttgttatgtttgtctct

SEQ ID NO: 81179 - DNA, 718 bp, Homo sapiens
gtccaacagttccctaggactaaagtcttttctgggagcaagttgagcctaggggatggacatccctggctatgcttcactacagacactcctgtaccaaaccttctgggttgtgcccaggctggaattctgcctctacctcttctctaagcagctttccttaccaactcaagtatctgtggtagtcgaggggtctcttcctgctaggaatccaaaggcctatgatgacaacaggttgctccttgcctgttcgattcaccacctccgcagcagtaattgggtgctaggaacaaattccagtgtatggtagccccatgtcaggttcccaactttctccctcttcagccaagcctctgtgtctttcctctgtgtgctctcagtgccttgcctctgaagatctgctagaattgcaccagtctgcacaatgtctctgtccctcagtgtgagatgtgccacttggctgtggctagtcagcaatcttggagaagaaggagttttgttttttaaatttagttttgccattagaaagatgtatagaaaataaaatatttagtcataaaagttggcatttatttatattttcaagactgtcatttcaaatgtaaaatttaagactaatacaaagtatttttamgtcagttacttaagaatgaataacttcagaaaactgaaaaagtttaaagtaacaaataataaattttttgttatgtttgtctct

SEQ ID NO: 81180 - DNA, 1142 bp, Homo sapiens
tttactgattttggagttccattcataggttgttataaaacatattatgtgtaattctgcataaagtttttaaaatttatgatcctttttccttattttatacaaataccttatattacccctgaataacattagatctacttagcagaattatcttatcccacatagtttaaggatgattaccccaagaatcaatagtaccttattgacatagtaatttattatgtggacccatcttattctttccagttgaaaagactttatttatcatgggaagaaagaaagcagctgtttatttttcttgacaaaataaatgaaggttcagcatgtctggagaaagctgcttcctgagatgaaagctggctgtgaagagacactggccctctacagctagatgacagctttcagtgacatcaatttcatttaaatacactgtaacaattctgtgatattatatttaaagtacttttagacctctctgtaattcaaaaaatgcaggcgtcttgtgactttatcttttccaactagaggagactatggcaatgaagttcatacttttaggtgtactgtgagttactgttacagaatccaaaaccagagaaacaagaattggggtgtaacctactattttcagttgcaatgaagaaacatgctgaagctcatttttaaccaaaaatcatcaacgacatagatttttttcccactcactcacaatttgactctggcaagccatttttatttacaattcttactgaaacacttcctaataaatctaggtttgacatacaagtgagttttacttaagagatggtttaataaaaggtctgttttgtactgataaaaatggaactgtcactamattttagtcatggctgtagacattctccaggaaaatcatttaaaggcatgtgggagtctctctctctgatctctctgcctgtctgtctctctctcttcctctttccatgagtacagctattagcagggagagcttggcacctgtgattgaaatttttgcctgacttcttgtgtccaaacaaggctgtttacaaaagtgagtaaatgttctctttatttctgctgctatcaggttgaaagctcatgtggtcagtttccctattttgcaggtaaattatgccaat

SEQ ID NO: 81181 - DNA, 1142 bp, Homo sapiens
tttactgattttggagttccattcataggttgttataaaacatattatgtgtaattctgcataaagtttttaaaatttatgatcctttttccttattttatacaaataccttatattacccctgaataacattagatctacttagcagaattatcttatcccacatagtttaaggatgattaccccaagaatcaatagtaccttattgacatagtaatttattatgtggacccatcttattctttccagttgaaaagactttatttatcatgggaagaaagaaagcagctgtttatttttcttgacaaaataaatgaaggttcagcatgtctggagaaagctgcttcctgagatgaaagctggctgtgaagagacactggccctctacagctagatgacagctttcagtgacatcaatttcatttaaatacactgtaacaattctgtgatattatatttaaagtacttttagacctctctgtaattcaaaaaatgcaggcgtcttgtgactttatcttttccaactagaggagactatggcaatgaagttcatacttttaggtgtactgtgagttactgttacagaatccaaaaccagagaaacaagaattggggtgtaacctactattttcagttgcaatgaagaaacatgctgaagctcatttttaaccaaaaatcatcaacgacatagatttttttcccactcactcacaatttgactctggcaagccatttttatttacaattcttactgaaacacttcctaataaatctaggtttgacatacaagtgagttttacttaagagatggtttaataaaaggtctgttttgtactgataaaaatggaactgtcactacattttagtcatggctgtagacattctccaggaaaatcatttaaaggcatgtgggagtctctctctctgatctctctgcctgtctgtctctctctcttcctctttccatgagtacagctattagcagggagagcttggcacctgtgattgaaatttttgcctgacttcttgtgtccaaacaagsctgtttacaaaagtgagtaaatgttctctttatttctgctgctatcaggttgaaagctcatgtggtcagtttccctattttgcaggtaaattatgccaat

SEQ ID NO: 81182 - DNA, 1209 bp, Homo sapiens
ccagaaatatttgttgaataaattaatgagtgaatttttggaaactatcacaattgaacaaaagctcttgtgttaggactcctttaccataatgaattaaagttcctgaataatcagttggtttaatttttttttaattagtaaattcaattgtctattcttgttaggagttccactttaggtaaaataagccagtgctgtcttcaaactggggcataagtatttctggggatagacaaagatttttcaggtgattcacagacaaaaacacttaaaggaaatcaacattcagatcttcagtttccacatayactcttttctaaaatttattcaactgagaacacacaggtaaaccacctccactgtcattatcatgtttcttacactttacaaaagaaaggcacgtctctcacccagcctggttctcactatggtgtgttgcctggagtgtagaaactcaggtgaccataaaacctacaatcgaacaagggcattcttgagagtgaaagtaggctctatgaatcattaacttggggccaggcacagtggctcacacttctaatcccaacactttgggaggccaatgtgaaaggatcccttgagcccaggagttcgagaccagcctgggcaacctagggagaccctatgtttacgaaagaaactagccggatgtggtggcacgttcctgcagtcctagctacttgagaggctgaggcaggagaattacctgaggttgcagtgagccatgattgcactacaactttccagcctgggtgacagaatgagatcctgtctcaataaacaaataaataaaatagttaacttgcgacaatataattcacaaaggtgtattcagataacactatcaccattctcctctccccttctgagtatactgggtttaaaaaggtggttctaagtgaaagagtagcaggtaaattaataatcacttgctaaagtggtaaaatttaaaaagtattcttcccagaaattgattaagtaaataaatccaatgagccagtgatttctaaaactttgtttcaaaaggtcttattgaattgtcagctgatggatcaaaagacataaaaaatgtttatagcagcatcattcataatagtccaagagttgttacccaaaatctctatcaaaagttgcatgctatatccatacaatggaatcttacacagcaatgagaaagaacaaattgtt

SEQ ID NO: 81183 - DNA, 635 bp, Homo sapiens
attcttttcttgtgctaattttagaggtagtgtaagtagagtaactaaatattaagatcctgaaactgtgaccttgaaaaagttttggaccttctttgggcttcagttttcctttctgtgaagtgggctattaatagtacctatcacacagttgccgtcaaatttaaacacattattaaatacaaaacacttagaatagagtttggtaaacagtaagcactaaataagctttagttattwttattattattgttgccactgtcatttttggttgtatattccccccacattagatttatatacttttttgaggctgggtaagatagcttacagttatggtgttttggggttagtgtgaacttttaagtcagatagagctgtttgagtccagctcagcaactcattaactgtgagaccttggccaagttacctttctgtaccttactttttacatatttaaattctgcagagcaatacctaacagagttgtcacagggatttaatgaggtcgtatttgtatatggcctaatttattgtctgatacgtagtatgttcctcccaaacgatgatgaaggtgataatggtgatgatgatgagcagagacagtgataaaattatcattctgacattttcta

SEQ ID NO: 81184 - DNA, 855 bp, Homo sapiens
atccataaaacccacaatacagtattcttatttgtgctttaaaaatcaatagctttttaaagaatttagatacatatatgtgtttgcatagaaattaaaaatactaaaawatatttttaatacttagatatttagatgtttataatttctagtcttgtttcctttctgcaaatctagtatttcatctggtatcatttttccttagtctaaaacactttttgtggcattcattacaagctgatccattagagattaattctctcagctttgtctaagaagaagatatttattttaccttcattttcgaagggtgtttttggatatagaattctaggttgacaggtttcttacccctttaaagattgtcattccattgtttccggtgaagagccccatgatttgaattgctgttccctatatacgatgtggttttcttgtgctcatcctgcttgagggtttcagagtgtatgatggggaaattcctactatgctgtcaacacagaacacctcagtgatcagctgtggggctttttcctataccaaagggttctctgacaccagttgggtattctacaattcgattcattgtctgcctggagttagcacagaccccagaggttaagagctcagtccaacaaggctgcccccctcacctccgatgccaatcacaaatccaagttgtcacctgtgctctgaccaactagctataaatcagagattcccacaacacattccttaggtttgatcactagaatggctcacagaacttggaaatatttacttatgtttaccagtttattatgataataaaggacatgataaagggtacagatgaacagccagatgagaagatgc

SEQ ID NO: 81185 - DNA, 595 bp, Homo sapiens
tgtggaaatatgggcaacaaagatttagaatatgaatagtggcccagcatttctcaatccaggaatataaggaaatgaataatagttttggttcatattaatactttatttttatagtttttctcctccacaaattcctaaataagtctgtcttaaggtcaaaaagttttaagcatgacctcctcatttcatagaatttgatttagaatacacagttaataagaggagatggtaatattgtatatggggaaaattatctaatattcagaaaggaaaagtttttttttggttaaaatattcaactcagtttacttaagcartttggttactagctgtaaaatagtgtacaattaaacttggtaagaaatactagaaaaaattagaaataccaagacatatattttgtatttctttaccaagactggcatagttttgtatttattaaataaagcctctgtggaattaatttttaatatgtgtttttatcaggactctcaaattgcagacatactgtcaacatctgggactgtagttactattacaatcatgcctgcttttatctttgaacatattattaagcggtaagtaaacaatt

SEQ ID NO: 81186 - DNA, 588 bp, Homo sapiens
tgaaaggaattccaaaatcctttgcatcaaagacatataatgcgaatggaaggatgatggccagaagttgtgttgggttgagtaaagcactgtatttattatatcattatgtcatttagtcttcacaccaagcctgtgggacaaacaacactttgtgggacattttcagtgagggaagaattagcagtgacctcccaccctcagaaactctgactagtgccatgggagtgttcttggcttgcttggagaaggtaaagacaaggtaatccaaggctgctcttagcccacaggcattgcagttagcagtaattacctggaaaatcagcagaatgatagagtttaaagaagcctccacaagtgacaaagtttttcctwgagaatttctcaagcactggaaaaaggtagcttattatatgtaaacattgctaagggtgtttttgtgtgagagtgaagagtgacatgttttggtggtaggggcaggaagggaacatttaggggactgcaagacaagacccaacaggaatgaaatgatgaaagaatggcctgtgctgatgggcagacacagttgattgagaggagtctggaaac

SEQ ID NO: 81187 - DNA, 1869 bp, Homo sapiens
tgcctgtgtatggagtggagaggggatggaaactttgaggcgtggacactttgggtagttggagaagctgatggaatttgttccttagagtcagggcagaagacccccattgctgtgaatgcagagggatgcatctcacactcatacctgtggagtacacaacccttgttatcctccttcattctgggttgacctatgagtgccctgcacgatactcattttcacagccttaccttcataaaaaatagcacgtatcatttacttcctagggtacacattttagagcctgccttatatcaacagtgactaagctaaattcagaggcagctaattgcatgaccttgggcaactcacttataccagtgctactctcacataagaatcacttggagatctccttaaactgttaatgccaaccaagagttctggggaaaagcctatccttgcaccatttcttttaggtacccaggcaatgcctttgctgttgctgctgctggtggtggaccacactttgaatagcaaggacctaatctctttgagctcagtttcctcaatggtaaaacaaagataataatgtttaagttattatgagtcaaaattaaattgaataagatgatgcacttatcasagtgcctagcaactgtttggtgttctgtaatagtataaaatatgttaataccatgttagttccgtttcatgggaaaaaccaccaggatataccattatcctttgatgcgtctttatataaatattctggaacaaatattctattgcaaattttctatcttacatttccaaacattgcactatttcctttaagtggttatttttgttgtttatacagcctcttccagtgcaatgaaaaattatgatcagtaatagaataataatgttatttacttttgacataatagggtatattaatgttccttgtattcagacctctggacaagctgcaaaagaagtcaggccattattcttccctggtggccttacccctattctggttttgttagcatgctaaaatgtttattttgacttactttctagagttaccttttaagtgtggaataacttaattatggatccctcaatactagtaacaaactgctatgagatttatgggttgttttagactgaaagcaaaaaccataattgtgcatgttcttccaaataagatgatgaaaaacttttgacttttgtttatcttaaaataggttaaaactttctttagtacccatattaaagttttccaaacttgtttcccttttgaaattttataaagaaataattttttaaaaaatttcagcatatctgtacatttacatttaatagttatttgacttatttcaagggatttttttctttaatttcacatcaaattttatatatgaggataggtggagtatgcctgagtaataactactttaaaatatatgtttcttttaaatcttgctggtattaagacaactggtgtctacttattctccaggatctataaagccatgttcaagggtctttgtaggtatagaggaaacaaggaaaaccccatatgactctttctctagcactgcaaatcatacaggtatgtgaaaataaggtgattatttttgtagcccatagattctcatcttccctgtggtggcttaagaattgtcaccattgtatgtttcctaagaagtttttcatcatcatcttagaatgatgattgctgtcattcactgaattctcatcagatagttttcagtgctggctatacattaggattacctacgacctttaaaaattacaactgtctgggccctatcccagattgatcaagtcagaatcactgaggcttgggcatttgtatttttttgtaagtgtctc

SEQ ID NO: 81188 - DNA, 1869 bp, Homo sapiens
tgcctgtgtatggagtggagaggggatggaaactttgaggcgtggacactttgggtagttggagaagctgatggaatttgttccttagagtcagggcagaagacccccattgctgtgaatgcagagggatgcatctcacactcatacctgtggagtacacaacccttgttatcctccttcattctgggttgacctatgagtgccctgcacgatactcattttcacagccttaccttcataaaaaatagcacgtatcatttacttcctagggtacacattttagagcctgccttatatcaacagtgactaagctaaattcagaggcagctaattgcatgaccttgggcaactcacttataccagtgctactctcacataagaatcacttggagatctccttaaactgttaatgccaaccaagagttctggggaaaagcctatccttgcaccatttcttttaggtacccaggcaatgcctttgctgttgctgctgctggtggtggaccacactttgaatagcaaggacctaatctctttgagctcagtttcctcaatggtaaaacaaagataataatgtttaagttattatgagtcaaaattaaattgaataagatgatgcacttatcacagtgcctagcaactgtttggtgttctgtaatagtataaaatatgttaataccatgttagttccgtttcatgggaaaaaccaccaggatataccattatcctttgatgcgtctttatataaatattctggaacaaatattctattgcaaattttctatcttacatttccaaacattgcastatttcctttaagtggttatttttgttgtttatacagcctcttccagtgcaatgaaaaattatgatcagtaatagaataataatgttatttacttttgacataatagggtatattaatgttccttgtattcagacctctggacaagctgcaaaagaagtcaggccattattcttccctggtggccttacccctattctggttttgttagcatgctaaaatgtttattttgacttactttctagagttaccttttaagtgtggaataacttaattatggatccctcaatactagtaacaaactgctatgagatttatgggttgttttagactgaaagcaaaaaccataattgtgcatgttcttccaaataagatgatgaaaaacttttgacttttgtttatcttaaaataggttaaaactttctttagtacccatattaaagttttccaaacttgtttcccttttgaaattttataaagaaataattttttaaaaaatttcagcatatctgtacatttacatttaatagttatttgacttatttcaagggatttttttctttaatttcacatcaaattttatatatgaggataggtggagtatgcctgagtaataactactttaaaatatatgtttcttttaaatcttgctggtattaagacaactggtgtctacttattctccaggatctataaagccatgttcaagggtctttgtaggtatagaggaaacaaggaaaaccccatatgactctttctctagcactgcaaatcatacaggtatgtgaaaataaggtgattatttttgtagcccatagattctcatcttccctgtggtggcttaagaattgtcaccattgtatgtttcctaagaagtttttcatcatcatcttagaatgatgattgctgtcattcactgaattctcatcagatagttttcagtgctggctatacattaggattacctacgacctttaaaaattacaactgtctgggccctatcccagattgatcaagtcagaatcactgaggcttgggcatttgtatttttttgtaagtgtctc

SEQ ID NO: 81189 - DNA, 1959 bp, Homo sapiens
tattttaagttaatataggcccatggacatatatctggaagtaagattttttttacaattcaccttgttttgtgcctttatcccatagggcttaattccaaaatcaggctacaaaaacacaggattgaagtatcattttttaatggaggttctaacaaaaaagtaggacttttaaagtctgtatcctcaaacacaacattttaccttctaaaagagccctagactttaatgtcttaagtctcattttgaaataattactgtcctgtgcttttattcacagatcagaatgctcatattgataagtggtaattcaagaggacatttggcttctggatgtcaaaagctgcaaaaggaacatattttgaagtgctttcaaaatgttagtaatgaaactctctgcctttcaccttcagcttgccacgaagccaactgtattattccaactaaccaacttcctacaagtcttcacagctcacccacaccctcaacaatcataagaacacaacaggtattggaaataattagaggtgaagaaaatgagaaatctttttaaatgtacttgtagcaacactacaacctgagtggtgactagacctttcccaacaggcaaactttattattctagttacttctttcagaaattatgttcacattctgttttgtctttattgttcccagggaaaggaaaaaatactatatatggatactttttcacatatcctccttttcccctaaaagacagttgattttaaagttgtattattatttcttatattgttgctgttactattgttattggtaatgaaacacaccgttaatctgacaccctttaaagtcacgcctggtaaggatttgcagacacacatggaaagacacagtggctccaaagttctatgactacacagtaagcactagtaatctctagtcaggggactggtgggtgaaaggaagaacttagaatgaaatctgtgttatcagtcacttttttccttaagagaaagaaacaaatgaaaccatgaaaagaatgacagcaatgtgttattattttgtgccagtttaatagtattttggccgtataaagaaaactgtggccacttatgtttcatttccacaaagagaaagacagcatttcctgggacacgaatcctggagaaatagytccttgggataataataggtattataatgaaaaaacatatgagaagttattgtaaaggtttcaacaaaattaaatggatctcattgggacagaacttctcggagtttttaatatactaatatgcattatgacactacaagaaaagggtttagtatatagcatttccaaaattcatcttttttatggagcatgcttcaagaccagtgttcttcaaaatatgttagtgctcataacagaagatatttcattttggtataagaaatgactttacactatctcttgaatcaaagatgttacaccattgatataattgagatttactttggctgttagcatatcaaattttttcatgttcttttcataatctctatagactaatgtctcattcaaatgcagagggtagaagacatagcagctggttgtgtctttatttagctggctgcaccataagttttattatatctacaaacagagtttataaatatctaaaaggttgctatggtctttcgctagcaatggcccctgagggaaggacaagaaataattaaagcaggaggtttaggaaaaatcattttaaaaggcagatcagtttactgaaggaccatgtgcactctgccagtaagggagggttgtagttccatgtaacttgctttgacatcttaagagtgactttacactatatttttagatgaaagttctgtgttgggtgatgtgttcaaacaaaaaatatggaacacatggcaattggtaaaaatttgtgaacaggaaggttgacatttttaaagaggtcctaccaacag

SEQ ID NO: 81190 - DNA, 871 bp, Homo sapiens
gggagagacctggtcagaagtaattgaatcatgggggcgggtctttctcatgctattctcatgatagtgaataagtctcacaagatctgattgtttcaaaaagggtagtttccctgcacaagctctcttctcttgtctgctgccacgtgagatgtgcctttcacctcctaccatgattgtgagacttccccagccatgtggaacagtgagtctgttaaaccaccttcttttgtatattgcccagtctcaggtatgtgtttattggcagcatgaaaacacactaatacatctgtactgaacattatgtgtagaggaaggatttaaagacattaccctaggtcacctaaaaaatagtctgtttatcataatctagaaataacaagaaacatcaaatttgcacaactggatatactgatcttttactatacctatatgcataaatgtttatatgcatacatatatttacattgtctgtagataaacatatatatgcatatatgygtatgtatgtatagtagtgcgtgtatatatataagcatgtgcatatatgtatatagacacacacatagccattcactacctaatgatattttcgtcaacaatggaccacatattgagcagtgatcccgtaacattattatattgtatttttactatacttttctatgtttagatacataaatacttacaattatgttataattatctactctattcattacagtaacatgttgcactggtttacagcctaggagaattaggctataccatatagcctaggtgtgtagcaggctttaccatctagatttgtaagtacactctatgatgtatgctcagtgatgaaatcaccttacagtgcatttctcagaat

SEQ ID NO: 81191 - DNA, 1578 bp, Homo sapiens
aagtggctaagttggccgtcaagcctggatgggccctaccttgaggctggtgcctcaccactcctcgggcctgaggtgctcaggccacaggttgttaatgttggaaaagacaccagagattctctcccgcaacctgttctttttttttttttttttttgagacagagtctcgctctgtcgcccaggctggagtgcagaggcgcgatctcggctcactgcaagctccgcctcccgggttcacaccattctcctgcctcagcctcccgagtagctgggactacaggcacccgccacsacgcctggctaatcttttgtagttttagtagagacgggtttgaccgtgctagccaggatggtctcgatctcctgacttcgtgatccacccgcctcggcctcccaaagtgctgggattacaggcatgagccaccgtgcccggcccgcaacctgttctttttacgaaggagagaaccgtggcctacagaggggaggacgtggcttttctcaaagttttatgtttggaacaagcttccgagctggggttggaaagccgggaatcctgccctgggtctccggctctttgtcttgttttggtgctgagggagcctggcttcttgccctggttccatcactgacagctgagcaaacctcaggctctccttttccttgatggtaaattaaagtcctccagcttgactcactcctgggctcaggtggtgttattatcaggattaattacatggctagagagagggctgagcctttcctggggaaacaaggccacttaaaagacactattatgttttaactgccctgatacatttgtaaccaagacttcttagaatgatattaaaatataaatagagaaaggatccaaaatttaaactgcaatttttcctgccatttcctggtcagcataaggaatattgagttttctatctaagtgcccatataagatatgaaatacctgggtaacgggagcaatttgctgcttaaattggaaccttgcaaatcaattatcaggaactagagcatgcattttctcctaagccaaaaaaaattattcttcaaaatgacatttggctgctcactgcatgtcataatcaaacgaggagtgaggtctaatgcagtagctccacatctaggtgaaaagggaaaaagaaattatccccaaaactgcaaatcttctaagatacgtgatcctatattttcaagactgaagcaagccttaggaatttaaagagtttaagaaagtaaaatttgattcaaattcacttctttaccgaaacttgcaaagcaaaaatccccagtttctctgggtggcattttattgcctggctataggtctagacaggcctagagccaggggtgcagggtgtgggtgggggaagggcagtatttcatagtatagcagtggaaaaggagcttagaggttctttggtatggcgattctcaatcctggctgctcagtggaattgcctgggatgcttttaaaaaccatggctagggctgggcatggtggctcatgcctataatccccagcacttttggggggactgaggcaggcggatcacctgaggt

SEQ ID NO: 81192 - DNA, 1578 bp, Homo sapiens
aagtggctaagttggccgtcaagcctggatgggccctaccttgaggctggtgcctcaccactcctcgggcctgaggtgctcaggccacaggttgttaatgttggaaaagacaccagagattctctcccgcaacctgttctttttttttttttttttttgagacagagtctcgctctgtcgcccaggctggagtgcagaggcgcgatctcggctcactgcaagctccgcctcccgggttcacaccattctcctgcctcagcctcccgagtagctgggactacaggcacccgccacgacgcctggctaatcttttgtagttttagtagagacgggtttgaccgtgctagccaggatggtctcgatctcctgacttcgtgatccacccgcctcggcctcccaaagtgctgggattacaggcatgagcyaccgtgcccggcccgcaacctgttctttttacgaaggagagaaccgtggcctacagaggggaggacgtggcttttctcaaagttttatgtttggaacaagcttccgagctggggttggaaagccgggaatcctgccctgggtctccggctctttgtcttgttttggtgctgagggagcctggcttcttgccctggttccatcactgacagctgagcaaacctcaggctctccttttccttgatggtaaattaaagtcctccagcttgactcactcctgggctcaggtggtgttattatcaggattaattacatggctagagagagggctgagcctttcctggggaaacaaggccacttaaaagacactattatgttttaactgccctgatacatttgtaaccaagacttcttagaatgatattaaaatataaatagagaaaggatccaaaatttaaactgcaatttttcctgccatttcctggtcagcataaggaatattgagttttctatctaagtgcccatataagatatgaaatacctgggtaacgggagcaatttgctgcttaaattggaaccttgcaaatcaattatcaggaactagagcatgcattttctcctaagccaaaaaaaattattcttcaaaatgacatttggctgctcactgcatgtcataatcaaacgaggagtgaggtctaatgcagtagctccacatctaggtgaaaagggaaaaagaaattatccccaaaactgcaaatcttctaagatacgtgatcctatattttcaagactgaagcaagccttaggaatttaaagagtttaagaaagtaaaatttgattcaaattcacttctttaccgaaacttgcaaagcaaaaatccccagtttctctgggtggcattttattgcctggctataggtctagacaggcctagagccaggggtgcagggtgtgggtgggggaagggcagtatttcatagtatagcagtggaaaaggagcttagaggttctttggtatggcgattctcaatcctggctgctcagtggaattgcctgggatgcttttaaaaaccatggctagggctgggcatggtggctcatgcctataatccccagcacttttggggggactgaggcaggcggatcacctgaggt

SEQ ID NO: 81193 - DNA, 596 bp, Homo sapiens
tgctttcctgttctccgttgattggacacgggttggacatttgatcctgggttggggtaaggaatctattggatggccacagctgtgccattcctcattgaagagtttgagagactgtggttagactgctgtgctctgtcgtctgctagggcagaggtgacctccccaagattgcaaatgtggagaaaagagccttgaaaagttacaaatcctctgagaagaaggaaatgaagctctggacaaaggggacccgagagaagacctgcaggcccagagaggcagaggagagagagatggagagtctgtgacygcctttccagtttctgttctctgttctgtgatagtctactttctgcagaaaagaaagccttcttttgagaattctagtctggctgattttctgttttctttttatacaattgcacgaaggctccccaagtcgtcaagtttcccttgcttggcatgttatcctcatacacagaatcctctctgtgtgctagtgggattgcccatcccagatcctaaggcattcatagtcccggcagggacctccctgcagagagctcctttgcctactagcacccagtttcatttga

SEQ ID NO: 81194 - DNA, 613 bp, Homo sapiens
agggtgtttttgtgctctggagatgaacactgcttagaggttgggagcctgctgtcaagggagtgctgacactctgccagttcggtctgtctgcagggtggtgggctgcacataggtgggggctgtgtgcaggcaggggccctgcctggggatcactttcacaggacctggccccagagaaccatgcaggcctcttctgcctccttttactttaatacccttgtttaccctctgctgtgtgtttttatttctccgagtacaggcatcagttggggctttcttagggaggcagtacattttcataggaagagattgaacttggggagaagctgacccacacttgaaacttgtcttatttacctttagaatatgttaccctcagcaagttactgtatttcttggagattcagtatttttaatctttaaaaygggggcaaaataacacttacctgttaagagtttttgtaagaattagatggaatgcacatggagagtctagcccagtaggtggcttgtattattacttattagtgacaactaaggctcaaagcattgaaagaacttttggatgtagtcactgagccaggaagtggtggagcaatgacaggatccc

SEQ ID NO: 81195 - DNA, 541 bp, Homo sapiens
aaagttccagataaaaaggagcacttcatagtaaaacacacacacatacacacacacagacatacacaaaatatataggtacaaacaaaataacacacaaataacaaggtactttgagtgaaggtcagcaaacagagaaacatcagatccttgaagacttcaaatattaacattttcagacacagaaaataatctgttaaatttcaaaatgtaaaagaacaacctgaaactgattgaagaacaggaagatttgtaaaaagaatcaaacagatattccagaaattaaaaatgattgacatgtaaaactcaacgatgacatatttctacttttgatcaaaatttagtgacaggggccagatttttctacttttgctttmaaaaactagaaaatcaggcaaagcacctgaaacaacagtttttagacattggatacttggtagacaagaagtgtgataagcaagagaagtcaagtcagccctatgatggcaccagcttgcatcctagaggcaaatttcaggatacaagttagggaggagaggct

SEQ ID NO: 81196 - DNA, 1617 bp, Homo sapiens
cggtggctcacgcctgtaatcccagcactttgggaggccgaggcaggtgaatcatgaggtcaggagatcaagagcatcctggctaacacagtgaaaccccatctctactaaaaatacaaaaaaattaggtgggtgtggtggcgggcacctgtagtcccagctactcaggaggctgaggcaggagaatggtgtgaacccaggaggcagagcttgcagtgagccgagatggcgccactgccctctagcctgggcgacagagtgagactccgtctcaaaacaaaacaaaacaaacaaaaactttctcagttttgttttctaacatggaaaatattggatataataaatgtaagcaaaagctctttaggattctaagttatttttaagagtataaacagtgccccaccccctgccaaaaacttttgaattgctgatctaaaatatacaaagaactcgtacaaagcaacaagaataagacagcatcccaacagaaaaaaaaatgagcaaaggttgcaaacaggtaatttacgaaaagaataaacaggcatacaaagaaagagttgttcagattattaatcagagtgcagataaaaatgtgacacgttaccttatacctactaggctggcaaaacgtagaaagccaaataatgacaagtatggttggggtttgaggacagaaaaaccctcatgtacagttggtaggagtgagaaaagtatagtagtgattctgaaagcattctaatagtagttatttcagttaaatatgcacaggcttttttttgtttttgtttttgttttttttgagatggagttttgctcttgttgcccaggctggagtgcaatggcacaatcttggctcgctgcaacctccgcctcctgggttcaagagattctcctgcctcagcctcctgagcaggcatgcgccaccacgcccggctaattttgtatttttagtagagacggggtttctccacgttggtcaggctggtctcaaactcctgacctcaggtgatctgcccacctcggcctcccaaagtgctgggattacaggtgtgagccactgcrcccggccttgcatagttcttacgacttagcaattccatgtttgggtatatgaacaaaataaattgtcatgcacaagtcatttggtgtgtgtacagatgtttattctccctgcttgcagggacagggatctgaagcctcctgggagcccatcactagtgagtggattgggaacacgtaaatgaatgctaccagaggtacccacaccatggatatatcccaaagaaagtgctacaagaaatgaaagaaacaagcagaagcaatctacagcatgatattgtttatgtaaattaaaattacagtcatacaaagcaattcatgttttgcaagaatacaaattatagaatttacattgcattggtttcctagggctgttaggaactaccactaattgggtggcttaaaacaaaataaattattctctcatagttctggaggcctgaagtccaaaactgaggtgtcgacatggttggttccttctgggcctccgaggaagaatctgttcaatgcctgtctcgtagcttctgatggtgctggcaattcttggtcttccttggc

SEQ ID NO: 81197 - DNA, 677 bp, Homo sapiens
tgccttttgcccggtaggcccatccactggtgtctactgacctcggcaggctggctctgtctcattccactgggggtcgtgggggtcaacacactcgatgatgatggagccctgctccagggtgtagccagggtcgcagctgaactccacagtggtacccacagggtaggtgggtgygctgctgctgaagttaccgtatttgacaaagggctcatagcaatggccctgctggaaggctgtaaaccacaggtcccagcccagctcagccttgactggtattaaacacagtgggcaagcatccccctacttccctccccagagcctttcttttcctgggtacgaatgacaaatatatgtcctggggttggagcaggaatgtgatggaggagggacagccaagagcatccatccctattatgctcaggaggccatcttgattaccatcctgttcccactgcctggttttgtgcttagtacacagaaggtactccatacatgttttttgaatgaattaatcaatgcatgcatgcataaatggttctagaatgtctcttacagcaattctttcttaagggttgaggccttttttgcttttcaaaatctggagaatttattcccttggaccatagggcctgggtccaggcagaggtttcctgcaaagctgtggtagggatccc

SEQ ID NO: 81198 - DNA, 915 bp, Homo sapiens
aataattttgacacaagtcatgatctgttatgttatcttgcattctttctgttaaatactcatttctgaaatgatagttgagaaacaactttgctgaattttatcacttctattttccagccattctttacttaatcaccctgatttttgagtattttctaattatgctctattgttatcttttcttagagactgtcatctcttaatttcttttgcttcattttgaaaacatggctttctggggttgtgtttttattatatgaaagcattctgtgactctaaagagagagatgcattcacgataactcttatttacagctttatttctctggagatctcatttctgttgttttcccaaagagataaaaatatggcttcatgtgttctgacatctgctctttctgcttccgtttttggttatatttggatcttcctttttatttacttcttgttcaatgtgggttctatctccaaaagcttctcctcagtttctcttcctcctggaatgaagttttcattagtaaattttgggattcctcagaacgtgtattgctccagtataaagttctctgtagtgatctgaattggacactttagagctccctccaagttttgattgctcttcttagctgtgcattcatactttgcagwgaatacttactgttaactttagtgtttgtctgtttccattgccacgataagccctgttgtctttttctctgcagatctgatacatgttgttggtatttctgttttcccatgttggagtctgtagggtacttgctcaccaattatcataatatatgttgtcttcgtgtgtttctttagcttattctagatgccatctgtgtgtgctctaggggaatgagaaaaattaaaaaactattattatattcccaatatcttcctggaatc

SEQ ID NO: 81199 - DNA, 652 bp, Homo sapiens
ttggacacgtgggttggaaatgaggcaccctgagcaatggtaacaggccagcaggggatctctttacagataaaattccagkggctggggtatcctgccctgggaatagaaggtgtgtggtttgcagtttaacagttttatcacactgtataatgtggctgggcatccatagcaagctcagccctgggcttggtatgatgggcttcgaaggtgagaaagcacccagtgtggccttgagcacacctgcaatgaccaatctttgcattgtgtacccttctctgagcacctgcagtgtccctgttccctgcatccgccaaggttgcttacagcaaaggttattttgcacccataggcatggatgtaagtcatggacttccttctataagggcaagtgtgtgaatgggaaaggtgttttaggaattaagaaacaggctggaaagtaattcttttcgaatgggattttcttgacttctctggatggctctgacaggcaaaggtatctcttgtcaccgtcaattgatttgaaggtactgtgatcacaacatagagtggggcagggaggagggcaacactgacttccactgctgaaagtgcttcttttttttttttttttttttagacagagtcttgctctgtcgcccaggctggagtg

SEQ ID NO: 81200 - DNA, 749 bp, Homo sapiens
gagtaagactttctgaaatctttgtaatttttgatacctagtttgaaacaactctttacttgatttgtcattcctctttcatttatttttcaaagtattgataagactaacaaaggtaattcatacaatctgaaaatatcatggctatgataataatttaagaaacatttgaatgccaatacctctactgattataccaccataagtgattagacaaaaaagtagatatgtttcaactatgctgaaacatatctatgctgaaaaattttatcctttacgcattttaactttcctgtgtaatttcctatagaaagctgtgtagactgctcctatagaaagcagtctacacagctttctataggaaagactgtttagtggtcagctttccagttttaatatcaaattcctggaaactaaagtgtcttactaaaaaaacccacttattatatccagtcatttctggatgaacaacactgatgaaaagacaactatttttaaaaagtaaaaggttgattcataaggcaaagatcatgttagttaccaaatgtagccacaaactttgttacaaaagttcttaagaatatatacacgaaatatctatttttataaacatgtrtacacacacatatctaatgtgcactatatccttaaatattcatttcctaccttctatcataagctctttgctgtgtatatataatttgagttggattatagtagaaataagcaagcacttatttatacattag

SEQ ID NO: 81201 - DNA, 792 bp, Homo sapiens
cccagactgtgcaccaaaagcagtcattaccaggcgagctggagaataagtctcttcaaaatacacagtgcatttaaaaaccatatatgaggctgagccactgctgtcattaccaattttaatttagctccttcagtttgccagccagataaactctttagtgctgttttttaatctatttgccacattttatgtttaagattatagtaatatggacagaagaaggaatcacttttaggggaaataaagaaatagatccgcttatcggcacccatcagaaagttcattaatcagccaggctttgtgccctctaaattgaaaggttaaataatcctctcaggaatatttctcggcccctccgccaattgtccggagaggagctgccattcatagcatgcgggatcggtgacagggtatcttaccactgtttggaccccaaacaatgatggacaaatggcttggtttacaaagaaaccatttagtacatggatggagaaggaccacaagctttgatgcaggatagagggatgaaggcatggagacaggatgtagggggaagggacagaaaagaacacataaatgtgtaaatccatggacattttatctgaatgtttattgggctagactataaaacacagaaatcacactaatatacatcttccamccatacaaaatgcttaacatattcaaatctgctactatattttgcatgtgattgtacatgaaccccaataaaaaaattataaaagaatagacccatagctctattacgtttattagctaatacatggg

SEQ ID NO: 81202 - DNA, 486 bp, Homo sapiens
tgttcattaacatacacttaaaattgtctatttgaaccagaaattccacgtcttagaattcaccttaaagcagcaaagaaatacacaaaagaatttatatttatcacagcattatttatagcagtgtaatggcatgctccaacctttgattttataatagggtaaaattttcagtcaatactcaaattatgatgcttatgcaggaagttgcttatgcaggaagtaagctgacctgcataaggtctctcatatatgtatrtgtgtatgtatatgtatacgtatatgtatatgtatatgtatatgtatatgtatatgtatatgtatatgtacacaccaaaatgttaccagtgattatcgctggatggttgggttacatacaatttttgttttatttttaatatttatcctgcagtttccaaatttttaacacaaattattatttccattactttaaccaattaatacagtacatattataaaagctat

SEQ ID NO: 81203 - DNA, 486 bp, Homo sapiens
tgttcattaacatacacttaaaattgtctatttgaaccagaaattccacgtcttagaattcaccttaaagcagcaaagaaatacacaaaagaatttatatttatcacagcattatttatagcagtgtaatggcatgctccaacctttgattttataatagggtaaaattttcagtcaatactcaaattatgatgcttatgcaggaagttgcttatgcaggaagtaagctgacctgcataaggtctctcatatatgtatgtgtrtatgtatatgtatacgtatatgtatatgtatatgtatatgtatatgtatatgtatatgtatatgtacacaccaaaatgttaccagtgattatcgctggatggttgggttacatacaatttttgttttatttttaatatttatcctgcagtttccaaatttttaacacaaattattatttccattactttaaccaattaatacagtacatattataaaagctat

SEQ ID NO: 81204 - DNA, 727 bp, Homo sapiens
tgtagggctagcatcatcatggaaatttgttttggaatttattctaatcatgatgggaagccttaagtgagggaagtgacttcctctggctctggctgctgcatgaataaccgggcttgaaagagctaagagcagaagcagggatttggctctagcagtagtccagttgagagatgatgatgtcttagactaccattgttgtggagatgctgaaatatgactgaattcaggacggatttcggaaatattgctatcaagatttttctggcagactggacatgagatattagggaaaaggatgaatcattgaggactcctagttcttaggcctgagccccttaatttctggaactcagcccccatcatttaatttatgatgctgccrgtaatagaatgggtaaaactgagggaaaggcaagtggaagaggacaggagtaaagagtacttcttcatacatgctaagtttgagatgactaatgaaaacctaaagataaatacagatggtgaactaagggaagaagtttagtctagaaatataaatgttagtgtcatcgacatttaattgacaattaaagtcaaaggattagtgaaacaacccaatataggatttagagaagaggtccaaggactgagtcctaaggtattccactgtttaaaggggtgaagaagaggaaggtcccaccaacagcctgacgaagggtatccagggtgggagaagagcaacagg

SEQ ID NO: 81205 - DNA, 654 bp, Homo sapiens
cataacccagtgaccctccagcaccccactgataggaggactctcccaggaccagggcaccctctttctacagaggcagcccatccccatttcacaaggtgctgggcttccctctgctgagctaaaatctgcactcctaaaatgcaggagtgctagtctaggttctgccctttggagctacacaaatcaaaaacccattcccatgatgactattgggagcatctcccagcccactcccatcctgatctctccattcattccccatgtgacatacgtccgtgatctctgtccagatcattgctgtttagtccaaatccctctgacatatggttccagctctgaatgcagttctccaggaggcctgcttagtgctgagactaagtccttcttgctctgaaggacacagtcaaatcacagtgttgactcaactgaagtttaccaaaatcctcagccaccagcyactgctgatccaaagagccacggactgtcctgctgtaattgactctcagacacaagtaaagaattttgtatttgtctcagtttttttctaacttttagccccttcccaagggaatttgcattttaacagaaaaggatgaatatctgagaagggattcctggatggatcaaaagatgaattttcagccctgggtg

SEQ ID NO: 81206 - DNA, 1446 bp, Homo sapiens
tcagtaataatatagaaaagaatgcaaaatatacatgaatttctaagggaaattattgacttcaaagacatttcacacatcttttgggatgccttaggcccacccctggcctccctggaggggagcaacatagtcactctctagttacagagtacttggtgtagataatgatgctctccaccctgggccaaagtggccatgcatgggccaagacatacacaagataaccaaccaaatragaaccaaacccacacactccctgccagtctagacaatgcagttttggaggtagagggtccctcacagatcagctagtctgatttttttgttttacaaagatactaacaccaagagccagagaatggaaatcatttgctcaagatggggcagatttgtggtcccctgagtctgagtctccttcatggcatttactatgggtagtgccagggaggtgaaattggctggctgtgaggctgaaacatggtaggtaggcccctcgggttgctgttccaggagatcatggggccatgggcataataggcacaggtagaagtttctggcaggagtagctgctggagaatccacatacttgatgtgctgggcagctccctgtgggttgagtcagcctcagccagctactagggattcaccctggatccattctcttacgtgtgaggctgacatcagaaccactttctatgactccaagagaaagccacacttctttctcaacagttatttcagacattgatttttttctccccctggttgtttctcatggaaaacaagactgctttcccccaagtcccaagtgactgccttctttgatcctgcccctggggctgtgtgtgtgacaccatcatttggcaaacagtgagaaaacaaagagaaaacccagaagggttggggtttctaaaatctagggcacagtccatcccttgagaagcagcaagtaatctagctgagtgagagaagaccaacatgaatttgaaaacagtaaaaaaccataaagaaggaagggtggttcaggctgtgattgagagaatagcttagaggggagggctggatggggacaggagtgatcagggaaacctcgctggagctgccatctcctgtcctaggttttggggcaccagcacaagagtaccagacttggaggtgggggtgcacgtttaaatttgagttcacccaaacgaattttgtaagggggcccatctccagttcttcctaagtcccctcccatgttgtcctctatgcccagtgattgtgtaaatccctcaggaaaagactatctcatcagcatgcattttctcagattggccctgctctgctggctttttccctacagttgtctctgtagcttcccttagtctcagtttccccatatgcgaacgaaagagatttgttcccctgctcctctctaagaaggttgtgaagataaatggc

SEQ ID NO: 81207 - DNA, 1446 bp, Homo sapiens
tcagtaataatatagaaaagaatgcaaaatatacatgaatttctaagggaaattattgacttcaaagacatttcacacatcttttgggatgccttaggcccacccctggcctccctggaggggagcaacatagtcactctctagttacagagtacttggtgtagataatgatgctctccaccctgggccaaagtggccatgcatgggccaagacatacacaagataaccaaccaaataagaaccaaacccacacactccctgccagtctagacaatgcagttttggaggtagagggtccctcacagatcagctagtctgatttttttgttttacaaagatactaacaccaagagccagagaatggaaatcatttgctcaagatggggcagatttgtggtcccctgagtctgagtctccttcatggcatttactatgggtagtgccagggaggtgaaattggctggctgtgaggctgaaacatggtaggtaggcccctcgggttgctgttccaggagatcatggggccrtgggcataataggcacaggtagaagtttctggcaggagtagctgctggagaatccacatacttgatgtgctgggcagctccctgtgggttgagtcagcctcagccagctactagggattcaccctggatccattctcttacgtgtgaggctgacatcagaaccactttctatgactccaagagaaagccacacttctttctcaacagttatttcagacattgatttttttctccccctggttgtttctcatggaaaacaagactgctttcccccaagtcccaagtgactgccttctttgatcctgcccctggggctgtgtgtgtgacaccatcatttggcaaacagtgagaaaacaaagagaaaacccagaagggttggggtttctaaaatctagggcacagtccatcccttgagaagcagcaagtaatctagctgagtgagagaagaccaacatgaatttgaaaacagtaaaaaaccataaagaaggaagggtggttcaggctgtgattgagagaatagcttagaggggagggctggatggggacaggagtgatcagggaaacctcgctggagctgccatctcctgtcctaggttttggggcaccagcacaagagtaccagacttggaggtgggggtgcacgtttaaatttgagttcacccaaacgaattttgtaagggggcccatctccagttcttcctaagtcccctcccatgttgtcctctatgcccagtgattgtgtaaatccctcaggaaaagactatctcatcagcatgcattttctcagattggccctgctctgctggctttttccctacagttgtctctgtagcttcccttagtctcagtttccccatatgcgaacgaaagagatttgttcccctgctcctctctaagaaggttgtgaagataaatggc

SEQ ID NO: 81208 - DNA, 772 bp, Homo sapiens
ttatatatatatatgaaagaaagcgttctgaaacatattacatacccactattcttactacagactgtttgctgggctgtcatttcttcattttgctggcttcctgcttttttttttttttttttttgctgttcccacctggtactcttcaaaagggccactctgggtaaacctctgtgcttttctctgcttcctttcctttacccaggtcatttattggatcagctccatgaacacattaacataaaagctgtgcagtcacacaagcgcccccctaccccgccccatactcaggagggccctacacttgctttaacactctgctgtagctgtcttgatttttttttggtttttttttttttgagrcagagtctctctctgttgtccaggctgcagtgcagtggcacagtctcggctcactgtaacctctgcctcccaagttcaagcgattctcctgccttagcctccctaatagctgggattacaggcacctgccaacacacccagctaatttttgtatttttagtagagatggggtttcaccattttggccaggctggtctcgaactcctggcctcaagtgatccacctgccttgccctcccaaagtgctgggattacactgggcagccaccgccctccactttgaaattcctaataataatctcatttttggatttgtgttttatatgtgaagtcccatgggacgacgaagcatgcacgtgagcagaggagagctgctccatgtcatctgcccttggctgccccgctca

SEQ ID NO: 81209 - DNA, 772 bp, Homo sapiens
ttatatatatatatgaaagaaagcgttctgaaacatattacatacccactattcttactacagactgtttgctgggctgtcatttcttcattttgctggcttcctgcttttttttttttttttttttgctgttcccacctggtactcttcaaaagggccactctgggtaaacctctgtgcttttctctgcttcctttcctttacccaggtcatttattggatcagctccatgaacacattaacataaaagctgtgcagtcacacaagcgcccccctaccccgccccatactcaggagggccctacacttgctttaacactctgctgtagctgtcttgatttttttttggtttttttttttttgagacagagtctctctctgttgyccaggctgcagtgcagtggcacagtctcggctcactgtaacctctgcctcccaagttcaagcgattctcctgccttagcctccctaatagctgggattacaggcacctgccaacacacccagctaatttttgtatttttagtagagatggggtttcaccattttggccaggctggtctcgaactcctggcctcaagtgatccacctgccttgccctcccaaagtgctgggattacactgggcagccaccgccctccactttgaaattcctaataataatctcatttttggatttgtgttttatatgtgaagtcccatgggacgacgaagcatgcacgtgagcagaggagagctgctccatgtcatctgcccttggctgccccgctca

SEQ ID NO: 81210 - DNA, 759 bp, Homo sapiens
ggatccagttgcaagtcgtttwgttgggaggtgatgtctcagtgaggcctgatctgaccattccatttaaaaatacaacccccctcttgtcccaccaagaccatgctctatttttagagcatttatcggcttcaaatatactttgtaaatcactcatttatgatgcttattcttatggtctatttttccccattagagtataaaaccacagtgcatgttttttcatctatgttgttcatgttaagtctccgggacagtgcacatacagtaagctagaaaaacatagatgtttttcatctgtgttgatgtatgttaagtgtactgattggtgcacacactgtaagcttgataaacacttgttgagtgaaataatgatttggtgaattgtgatggccccattttttgctcccttaatagccagaaaccacattagtgcagatactgccttattctctgaatcttgcacacctagcaccatgcctgtcacatcctggaatgtttgaacataagacagtgtaacccagtctagagtgacaactcctggccatgcctattgtctcaccattgcatctttaaagttgtgatgccttgaactctgaggactgtacctgttttgtgatcatttttctttttcctgtcttgcatttagccatcctaaagataagtcttcaagataagattgagcatgtccgccaacctaggcacccatttgcctgaagatttttggtgacacctgaagaggttgactcttaggttcct

SEQ ID NO: 81211 - DNA, 759 bp, Homo sapiens
ggatccagttgcaagtcgttttgttgggaggtgatgtctcagtgaggcctgatctgaccattccatttaaaaatacaacccccctcttgtcccaccaagaccatgctctatttttagagcatttatcggcttcaaatatactttgtaaatcactcatttatgatgcttattcttatggtctatttttccccattagagtataaaaccacagtgcatgttttttcatctatgttgttcatgttaagtctccgggacagtgcacatacagtaagctagaaaaacatagatgtttttcatctgtgttgatgtatgttaagtgtactgattggtgcacayactgtaagcttgataaacacttgttgagtgaaataatgatttggtgaattgtgatggccccattttttgctcccttaatagccagaaaccacattagtgcagatactgccttattctctgaatcttgcacacctagcaccatgcctgtcacatcctggaatgtttgaacataagacagtgtaacccagtctagagtgacaactcctggccatgcctattgtctcaccattgcatctttaaagttgtgatgccttgaactctgaggactgtacctgttttgtgatcatttttctttttcctgtcttgcatttagccatcctaaagataagtcttcaagataagattgagcatgtccgccaacctaggcacccatttgcctgaagatttttggtgacacctgaagaggttgactcttaggttcct

SEQ ID NO: 81212 - DNA, 174 bp, Homo sapiens
aatactgcttcaataaatttatgatacctaagaagcacattcagaccactatttaaatgcaaaaacaaaggccaggagcaatacatggatttgtcaaaagttgtctaagtgawcagaacaggagaaacagaccaaattctcagcttttgttatagcaaattcagaaactggttc

SEQ ID NO: 81213 - DNA, 647 bp, Homo sapiens
gagagagacactccagcagcaaaatatctccctcaggaacttacacctgaagagagaacatgggaaacaaaaagttatttctaatgtcaaaatgatggcccctaggcatgaggctagggaacaagttatagcargaaataggccatgtaaacacaaataccacccagagcaagccagcaagctccatggggctctgcaaggttgcatcccaggtgcctggcacaaggtgggcccagaggtctataaatattttgtaaatacctgatacatagtgaatatctttggtgtaaggttgagtattttaatctgttttgtatcccacacatacttaccatgacatcatctaaacagttgttcacatgctggtcaccagtcctattgagtacttacattcagtgctctaagtcagacactagaatatgcctgacctcatttaataatcacaacaaagttacgaggcaaagtattatacccaattttcaaaaagaaacaggaacttggggagattaaatcagttctcctgagtcacacagaagtgaatagcaaaaagtaaattcaaacccaggtgcgtctcagtccaatctccataatattttctctaccatgcgattttctcatgggtgttagtagcgtgtgcttgcgcacac

SEQ ID NO: 81214 - DNA, 647 bp, Homo sapiens
gagagagacactccagcagcaaaatatctccctcaggaacttacacctgaagagagaacatgggaaacaaaaagttatttctaatgtcaaaatgatggcccctaggcatgaggctagggaacaagttatagcaagaaataggccatgtaaacacaaataccacccagagcaagccagcaagctccatggggctctgcaaggttgcatcccaggtgcctggcacaaggtgggcccagaggtctataaatattttgtaaatacctgatacatagtgaatatctttggtgtaagkttgagtattttaatctgttttgtatcccacacatacttaccatgacatcatctaaacagttgttcacatgctggtcaccagtcctattgagtacttacattcagtgctctaagtcagacactagaatatgcctgacctcatttaataatcacaacaaagttacgaggcaaagtattatacccaattttcaaaaagaaacaggaacttggggagattaaatcagttctcctgagtcacacagaagtgaatagcaaaaagtaaattcaaacccaggtgcgtctcagtccaatctccataatattttctctaccatgcgattttctcatgggtgttagtagcgtgtgcttgcgcacac

SEQ ID NO: 81215 - DNA, 647 bp, Homo sapiens
gagagagacactccagcagcaaaatatctccctcaggaacttacacctgaagagagaacatgggaaacaaaaagttatttctaatgtcaaaatgatggcccctaggcatgaggctagggaacaagttatagcaagaaataggccatgtaaacacaaataccacccagagcaagccagcaagctccatggggctctgcaaggttgcatcccaggtgcctggcacaaggtgggcccagaggtctataaatattttgtaaatacctgatacatagtgaatatctttggtgtaaggttgagtattttaatctgttttgtatcccacacatacttaccatgacatcatctaaacagttgttcacatgctggtcaccagtcctattragtacttacattcagtgctctaagtcagacactagaatatgcctgacctcatttaataatcacaacaaagttacgaggcaaagtattatacccaattttcaaaaagaaacaggaacttggggagattaaatcagttctcctgagtcacacagaagtgaatagcaaaaagtaaattcaaacccaggtgcgtctcagtccaatctccataatattttctctaccatgcgattttctcatgggtgttagtagcgtgtgcttgcgcacac

SEQ ID NO: 81216 - DNA, 1491 bp, Homo sapiens
actcaaaccatagcatcaccattcattagctctgtggctgtgggcaagtcagaaaacttctctgtgtctcagtttccacatctctaaaagagaaataaaaattataccaataattataggattattttgaggattaagtgagataaggtacaagaaagacaacacaagcctggcacaagatagcacaaatacacagtagctaaactgagttgggctctatgctgaatttaaaaagctcaaggccagatctcctcaactcaagttgatgcctagaattttacaacatatctaggtggggaaaaaaaatctccatatcacttccttccaaaccacaaaatatttacagttgaaattgaagataaaggtcccacctcaacttttcccctctacttaaaaagcttggtcagacttgataacatcttattatcatggatgcctgttggcatccaaaagtaatggagattgcctgttattgtaactgctgtagtttctctggttcccattctatattccatcctttggaattctatcctatatttccttaatcttattctgatcttcctattttcccagtacatctcatctaagccatttctggaagtaccttttattcagtcatttatgcttttaacaaagatttactcatccaaccccaacatgactgcaccaatctaagcctggagatgagcaagatatctggggatcctgcactgtgtcaaggtaggtagacatttaaatgagcaaatcacttcatgggtaaggstaataatagtagctcaaagcaggtgcaaataaccgggtcttgagtgaatggatgaggttgactgagggaatcttctaagagaaagtgacatttaagccgaaccaacagaatgaccaggaaatactcaggggaagaaaagaggaaaaagtgtttcaatcaaagacaatccaaccatcgatcttgacctacgcttcaagcacagctagggttactacagcccagcaagagctattcatcactgccattgatcctccctacccactagaaaactttgaaattttagagctcacatcttgttaaaatctcttcccctctcaagaactaaagcttctccagcacaacctcaattcactcagagaaggagagaaaaagaaaaataagttgtattcagaaaaactcaaaagctctccatctgtgaactgtagaggacacttgttgatcagattgccagagaaagccaacagaaaggcagagccaccttctttcctccctttcaagagcagagctcaaaactgccttcacgtctaaacacatatgacctggttgacaaggtcatgccatttctttacctgtcaaataaatggactttctcagtttccactgtggttgaaaatataatatttctgtttgcaatttcaatttcacagatgactggcatctgcagggacagagaattctaataaaattgcagaagcatttaatacaatgactggcagatggggaaaggg

SEQ ID NO: 81217 - DNA, 544 bp, Homo sapiens
caaaggtttaattgatatttaatctctcagtgaactatttatataaacaatctttttctgagtatatttccatggtaccctcctaatatgtatctaatgtgtggtatttatatgatagtttatttgaaaaacaatgytaaaagaaacacagaggttgtgatttgttcactgccacagcaccatagaaaaagaacatggagaggattcctggctcagatgacttttgtgaactccttattgtttttaggtgggcttatgggtaaaaccaactaaagggagaataaattctgaagcaggtaagcatattggtcagtggctcttccttactggaagatggaaagggaaggtggttggaaattgtattagtctgttctcatgctgctatgaagaaatacctgagactgggtaatttataaaggaaagaggtttaattgactcacagttatgcaggggagatctcaggaaacctacagtcatggcagaaggggaagcaaatatgtccttcttcacatgaaggcaggaaagataagtgaatgtcgagcaa

SEQ ID NO: 81218 - DNA, 544 bp, Homo sapiens
caaaggtttaattgatatttaatctctcagtgaactatttatataaacaatctttttctgagtatatttccatggtaccctcctaatatgtatctaatgtgtggtatttatatgatagtttatttgaaaaacaatgttaaaagaaacacagaggttgtgatttgttcactgccacagcaccatagaaaaagaacatggagaggattcctggctcagatgacttttgtgaactccttattgtttttaggtgggcttatgggtaaaaccaactaaagggagaataaattctgaagcargtaagcatattggtcagtggctcttccttactggaagatggaaagggaaggtggttggaaattgtattagtctgttctcatgctgctatgaagaaatacctgagactgggtaatttataaaggaaagaggtttaattgactcacagttatgcaggggagatctcaggaaacctacagtcatggcagaaggggaagcaaatatgtccttcttcacatgaaggcaggaaagataagtgaatgtcgagcaa

SEQ ID NO: 81219 - DNA, 544 bp, Homo sapiens
caaaggtttaattgatatttaatctctcagtgaactatttatataaacaatctttttctgagtatatttccatggtaccctcctaatatgtatctaatgtgtggtatttatatgatagtttatttgaaaaacaatgttaaaagaaacacagaggttgtgatttgttcactgccacagcaccatagaaaaagaacatggagaggattcctggctcagatgacttttgtgaactccttattgtttttaggtgggcttatgggtaaaaccaactaaagggagaataaattctgaagcaggtaagcatattggtcagtggctcttccttactggaagatsgaaagggaaggtggttggaaattgtattagtctgttctcatgctgctatgaagaaatacctgagactgggtaatttataaaggaaagaggtttaattgactcacagttatgcaggggagatctcaggaaacctacagtcatggcagaaggggaagcaaatatgtccttcttcacatgaaggcaggaaagataagtgaatgtcgagcaa

SEQ ID NO: 81220 - DNA, 544 bp, Homo sapiens
caaaggtttaattgatatttaatctctcagtgaactatttatataaacaatctttttctgagtatatttccatggtaccctcctaatatgtatctaatgtgtggtatttatatgatagtttatttgaaaaacaatgttaaaagaaacacagaggttgtgatttgttcactgccacagcaccatagaaaaagaacatggagaggattcctggctcagatgacttttgtgaactccttattgtttttaggtgggcttatgggtaaaaccaactaaagggagaataaattctgaagcaggtaagcatattggtcagtggctcttccttactggaagatggaaagggaaggtggttggaaattgtattagtctgttctcatgctgctatgaagaaatacctgagactgggtaatttataaaggaaagaggtttaattgactcacagttaygcaggggagatctcaggaaacctacagtcatggcagaaggggaagcaaatatgtccttcttcacatgaaggcaggaaagataagtgaatgtcgagcaa

SEQ ID NO: 81221 - DNA, 1905 bp, Homo sapiens
aacactaggtgaatgcagaaaactgcatccagatgaacagagctgtgtaggaatgtgcaaattgcacacaggctcacacctcaaacatctgccagctacctctgctcaccatgtgctttgagccgcacccatccacatctggtgttagaactttccttctgacttcagataactctccttccatacttcataatgacttactaactgcagccttttgacactcacttctgcaagcaaactccaggtctgttttcaagataaaatatagtatttattgtagtatttatgtatttcttaacaatttagcatgtgtaaaactgtgttatttttattagattaaaaaaaatgtttccctgatgactttttttttggctttttgttttttttctttgagacagagtcttgctctgtcacccaggctggagtgcagtggtgggatctcagcccactgccacctccacctcccaggttcaaacgattctcctgcctcagcctcctgagtagctgggactacaggtgtgtgtcaccatgcctggctaatttttgtatttttagtagaaacagggttttggcatgttgcccaggctgctctcaaactcctggcctcatgtcatctgcccgccttgaccacccaaagtgctgggattacaggcgtgagccatcacgtctggtcactgatgaagtttttagcatccatttttctgatgagtcctgtaggattttttgcccagtgatttttaggaatgtgtgtgtatgtgtgtgactttattgcagaactgactttattgtcacttattatgcagatttctcctgttaggggktgtgtgtgtgtgtgtgtgtgtgtgtgtgtgtgtgtgtgtgtgtgagatgcacttaaaggggtagctgataattatttgaagtacttcttttcacagtggtttagcaggttagcagatttttcccaagaaaabaacactaggtgaatgcagaaaactgcatccagatgaacagagctgtgtaggaatgtgcaaattgcacacaggctcacacctcaaacatctgccagctacctctgctcaccatgtgctttgagccgcacccatccacatctggtgttagaactttccttctgacttcagataactctccttccatacttcataatgacttactaactgcagccttttgacactcacttctgcaagcaaactccaggtctgttttcaagataaaatatagtatttattgtagtatttatgtatttcttaacaatttagcatgtgtaaaactgtgttatttttattagattaaaaaaaatgtttccctgatgactttttttttggctttttgttttttttctttgagacagagtcttgctctgtcacccaggctggagtgcagtggtgggatctcagcccactgccacctccacctcccaggttcaaacgattctcctgcctcagcctcctgagtagctgggactacaggtgtgtgtcaccatgcctggctaatttttgtatttttagtagaaacagggttttggcatgttgcccaggctgctctcaaactcctggcctcatgtcatctgcccgccttgaccacccaaagtgctgggattacaggcgtgagccatcacgtctggtcactgatgaagtttttagcatccatttttctgatgagtcctgtaggattttttgcccagtgatttttaggaatgtgtgtgtatgtgtgtgactttattgcagaactgactttattgtcacttattatgcagatttctcctgttagggggbgtgtgtgtgtgtgtgtgtgtgtgtgtgtgtgtgtgtgtgtgtgagatgcacttaaaggggtagctgataattatttgaagtacttcttttcacagtggtttagcaggttagcagatttttcccaagaaaa

SEQ ID NO: 81222 - DNA, 952 bp, Homo sapiens
aacactaggtgaatgcagaaaactgcatccagatgaacagagctgtgtaggaatgtgcaaattgcacacaggctcacacctcaaacatctgccagctacctctgctcaccatgtgctttgagccgcacccatccacatctggtgttagaactttccttctgacttcagataactctccttccatacttcataatgacttactaactgcagccttttgacactcacttctgcaagcaaactccaggtctgttttcaagataaaatatagtatttattgtagtatttatgtatttcttaacaatttagcatgtgtaaaactgtgttatttttattagattaaaaaaaatgtttccctgatgactttttttttggctttttgttttttttctttgagacagagtcttgctctgtcacccaggctggagtgcagtggtgggatctcagcccactgccacctccacctcccaggttcaaacgattctcctgcctcagcctcctgagtagctgggactacaggtgtgtgtcaccatgcctggctaatttttgtatttttagtagaaacagggttttggcatgttgcccaggctgctctcaaactcctggcctcatgtcatctgcccgccttgaccacccaaagtgctgggattacaggcgtgagccatcacgtctggtcactgatgaagtttttagcatccatttttctgatgagtcctgtaggattttttgcccagtgatttttaggaatgtgtgtgtatgtgtgtgactttattgcagaactgactttattgtcacttattatgcagatttctcctgttagggggtstgtgtgtgtgtgtgtgtgtgtgtgtgtgtgtgtgtgtgtgtgagatgcacttaaaggggtagctgataattatttgaagtacttcttttcacagtggtttagcaggttagcagatttttcccaagaaaa

SEQ ID NO: 81223 - DNA, 952 bp, Homo sapiens
aacactaggtgaatgcagaaaactgcatccagatgaacagagctgtgtaggaatgtgcaaattgcacacaggctcacacctcaaacatctgccagctacctctgctcaccatgtgctttgagccgcacccatccacatctggtgttagaactttccttctgacttcagataactctccttccatacttcataatgacttactaactgcagccttttgacactcacttctgcaagcaaactccaggtctgttttcaagataaaatatagtatttattgtagtatttatgtatttcttaacaatttagcatgtgtaaaactgtgttatttttattagattaaaaaaaatgtttccctgatgactttttttttggctttttgttttttttctttgagacagagtcttgctctgtcacccaggctggagtgcagtggtgggatctcagcccactgccacctccacctcccaggttcaaacgattctcctgcctcagcctcctgagtagctgggactacaggtgtgtgtcaccatgcctggctaatttttgtatttttagtagaaacagggttttggcatgttgcccaggctgctctcaaactcctggcctcatgtcatctgcccgccttgaccacccaaagtgctgggattacaggcgtgagccatcacgtctggtcactgatgaagtttttagcatccatttttctgatgagtcctgtaggattttttgcccagtgatttttaggaatgtgtgtgtatgtgtgtgactttattgcagaactgactttattgtcacttattatgcagatttctcctgttagggggtgtgtktgtgtgtgtgtgtgtgtgtgtgtgtgtgtgtgtgtgtgagatgcacttaaaggggtagctgataattatttgaagtacttcttttcacagtggtttagcaggttagcagatttttcccaagaaaa

SEQ ID NO: 81224 - DNA, 952 bp, Homo sapiens
aacactaggtgaatgcagaaaactgcatccagatgaacagagctgtgtaggaatgtgcaaattgcacacaggctcacacctcaaacatctgccagctacctctgctcaccatgtgctttgagccgcacccatccacatctggtgttagaactttccttctgacttcagataactctccttccatacttcataatgacttactaactgcagccttttgacactcacttctgcaagcaaactccaggtctgttttcaagataaaatatagtatttattgtagtatttatgtatttcttaacaatttagcatgtgtaaaactgtgttatttttattagattaaaaaaaatgtttccctgatgactttttttttggctttttgttttttttctttgagacagagtcttgctctgtcacccaggctggagtgcagtggtgggatctcagcccactgccacctccacctcccaggttcaaacgattctcctgcctcagcctcctgagtagctgggactacaggtgtgtgtcaccatgcctggctaatttttgtatttttagtagaaacagggttttggcatgttgcccaggctgctctcaaactcctggcctcatgtcatctgcccgccttgaccacccaaagtgctgggattacaggcgtgagccatcacgtctggtcactgatgaagtttttagcatccatttttctgatgagtcctgtaggattttttgcccagtgatttttaggaatgtgtgtgtatgtgtgtgactttattgcagaactgactttattgtcacttattatgcagatttctcctgttagggggtgtgtgwgtgtgtgtgtgtgtgtgtgtgtgtgtgtgtgtgtgtgagatgcacttaaaggggtagctgataattatttgaagtacttcttttcacagtggtttagcaggttagcagatttttcccaagaaaa

SEQ ID NO: 81225 - DNA, 952 bp, Homo sapiens
aacactaggtgaatgcagaaaactgcatccagatgaacagagctgtgtaggaatgtgcaaattgcacacaggctcacacctcaaacatctgccagctacctctgctcaccatgtgctttgagccgcacccatccacatctggtgttagaactttccttctgacttcagataactctccttccatacttcataatgacttactaactgcagccttttgacactcacttctgcaagcaaactccaggtctgttttcaagataaaatatagtatttattgtagtatttatgtatttcttaacaatttagcatgtgtaaaactgtgttatttttattagattaaaaaaaatgtttccctgatgactttttttttggctttttgttttttttctttgagacagagtcttgctctgtcacccaggctggagtgcagtggtgggatctcagcccactgccacctccacctcccaggttcaaacgattctcctgcctcagcctcctgagtagctgggactacaggtgtgtgtcaccatgcctggctaatttttgtatttttagtagaaacagggttttggcatgttgcccaggctgctctcaaactcctggcctcatgtcatctgcccgccttgaccacccaaagtgctgggattacaggcgtgagccatcacgtctggtcactgatgaagtttttagcatccatttttctgatgagtcctgtaggattttttgcccagtgatttttaggaatgtgtgtgtatgtgtgtgactttattgcagaactgactttattgtcacttattatgcagatttctcctgttagggggtgtgtgtgkgtgtgtgtgtgtgtgtgtgtgtgtgtgtgtgtgtgagatgcacttaaaggggtagctgataattatttgaagtacttcttttcacagtggtttagcaggttagcagatttttcccaagaaaa

SEQ ID NO: 81226 - DNA, 1027 bp, Homo sapiens
tatgcttctattttttatttacgattttgacatcaacttttcaactgatttttttttctttactaggtccattatcttggcagagaagttggagcaaaattttgggagctcctccttgtcattattcgatgtccctttttggttctttcagctaccataaataacccaaatcttctcaccaagtaggtataggtaaaaagagtggttgttatatattcagtggttgaattatatactgtctatatggtctgaagtctttaaggttttttctatgataactttcaaataaatttattacccaatctttgaaacgtcagtggtcttgctttgttgcccaggctggccttaaactcctgggctgaaggaatcctcccacctcagcctcctgagtagctgggaccacaggtgtacattaccatgtctggctttctcaaatttttttgaagatatatttcctggaagttagagarggaaaacatcttctccaaagaaaatcaaggtctcccatagccagatctgaaattgtgcaggacaatttctaaaaattttcaagtaaatgtcatctgaagtaagagagagaattgtatccccctttctttgtccttatccaataattaaagctaaaatggaaataactgggacacagtcattgaccttgcagatgacaatcataagaacaacaaagcattatatgaacgtcaagtattgttttgttaccagacttgatttttcctggtaacagcgacgatggcagtaacagcagcactggtaacaagcacacagtgctttctatgtggcaggcacgctaactcattcaagccacgcaacacccttatgagaaagatactttcgttatcttctatgttatgatggagaaagggaggcatagagaagctgaggaatttgcccaaagtccacagctctgaagtcaactcaggtggtttaaattgagagggcatgctctaaatttttaaacttgtgaaattttctttgtttaaaatatccaagttcttgataaatacttcta

SEQ ID NO: 81227 - DNA, 1027 bp, Homo sapiens
tatgcttctattttttatttacgattttgacatcaacttttcaactgatttttttttctttactaggtccattatcttggcagagaagttggagcaaaattttgggagctcctccttgtcattattcgatgtccctttttggttctttcagctaccataaataacccaaatcttctcaccaagtaggtataggtaaaaagagtggttgttatatattcagtggttgaattatatactgtctatatggtctgaagtctttaaggttttttctatgataactttcaaataaatttattacccaatctttgaaacgtcagtggtcttgctttgttgcccaggctggccttaaactcctgggctgaaggaatcctcccacctcagcctcctgagtagctgggaccacaggtgtacattaccatgtctggctttctcaaatttttttgaagatatatttcctggaagttagagaaggaaaacatcttctccaaagaaaatcaaggtctcccatagccagatctgaaattgtgcaggacaatttctaaaaattttcaagtaaatgtcatctgaagtaagagagagaattgtatccccctttctttgtccttatccaataaktaaagctaaaatggaaataactgggacacagtcattgaccttgcagatgacaatcataagaacaacaaagcattatatgaacgtcaagtattgttttgttaccagacttgatttttcctggtaacagcgacgatggcagtaacagcagcactggtaacaagcacacagtgctttctatgtggcaggcacgctaactcattcaagccacgcaacacccttatgagaaagatactttcgttatcttctatgttatgatggagaaagggaggcatagagaagctgaggaatttgcccaaagtccacagctctgaagtcaactcaggtggtttaaattgagagggcatgctctaaatttttaaacttgtgaaattttctttgtttaaaatatccaagttcttgataaatacttcta

SEQ ID NO: 81228 - DNA, 1027 bp, Homo sapiens
tatgcttctattttttatttacgattttgacatcaacttttcaactgatttttttttctttactaggtccattatcttggcagagaagttggagcaaaattttgggagctcctccttgtcattattcgatgtccctttttggttctttcagctaccataaataacccaaatcttctcaccaagtaggtataggtaaaaagagtggttgttatatattcagtggttgaattatatactgtctatatggtctgaagtctttaaggttttttctatgataactttcaaataaatttattacccaatctttgaaacgtcagtggtcttgctttgttgcccaggctggccttaaactcctgggctgaaggaatcctcccacctcagcctcctgagtagctgggaccacaggtgtacattaccatgtctggctttctcaaatttttttgaagatatatttcctggaagttagagaaggaaaacatcttctccaaagaaaatcaaggtctcccatagccagatctgaaattgtgcaggacaatttctaaaaattttcaagtaaatgtcatctgaagtaagagagagaattgtatccccctttctttgtccttatccaataattaaagctaaaatggaaataactgggacacagtcattgaccttgcagatgacaatcataagaacaacaaagcattatatgaacgtcaagtattgttttgttaccagrcttgatttttcctggtaacagcgacgatggcagtaacagcagcactggtaacaagcacacagtgctttctatgtggcaggcacgctaactcattcaagccacgcaacacccttatgagaaagatactttcgttatcttctatgttatgatggagaaagggaggcatagagaagctgaggaatttgcccaaagtccacagctctgaagtcaactcaggtggtttaaattgagagggcatgctctaaatttttaaacttgtgaaattttctttgtttaaaatatccaagttcttgataaatacttcta

SEQ ID NO: 81229 - DNA, 1027 bp, Homo sapiens
tatgcttctattttttatttacgattttgacatcaacttttcaactgatttttttttctttactaggtccattatcttggcagagaagttggagcaaaattttgggagctcctccttgtcattattcgatgtccctttttggttctttcagctaccataaataacccaaatcttctcaccaagtaggtataggtaaaaagagtggttgttatatattcagtggttgaattatatactgtctatatggtctgaagtctttaaggttttttctatgataactttcaaataaatttattacccaatctttgaaacgtcagtggtcttgctttgttgcccaggctggccttaaactcctgggctgaaggaatcctcccacctcagcctcctgagtagctgggaccacaggtgtacattaccatgtctggctttctcaaatttttttgaagatatatttcctggaagttagagaaggaaaacatcttctccaaagaaaatcaaggtctcccatagccagatctgaaattgtgcaggacaatttctaaaaattttcaagtaaatgtcatctgaagtaagagagagaattgtatccccctttctttgtccttatccaataattaaagctaaaatggaaataactgggacacagtcattgaccttgcagatgacaatcataagaacaacaaagcattatatgaacgtcaagtattgttttgttaccagacttgatttttcctggtaacagcgacgatggcagtaacagcagcacyggtaacaagcacacagtgctttctatgtggcaggcacgctaactcattcaagccacgcaacacccttatgagaaagatactttcgttatcttctatgttatgatggagaaagggaggcatagagaagctgaggaatttgcccaaagtccacagctctgaagtcaactcaggtggtttaaattgagagggcatgctctaaatttttaaacttgtgaaattttctttgtttaaaatatccaagttcttgataaatacttcta

SEQ ID NO: 81230 - DNA, 1027 bp, Homo sapiens
tatgcttctattttttatttacgattttgacatcaacttttcaactgatttttttttctttactaggtccattatcttggcagagaagttggagcaaaattttgggagctcctccttgtcattattcgatgtccctttttggttctttcagctaccataaataacccaaatcttctcaccaagtaggtataggtaaaaagagtggttgttatatattcagtggttgaattatatactgtctatatggtctgaagtctttaaggttttttctatgataactttcaaataaatttattacccaatctttgaaacgtcagtggtcttgctttgttgcccaggctggccttaaactcctgggctgaaggaatcctcccacctcagcctcctgagtagctgggaccacaggtgtacattaccatgtctggctttctcaaatttttttgaagatatatttcctggaagttagagaaggaaaacatcttctccaaagaaaatcaaggtctcccatagccagatctgaaattgtgcaggacaatttctaaaaattttcaagtaaatgtcatctgaagtaagagagagaattgtatccccctttctttgtccttatccaataattaaagctaaaatggaaataactgggacacagtcattgaccttgcagatgacaatcataagaacaacaaagcattatatgaacgtcaagtattgttttgttaccagacttgatttttcctggtaacagcgacgatggcagtaacagcagcactggtaacaagcacacagtgctttctatgtggcaggcacgytaactcattcaagccacgcaacacccttatgagaaagatactttcgttatcttctatgttatgatggagaaagggaggcatagagaagctgaggaatttgcccaaagtccacagctctgaagtcaactcaggtggtttaaattgagagggcatgctctaaatttttaaacttgtgaaattttctttgtttaaaatatccaagttcttgataaatacttcta

SEQ ID NO: 81231 - DNA, 708 bp, Homo sapiens
cagcaagcgttataaaatatcatgcatctaccatttaaataaaaaatataactattaatatgctatcatatcatagcatatcatatcatagcattatactcattttcaaatgctattaagtgaagaaaaaataaaatacgtaaaaagtatgtacacacacaaaggttttcaagaaacaaaaatgttgctgtggtatgtactggaaaatttataagggttttatataatttgttcatgatataatgttaatgcatattcaggtactaccttgagtactttcaaattcatagtagaaggcaatattctttaacaattgctcatcatacaagtctgaaacatgatttaaattcagattccagcatccaaaaacgtttaagttgcttaaaatgaaatattcacaccacttgttctgaaaattaaaaataaaacattattagcagggaggcatggaataatttcatactcctggttaaccccctataaggtaggtcacaagggacatttctgggtggaatgataaagtcattacaatcacaaatattacagatggtgatctataagtccccaaactaatgctttcatatctttacttttaaaastgggaattgcactgcttatcctagtactcattatttaccttatagtacgctgttcccttaatgtggtactaaaactatagatgacaatactaacacctttgtcatgcag

SEQ ID NO: 81232 - DNA, 1060 bp, Homo sapiens
  misc_feature (1)...(1060): n = A,T,C or G
ctgttttatcattcactactagtctatttaatctaatgaatgatactattttaccattataaaatatactagtatctatggatactatactatctataatactataatctataatggttagtatctgtagatacyagtctataatgtctatagatctatatactataatactgtagctactacagatactagtctattttatcatccactttctcttataaaacattaaaatttatcaaaatatacatacacaaacacagagtgtaaatggcatcacttgcagtagaaacataaacaaacataaagatgcagtattaaatcataactgcataaaattaactgtagtacatactctactactgtcataatgttgtagccaccttctgttcctattgctgtgagctcaagtgttacaagtatccacnnnnnnnnnnnnnnnnnnnnnnnnnnnnnnnnnnnnnnnnnnnnnnnnnnnnnnnnnnnnnnnnnnnnnnnnnnnnnnnnnnnnnnnnnnnnnnnnnnnntgtgaaaataagttatgagaatagcatgaataaataaaattaataattatttaaaatgcaattttttatcttttctgctttttcctgaagaatatttccagatttcaaatgcactaagtaacattgttttgtatattaaatgttaatcagtgccaaattatgaactacatcttaaacatggaatattttgttcacctgtaggttactggtcataaaactgagaaaatcagctcatgtaagttacattaattataattcacaaacattattatttctgccaagtttataattgaggccgtttattttccaggaagtacaagagcagctgtgggctataactgagaatagtcgtctttgcatttttcattgttgcttggtaattgcctaattttttctttgatattcccttatataaggattccaattaaaaatatgatgttttcattccaccctttatattaatcctatattcactgtttttgaatttttaacccatgagagttctgttttctcccatttaattcataataatagaa

SEQ ID NO: 81233 - DNA, 642 bp, Homo sapiens
atcctgtaacactacatggaatgttacccactgagtgctacaaccagactttgttgagagaaataaatttataatttgttaacacaatgaaatattgtgattctttctcaccagagtaaacagacttaatcaacaagaccactagaagagcaatagtctatttatattggttatcttagcatttagtctactgtccagcacattttcataaataactgaatattttatatttaatatactatgtacgtattgaaaaataatttgtttaaaaataatacatggtcttttagctatttagcttaatagcttaaagctattttagttcttagcatacatatatatgtatttatrtatatatatgtgtgcatatatatctgtgtattttcccaaatgtttatatatataatacacatattacagtgagaatgaccctttgtatttcaaagactatgtattaaaaaaaatagcacagtctaattttcttttcattttgaacatagagttttagtggtgaagcttagtgttaagaggcatttataaccttcagtaaggcaattccatgtaacaaaaccaaactaaatattgtttggtgagcttttccttcctatttcaaatattccttccctgatgtttgtcagtgat

SEQ ID NO: 81234 - DNA, 642 bp, Homo sapiens
atcctgtaacactacatggaatgttacccactgagtgctacaaccagactttgttgagagaaataaatttataatttgttaacacaatgaaatattgtgattctttctcaccagagtaaacagacttaatcaacaagaccactagaagagcaatagtctatttatattggttatcttagcatttagtctactgtccagcacattttcataaataactgaatattttatatttaatatactatgtacgtattgaaaaataatttgtttaaaaataatacatggtcttttagctatttagcttaatagcttaaagctattttagttcttagcatacatatatatgtatttatgtatatatatgtgtgcatatatatctgtgtattttcccaaatgtttatatatataatacacatattacagtgagartgaccctttgtatttcaaagactatgtattaaaaaaaatagcacagtctaattttcttttcattttgaacatagagttttagtggtgaagcttagtgttaagaggcatttataaccttcagtaaggcaattccatgtaacaaaaccaaactaaatattgtttggtgagcttttccttcctatttcaaatattccttccctgatgtttgtcagtgat

SEQ ID NO: 81235 - DNA, 1294 bp, Homo sapiens
tccagtaagtagaaaaagatgcaatacaaatattactgtacaatcattaactacattataaacaagagcactgtctcctaatgtctagaaatctagaaaagtgtatgatttataatacacagtacagaagaagaaaaagaagaagaggaggaggaggaacaagaggaaggagaaagaaaaaaataacataagcagaatagaaagagtgcaatattagaagtaccataaatgttatgcttatttagcacgttaaggactatcctatggatggaacggaggtaaaggaagaagagtgatggggactgtatcatggaagaagaagcttttgaactaggccttaagaaacattcaggaattctaatagtggggttagtaatggaatagtaatggaattggggctggaacacagcatttaaaatattttatatttaaagcaataataaagatctgagaattcaaacctgacagcatgaaaaaataaaaatgcggctataagcaacaacacaaatgaatctcatgaagataattttgagggaaagtagagagatgtaaaaattatatacaatgtaattccagtgtgatgttcaaacaggcttttagcagtctggatcctggttaccctggagagagagygtctgcttagtgattggcaggagtcttaaagggggcttctggagtgctgctcaggttctgtttcttattcttggtgctgattaaataaacagattcagattatgaaaattgattgagatgtacattatgatttttacagttttctaaattaatattctagtgcagacaaagtttattttcaaaatgaaagctatatatgagttatgttttgcataaaaaatataaatggtggaatttgcctaatgattgaattaatactggaaaacagggagagacatatttggaagctggaatgagattgtgataagctgtaaaaaactgttctaagaaatttcaatgtgctaaaataatgcacaaaaaatctgaatagtgacatatgtacagtttagttttaccaaactaatctaaaattaatgtagataatgaggtataggcagtgggaagtaggcaatgacatgattaggctttggaacagctgatcaaacagaccagacaatagtttatgcagcaatgcattagtgtgaaagcagtgagaatattctcaaaagccagtcacttgatgtattaaaaatatcttgcaatttaataggattaagctaaaaaggaagtatgatgtaaagccactataccttctacctaatgatactatagaagcttatat

SEQ ID NO: 81236 - DNA, 1294 bp, Homo sapiens
tccagtaagtagaaaaagatgcaatacaaatattactgtacaatcattaactacattataaacaagagcactgtctcctaatgtctagaaatctagaaaagtgtatgatttataatacacagtacagaagaagaaaaagaagaagaggaggaggaggaacaagaggaaggagaaagaaaaaaataacataagcagaatagaaagagtgcaatattagaagtaccataaatgttatgcttatttagcacgttaaggactatcctatggatggaacggaggtaaaggaagaagagtgatggggactgtatcatggaagaagaagcttttgaactaggccttaagaaacattcaggaattctaatagtggggttagtaatggaatagtaatggaattggggctggaacacagcatttaaaatattttatatttaaagcaataataaagatctgagaattcaaacctgacagcatgaaaaaataaaaatgcggctataagcaacaacacaaatgaatctcatgaagataattttgagggaaagtagagagatgtaaaaattatatacaatgtaattccagtgtgatgttcaaacaggcttttagcagtctggatcctggttaccctggagagagagtgtctgcttagtgattggcaggagtcttaaagggggcttctggagtgctgctcaggttctgtttcttattcttggtgctgattaaataaacagattcagattatgaaaattgattgagatgtacattatgayttttacagttttctaaattaatattctagtgcagacaaagtttattttcaaaatgaaagctatatatgagttatgttttgcataaaaaatataaatggtggaatttgcctaatgattgaattaatactggaaaacagggagagacatatttggaagctggaatgagattgtgataagctgtaaaaaactgttctaagaaatttcaatgtgctaaaataatgcacaaaaaatctgaatagtgacatatgtacagtttagttttaccaaactaatctaaaattaatgtagataatgaggtataggcagtgggaagtaggcaatgacatgattaggctttggaacagctgatcaaacagaccagacaatagtttatgcagcaatgcattagtgtgaaagcagtgagaatattctcaaaagccagtcacttgatgtattaaaaatatcttgcaatttaataggattaagctaaaaaggaagtatgatgtaaagccactataccttctacctaatgatactatagaagcttatat

SEQ ID NO: 81237 - DNA, 1294 bp, Homo sapiens
tccagtaagtagaaaaagatgcaatacaaatattactgtacaatcattaactacattataaacaagagcactgtctcctaatgtctagaaatctagaaaagtgtatgatttataatacacagtacagaagaagaaaaagaagaagaggaggaggaggaacaagaggaaggagaaagaaaaaaataacataagcagaatagaaagagtgcaatattagaagtaccataaatgttatgcttatttagcacgttaaggactatcctatggatggaacggaggtaaaggaagaagagtgatggggactgtatcatggaagaagaagcttttgaactaggccttaagaaacattcaggaattctaatagtggggttagtaatggaatagtaatggaattggggctggaacacagcatttaaaatattttatatttaaagcaataataaagatctgagaattcaaacctgacagcatgaaaaaataaaaatgcggctataagcaacaacacaaatgaatctcatgaagataattttgagggaaagtagagagatgtaaaaattatatacaatgtaattccagtgtgatgttcaaacaggcttttagcagtctggatcctggttaccctggagagagagtgtctgcttagtgattggcaggagtcttaaagggggcttctggagtgctgctcaggttctgtttcttattcttggtgctgattaaataaacagattcagattatgaaaattgattgagatgtacattatgatttttacagttttctaaattaatattctagtgcagacaaagtttattttcaaaatgaaagctatatatgagttatgttttgcataaaaaatataaatggtggaatttgcctaatgattgaattaatactggaaaacagggagagacatatttggaagctggaatgagattgtgataagctgtaaaaaactgttctaagaaatttcaatgtgctaaaataatgcacaaaaaatctgaatagtgacatatgtacagtttagttttaccaaamtaatctaaaattaatgtagataatgaggtataggcagtgggaagtaggcaatgacatgattaggctttggaacagctgatcaaacagaccagacaatagtttatgcagcaatgcattagtgtgaaagcagtgagaatattctcaaaagccagtcacttgatgtattaaaaatatcttgcaatttaataggattaagctaaaaaggaagtatgatgtaaagccactataccttctacctaatgatactatagaagcttatat

SEQ ID NO: 81238 - DNA, 869 bp, Homo sapiens
tgtttagagattgcagaacagccatcagttttatccagaacacctgtaaatagttttttgaaacaaattatcagagccaaaaaacaaaataattcttgcatctactcctcttcctttttgaattgacatatctaaacaaaaaccaaaaggaacacgtaaatcaggctttactgcgatgaagagatagtgtcctatctcattttactaagaggacatatgtaaatgctgagttatttcttctctcacgacacatctgtgtattgttcaggggaccagcattctgccaaaaacaagttaggaacactagataaatgagaagactttgaactagagacagagagatctgggatgttgatgtggctttgttacaaatgggtccaacggcctctgggaaagaccatctctctaagagtctgcgttcctcctttgtgaagggtaatgaggtggggtgggaggtgcctgggggtgggggtgggtgggattaatttagagttgttttccgatgaggtagccactagccacacgtggctatttaaatttaaatgcaaaataattaaaattaaatagarttgaaaattcaaattttcagctgcaccagctgcattaaaagtgctcgaaaactacgtgcggctaatggctaccatattggacagcacagatgaaacatttccatcattgtagcaagttttatttgcagtacctgcctagattggaaatcatagtgtaggattctattctacctctcctctgcatattgcccctgtgacagacattgctaatcgatcacagcattcttgtctactataccttgatgtgtcttcaccatcttcctcggagatccatttgtgctcaattgacctggaatatgc

SEQ ID NO: 81239 - DNA, 869 bp, Homo sapiens
tgtttagagattgcagaacagccatcagttttatccagaacacctgtaaatagttttttgaaacaaattatcagagccaaaaaacaaaataattcttgcatctactcctcttcctttttgaattgacatatctaaacaaaaaccaaaaggaacacgtaaatcaggctttactgcgatgaagagatagtgtcctatctcattttactaagaggacatatgtaaatgctgagttatttcttctctcacgacacatctgtgtattgttcaggggaccagcattctgccaaaaacaagttaggaacactagataaatgagaagactttgaactagagacagagagatctgggatgttgatgtggctttgttacaaatgggtccaacggcctctgggaaagaccatctctctaagagtctgcgttcctcctttgtgaagggtaatgaggtggggtgggaggtgcctgggggtgggggtgggtgggattaatttagagttgttttccgatgaggtagccactagccacacgtggctatttaaatttaaatgcaaaataattaaaattaaatagaattgaaaattcaaattttcagctgcaccagctgcattaaaagtgctcgaaaactacgtgcggctaatggctaccatattggacagcacagatgaaacatttccatcattgtagmaagttttatttgcagtacctgcctagattggaaatcatagtgtaggattctattctacctctcctctgcatattgcccctgtgacagacattgctaatcgatcacagcattcttgtctactataccttgatgtgtcttcaccatcttcctcggagatccatttgtgctcaattgacctggaatatgc

SEQ ID NO: 81240 - DNA, 869 bp, Homo sapiens
tgtttagagattgcagaacagccatcagttttatccagaacacctgtaaatagttttttgaaacaaattatcagagccaaaaaacaaaataattcttgcatctactcctcttcctttttgaattgacatatctaaacaaaaaccaaaaggaacacgtaaatcaggctttactgcgatgaagagatagtgtcctatctcattttactaagaggacatatgtaaatgctgagttatttcttctctcacgacacatctgtgtattgttcaggggaccagcattctgccaaaaacaagttaggaacactagataaatgagaagactttgaactagagacagagagatctgggatgttgatgtggctttgttacaaatgggtccaacggcctctgggaaagaccatctctctaagagtctgcgttcctcctttgtgaagggtaatgaggtggggtgggaggtgcctgggggtgggggtgggtgggattaatttagagttgttttccgatgaggtagccactagccacacgtggctatttaaatttaaatgcaaaataattaaaattaaatagaattgaaaattcaaattttcagctgcaccagctgcattaaaagtgctcgaaaactacgtgcggctaatggctaccatattggacagcacagatgaaacatttccatcattgtagcaagttttatttgcagtacctgcctagattggaaatcatagtgtaggattctattctacctctcctctgcatattgcccctgtgacagacattgctaatcgatcacagcattcttgtctactataccttgatgtgtcttcaccatcttccycggagatccatttgtgctcaattgacctggaatatgc

SEQ ID NO: 81241 - DNA, 1244 bp, Homo sapiens
tgcataagaagaatctctagttacactggtgtaattctccaggcttttctcttytctggttcgaaactgctctggatcacgtggctttccagggagacctgtgggattaagaagagagtgggcctacaaccccatttccagttgtctactatagaaaacaaagtacaggctctcatctgaatctgtgggcagagtctggctgggctctctataatccttccctggtcttccctggctctgtaactaagagttgagcacttccacactctctccccacaagtcttgatgctggaaaggaaagcattgcaaagccacagctcagtgttgcagctttgttttcacgcaaatcttaaactctctttgttctcacctctgtcatccctttacttttatttacctgatgctaggaaagagttaggtctaatggctgagacatgaaaaatgtcaaagaccagcatgagaactaggcccaggggtgcctcttccagtctctttctcaagtagctttctcagttttgggggacattgacgaagtctcccacaatatcttacactaagtagttgtttgataaatatgtattgaagtaaggtctttatctcccccaataccgcatgtgagaggccacgaataaacctgcctgcttcactcacatgtcagcacgggcttgtttatctggttaactcacagacctatccatctgttagaatagctgggcgttgtggcgggtgcctgtaatcccagctacttgggaggctgaagcaggagaatcgcttgaacccaggaggcagaggttgcagtgagccgagatcatgccactgcactccagcccgggcaacaaagcaagactccatctcaaaaaaagagaaaagtcccctttcattctctggaactccttaggccctgatagaatgagtcaagggcagacatcttttgaggcctggggcagtggggggaggacaagcagggagggagtggtagatccagagaggccctgccacagagaaaggtagaagggaatggagtcaggaaaggtggaggaaagcccttcaataaagcttgggggacctcaaagatagccagtgataatggcaacaataatatgataattgccactgggcaaggattggaagataaatcattttctctcttgctctccaggggatgtttatggattgctttttcttttacttttcagtgttcaggcccaggaacagtaggaagggatccctgggccaatgccaca

SEQ ID NO: 81242 - DNA, 1244 bp, Homo sapiens
tgcataagaagaatctctagttacactggtgtaattctccaggcttttctcttctctggttcgaaactgctctggatcacgtggctttccagggagacctgtgggattaagaagagagtgggcctacaaccccatttccagttgtctactatagaaaacaaagtacaggctctcatctgaatctgtgggcagagtctggctgggctctctataatccttccctggtcttccctggctctgtaactaagagttgagcacttccacactctctccccacaagtcttgatgctggaaaggaaagcattgcaaagccacagctcagtgttgcagctytgttttcacgcaaatcttaaactctctttgttctcacctctgtcatccctttacttttatttacctgatgctaggaaagagttaggtctaatggctgagacatgaaaaatgtcaaagaccagcatgagaactaggcccaggggtgcctcttccagtctctttctcaagtagctttctcagttttgggggacattgacgaagtctcccacaatatcttacactaagtagttgtttgataaatatgtattgaagtaaggtctttatctcccccaataccgcatgtgagaggccacgaataaacctgcctgcttcactcacatgtcagcacgggcttgtttatctggttaactcacagacctatccatctgttagaatagctgggcgttgtggcgggtgcctgtaatcccagctacttgggaggctgaagcaggagaatcgcttgaacccaggaggcagaggttgcagtgagccgagatcatgccactgcactccagcccgggcaacaaagcaagactccatctcaaaaaaagagaaaagtcccctttcattctctggaactccttaggccctgatagaatgagtcaagggcagacatcttttgaggcctggggcagtggggggaggacaagcagggagggagtggtagatccagagaggccctgccacagagaaaggtagaagggaatggagtcaggaaaggtggaggaaagcccttcaataaagcttgggggacctcaaagatagccagtgataatggcaacaataatatgataattgccactgggcaaggattggaagataaatcattttctctcttgctctccaggggatgtttatggattgctttttcttttacttttcagtgttcaggcccaggaacagtaggaagggatccctgggccaatgccaca

SEQ ID NO: 81243 - DNA, 1244 bp, Homo sapiens
tgcataagaagaatctctagttacactggtgtaattctccaggcttttctcttctctggttcgaaactgctctggatcacgtggctttccagggagacctgtgggattaagaagagagtgggcctacaaccccatttccagttgtctactatagaaaacaaagtacaggctctcatctgaatctgtgggcagagtctggctgggctctctataatccttccctggtcttccctggctctgtaactaagagttgagcacttccacactctctccccacaagtcttgatgctggaaaggaaagcattgcaaagccacagctcagtgttgcagctttgttttcacgcaaatcttaaactctctttgttctcacctctgtcatccctttacttttatttacctgatgctaggaaagagttaggtctaatggctgagacatgaaaaatgtcaaagaccagcatgagaactaggcccaggggtgcctcttccagtctctttctcaagtagctttctcagttttgggggacattgacgaagtctcccacaatatcttacactaagtagttgtttgataaatatgtattgaagtaaggtctttatctcccccaataccgcatgtgagaggccacgaataaacctgcctgcttcactcacatgtcagcacgggcttgtttatctggttaactcacagacctatccatctgttagaatagctgggcgttgtggcgggtgcctgtaatcccagctacttgggaggctgaagcaggagaatcgcttgaacccaggaggcagaggttgcagtgagccgagatcatgccactgcactccagcccgggcaacaaagcaagactccatctcaaaaaaagagaaaagtcccctttcattctctggaactccttaggccctgatagaatgagtcaagggcagacatcttttgaggcctggggcagtggggggaggacaagcagggagggagtggtagatccagagaggccctgccacagagaaaggtagaagggaatggagtcaggaaaggyggaggaaagcccttcaataaagcttgggggacctcaaagatagccagtgataatggcaacaataatatgataattgccactgggcaaggattggaagataaatcattttctctcttgctctccaggggatgtttatggattgctttttcttttacttttcagtgttcaggcccaggaacagtaggaagggatccctgggccaatgccaca

SEQ ID NO: 81244 - DNA, 595 bp, Homo sapiens
tgagccaagaatcgcttctggctctggcccacgtgggcagcaaaggaagaagctccagaactcatctccccaccagaaccaggagctcatggtcaactccagggcaatgtgggaacggacccaggaagttcagtaatgcagggaagaggcaagaaaaagaagtaccttaagcaaaggactcaggacactggaggcccccagtcaaggggaactgttttcacygctaagatgataagaaatcacaaccttaaccaggctaacttaactctcacagcctcccctactgcctttgtcttcttctgccctctcctaaatgctccttcttgccttaagctttctgagtggtccctttgacatttccacaaggatcccaacatgcccaccattggacccatgcctgccctcagcctgagccctctactggccttggctcaccctctctagaatcacagtcctatctggctctccttcttcatcaaccacctgccaccaaggtctgtcgtctctactcttcacatgcttctcaaactggccgttctcctcatcctgattgccctcccttggtgcagactcatcatctctccatgggctgttg

SEQ ID NO: 81245 - DNA, 740 bp, Homo sapiens
tttttggagagaacatttaacacccacttttctagcatttctggagcacagtacagattaagtatcccttatccaaaatgcttgggatcagaagtattttggattttaattttggaggaatttttggaatatttgtattatatatttaccacttttgcattcctagtccaaaaatcygaaatccaaaattctccaaagagcatttcccttaagagtcatgttgatgttcaaaaagttgtgaagtttggatcattttccagatacagatactcaacctgtgttgttacagaggtggttgttgctattgctgttctttggtgtatttgttttgtttgtcaaatagaagaaataaaaggcatagacaagcagattgaatggggataattgaaggagagtcctatttctcaatatttctttgccttatctgtcttagtctgtttcctgttgctataacagaataccacagactaggtaatttataaagaacagaagtttattcagctcacatttgtgaaaaatgcaatgtttgaccatggtgtcattatcggttgaaggccatcatgctatgttattccattgcaaaagagtgaacagacaaccaattgtgtgtgaaaagaaagtatgagggaccaactttgcttttagaataatgatataataatctgcaattgagataaataatcctctttcatgacaacattaattcatcaatgagggatctgtctttgtaaatcaataaa

SEQ ID NO: 81246 - DNA, 329 bp, Homo sapiens
tcaaacatacagaaaattttggaaaatcaaagatgaatggtgtttccatgtgaaagaatggcccaaataactctacagaattttttcgcatttgcttcgtcacatacccagtatctgaactagaatcatgtatgctaactggttcctatgaacacagtggaggtttatttctcctacaaaggaatatatccttgggactcagtcctttaaacactcactgtaaattatctgcagacaragttacagtcatcctcccactcatgtcaaatccctgaaaattatattattttctcaagtaatatacttatttgaaatgtgtatgtattcat

SEQ ID NO: 81247 - DNA, 329 bp, Homo sapiens
tcaaacatacagaaaattttggaaaatcaaagatgaatggtgtttccatgtgaaagaatggcccaaataactctacagaattttttcgcatttgcttcgtcacatacccagtatctgaactagaatcatgtatgctaactggttcctatgaacacagtggaggtttatttctcctacaaaggaatatatccttgggactcagtcctttaaacactcactgtaaattatctgcagacagagttacagtcatcctcccactcatgtcaaatccctgaaaattatattattttctcaagtaatatacttayttgaaatgtgtatgtattcat

SEQ ID NO: 81248 - DNA, 1130 bp, Homo sapiens
atattcacacatacacactttttttttttaatttgccagatctgtcctagaccaacttctccaaatctatatttcagggaccagaaagacaaatctaatatctcaagctcttgtatacaatattttcaactccatggatcatagtcttataatgaaactagcgaaagccctcaaaactttatgacaccatttttattgcgttttataaaatacttttctgaatctacagattgtgatcatatttgttttctattttaaatccctttaattgttcctcaagcagtatataacagctttgtgaaatgcaattcctatagtaataaaaagaaaattctagggtttttaaacaattaatgaagttgtaatggtgacttttcaagctaatagtttttttagcctacgttagatcatgctaactcaaaagcttaatttcagtacaattgtttcattcatattagcacaatgccacaaaaaataactacactattattctaggaatgcaaaagaggcaaggatatctcttagctaccatctcaataaccaccgttttaccaactatgataaatctctagaaaatatgagtctatctaggaagattttatgaattttaagatgcactttaagtgatcaataattgtttttctcttagaagaagcatatttgtaggaatatacttaatataaaagaaagttacaactggcttaggtctacttcaacacattacagtgtttaaagcttagtgctttaaagagacaaagatatttagtaatttttcttaaagaaaaattactcaattctcccatttcttaagctatggaaactctcatcttccaaataatgctgctcatatttatggatcactatgttaagtggtttttattatataattaatatttataacaatgatataggctatttttaatataagtatccattttaatgttagaaattgaaggacagagatgttaataattttctccagatcatacatagccaagacaggatttcattcataagaagttgacaactgtggtcccttgtccgtgaagctgaatcacctacactgccagttagctatccgggagtccattctcaagtgattgtgctcttttaraaagataatcatgcaa

SEQ ID NO: 81249 - DNA, 1359 bp, Homo sapiens
tctcagtagattggggtgagcactgctctaatagacttccctgcttgtactccagttccctgttgtccatgctcagcacagcggccagggtgcttaaccattaggtcagattttgctgctctttgctcattcttgcaatggcttcccactctactaaaaataatagccgaagtgtttaaactacatgactgatccctatttgctcgccgacttcaccagctatgggtcctttgctaactcggcttcagatacttttattttattttattttccaacactcctgcttaggccgttggtcctggttcatctgtctgcccaggctagtctttctgcggatatttaaatgcctcattgtttaactccttcaagttttgctcaaatcacgcccactcaatgaacccaacttcagctaccttattaacaatgtcaagcaaccatcaccacccaacatggcattcaacattcccttcatctattctgattttttatctgtttttcccatggccccttattgtattctaatttacaacataatttacttatttgttataattattgtttgttatgtgactcttcctctctagttagaatgttggtcatctttatgtgttttgtccaacgacatatcagagcacccaaaacaatgggttttgggtattcaatacaatacaatgactagtaggtactcaataaatattggttaaaaatactaagtttttactgtatgtggttgcatatatgtcttcactcttgctctttatattttaaaaacaartaactattaaatacttattctatgttaggcataattctgattattttacatgtcactggatgcttataagaattttgtggtatgcatctttccatagcagtgaaacgcagtggctaaaggcagaaattagggatatagtacagtagacaaaatctcagaatttcaagttattaaacatggatgtaagtcttggctctgccacttcctgggtataatgccttgagcaagtgatataaccccctcttgcctcagtacctagacttcctcatttgggaaaccaatatagtccattatagtacagccctcataatatcattgttactagaaaggagttaacacatgtaaagtattaggatgacatctggaacagagcatgtgctaaactaatgtaagctattattcttacaattaatattttgtcagtttttcatattatggacctgagacttagagaagccaattaacttggccaaggtcacatagatagtaaagaggcatttaggcctttgaccccaaaactgtgcttttaaccaccatgcaacaagaaacacaaaaagaaaagtcttttggggggaaatatgatg

SEQ ID NO: 81250 - DNA, 1288 bp, Homo sapiens
atgcataatcgtcatgcccacaatttctattcatccatttaatcagtggttggagttcacataacagaaattacactcagaagaaaacataggagaacatccctgagcaagtcaaagtcactgattttttaggttatttaggcctgatatgtaatattttccccactggcccttctagatagagatttaaataagactgcactattgataggtcatctttttgtaaattaaaaactaataaataagttttataaatttgccatctcatataataaaattagtttaggaatttgctggaggtattgttaaatttcaaatagctatctcatgtataattatttcatttaaattatttaaaacatttctaacctttcataccaaacaacctttcttttatttgtgacacagaaaatagagtgctcaaaataagtatagctgatagaaccaagaagaatttgaaatgattttcattctaaagtgcccttttttttttttttagaattttggaagttgtgtctttctttattgaggagattcttggtataagttcaattagtgatcataattggtggatatgcagaagataatgaaacgtgaatgttcatgattcccctgtcagtttctgacctccagtgctttgcttttacaggagacatcacatgaattagaagcagctgcaaaaaccatgatggagaaaaatgaatttgtatctgatgaaatggtatcactttcctctaaagctagatggctagcagaagaattaaacctatttggccaaagcattgactatagatcgcaagtcctgcaaacttacgtggcatttctgaagtcatcagaggaggtatggtactatgtgttaaccttcttcagcaaggtggccactgcccatgtccttgctttctgtggggatatatgctctgccttggtgggtaggtccatatcctctacccctgtgcgtgggctcacttataggccctgtattcttgtaaaccaaagagtgattgcagcagttctcaatctataaaggtttatttagccaaggtcgagatatgcctgggaaaaaattaaaatcccaggagcacctgtgacctgtgckttttccaaaggggggttggggaacttcagtatttaaaggagaaagggcaagcacaaggaaaacaaaaaggagggaggataggcagtgaggcagctggttacattcttgtgaggctctgattagcctcagcaaatctacattttacatgtgaaaacctacatttttacatggggaaaaagtaaattatgcatt

SEQ ID NO: 81251 - DNA, 737 bp, Homo sapiens
gtccaatatttatttcagacttctcacaacttaaaacttcttcaggaagcacttatgcctgtgtctgcacttgacctcggagggagcctccagttcattttagatctacgacaaaaatggaatgacatgaagcctcagttccaggtgaagaaatatattgctggatttgggtgaatggaaaaaatacttaaaactgtttggttgcagtttacctgattaattgtaacaggctggtgaatttctatttttttaaacaaaagtattgcttgtctaaaaatccactgtagagacatttttcttacttttttcctgcattcttttgaatttgatgatataccagcattagggctayacaatgtcctaaatagatttttatattagatttttaaaattcacatggctaattaaactagtaatatatttatcctatattttcactctaattcttttccttgggagtgcagaggtgttttaaattgagacatctcagaacaaggatgggcaacctcggacccagaggctctgctgccctgggtccctgaggtgaccactgttatgtcactgtcctcacccaccagcaccccaggcacgtaccatcaccccaggaattttgctgtgccctccactccacctttcaggatatgagcaataaaaccatgagtcatgttcctgaccctgactgcttaacacagtccctatttccccacctcctgcctctccaaaatgtgacacaaccg

SEQ ID NO: 81252 - DNA, 1153 bp, Homo sapiens
atgcataccatgatatcatatactgtccattactattccaataataagaactctttttcagagcagcatattagttatttactaactggtcccttctttccttttctttcttcttttttcttttgttcattcatttttttcttttcttaattctgaatgtcacataaacatataaaggcctaaaggcaaggatcttgacaatattgcaaggtgtattagggttctctagagggacagaactaatatgtatatagggaagaatatatacatacatatatatatttatataaagggaagtttgttaagtattaattcacacaatcacaaggtcccacaatatgctgtctgcaagctgaggagcaaggagagacagtccaagccccaaaactgaagaacttggagtccgatgttcgagggcaggaagcatccagctcgggagaaagatgtaggctggcaggcagggtctagaaaagtctaagaacagtgactagacaatcagcttaagaggacagacacttgactttatgtttataacatatggtccatcttcttggctcttgagttacctgaattgcatcatgtcaagatgacgcaggcttccagattatagtcacttcttccctctagttcccgtaagaattaaaatgatttgactttagttccaacaaacataacgtaacattaatgtgcttcacattaggtcaaatgagtctaaaaatacacacacgcacactacatacccacacacaaatatgcacaaacgtatcttaaatagatagccaattggtgaacactccaaaacagaaagatcatacrtttctagtgtttctttgccttatgactggcagattctttgtaacacaaatctctcagtgggaataattttcaaagtatataatatgaaaccagttgtttctgaataaagcaatcaaatagaattatagcagatgccatctatgggggtggaaatggtgccaccaatacagataccaccacttaagtaaaggagaaaaatgtttaaataagtacatggcgtcatcttgttaacataactatactacattagttgtcagtaaatttaaactgttaaacattaacatattaatcactatataaataaatacaagatatgaaatactcaagaaattgaaaa

SEQ ID NO: 81253 - DNA, 1877 bp, Homo sapiens
aaattattaggttgtgatgtttaccttttgtggtgatttccctaaatgaaataggctaacttaatagaagggagggtctgtttatgttttatccacaataaacctcaaatatagacttttttaaaaaggctcttaaatctgattggctgttattatctcctgggaaagttttaaaaacacatatttccaggctcaccccctatccactgaatcataatttatattggtagggtgaaaaaaataaggatttaaaaaaaaatctgaagcattttatttgcaatcasggacaaggaaatgacacttacaatcagacaaattttggaaccactgatccagaatattctaaggtatttaatgaataggtaatatttgatttagaataattgatatataattataccaaaaattggaagatagattctataaaaatagtagtttaaaccttaaaactttcaactaacttgactctgaaaattacattattggattaatgacttctaaatctaaaatttaactttagttttacaaattacttcattcactcaataagtattgagctagcctgtggaagatagaatgacaaataaacaaaatcctcacccttaggcgccttgaatgattgttacaccaatccatcaggagtttaaacagccctgtgcaatattggatatcattagtcttaattcataaagatgaaactgacgcatttcttcctactttcttcattcacatcattgtctcaacaaaggtgccactaatttaaaagggaaaaggatccaaaagtacagctggatataaagaacaagttctaatgttctataacactgtaggatgaccataatatatattttcaaatagctagaagaaaggatattggatgttcccaacacagagaaatgataaatgtttgagatgatggatttgtaattagcccaatctgatatacatacatatgttatatgcattggaacatcactatgtaccccataaatatgtacaattattatgtgtcactttaaagaaaaaagctaagaaaaggtaaaaaatatgatcaggtttttctttcccaaaattgtctatatgcccatgtggttatttttaccttccttgtaaaatttgtgtaactatatttataatagctatgtactctattataggaaaaatccttacctctaatggtatggaagaaatcacttgtcttctaacaaaattcactgaaagctagaattttttcaactcatctttttgcaggctctggttttcagctcaccactaagtatatgcacaggactctcattctatactcaataatctgtgaaccagctgcaaatgatactgggatgggcattccataactctcctacactgaatgtggaaccatctaaaaagcattattcagcaccttttatgaacacaagctcaaacaggaagcaaaacgagtgtgtagcagaaagtgaaatcagtttctgctttggggtatctgagaagccgtcttattgggtcttaaatacgtgcagggatttcagctggtgagcgtagaggtgggcctggggagagagcaaggatgacacaccatgtcccaagcaggagagacagctcgagccagagcactgaagcaagggggtcggtgttatcaagagaatgtggaggacgattctggatcatagagcaatggagctaatggtgtctggagaattaataagagtttcctataggaagcaatatctgagctgagacctcaaacaagctgtgggagttatccaggcaaaaaaggagtggaggtggggtggggagtgaagggtgacagaaaaatgagttattaagaatgaaaagagatataaagtgaataggagatagaaccagtgagatctagaata

SEQ ID NO: 81254 - DNA, 715 bp, Homo sapiens
aaaaaaaaaaaaaaaaagtgtattttgtggaaaacacagcacaaatcgcagggcgtggtaaaaattgcaaagacgaggaaaactcacaacaagtcttaactcttggttctacccttaggatactgctataaacaaaccctaaagtcagactcagaaaaacaaacacaaacgccaccatcatatatgatttaatttgtaaaccaactgtacttcttataaaggaaataaataaaggaagtaaaccactttgacagattatccactgctctctcaatccaaccacctctcataaagtcctaggaaaaggctgggcgtggtggctcacacctgtaatyccagcactttgggaggccgaggcgggtggattgcttgaggtcaggagttcaggaccagcctggccttcatggggaaaccccatctgtactaaaaatacaaaaattagccaggcgtagtggcaggcgcctgtaattccaggtacttggggggctgaggcaggagaattgcttgaacccgggaggcagaggttgcagcgagctgagatcatgccatcacactccagcctgggtgacaagagcaagacttcgtctcaaaaaaaaaaaaaaatcctaggaaatacggtcatggcttccagtaaaacagagaccccagtttgaaaaaaaaagtcatgaaaaagataaatgttgttattttaggtaatgatttggtatcactcaag

SEQ ID NO: 81255 - DNA, 715 bp, Homo sapiens
aaaaaaaaaaaaaaaaagtgtattttgtggaaaacacagcacaaatcgcagggcgtggtaaaaattgcaaagacgaggaaaactcacaacaagtcttaactcttggttctacccttaggatactgctataaacaaaccctaaagtcagactcagaaaaacaaacacaaacgccaccatcatatatgatttaatttgtaaaccaactgtacttcttataaaggaaataaataaaggaagtaaaccactttgacagattatccactgctctctcaatccaaccacctctcataaagtcctaggaaaaggctgggcgtggtggctcacacctgtaatcccagcactttgggaggccgaggcgggtggattgcttgaggtcaggagttcaggaccagcctggccttcatggggaaaccccatctgtactaaaaatacaaaaattagccaggcgtagtggcaggcgcctgtaattccaggtacttgggrggctgaggcaggagaattgcttgaacccgggaggcagaggttgcagcgagctgagatcatgccatcacactccagcctgggtgacaagagcaagacttcgtctcaaaaaaaaaaaaaaatcctaggaaatacggtcatggcttccagtaaaacagagaccccagtttgaaaaaaaaagtcatgaaaaagataaatgttgttattttaggtaatgatttggtatcactcaag

SEQ ID NO: 81256 - DNA, 690 bp, Homo sapiens
tgcaaataaattcattttctgcttaggttagtcagatggatggactgatacacaaatgattaaatcaatgaatgagtaaaagcaacaaagcatcaaagaaagaacaggctcaatttccactacttttggcattctttctcttcctctttccattacttgacttcccaatcttttctgtaatagcaagtaatttttaaaacaaataaayattctagttttctaaaaacccttagggttcttatatcatgtacaaaaataatttataacatattgacttaataattttctactagcctgtgaactagttgaagtagaagctctgtatcctctcctttgggctgatttattttttgaaattaaggaagaaattagaagaatttaaaaaactagcatctttcattcataaaaactagctgagcctagtacaatattaaactcacatttcaataaataaatctactcaggtctttcatgcccacatgtccactgctcagtcagtcttcgctgctccttcttcttcactgtaggaggcccagggagttctgccacagcctttatcactctgtgacctgcaggtactgggacatgcatggggaggatgccaggacacccaggaagttggaatacgaacttagttgcctttgaagttgtgactgtgaccttcacccaacagaagtgggcttggctgga

SEQ ID NO: 81257 - DNA, 582 bp, Homo sapiens
tgagcaggccctttaacaagagttttattagttcccacttgtgtccccctccactcctcctcacactcctcatggtctgctatttgcagagacattcaggtgatttgttctgaggaattgcrgagctcacaggaggcaattctgccactgtaggagttataaggagtgcctacgatgaaagaagaggagaaagatttttaaaaataaaatccccccacccccctacatgcttcaagcagacaagctcaggtgggctcagatagaggggactccagatccccatcacccctgaatgcaaagctgggtggtcggacctcttgggagccaaccaagaacctttgtggctgccagagtttaagagcctggaccaactggaagggtggagtccccaaagctcatggttctcctggtgagcaggagggacccacattcccaccacaggcttccactcagcctggtcccaggttgggatgtgcgtgtgggaacaaaggtcatacttttcctccctagcaccaggccttgtcccctggctgcggataaggtgcagactccttccctagtgattcccagagaagagcacgt

SEQ ID NO: 81258 - DNA, 1192 bp, Homo sapiens
tgaaatgattctacaactcactataacgtagactcagtgggatctctgagcttgttttcctgcaactagactgtccatctggggtgatgggagacagtaacagaatatcaggcattagattctcataaggagtacacaacctagatccctcgcatgcacatttcacaacagagtttgtgctcctatgagaatctaatgctgctgctgatctgacaggacatggagctcaggtggtcatgcaagcgatgggaggggctagaaatacagatgaagtttcccttcactcgcctgctgctcacctccagctctgtggccctgtggttggagactgctgctcaagtgcattcgaaaggatccatcccatgccattcttcagagtcatctttactgctgcagtggtcaacttgtagcacccctaagctcgcaggacatatgcttcaactggcatttcacaatcaacagtatgtggtagcttgagtcattgtgaggtcacttcctggaaatcaccagcatcccatatcccattagcaaggagctcagcactgctccttggataaccaaacctattcccaaatcccatctgtgtgcatctatctcctggtacccttcctagcatcaattctgtatttgtaggagtccaatcaggagacacaaaccactcaaaagtttaaactagaatgagcaagatggctcacacctgtaatcccagcactttgggaggccaaggtgggtggactgctttgagctcaggagtttgagaacagtctgggaaacatggtgaaacctcgtctctacwaaaaacacaaaaatcagctgggtgtggtggcacttacctgtaatcccagctactcgggaggctgaggcaggagaattgcttgagcctggcaggtggaggctgcagtgagcagaggttgtgccactgtactccagcctgggtgacagtgtgagacccggtatcaaaaagaaaaaacatatatatatgtaaatttaatataaaaagtattaattttggccaggcacaatggctcatgcctgtaatcccagcactttgggaggccaaggcagacagatcacctcaggtcaggagttcgagaccagcctgaccagcatggaccaaccccatctctactaaaaatacaaaattagctgggcatggtggcacatgcctgtaatcccaactactcgggaggct

SEQ ID NO: 81259 - DNA, 1192 bp, Homo sapiens
tgaaatgattctacaactcactataacgtagactcagtgggatctctgagcttgttttcctgcaactagactgtccatctggggtgatgggagacagtaacagaatatcaggcattagattctcataaggagtacacaacctagatccctcgcatgcacatttcacaacagagtttgtgctcctatgagaatctaatgctgctgctgatctgacaggacatggagctcaggtggtcatgcaagcgatgggaggggctagaaatacagatgaagtttcccttcactcgcctgctgctcacctccagctctgtggccctgtggttggagactgctgctcaagtgcattcgaaaggatccatcccatgccattcttcagagtcatctttactgctgcagtggtcaacttgtagcacccctaagctcgcaggacatatgcttcaactggcatttcacaatcaacagtatgtggtagcttgagtcattgtgaggtcacttcctggaaatcaccagcatcccatatcccattagcaaggagctcagcactgctccttggataaccaaacctattcccaaatcccatctgtgtgcatctatctcctggtacccttcctagcatcaattctgtatttgtaggagtccaatcaggagacacaaaccactcaaaagtttaaactagaatgagcaagatggctcacacctgtaatcccagcactttgggaggccaaggtgggtggactgctttgagctcaggagtttgagaacagtctgggaaacatggtgaaacctcgtctctacawaaaacacaaaaatcagctgggtgtggtggcacttacctgtaatcccagctactcgggaggctgaggcaggagaattgcttgagcctggcaggtggaggctgcagtgagcagaggttgtgccactgtactccagcctgggtgacagtgtgagacccggtatcaaaaagaaaaaacatatatatatgtaaatttaatataaaaagtattaattttggccaggcacaatggctcatgcctgtaatcccagcactttgggaggccaaggcagacagatcacctcaggtcaggagttcgagaccagcctgaccagcatggaccaaccccatctctactaaaaatacaaaattagctgggcatggtggcacatgcctgtaatcccaactactcgggaggct

SEQ ID NO: 81260 - DNA, 679 bp, Homo sapiens
agcacaattacataggaagggggaattaagagtgcagataaaattaatgttgctcatcagctgaccttaaaacaagattatcctggagtatctaggagagcccatgtaattacaagcattctttaaaactggaagagggaggcagaaggttaagaaccagagacggtgggcacaatggctcatgcctgtaataccaatactttgggaggccagggcaggaaaatcccttgagtgcaggagttcaaggtcagccgyggcaacatactgaggtcccatctctacaacaaaataaaaacaaaattcactgagtgtcacgatgcttacctgtagtcccagctactgggaaggctgacatggtaggattgcttgagcctgggagtttgaggctataatgagccatgataggaccactgaactccatcctgagtgacagggcaaggtcctgtttctaaagaaaaaaaggacattggaatcagggtcctctccatcctgaggtgcctacaaggcatctctctctgcaaacgagtaaacatcaccctccaactccttacagagtggagcagcaggaaaactccttcacctcatttctgtgctgcttgggaggcctggacagcccaataaccagctccttgctgatgaagcaatcaggaaatggctcgagttgagctaaggagaattt

SEQ ID NO: 81261 - DNA, 679 bp, Homo sapiens
agcacaattacataggaagggggaattaagagtgcagataaaattaatgttgctcatcagctgaccttaaaacaagattatcctggagtatctaggagagcccatgtaattacaagcattctttaaaactggaagagggaggcagaaggttaagaaccagagacggtgggcacaatggctcatgcctgtaataccaatactttgggaggccagggcaggaaaatcccttgagtgcaggagttcaaggtcagccgcggcaacatactgaggtcccatctctacaacaaaataaaaacaaaattcactgagtgtcaygatgcttacctgtagtcccagctactgggaaggctgacatggtaggattgcttgagcctgggagtttgaggctataatgagccatgataggaccactgaactccatcctgagtgacagggcaaggtcctgtttctaaagaaaaaaaggacattggaatcagggtcctctccatcctgaggtgcctacaaggcatctctctctgcaaacgagtaaacatcaccctccaactccttacagagtggagcagcaggaaaactccttcacctcatttctgtgctgcttgggaggcctggacagcccaataaccagctccttgctgatgaagcaatcaggaaatggctcgagttgagctaaggagaattt

SEQ ID NO: 81262 - DNA, 679 bp, Homo sapiens
agcacaattacataggaagggggaattaagagtgcagataaaattaatgttgctcatcagctgaccttaaaacaagattatcctggagtatctaggagagcccatgtaattacaagcattctttaaaactggaagagggaggcagaaggttaagaaccagagacggtgggcacaatggctcatgcctgtaataccaatactttgggaggccagggcaggaaaatcccttgagtgcaggagttcaaggtcagccgcggcaacatactgaggtcccatctctacaacaaaataaaaacaaaattcactgagtgtcacgatgcttacctgtagtcccagctactgggaaggctgacatggtaggaytgcttgagcctgggagtttgaggctataatgagccatgataggaccactgaactccatcctgagtgacagggcaaggtcctgtttctaaagaaaaaaaggacattggaatcagggtcctctccatcctgaggtgcctacaaggcatctctctctgcaaacgagtaaacatcaccctccaactccttacagagtggagcagcaggaaaactccttcacctcatttctgtgctgcttgggaggcctggacagcccaataaccagctccttgctgatgaagcaatcaggaaatggctcgagttgagctaaggagaattt

SEQ ID NO: 81263 - DNA, 2786 bp, Homo sapiens
cattaaagaaaatcctaaagaagttctccagagaagtttacttttaaacttcttggaagctcattactggtctctcttttaaaattctaaatatgtttgctttcttgggcatagattgtgtgatttccatgaaaataaaatacagctcgtttagtatgtaaaatagacaaactatacacagaacacatttacttcaattctgcaaagttttgctatttccttcatatctaattaccattctaagtggtggagataaacagtttttgctcttgcataagcttagattcttgggaggcagcaagtcatagaattagataatttcaatgcaatagggtaattgcgatgatttcagttgtaggcataatagtggggcctgggctagcttagacatctatgaatctatgatatatttgcaaaaatgaaaggcaaaattattattttcagcaattgcatagtaataaatgaataaaacaaattatgaatacaatgattataagtttttttttatggttactaacagagaaatgtcacatctcaaaataatctctcgtagtaggtaaaacatagcacctcaaaagcagtagtggtaatgaaggtcgtagtaaatcttcattgccatgtccaataattagatctcataattctttactgtgtggattaacattaggcaatatcttacattatagactggctttttttaaaactttagttatttttcatcatagagtggaaattaaccagaaattgaatgatggtgaaaccttaatagctttagtagtttaaggctattcaagtaattatacagaagaggtctctgaaaaaaatttatagtttacaaaattgtaatagtttcaagacattaatttcttatgtgtcctccaatattgcaaaggcatttttacaagcatgtatttgtgggaaattccaacagagcctgggtaatttcctgttcttttagtatccttgaacttagaacaatcaatttaagttggttttgkatgaatattgaagctgttactttctgtggaaaatttacaattatattctaactatccacctttagaggaataattcatttaaaaaatagcataaccttagataggcagtaatgtaatatttagggaaaaggtataagtaatgtcattccctatgcctatgtgtaggccttgggacggcaaacgttttccttcattacaacctcaacaacagattaaaataaatagtattgccacaggaagcaaaactaatatgtaggaactttacaaaatgcatcttgccagccagcagcagtgcacatataaaatgatgctgaatcaattggatatcatcttgatactagtaccccaccagagagctagttggagagctagttgacacactgatatagatttccctgccacaacctattactgctttacactttttcttagccaggtgactatttcctgtctccaaagactacagcttgggattaacggtatttcttttatcatgtcacattctaaagagtgacttaaatgaggaaactattagaaagtttagatattcatataaaatcatgctgcaggaagttaatataaatatgatgaggtgatagccccatcaaggcattccacaaacaatttcaatacattcaggatgtttcagacaaagaacagagatagatacatagataggcagatatttagtaatattttattcataattttcaaatattctcatggtgacacttattcccatagtctaaaaaataaattttataaaataataaaaatacaaaccacactaggggagaaaatactcacaatcacctatccaataaatgacttgtatcaagaatatataaataacttccaaagttcaataataaaaagccacctaatataaaatcaatgaattatgtgcatatacatttcataacagaagataaacagacatcaattaagcacgtaaaaagatgctcagtcattaaataaatgaaaattgtgaataatgagatactactcctcttagaatgtctaaaattttaaaaagacaaagtatgccaagcgtgggtaaacatgtaaaaatgtgttaactctcatacactactggtgaaaatacaaaatgccaaaaacactcaggaagatagttgggcgtttgtgtaaaaaattaagtggatatatactatgtgacctgtcattccactcttaggtatttacctaaaagaaatgaatacatatgtacatataaagatttctacataaatgttcatagcagctttatttataacagtcaaaaacaagtgaatgcataaaaaattttagtacatctgtacaatgcaatataaaggcataaactattcatgcatgaaaaatgaatggatatcaaaataacaaacttattttattatatacaatttgagaaaaaaaatatagtaacacaaagataatcactggttgcctggaaatggggtgagattggagaggaggacaagaaaaggagaaacgaagattacaagaggacgtgaggacattttgagactagtaatggatatatatatataaatatacatatatatgcatcttaactttgatgaagtgtctatacatatcattggtctattttatattaggtagttacatatatcttacgtatatttatttgtatatgtatattaatatataatcttgattgtgttgagaatttcaacaacttagcaagttgtgtgctttaagtgtgtgctttttattttttatcagacatatagttctacctacatttaggctagttaaatactcttttca

SEQ ID NO: 81264 - DNA, 2786 bp, Homo sapiens
cattaaagaaaatcctaaagaagttctccagagaagtttacttttaaacttcttggaagctcattactggtctctcttttaaaattctaaatatgtttgctttcttgggcatagattgtgtgatttccatgaaaataaaatacagctcgtttagtatgtaaaatagacaaactatacacagaacacatttacttcaattctgcaaagttttgctatttccttcatatctaattaccattctaagtggtggagataaacagtttttgctcttgcataagcttagattcttgggaggcagcaagtcatagaattagataatttcaatgcaatagggtaattgcgatgatttcagttgtaggcataatagtggggcctgggctagcttagacatctatgaatctatgatatatttgcaaaaatgaaaggcaaaattattattttcagcaattgcatagtaataaatgaataaaacaaattatgaatacaatgattataagtttttttttatggttactaacagagaaatgtcacatctcaaaataatctctcgtagtaggtaaaacatagcacctcaaaagcagtagtggtaatgaaggtcgtagtaaatcttcattgccatgtccaataattagatctcataattctttactgtgtggattaacattaggcaatatcttacattatagactggctttttttaaaactttagttatttttcatcatagagtggaaattaaccagaaattgaatgatggtgaaaccttaatagctttagtagtttaaggctattcaagtaattatacagaagaggtctctgaaaaaaatttatagtttacaaaattgtaatagtttcaagacattaatttcttatgtgtcctccaatattgcaaaggcatttttacaagcatgtatttgtgggaaattccaacagagcctgggtaatttcctgttcttttagtatccttgaacttagaacaatcaatttaagttggttttgtatgaatattgaagctgttactttctgtggaaaatttacaattatattctaactatccacctttagaggaataattcatttaaaaaatagcataaccttagataggcagtaatgtaatatttagggaaaaggtataagtaatgtcattccctatgcctatgtgtaggccttgggacggcaaacgttttccttcattacaacctcaacaacagattaaaataaatagtattgccacaggaagcaaaactaatatgtaggaactttacaaaatgcatcttgccagccagcagcagtgcacatataaaatgatgctgaatcaattggatatcatcttgatactagtaccccaccagagagctagttggagagctagttgacacactgatatagatttccctgccacaacctattactgctttacactttttcttagccaggtgactatttcctgtctccaaagactacagcttgggattaacggtatttcttttatcatgtcacattctaaagagtgacttaaatgaggaaactattagaaagtttagatattcatataaaatcatgctgcaggaagttaatawaaatatgatgaggtgatagccccatcaaggcattccacaaacaatttcaatacattcaggatgtttcagacaaagaacagagatagatacatagataggcagatatttagtaatattttattcataattttcaaatattctcatggtgacacttattcccatagtctaaaaaataaattttataaaataataaaaatacaaaccacactaggggagaaaatactcacaatcacctatccaataaatgacttgtatcaagaatatataaataacttccaaagttcaataataaaaagccacctaatataaaatcaatgaattatgtgcatatacatttcataacagaagataaacagacatcaattaagcacgtaaaaagatgctcagtcattaaataaatgaaaattgtgaataatgagatactactcctcttagaatgtctaaaattttaaaaagacaaagtatgccaagcgtgggtaaacatgtaaaaatgtgttaactctcatacactactggtgaaaatacaaaatgccaaaaacactcaggaagatagttgggcgtttgtgtaaaaaattaagtggatatatactatgtgacctgtcattccactcttaggtatttacctaaaagaaatgaatacatatgtacatataaagatttctacataaatgttcatagcagctttatttataacagtcaaaaacaagtgaatgcataaaaaattttagtacatctgtacaatgcaatataaaggcataaactattcatgcatgaaaaatgaatggatatcaaaataacaaacttattttattatatacaatttgagaaaaaaaatatagtaacacaaagataatcactggttgcctggaaatggggtgagattggagaggaggacaagaaaaggagaaacgaagattacaagaggacgtgaggacattttgagactagtaatggatatatatatataaatatacatatatatgcatcttaactttgatgaagtgtctatacatatcattggtctattttatattaggtagttacatatatcttacgtatatttatttgtatatgtatattaatatataatcttgattgtgttgagaatttcaacaacttagcaagttgtgtgctttaagtgtgtgctttttattttttatcagacatatagttctacctacatttaggctagttaaatactcttttca

SEQ ID NO: 81265 - DNA, 2581 bp, Homo sapiens
  misc_feature (1)...(2581): n = A,T,C or G
agtgaggctccatgggcgtgggaccctccaagccaggccagggatataatctcccggtgtgccgtttgctaagaccattggaaaagagcagtattagggtgggagtgacccgattttccaggtgccaatagcaaatacagcaataattgttatttgttttgcagttgtttgtgcctctcttcctcttttgctgtcttgctttgtcatttgatgatttttgtagtgatttgccttaacttttcattttttatgtttcctttatgtgtgtgtatctattataggtttttttctttgtgggtaactcaaggtttgcataaaataccttgtagttataattatccattttatgttaacaacttaacttcaactgcatattaaaattatacactttactttcccccacccacactttgtgcttttgtagacaatttgcttctttttatattgtgtatccattaacacatttttatcttttaattattatattagaattaaaagtaacttctaaaccattaaaaaaactattttggaggtaaattttgagaataatttttcttccttgggtagaaattcatactctctttgaaannnnnnnnnnnnnnnnnnnnnnnnnnnnnnnnnnnnnnnnnnnnnnnnnnnnnnnnnnnnnnnnnnnnnnnnnnnnnnnnnnnnnnnnnnnnnnnnnnnntgtacatgtagaccccttttttaaaataaaagaaaaaaaatgcttcattactaaattagatgttaagtttgtatataacagaccctcaattcaatttctacaacaatggggatgttaatagtgcttcagatgatctaaacaactgtgttaacaactttatggtaaggaatttgtagtcataatgcaatgtcaagaattctgtatatataaattgtttcttctttaaaaagtattttttcattaaactatggtcagaagccagaacatcccaggcatcataccaatgattttaaattgttggaaatttttaattagaaatatataactcagtgagattttaccataattgcaaatattttacttcatgttatgtagactcatagctcttaaacattttaagtctgttattatattctagtagtgccaagaagcttatgaggcatttaataaacatcttgaaatccatttacactagcacatttcaatgaaactgtttccagtataatagattttgatagaattgattacattgctgaatgtaaatatcatttcaggttgaagttaaactttgcataaaggttgaaaaacaagtctcttgtcaaattttgctcttaagggtcctatgttaaaatatagtgtgcataatttattttacaggaaagtgaatgttagcatattatagaactacaactgatacatgtttgtgtgcatagttaaaaaatgcatgactataaaacctcttggattattggaatatgcatctgaaacattttcttagcaataaactttgacacataaaaatttatattaacttgatatcttgtttattgatttatttttaaagtttttataaggtaagaaacatacaacacttcataaccctttartgctatggtctgaatgtttgtgtccctctgcaaatttgtatgttgacatctaatccccaacatgatgatattaagagtgaggcctttgggaagtgatgaggttatgaaggcagagctccagagagataccttgccccttctgccatgtgaggacacagcaacaaagcaccacttatggaacagaatgcaccttcttaccagacacaaaatctgttagcatcttaatcttggacttcacagcctccagagctatgagaaataatgtttgttgtttataaattacctagtctaagatattttgttatagcagcccaaatggactaagacattgggtgaccatgtttatatttttaaataaaataattgccttaaaaataactgtatataggttttttagaagaaaatataattatatagagtttttagaaacaaaattacttttaaatccaattgtcctcaaatcaaatttgttgtttattttgtttacctgctatatttggatttcaaaaaataagtagatggatgacacctaaaatgtaagtatgtgttatttttgtttttttgttttttgtttttgttttgttactttaccaaacagaacccagaaaattttcatatatcctttaatttattaagttgtcagattaaagcctatttatataataagttatttaacggtatctttctgatgcacagttgaactcatggagatacagagtagaattatggttatcagagtctaggaagggtattggggagtagtggggtaagtggggataattaatgtgtatgaaaatacagttacaatgaataagacccagtatttgatagcaaacaggatgactacagtcaacaataatttattatatattttaaaataatgaaaagagtgaaattggaatgttcttaacacaaagaaaggacaaaatgcttgcggtaatgaatacccccaattaccctgttgtgattattacacatagtatttctgcatcagaatatcacatgt

SEQ ID NO: 81266 - DNA, 2581 bp, Homo sapiens
  misc_feature (1)...(2581): n = A,T,C or G
agtgaggctccatgggcgtgggaccctccaagccaggccagggatataatctcccggtgtgccgtttgctaagaccattggaaaagagcagtattagggtgggagtgacccgattttccaggtgccaatagcaaatacagcaataattgttatttgttttgcagttgtttgtgcctctcttcctcttttgctgtcttgctttgtcatttgatgatttttgtagtgatttgccttaacttttcattttttatgtttcctttatgtgtgtgtatctattataggtttttttctttgtgggtaactcaaggtttgcataaaataccttgtagttataattatccattttatgttaacaacttaacttcaactgcatattaaaattatacactttactttcccccacccacactttgtgcttttgtagacaatttgcttctttttatattgtgtatccattaacacatttttatcttttaattattatattagaattaaaagtaacttctaaaccattaaaaaaactattttggaggtaaattttgagaataatttttcttccttgggtagaaattcatactctctttgaaannnnnnnnnnnnnnnnnnnnnnnnnnnnnnnnnnnnnnnnnnnnnnnnnnnnnnnnnnnnnnnnnnnnnnnnnnnnnnnnnnnnnnnnnnnnnnnnnnnntgtacatgtagaccccttttttaaaataaaagaaaaaaaatgcttcattactaaattagatgttaagtttgtatataacagaccctcaattcaatttctacaacaatggggatgttaatagtgcttcagatgatctaaacaactgtgttaacaactttatggtaaggaatttgtagtcataatgcaatgtcaagaattctgtatatataaattgtttcttctttaaaaagtattttttcattaaactatggtcagaagccagaacatcccaggcatcataccaatgattttaaattgttggaaatttttaattagaaatatataactcagtgagattttaccataattgcaaatattttacttcatgttatgtagactcatagctcttaaacattttaagtctgttattatattctagtagtgccaagaagcttatgaggcatttaataaacatcttgaaatccatttacactagcacatttcaatgaaactgtttccagtataatagattttgatagaattgattacattgctgaatgtaaatatcatttcaggttgaagttaaactttgcataaaggttgaaaaacaagtctcttgtcaaattttgctcttaagggtcctatgttaaaatatagtgtgcataatttattttacaggaaagtgaatgttagcatattatagaactacaactgatacatgtttgtgtgcatagttaaaaaatgcatgactataaaacctcttggattattggaatatgcatctgaaacattttcttagcaataaactttgacacataaaaatttatattaacttgatatcttgtttattgatttatttttaaagtttttataaggtaagaaacatacaacacttcataaccctttagtgctatggtctgaatgtttgtgtccctctgcaaatttgtatgttgacatctaatccccaacatgatgatattaagagtgaggcctttgggaagtgatgaggttatgaaggcagagctccagagagataccttgccccttctgccatgtgaggacacagcaacaaagcaccacttatggaacagaatgcaccttcttaccagacacaaaatctgttagcatcttaatcttggacttcacagcctccagagctatgagaaataatgtttgttgtttataaattacctagtctaagatattttgttatagcagcccaaatggactaagacattgggtgaccatgtttatatttttaaataaaataattgccttaaaaataactgtatataggttttttagaagaaaatataattatatagagtttttagaaacaaaattacttttaaatccaattgtcctcaaatcaaatttgttgtttattttgtttacctgctatatttggatttcaaaaaataagtagatggatgacacctaaaatgtaagtatgtgttatttttgtttttttgttttttgtttttgttttgttactttaccaaacagaacccagaaaattttcatatatcctttaatttattaagttgtcagattaaagcctatttatataataagttatttaacggtatctttctgatgcacagttgaactcatggagatacagagtagaattatggttatcagagtctrggaagggtattggggagtagtggggtaagtggggataattaatgtgtatgaaaatacagttacaatgaataagacccagtatttgatagcaaacaggatgactacagtcaacaataatttattatatattttaaaataatgaaaagagtgaaattggaatgttcttaacacaaagaaaggacaaaatgcttgcggtaatgaatacccccaattaccctgttgtgattattacacatagtatttctgcatcagaatatcacatgt

SEQ ID NO: 81267 - DNA, 785 bp, Homo sapiens
caaaaatcttttcccttaatacacattgtaaaatgctcctatagcacacgaggtttaaaaaatactgtagtgcaccctggctggttctcttcagtattttctaggactcccattttggaggtatgttgctgctgtgttgtgctctgcttgaattaaattgtaaaacacccctgctggatgggaatgtttgtctggccatacagctgaagagaatgtaattcttacattaaaacagtggaggcaaaaccatggagaaacattcaggtttatgttgaggccaagcatttgaatggtctcccagatttaaacttgtcttcacagatgtggtagcagcactgacaccatcatacatgccagggtcgtgtggtgactcaaagaaaaattgtccctcttggcaaaatgctcttcccagggagaatggcagcagctggctccactgatggtggagtttccaactatgaagccaagggtcaacctgggcagcactgattctagctcatttagtgctctggggcctggggttgagaaaaaggggcaaaggtgaaccactttcttcccaataggatgattcattttagtggctaacagcctgctcyactttcctaaggtgagaaaaagcaagcacattgacattcctgcccacaataccttctgttatgtccatgtggttagctggcatcaagttgcctcctagaggaaataaaaaactaaagtgcttgttctgctaaagtttactgttttcttttctactttatttagctttttaggcattttatttcaccctt

SEQ ID NO: 81268 - DNA, 569 bp, Homo sapiens
caaatataataagggtattccctttgtcttcaaaatttgttaaattaataatgccatatctctgaaatagtatattgaaggtattttagtttttaactctatttgtkactttttataacgatttctcttagtatcattattaattttgcctattatttctgtaaaataaattattaaatatagaataatttggtaaaatatttcaccttttttgtgcaaataaatagacaaatttttccttataacattcacaccaatttatacatttgtcaattacttatgagatggctttatcccacgtatacatgacgtatatattatttaagatataaaatttgtttctgaaaagcttattattagtaaaattaaatactatattgtaatttaaatttttataactagtttatgaactatatcctcatactacattatcattttattgttgactattcttcaaattattaatttgaaagctcttcacatattgaccctgatctaatatatctctaagcactaatctaacaccgaagttattatgatagaaaagacaaaactagaaagaaaaaaat

SEQ ID NO: 81269 - DNA, 569 bp, Homo sapiens
caaatataataagggtattccctttgtcttcaaaatttgttaaattaataatgccatatctctgaaatagtatattgaaggtattttagtttttaactctatttgttactttttataacgatttctcttagtatcattattaattttgcctattatttctgtaaaataaattattaaatatagaataatttggtaaaatatttcaccttttttgtgcaaataaatagacaaatttttccttataacattcacaccaatttatacatttgtcaattacttatgagatggctttatcccacgtatacatgacgtatatattatttaagatataaaatttgtttctgaaaagcttattattagtaaaattaaatactatattgtaatttaaatttttataactagtttatgaactatatcctcatactacattatcattttattgttgactattcttcaaattattaatttgaaagctcttcacatattgaccctgatctaatatatctctaagcactaatctaacacygaagttattatgatagaaaagacaaaactagaaagaaaaaaat

SEQ ID NO: 81270 - DNA, 589 bp, Homo sapiens
cactactgtgcaaacatctgattggttgcaatcagaggctagggagaagttacaaagttacaaatgaagactggatgagctatcagtctgatttgttgctgacagtcaatttcccatcttctatgcagaacaaatcaaagggagtagcctctagtccttttgttactttggcgtggaaagttaaggtttttctttcattttttttctaggaagtccgcgtgaaacagccttaggttccctgtctccagactcatctcctgcctcaaatgtagcacttccctaatgtgaagagtcagtgtatcattatataaagcctcacttcaaaacaggtaggggagactactctgacaggagcctttgactctcagacaactctgataaacactggccactgatcttcaaaatctccagatgataaaatggcatcaaattcaattccatatcactgtgaaacactctccattagtaactcatatcaaaaggagaaaggaatagttgtatgtatttccaatttgatggytgtgtgccaacaaatgaaccccctattttaagctctgctgctgtcaatatttaatttaaacagctgaat

SEQ ID NO: 81271 - DNA, 1412 bp, Homo sapiens
cgtagacagcttaagtgttaaacagctcagtgaagagtcagtgtgacagcctttttgtattcctgcacccagcgcatcccaaattcttgtcctgcatccaggaagaatcaggtcacatgagtggtttcaaagattatgaatgtggaggattttattaagcagtagaagtggctctcagcagaaggggagcaggaaaggggatggtgcaggaagaaggtgatctttccctaagccaggctgtctgcagtcgggctcctctccaaagccgggccgtctgaaattaagcagcatctatccatagtctctgatgctcagytgctgcttctcctctcaatgttcagctgcttgtctctctgccagctgaggtctggggtttatatgggtacaggattggggagtgtagcaggccacaaaagtaacacttgggcaggaaaacagggataactgttctcatttagagctgtggttccaggcttgagggtggggcctttgccgggaaaccactctcttttacccagtatttccctgcctcctgttcatatcagtacgagtagttgaaactagaaggcacagggttgctttgttccacctcacctgtgaacatgcacatggagtgacaccaatattttgccactctgtgcatgtccacggatgacttcaaaagcaccgtgaatactattttggggttacaaataaattttagggagtaagtaaattcataaataagaaatctgcaaataataaagatccactgcatatgatttgtgctaaaatttatttcacactttctatagggtaagcactatgtcaagtattttgtgcacattttctccttaaacctttacaataaccccattagggaagtgctattgtcattcgtagggacagggggcagggaagttctgggcagacgagggcaggtccctggcgagggccctaccctcaagcctggaaccacaccctaaagtgagaacataacattcctgtttccccgccgaatgttgccttttccaaaactatccatggcctgccccaccccatcctgtgcccataaaaaccccaggctctgccagcagagagaagagaggagaagaggagaggcagtaggacatgggagactgtggttggacttcagagagaagcagcttgacttcagagggatggcttgacagcataacttcagtgaggagtccagctggagatggccagactctggggaaggttatctttctactccatccccttttcagctccccttcctgctgagagccactttcatcaacaactccctctgcttctccacaccttcattttattggctttctcccttaagtggggaggcaggtgatggtcccaggacatctagggctgaggaggtgtatgtaattctgtggttcagaattaggaaatcc

SEQ ID NO: 81272 - DNA, 1412 bp, Homo sapiens
cgtagacagcttaagtgttaaacagctcagtgaagagtcagtgtgacagcctttttgtattcctgcacccagcgcatcccaaattcttgtcctgcatccaggaagaatcaggtcacatgagtggtttcaaagattatgaatgtggaggattttattaagcagtagaagtggctctcagcagaaggggagcaggaaaggggatggtgcaggaagaaggtgatctttccctaagccaggctgtctgcagtcgggctcctctccaaagccgggccgtctgaaattaagcagcatctatccatagtctctgatgctcagttgctgcttctcctctcaatgttcagctgcttgtctctctgccagctgaggtctggggtttatatgggtacaggattggggagtgtagcaggccacaaaagtaacacttgggcaggaaaamagggataactgttctcatttagagctgtggttccaggcttgagggtggggcctttgccgggaaaccactctcttttacccagtatttccctgcctcctgttcatatcagtacgagtagttgaaactagaaggcacagggttgctttgttccacctcacctgtgaacatgcacatggagtgacaccaatattttgccactctgtgcatgtccacggatgacttcaaaagcaccgtgaatactattttggggttacaaataaattttagggagtaagtaaattcataaataagaaatctgcaaataataaagatccactgcatatgatttgtgctaaaatttatttcacactttctatagggtaagcactatgtcaagtattttgtgcacattttctccttaaacctttacaataaccccattagggaagtgctattgtcattcgtagggacagggggcagggaagttctgggcagacgagggcaggtccctggcgagggccctaccctcaagcctggaaccacaccctaaagtgagaacataacattcctgtttccccgccgaatgttgccttttccaaaactatccatggcctgccccaccccatcctgtgcccataaaaaccccaggctctgccagcagagagaagagaggagaagaggagaggcagtaggacatgggagactgtggttggacttcagagagaagcagcttgacttcagagggatggcttgacagcataacttcagtgaggagtccagctggagatggccagactctggggaaggttatctttctactccatccccttttcagctccccttcctgctgagagccactttcatcaacaactccctctgcttctccacaccttcattttattggctttctcccttaagtggggaggcaggtgatggtcccaggacatctagggctgaggaggtgtatgtaattctgtggttcagaattaggaaatcc

SEQ ID NO: 81273 - DNA, 1412 bp, Homo sapiens
cgtagacagcttaagtgttaaacagctcagtgaagagtcagtgtgacagcctttttgtattcctgcacccagcgcatcccaaattcttgtcctgcatccaggaagaatcaggtcacatgagtggtttcaaagattatgaatgtggaggattttattaagcagtagaagtggctctcagcagaaggggagcaggaaaggggatggtgcaggaagaaggtgatctttccctaagccaggctgtctgcagtcgggctcctctccaaagccgggccgtctgaaattaagcagcatctatccatagtctctgatgctcagttgctgcttctcctctcaatgttcagctgcttgtctctctgccagctgaggtctggggtttatatgggtacaggattggggagtgtagcaggccacaaaagtaacacttgggcaggaaaacagggataactgttctyatttagagctgtggttccaggcttgagggtggggcctttgccgggaaaccactctcttttacccagtatttccctgcctcctgttcatatcagtacgagtagttgaaactagaaggcacagggttgctttgttccacctcacctgtgaacatgcacatggagtgacaccaatattttgccactctgtgcatgtccacggatgacttcaaaagcaccgtgaatactattttggggttacaaataaattttagggagtaagtaaattcataaataagaaatctgcaaataataaagatccactgcatatgatttgtgctaaaatttatttcacactttctatagggtaagcactatgtcaagtattttgtgcacattttctccttaaacctttacaataaccccattagggaagtgctattgtcattcgtagggacagggggcagggaagttctgggcagacgagggcaggtccctggcgagggccctaccctcaagcctggaaccacaccctaaagtgagaacataacattcctgtttccccgccgaatgttgccttttccaaaactatccatggcctgccccaccccatcctgtgcccataaaaaccccaggctctgccagcagagagaagagaggagaagaggagaggcagtaggacatgggagactgtggttggacttcagagagaagcagcttgacttcagagggatggcttgacagcataacttcagtgaggagtccagctggagatggccagactctggggaaggttatctttctactccatccccttttcagctccccttcctgctgagagccactttcatcaacaactccctctgcttctccacaccttcattttattggctttctcccttaagtggggaggcaggtgatggtcccaggacatctagggctgaggaggtgtatgtaattctgtggttcagaattaggaaatcc

SEQ ID NO: 81274 - DNA, 711 bp, Homo sapiens
agctctacattagaaaaataaaataaaggctatatgtaaagccttgtattgcctagccaataggcattccactgtcaattctcacaaaagagtgagatctcatggcctcatggcccaggaagctcagggtgatagaaatgactgttcctgttgtgcrataatagacggtcataaaacaaaccaaccagtctttctttattttaaattttcatagtttgtgcaacatcaatttttttacattaactttgatttttaaaaatattacattcaaatattacttatatcagttactgagttttcggtggtctcttgtattttgtgtctaaagcgagtacctcactggctttaccccgatcctggccctgcctgatatgttgaaaccaaactcttgattcttcaccctaccctaaccccaacctcgaacttgttcctctttgtctccataactgttaactcatttttttagttgctcaggccaaaacgatttgaatcattcttgaccctttgctttctccatactccatatctaatctatcagtagattttgtcagctcttccttcaaaattacccacagtctgatcattccctccacctctgccaccttccacatcatctaagcctccattgcctctcaacagtatcattgcaaaagcctcctaaatggtctttctgccattactctctagtggcttctcatctcgctcgaaaca

SEQ ID NO: 81275 - DNA, 711 bp, Homo sapiens
agctctacattagaaaaataaaataaaggctatatgtaaagccttgtattgcctagccaataggcattccactgtcaattctcacaaaagagtgagatctcatggcctcatggcccaggaagctcagggtgatagaaatgactgttcctgttgtgcaataatagacggtcataaaacaaaccaaccagtctttctttattttaaattttcatagtttgtgcaacatcaatttttttacattaactttgatttttaaaaatattacattcaaatattacttatatcagttactgagttttcggtggyctcttgtattttgtgtctaaagcgagtacctcactggctttaccccgatcctggccctgcctgatatgttgaaaccaaactcttgattcttcaccctaccctaaccccaacctcgaacttgttcctctttgtctccataactgttaactcatttttttagttgctcaggccaaaacgatttgaatcattcttgaccctttgctttctccatactccatatctaatctatcagtagattttgtcagctcttccttcaaaattacccacagtctgatcattccctccacctctgccaccttccacatcatctaagcctccattgcctctcaacagtatcattgcaaaagcctcctaaatggtctttctgccattactctctagtggcttctcatctcgctcgaaaca

SEQ ID NO: 81276 - DNA, 1904 bp, Homo sapiens
atatttttctctgtgtttggctctatgaaggcagggaatttctgttttcagtcttatatcccctgtgtttaagataagatctggcttaaagtagtatcttggagataatatactcaaacttggctcccaccctaaaaggtgattaaatatattatctttttgttattgttgagacaggatctcactctgttgcccaggctagggtgcagtggtgccatttagagctcactacaacctcaaactcctgggcttaagggtagctaggactacagatagatgccaccatgcccagctagttttaaaaattattattattattattattttgtagagatggagtctccttatgttgccctggctggtctcaaactcctggcctcaagcaatccttccaccttgacctcccaaagtgctaggagtacaggcatgagccactgtgcccagcttacattatccttgaattcagtttccttgattgagctcctttcctgtttttgatgtaatactttattggccaggtactcatttgggtgattttttttttattgctataagacctattcaagagtatgtattcccagtgtctctctgtaagcaagatcaggtcttgcaggatctctctcggtctctatctccatctctgtttatctctgtttccatgtctctcttccttagcactgcttcaggcaattaataaaaatctgataatgattttcctcattaaatcaggaagatgagctacaagtagactgacaggtggttgaaagtcaccctggaaaatcatgctgattggtgccctgtgatatagaggtcaaaatgatttcattcttattatgtggatgaaaacattttcaaacttgtttatattgcttgttgattactccaccgagccttgttgttaacacattggggaaagtaaatgtaattcaaagtcacctttaccaaagagaaaatgaaccatcaaaagtaaaaacaaacttcaaaaggaaaaaatgagataatttggtgggaggatataaatggccatgtcacgggctgtgacagacttccctgtgcccagtacagatggaggcatgacatgcatgctagtgtgcaacccatgctggacccagtaccataggaagagggaagctggcaatcactggccacttactcaacaggcactatggaatcctgtgagaaggtaatattatcatccccatttaactgataagcaaattgagagtcacagacactggttaattgccccagaccacacaggctacaagaggctgagtgcacttctcagtaaccccctggtctgtctcagtgccrtctagcacacccagcccggcactgaacatatccctaggggaatcacaagcaaagggaagatgctcatcttgtcttgaattagagctttgggtcctagttcattctgttttagagaggatttgattcaacccctgaaggagccaaggaaaatggttgcaagggttgagaatgcgtgaagaaagcagaaaaactaatgtattcatggtaaaggagcggaagggttgaaacaatgtgtttactcaacttcctgccctaaccatgttatcttagtccattcaagctgctataacaaaaacaccacaaactgggcagcttatgaacaatagaaatttgtttctcacagtcctgaaggctcagaagtccaagatcaagtctattccaagggggaaggatgggtcccaccttctaataccatcacattgggaattaggtctcaacttatgaatattttggggtggcagaaaaattcagtctgtgccaaatatgtttcctgaaccttcctgttctaaaataatttcttactctataacaaagaaaaaggtatggtgattggctgcttgattcgaaattgtaaattgttgtattagata

SEQ ID NO: 81277 - DNA, 1904 bp, Homo sapiens
atatttttctctgtgtttggctctatgaaggcagggaatttctgttttcagtcttatatcccctgtgtttaagataagatctggcttaaagtagtatcttggagataatatactcaaacttggctcccaccctaaaaggtgattaaatatattatctttttgttattgttgagacaggatctcactctgttgcccaggctagggtgcagtggtgccatttagagctcactacaacctcaaactcctgggcttaagggtagctaggactacagatagatgccaccatgcccagctagttttaaaaattattattattattattattttgtagagatggagtctccttatgttgccctggctggtctcaaactcctggcctcaagcaatccttccaccttgacctcccaaagtgctaggagtacaggcatgagccactgtgcccagcttacattatccttgaattcagtttccttgattgagctcctttcctgtttttgatgtaatactttattggccaggtactcatttgggtgattttttttttattgctataagacctattcaagagtatgtattcccagtgtctctctgtaagcaagatcaggtcttgcaggatctctctcggtctctatctccatctctgtttatctctgtttccatgtctctcttccttagcactgcttcaggcaattaataaaaatctgataatgattttcctcattaaatcaggaagatgagctacaagtagactgacaggtggttgaaagtcaccctggaaaatcatgctgattggtgccctgtgatatagaggtcaaaatgatttcattcttattatgtggatgaaaacattttcaaacttgtttatattgcttgttgattactccaccgagccttgttgttaacacattggggaaagtaaatgtaattcaaagtcacctttaccaaagagaaaatgaaccatcaaaagtaaaaacaaacttcaaaaggaaaaaatgagataatttggtgggaggatataaatggccatgtcacgggctgtgacagacttccctgtgcccagtacagatggaggcatgacatgcatgctagtgtgcaacccatgctggacccagtaccataggaagagggaagctggcaatcactggccacttactcaacaggcactatggaatcctgtgagaaggtaatattatcatccccatttaactgataagcaaattgagagtcacagacactggttaattgccccagaccacacaggctacaagaggctgagtgcacttctcagtaaccccctggtctgtctcagtgccatctagcacacccagcccggcactgaacatatccctaggggaatcacaagcaaagggaagatgctcatcttgtcttgaattagagctttgggtcctagttcattctgttttagagaggatttgattcaacccctgaaggagccaaggaaaatggttgcaagggttgagaatgygtgaagaaagcagaaaaactaatgtattcatggtaaaggagcggaagggttgaaacaatgtgtttactcaacttcctgccctaaccatgttatcttagtccattcaagctgctataacaaaaacaccacaaactgggcagcttatgaacaatagaaatttgtttctcacagtcctgaaggctcagaagtccaagatcaagtctattccaagggggaaggatgggtcccaccttctaataccatcacattgggaattaggtctcaacttatgaatattttggggtggcagaaaaattcagtctgtgccaaatatgtttcctgaaccttcctgttctaaaataatttcttactctataacaaagaaaaaggtatggtgattggctgcttgattcgaaattgtaaattgttgtattagata

SEQ ID NO: 81278 - DNA, 1904 bp, Homo sapiens
atatttttctctgtgtttggctctatgaaggcagggaatttctgttttcagtcttatatcccctgtgtttaagataagatctggcttaaagtagtatcttggagataatatactcaaacttggctcccaccctaaaaggtgattaaatatattatctttttgttattgttgagacaggatctcactctgttgcccaggctagggtgcagtggtgccatttagagctcactacaacctcaaactcctgggcttaagggtagctaggactacagatagatgccaccatgcccagctagttttaaaaattattattattattattattttgtagagatggagtctccttatgttgccctggctggtctcaaactcctggcctcaagcaatccttccaccttgacctcccaaagtgctaggagtacaggcatgagccactgtgcccagcttacattatccttgaattcagtttccttgattgagctcctttcctgtttttgatgtaatactttattggccaggtactcatttgggtgattttttttttattgctataagacctattcaagagtatgtattcccagtgtctctctgtaagcaagatcaggtcttgcaggatctctctcggtctctatctccatctctgtttatctctgtttccatgtctctcttccttagcactgcttcaggcaattaataaaaatctgataatgattttcctcattaaatcaggaagatgagctacaagtagactgacaggtggttgaaagtcaccctggaaaatcatgctgattggtgccctgtgatatagaggtcaaaatgatttcattcttattatgtggatgaaaacattttcaaacttgtttatattgcttgttgattactccaccgagccttgttgttaacacattggggaaagtaaatgtaattcaaagtcacctttaccaaagagaaaatgaaccatcaaaagtaaaaacaaacttcaaaaggaaaaaatgagataatttggtgggaggatataaatggccatgtcacgggctgtgacagacttccctgtgcccagtacagatggaggcatgacatgcatgctagtgtgcaacccatgctggacccagtaccataggaagagggaagctggcaatcactggccacttactcaacaggcactatggaatcctgtgagaaggtaatattatcatccccatttaactgataagcaaattgagagtcacagacactggttaattgccccagaccacacaggctacaagaggctgagtgcacttctcagtaaccccctggtctgtctcagtgccatctagcacacccagcccggcactgaacatatccctaggggaatcacaagcaaagggaagatgctcatcttgtcttgaattagagctttgggtcctagttcattctgttttagagaggatttgattcaacccctgaaggagccaaggaaaatggttgcaagggttgagaatgcgtgaagaaagcagaaaaactaatgtattcatggtaaaggagcggaagggttgaaacaatgtgtttactcaacttcctgccctaaccatgttatcttrgtccattcaagctgctataacaaaaacaccacaaactgggcagcttatgaacaatagaaatttgtttctcacagtcctgaaggctcagaagtccaagatcaagtctattccaagggggaaggatgggtcccaccttctaataccatcacattgggaattaggtctcaacttatgaatattttggggtggcagaaaaattcagtctgtgccaaatatgtttcctgaaccttcctgttctaaaataatttcttactctataacaaagaaaaaggtatggtgattggctgcttgattcgaaattgtaaattgttgtattagata

SEQ ID NO: 81279 - DNA, 765 bp, Homo sapiens
cttatgatattttcctgttggtttaacctcttaatcgttctgaagtatctctctttatctctagtgaggctcttgccttaaagtccattttgtatggtgttattatagctgcattaggtttcttttggttagcagttgcatggtatggctttttctatccttttattttcaccttctttgtgactgtatttaatgtatatcttgtaaagacgtcatatagttttcttaaaaatccagactgacagctagagtcttttttttttttttttttttwagtagagacggggtttcaccatgttggccaggcagtctggaactcctgatctcaggtgatcctcccgcctcagcctcccaaagtgctgggattgcaggcgtgagccactgcgcctggcctttgtatttttttaaatagtcttttaattgtatagtctatttacatttaatgaatgtactgatctatatggttttataactcacatctatatggttttataactcacattaatgtttgtttcttatttgatatacttcatattctgttttctctcatttttgcattcttttgggttattcaaattctttattatgttttcctcttcattagcttgttgtactgttctttaggtagctacactagagttacagcacttattcttgattaattatagttttatataaattattactttcactattttcctgtaatataatgctagaacttagaacaatgtactcacccctttctttgtgtgttattttgccatg

SEQ ID NO: 81280 - DNA, 726 bp, Homo sapiens
cagattttaaaaaactataaaagatattttggagacaactggaaaatttgagtatatatggactaagtatgacatcatgaaatattaattttcttaggtatgataatgatattgtgatatgttggaaaatgtccttattctaagaatatgcatgctgatgtatttaggggtaaaatttcatttttggaaaaattacaatgtaataatttctgtacatttttaccttttactagrtcattaatgagattcctaagtattaaacatttataaaatacttaaatttaacttatctttttatctgatattttccatataatgtttattaccatatgacttcttgacattttaaaaaatctgtcctcattcccatcctcaactaaaatatcagttatttgaggactgaggctttctgttattcactgcttaattcatagcacaaaggatagtatctggcatatagtaggcaatagtcagtatttgttgagtggactaataaataaggataaccaatctcaaccagccttaccatttctatataatttgtaatatctttaatttttttattagttttagtattgttactggaaaagataattgattgttttttatgtttcagggaagttgggaaaaaagaattttgaagagtttaaatagtatgtgcactgaactgagtatcccactggcacgaaaggtacttttaaacatttttctgtttaagtatttcat

SEQ ID NO: 81281 - DNA, 726 bp, Homo sapiens
cagattttaaaaaactataaaagatattttggagacaactggaaaatttgagtatatatggactaagtatgacatcatgaaatattaattttcttaggtatgataatgatattgtgatatgttggaaaatgtccttattctaagaatatgcatgctgatgtatttaggggtaaaatttcatttttggaaaaattacaatgtaataatttctgtacatttttaccttttactagatcattaatgagattcytaagtattaaacatttataaaatacttaaatttaacttatctttttatctgatattttccatataatgtttattaccatatgacttcttgacattttaaaaaatctgtcctcattcccatcctcaactaaaatatcagttatttgaggactgaggctttctgttattcactgcttaattcatagcacaaaggatagtatctggcatatagtaggcaatagtcagtatttgttgagtggactaataaataaggataaccaatctcaaccagccttaccatttctatataatttgtaatatctttaatttttttattagttttagtattgttactggaaaagataattgattgttttttatgtttcagggaagttgggaaaaaagaattttgaagagtttaaatagtatgtgcactgaactgagtatcccactggcacgaaaggtacttttaaacatttttctgtttaagtatttcat

SEQ ID NO: 81282 - DNA, 787 bp, Homo sapiens
atttcacaaatagaaccattagaggaccttttaagaaacccatctcccttatcccctttctgtagtggaacgtggagcaatgttaagattgctggacactctggaacctttaatcctcacgcctggaatcccagcactttgggaggctgaggtgggaggatcactkgagcccaggagtttgagaccagcctgggcaacttatgaagaccctgttgccaaaaaaaaaaaaaaaaaaaaaaaaagccaggtgtgatggtgcacacctgcagtcagctactccggagggcgaggtgggaggaccactgagcccaggattcaaggctgcagtgagctgtgattgtgccgctgcactccagcctgagcaacagagtgagaccctgtctctaaaagaaagaaaggaaaacattcaaggcaaggaatcaagaaaccagcagatggtggcgattggctttgagcaacacacagagtcttcctccagctgaactggaaggtcagcgtctgcccggtcaaaggcatggagaccggtatgcctgcctctcaccgtggcccacacggcgatcttcctgtcacctcaaagggcaccaaggaagagcaaggcagcccctgggcaccagcgaggctctggaaggctcctgttggacctggccccacggacaaggccgccctgtgacgagggggcaggacaagaaagagcaaggcagcccctgagcatgcacagcgaggccctgggaggctcctgttggacctggccctgcggacaaggccgccctgtgacgagggggcagga

SEQ ID NO: 81283 - DNA, 609 bp, Homo sapiens
agaggggttttgtaggccagacccagaataaatgtatgtaacatctacctgcactctgtcagccagatctcagtcacctaattgcacagaaggctgggaagcattgtttacatgtgtgtaaaggagcaaaggggaaaggatttggtgactggccaatcgtagccttattcgtagtgctatttaataatgggtgtatgtgggaggtaatttgtataatgagaacactagtttatgcgtgtaattaccagttctagtagtaaattcatgttaccttggacaagaaattttttaaatggtagattaagagcatagcttagagtcacatttgttcagttccytatttcttaacctgagcctttaattaaaccagtttgtgcaatggatcttacaaaacaggaagctatttatgtattttctagttcttagagattaaacttttacttccgtaaagtagaagtcataatatttgcccatattcatactagttttgtcctgaagatcaaagtagatagagtctctgaactatcaaaactacattatgaaaaatgaattattttccttcttagctgacaaaggagtattgatctatgtaatgctgacataaattca

SEQ ID NO: 81284 - DNA, 609 bp, Homo sapiens
agaggggttttgtaggccagacccagaataaatgtatgtaacatctacctgcactctgtcagccagatctcagtcacctaattgcacagaaggctgggaagcattgtttacatgtgtgtaaaggagcaaaggggaaaggatttggtgactggccaatcgtagccttattcgtagtgctatttaataatgggtgtatgtgggaggtaatttgtataatgagaacactagtttatgcgtgtaattaccagttctagtagtaaattcatgttaccttggacaagaaattttttaaatggtagattaagagcatagcttagagtcacatttgttcagttccttatttcttaacctgagcctttaattaaaccagtttgtgcaatggatcttacaaaacaggragctatttatgtattttctagttcttagagattaaacttttacttccgtaaagtagaagtcataatatttgcccatattcatactagttttgtcctgaagatcaaagtagatagagtctctgaactatcaaaactacattatgaaaaatgaattattttccttcttagctgacaaaggagtattgatctatgtaatgctgacataaattca

SEQ ID NO: 81285 - DNA, 1103 bp, Homo sapiens
cattcccctactgataagccttcattctttctaatttttcaccattataagcaatactcaaccacgattttccatatatctttaagtcctggtgttttgtttctatgaggttcaaaattaagagtaacattgctggatcaaaatgtacacttattttcatttgaataattgctggcagatttttttaaaggatgcaaaaatttacattcaatcagcaatgtatgagagtacgctttttctcacatcctgccagcaatggtttttaaaattcttgccagtcttataagtgaatattgataatcacattgctattttaattttgtgtttctaataaaagacaaagcattttttcatgtttcttgtttttattttactgatttggatttgttttactgaagagagcttcctcaaatcctttgctccatttttgacctttctgaaatccgaactctctatatattatagagattaacccactagcctctgaattgcaaataatttttcatatctaattttcatcttatttatgccatacatataaaatgtttagattacgatacagtcataaattaccatatatgtcttttctggacttcttaagaaaactttccctactccttgcctctagattgtacaaatagtctttcagattaacttgcagaagttgtagtgtagtttaattttctacacttaaataatccaaatgaagttcatttttacacatagaatataataaactgtaatattattttcttctagaaggatagtcattttacctgcactttttttctwaaataacccgttctttacctattaactaaaaccatcaaaatcatagttaattatcatgaatcttgcagtctgcttcaggattcaatatttttcctcactcttctttttgtctattacaattaaaaaaactatgcaaatttgattgtagttttatgttatgtttcaatgcctgatcaggtaagtcttactattatttttaaaattccttggctattcttggatattgatatttacccataattttaaagaaaaaaacgtatctaattcccaacattcctctccataaaaaatacttttgagattttatttaa

SEQ ID NO: 81286 - DNA, 1998 bp, Homo sapiens
gtgccttgcaaaagcagccaagattcagtgaggcttaaaactacaaagcatcactatagatcacatgccactatttttaacaaatattaaatttttacaatttttttttctccaaattattgatgccagtcaaaataaccaatttttttccctcacttactcagggtaactttgatttgatcttccatcctgattatacaaattgatcttataattaccttaattcaataataattttaaaaagcgttttctcaaaacgaaatggtggtaaagtgttggggcagcaacaatttttgggggtggtatcatatctcctgtgacctgcacatgtatgtccagatcacctgaagcaactgaagatccacaaaagaagtgaaaatagccttaactgatgacattccaccattgtaatttgtttctgccccaccctaactgatcaatgtactttgtaatctccctcaccattaagaaggttctttgtaattctccccacacttcagaatgtactttgtgagatccaccccctgcctgcaaaacattgcttctaactccaccgcctatcccaaaacctataagaactaatgataatccaccaccctttgctgactcctttttcggactcagccggcctgcacccaggtgaaataaacagccttgttgctcacaaaaaaaaaaaagtgttttctcacattaaaaaatgacaaccataaattttgcataaaatattaaagaataaatggctctaataaaatattattagaggcagctatttctaaattaaaagacgcattgagttttagcataagaataactaaggtaaatcacataaattaaaaagaagaaataaagtgaaacatgattatataatgactattttagtttacgtaggcaaatcgtcaccaataatctatgtgcagcttaacatcatcatgcatggtgcctgatggaataaaaataggaggattcagtgtgaatttgagttcaactgaacaaagattttcttacagcatcttacagggatacaatgtgttggggattgctctagacccagaaatgcaaaaataaataagacatagtcaataagaaagaaagagtgaaagtttktcagtatctctgtcagcaaaatgctatgtaacaaaccaatatattcactggctaaaagcaagtcctatttgctgtatcagtcagggcctgaagagaaacagatggtgaactcaaaatggtttagctgaagaggattaaaggaaaggaccatttatagagccataggaaggtcaaaggatgcaagaagtgctagtgaaacaccaaacaatgtacccaaagaatgtgatcagtactgctcacccctactgggaagggttaaggggaagaaccatatgtactaaaaacttgctgagagctgaagccagaagtagggctgcaggaccagacaggaactgtggcaggagaggaaagcagccaatcccagaacctcagcaggggtgggggctataaatagtgtgtatgtatacatgtaatatgtgtgtgtgtgtgtgtgtgtgtgtgtgtgtgtgtgtatttgccagtcattagagaaaatctaatttgacttcgttatgttctttttacctgttagatgaagtaggttaaagatgatacagtaaacttttttaggacacaattccctagacttccccctaattacctacctcagctttcacacacagttactaacaaatattgttagatgatgtacagtagtaataaaaacaattacatatggaactcttagtatggcatggactctactaagggctgatacttctttattaatatgttttactatcagtctgtctagagggtgctattcctgtctccatttcacgaagaggaaactgaagctttagtaatgttaatgaatttgcccagggtcacaggtttagtagctctcagtgccaagactcaaatctagatctgatagtcacgaaggtttgtgttctcaacattatgctctattgt

SEQ ID NO: 81287 - DNA, 1998 bp, Homo sapiens
gtgccttgcaaaagcagccaagattcagtgaggcttaaaactacaaagcatcactatagatcacatgccactatttttaacaaatattaaatttttacaatttttttttctccaaattattgatgccagtcaaaataaccaatttttttccctcacttactcagggtaactttgatttgatcttccatcctgattatacaaattgatcttataattaccttaattcaataataattttaaaaagcgttttctcaaaacgaaatggtggtaaagtgttggggcagcaacaatttttgggggtggtatcatatctcctgtgacctgcacatgtatgtccagatcacctgaagcaactgaagatccacaaaagaagtgaaaatagccttaactgatgacattccaccattgtaatttgtttctgccccaccctaactgatcaatgtactttgtaatctccctcaccattaagaaggttctttgtaattctccccacacttcagaatgtactttgtgagatccaccccctgcctgcaaaacattgcttctaactccaccgcctatcccaaaacctataagaactaatgataatccaccaccctttgctgactcctttttcggactcagccggcctgcacccaggtgaaataaacagccttgttgctcacaaaaaaaaaaaagtgttttctcacattaaaaaatgacaaccataaattttgcataaaatattaaagaataaatggctctaataaaatattattagaggcagctatttctaaattaaaagacgcattgagttttagcataagaataactaaggtaaatcacataaattaaaaagaagaaataaagtgaaacatgattatataatgactattttagtttacgtaggcaaatcgtcaccaataatctatgtgcagcttaacatcatcatgcatggtgcctgatggaataaaaataggaggattcagtgtgaatttgagttcaactgaacaaagattttcttacagcatcttacagggatacaatgtgttggggattgctctagacccagaaatgcaaaaataaataagacatagtcaataagaaagaaagagtgaaagtttgtcagtatctctgtcagcaaaatgctatgtaacaaaccaatatattcactggctaaaagcaagtcctatttgctgtatcagtcagggcctgaagagaaacagatggtgaactcaaaatggtttagctgaagaggattaaaggaaaggaccatttatagagccataggaaggtcaaaggatgcaagaagtgctagtgaaacaccaaacaatgtacccaaagaatgtgatcagtactgctcacccctactgggaagggttaaggggaagaaccatatgtactaaaaacttgctgagagctgaagccagaagtagggctgcaggaccagacaggaactgtggcaggagaggaaagcagccaatcccagaacctcagcaggggtgggggctataaatagtgtgtatgtatacatgtaatrtgtgtgtgtgtgtgtgtgtgtgtgtgtgtgtgtgtgtatttgccagtcattagagaaaatctaatttgacttcgttatgttctttttacctgttagatgaagtaggttaaagatgatacagtaaacttttttaggacacaattccctagacttccccctaattacctacctcagctttcacacacagttactaacaaatattgttagatgatgtacagtagtaataaaaacaattacatatggaactcttagtatggcatggactctactaagggctgatacttctttattaatatgttttactatcagtctgtctagagggtgctattcctgtctccatttcacgaagaggaaactgaagctttagtaatgttaatgaatttgcccagggtcacaggtttagtagctctcagtgccaagactcaaatctagatctgatagtcacgaaggtttgtgttctcaacattatgctctattgt

SEQ ID NO: 81288 - DNA, 724 bp, Homo sapiens
cttctcataataaatactacatgctggttgctcgtggattgttgggaattggagcaggtaaggttgtatgtatatgtttggttgtgtcatattcacattcattctgacatttatggctcacttttaactggtctcatccccttttaaactcatatttcacagttcaacatacatgtttctcattgtaaacaaatatttttcttatcattttgcctttgctcatgatgttctcattacctatagtttctcttctgttctcatcattcttcatccttcaagattcagtttaaaccaggtgtggtggcacgtgcctataataccagctactcaggagactgaggtagcagaatctcttgagcccaggagttcgaggccagcctgggtaacatagggagacctccatctaaaaaaaaaaaaacccaaaacaaaaatagatccaattcaagctccacattttccacaaagccatcttgggctaccctgccccttgagagatttttttcttctctgacatgtctctggcacttkcttatagtattgtactgtttctatcctttctcactaaccagataataatttttttttttttttgaaacggagtcttactctgtcacccagactggaatgcagtggcgcaatcttggctcactgcatcctctacctgcctgggttcaagcaattctcctgcctcagcctcccgagtagctgggattacaggcgtctg

SEQ ID NO: 81289 - DNA, 675 bp, Homo sapiens
gatccagggactctcataactagtagtactttagaaagtagatgtcaacactgaccctcagggcaaaaattcctttcatagcaagcttgccattcccacagagcaactgtgatttggaaagtactcctgaagtggctctagggtgacagtttgagacagcatctacctcgccagattcaaaccctagaatgctcatgcctgaggagcctgccaagtcttctgctccaaacttctcattttacagatgaaatcacaaaccagcaaggtgacatgaacacagtgagtggaaaacaaagctctttggctcccaacctaatgatactttatttcatacaaatgtctcctgtatttggttatatctgtgaacatttcatggatgatggatcagggcagttatctgtgaattatacttccaccatagccagtggaaggagagttctcagccttgtccctattccaygttccagttctacctcttgggcctaggatgatgaaggagattgctgagtcatattttaataccatcaaccagggtcaacaacttccacccagcctgaggtagctgcaggcatcctacccacctccctacagtgaaactgctgcccattccaatgccattcatgcatgcactagcccaaaagcttttgaatgaagagtcaccctgatctcactaaa

SEQ ID NO: 81290 - DNA, 1652 bp, Homo sapiens
aaatataaacagaatcttactctcataaactgactacaactcatgaaaataaactacaattgtctacttaagcttcactgcttggaacagaaaactaagtacctcatgttctcaattctaaatgggagctaaacattgagtacacatagaccaaaaaaaaggaggaggggggatcaacagacaccagggcctacttgaaggtggagggtgggagaagggtgaggatgaaaaaactaccagtcagtactatgcttattacctgggtgatgaaatactctgtacaccaaacccttgagacacacaactcacctgtataataagcctgcacatgtaccctctgaacataaaataaaagtcagaaagaaagaaggaaggaaggaaggagagaaagcaagcaggaaggaaggaaggaaggagagaaagcaagcaggaaggaaggaaggraggagagaaagcaagcaggaaggaaggaagggagggagggaggaaggaaggaagggagggagggagggaggaaggaaggagagagagggaaagaaagaaaagaaagaaagaaagaaagaaagaagaaagaaagagaaagaagaaagagagagagaaagaaagaaaggaaattaaagaccagtgtgtgttgttctctgcatgggccttgtctttaaatacatttaaattgtgagaataattgtttctgtcttcatagtcaattgctccacatttgactaagcattaaatcacaaataaattcagtttttcctggctatcctattcttacttcaaatttttgtgatttgtactcaagtcgtatcatgtattttacttataggatcctgtaattttcctatttgttcacacttcatcgttggcctaagagatttgaccctatcggttttctttctgtgactcaattttaatgcctatatgttttaagaagtaagttctaaaatttaaaaaaaaaacctttcctgcttatggtagacagaataatgccccctccccgcccccaagatgttcacatccttatccccagaacctgtaactgtgtggccttacatgccaaaaggaacttggacaatttgataaagttaaggactttgagattgagagattattctggattaactgggtgggcctcattaaacagtataggtctttaaaagcagagaacatttcctgactatgatcgtggagcgatatgaccatggaagaagggtcagagagctgctggctttgaagatgggaggaagcagccatgagccaaggaatgcggatgtcctccacaagctggaaaaggccaggaaacagatcctgccctaggaaacagatcctcccctagggaatgcatgctaccgcaccttgattttagccaagggaacccggatctgcagagatataagataatatattggtgtcgttttaagccactatgtctgtggtaattggttatagcaacaatagaaaaaccatacacagcccaaaccctagcaactcgcaagctagagggaagctctctgaacttgcatttcctcatttataaaagtagagataatacacgctacctaagagactcctgtgaagatgaaatgcaatgaagaatgcagaaagcttaattcagtgcctgcaacctccgaagtgaggggagctgttctctgaat

SEQ ID NO: 81291 - DNA, 1652 bp, Homo sapiens
aaatataaacagaatcttactctcataaactgactacaactcatgaaaataaactacaattgtctacttaagcttcactgcttggaacagaaaactaagtacctcatgttctcaattctaaatgggagctaaacattgagtacacatagaccaaaaaaaaggaggaggggggatcaacagacaccagggcctacttgaaggtggagggtgggagaagggtgaggatgaaaaaactaccagtcagtactatgcttattacctgggtgatgaaatactctgtacaccaaacccttgagacacacaactcacctgtataataagcctgcacatgtaccctctgaacataaaataaaagtcagaaagaaagaaggaaggaaggaaggagagaaagcaagcaggaaggaaggaaggaaggagagaaagcaagcaggaaggaaggaaggaaggagagaaagcaagcaggaaggaaggaagggagggagggaggaaggaaggaagggagggagggaggraggaaggaaggagagagagggaaagaaagaaaagaaagaaagaaagaaagaaagaagaaagaaagagaaagaagaaagagagagagaaagaaagaaaggaaattaaagaccagtgtgtgttgttctctgcatgggccttgtctttaaatacatttaaattgtgagaataattgtttctgtcttcatagtcaattgctccacatttgactaagcattaaatcacaaataaattcagtttttcctggctatcctattcttacttcaaatttttgtgatttgtactcaagtcgtatcatgtattttacttataggatcctgtaattttcctatttgttcacacttcatcgttggcctaagagatttgaccctatcggttttctttctgtgactcaattttaatgcctatatgttttaagaagtaagttctaaaatttaaaaaaaaaacctttcctgcttatggtagacagaataatgccccctccccgcccccaagatgttcacatccttatccccagaacctgtaactgtgtggccttacatgccaaaaggaacttggacaatttgataaagttaaggactttgagattgagagattattctggattaactgggtgggcctcattaaacagtataggtctttaaaagcagagaacatttcctgactatgatcgtggagcgatatgaccatggaagaagggtcagagagctgctggctttgaagatgggaggaagcagccatgagccaaggaatgcggatgtcctccacaagctggaaaaggccaggaaacagatcctgccctaggaaacagatcctcccctagggaatgcatgctaccgcaccttgattttagccaagggaacccggatctgcagagatataagataatatattggtgtcgttttaagccactatgtctgtggtaattggttatagcaacaatagaaaaaccatacacagcccaaaccctagcaactcgcaagctagagggaagctctctgaacttgcatttcctcatttataaaagtagagataatacacgctacctaagagactcctgtgaagatgaaatgcaatgaagaatgcagaaagcttaattcagtgcctgcaacctccgaagtgaggggagctgttctctgaat

SEQ ID NO: 81292 - DNA, 823 bp, Homo sapiens
ggatattcatcttatctagctctcaaacatcctaaatagaagtgtaattcatttactgtagaatattttggtaaattttcccctttattttcataaggcagaaacatgaagttgaccttttccttagaaatgttcatattcgaaatactaaaggttattattgagaatgttgaattttaataaactttcaatttattcatttctattgttttatctgtttttcactaggaatccagctacacaccattgagatatgtttgtttcaaaaagattttaataattctgtaccagaactattcctaatattacccttttatattttctcacattctgtttattttttctgaaacctttccttattcattagctcattttttttttacttcagctagttttctgaaagggttatagttaataactttttgtcaccttattttggaaaaataaaatctatcttatttactctatactttcctttagaggaagagtatattgaaagaagtggctttgctcaaagaattttaaatatagaaagctgctacttgactagctgaaaactggacatttttctataatgtcaaaacacatcacagaaactgagaaacttcctggattttctactacttatccaagttctcttcctcagttgcaatttccactaactggatgttagccagcccccttccactctatcctcttctctacacggaagtaatttgctgaytccaaacccaggctcttctacagattatcccctgagtgccagccctacagtaatgaactggcattaaacttctccacttcgatgttgaaaaccaaacgg

SEQ ID NO: 81293 - DNA, 648 bp, Homo sapiens
aacagtcagaaaagtaaaagagacttacacaaagtttttaacaaatgatagagcccagatgtccacataagcccagattcctttccaccatatcataatgtactcaytagatgcttactagtctacatcaggagttgaaaaactttctctgtaaaggcccaaatagtaatattgcaggatttgcaggctgcatgttttcttctgccccatagtctcctttgttgttattgttttctacaacattaaaattgtgaaacccatcctgagcttttgggatatacaaacaggtcacgggaagaatttggcctgcaagccatatttttgctgaccccttgtctacaccatttttaaaaggtattgataccccattctcatttttggggattccatggaaccaggtcttacttgctaaatgtgttatttttaatatcacatagatgcaggaagttggattctttgccatgctaatccaagctttggaaatgtttctaaatgtgtactagtcctacttgtgtgtgctttgagcagaacaattgaaattcacagtgcagacatcaccattataattatagtctgtctgtattattggactgattaatctaaatggaatgtgtgtgttaataatgccactccacatttatttggttt

SEQ ID NO: 81294 - DNA, 722 bp, Homo sapiens
tgggaagcacagaaccactagttggttttcagtgtttcagtgcatacaattcctaataaatctggccaagaaaacctgtaagttcttagattgtcccaaaggtggcgcatgaaatcaaagcaggagaacagtttcctacgaggtgtagcctgggaaagttgggggtgactgatggaaaggaggagtgaagctccgccctttccgctgctaggctgcgcccgaggctatttaaacccaccctggctggcctgtactcagatcttsgcggagcggatcagcggccggagcgtttggcggactctgcgtggacttggagctcacagcgtcttgcgacttgaaagcggattcagaggacaggacagaacacttgggcaagtgaatctctgtctgtctgtctgtctgtctgtcccattggttggttgatttccatttccttaaggggcccatacctcacaccgcacacacacaaacacacacacacacacacacgcacacgcacacacgcacacacactccttccttctgcgagttagaacattagtgggggcccctgggagctgcaggtttcctaatcatgtctgcacctaagaacagtagggtcttgtctggctcttcttatgaacggtcccccagcacggacaccccaaggtccatgcgagcctcacccagcttctccctctcccctctcagaaactcaggcttaaggggaagctcctcaccag

SEQ ID NO: 81295 - DNA, 430 bp, Homo sapiens
cggactctgcgtggacttggagctcacagcgtcttgcgacttgaaagcggattcagaggacaggacagaacacttgggcaagtgaatctctgtctgtctgtctgtctgtctgtcccattggttggttgatttccatttccttaaggggcccatacctcacaccgcacacacacaaacacacacacacacacacacacgcacacgcacacacgcacacacactccttccttctkcgagttagaacattagtgggggcccctgggagctgcaggtttcctaatcatgtctgcacctaagaacagtagggtcttgtctggctcttcttatgaacggtcccccagcacggacaccccaaggtccatgcgagcctcacccagcttctccctctcccctctcagaaactcaggcttaaggggaagctcctcaccag

SEQ ID NO: 81296 - DNA, 983 bp, Homo sapiens
gcctttttattcaagaaattgaccctwgttctcactggaaaaaataaagttggaaaactcctctgtaaaagatagataagagaataacagaggtaccatctctgtttaggataactctcattgtctctcaagcctgccggacaaaccaaggtttaacatggcagccaccttccagaattttcctgatgcctgaggtccagccattatttgacttacacatttattcctggtttactggcaattgtgcacatttatagactgacgaatagttttagagccaggagatggagtgagtgacaattttccattcctaaaaaaaaaaaaaaaacatgattattctgaaccaaacaaagaaactcttaatgttgtttgggttaagcataattagcactgtgtataacctcactgtcacagcaataattgctgagttctttcatctgccttctgggatcagaagcaagtcagtgatacatggtgagaagaggtcgtataaaggcagggctcacagtctgcagctacttcaaaatacaggactgcatctttttctactacatagatggtattcttgttgagtacgtatacactgaattagaaaaatacagttggataatcctttaacagaaatcttcacagccaaatatattttagagtttagaattcattaaacgagagatcagcaaaagaaaattccagaagctcgaaagccagaaagggtcagataataaatattttcagctttgcaagccatatggtctctggagcaactattcagccctgcctttgtagcactaaaacagccatagacaatacatcaataaacaggcatgttgggttgcagtgaaattttatttaccaaaaaaaggcaaagagccagatttggtcagcaggctatggtttcctgacccttgttttagcctttagaaaggcaatggggtacgaattcgtatgtatttctatatatttataaatttgtgtgtacaaat

SEQ ID NO: 81297 - DNA, 753 bp, Homo sapiens
ataatgggcaccagggttctcacagcctaaatgggagttgcaaatataaacagaggacaactgtaaatcaccataaatgaacacatcacacacgtataaaatctacgcacacacacaaatttgctgagaggctctgggcaagagcacctcaaaaaaaaatgagtacgstgagcatcctcatgatggcttctaaataccaatctctaataaaggaagccaggttgttttgttttgttttgtttttgtttttaacaacaacaacaaaaatggctactttgctggcagagcaggtgaaatacaagatgatcctggaactctctcttgtatcagaaaggaagaattcaaagaagggtaaggacatgccaaaggcaagccatttgaaagcatcgaataaatagcaaatgtattataactcatttaccaaaataagaaaccttggattcacaccgataaaacagatcatcctcatagaaatatatgaataaaaagtttaaatgtccagtgaggcatatttgcattgtctaaaatccctagccacaaaacactaattataaagaaaaaaaagatacttacttttatactggagaagtctgacaggtaccaccttagtcaaatgattatttaacttcaagagcaatgggacagatagaagtcttaaccttctacctgacagaacgcagcataaagagcacagcatcctgaatcgaattgtaatgaaagtggtttattacctccaatggtgtatccagtgaa

SEQ ID NO: 81298 - DNA, 1349 bp, Homo sapiens
gcatctccaaaaaggtacattgagtttttgagaatgaatgtggaaaccacagccactgcattcgtatatgaaaatctgtatgtgaattcctgctctgtagtctcrggcaagtcccttgaatccccttagagccccagtgctcatcggggatcataatatcaaatttattataatttcaaatgcaaacgctgtttcccccttaaaatttttagcctcatttatatgtctgttattctttttataatcttattaaaacaagaaaaactttcttctcttttgccacaattaaaattcaattatttcatgttgaacagactaaacacacataaacaatcaggacttttgacttactttactacaattgctttaaatattttaaatggtaattctaaaattgaattattatgttctcttaaagtgtctaaacagtctgacaaatcaacagtaggtccttaacaagaaaaacctaagaatttaattcttgtatttacccttacaaaatagtaaatcttaacttcttttaaatatttcaaaactttttctaaaaagttagttaatttttatatacagtacttttcaacttaaacgggtaagtctaaaatcagttatttatttacaaaattaaaagtgcaaatacaaatcaaatctggcaaagactccttagagccttaaatataacaagcactttttacaccaaacatgtagaaactattctaattaatacaaacttaattctaaacagctcaatgatattacagtttgagcactcaagagctcaatatccaaaatctgaaacgcttcaagatctacaattttttgagcaccaacaggactccaaactgaaaaattccacacctgacctcatgtgacacatcacagtcaaaatgtagtcaaaactttgtttcctgctcaaaattattaaaaataccatatagaaatgcattcaggttatatgtataaagcttatataaaatacaaatgaattttgtttttacacttgggtcccaatccccaagatatctcattatatatatgcgaatattccaaaattcagaaaatttcaaactctaaaacatttttggtctcaagcattttggataagggatacacaacttctaataccatgagtttgatatatgtcattgtctctatattttattctactacccaaggttaaaaaacatttattctctaaggaattttgtcacctcaaatggattaaatttttttattagaaataaaattgaaaacgggatgtagatgctgggagctatctatgtctagggtaattttctgcataacactgacattaacacccagagccttaattataattatatttatcatca

SEQ ID NO: 81299 - DNA, 360 bp, Homo sapiens
gtatttaatctctttctttctttctttctttttttgagacagtctcactctatcacccaggctggagtacaatggtgtgatctcggctcactgaaacctctgcctcccgggttcaagagattctcctgcctcagcctcccaagtagctgggattacaggtgcccaccaccatgcctggctaatttttgtatttttagtagagatggtgtttcaccatgttggccaggctggtctcaaactcctggcctcaagtgatccacccaccttggcctcccaaagtgctgggattacaggtgtgagccaccgcacccggcctatctctttctcttgccttctaaacsctcctgacctaatgctggc

SEQ ID NO: 81300 - DNA, 1696 bp, Homo sapiens
ttttccaccatgcctaggcttcccctgccacctgttgaggacagccgccatgtggtaaacgcactgtgtgcattgctcttttataaaatagctctacactgaccacacgcttggccataaaacacatttgtttgaattctcagcgaattaaaaaaaacggaaattataccaagcacactctccgaccccagcccaataaaattagaaatcagtactaagaagattgctcaaaaccatacaattacatggaaattaaacaacctactcctgaatgactttggggtaaaaaatagctttgcatgcacatatatagaaaccgtaagctatatacagcggtgttttaggtgcttttaaaaaaaactgagccaacgcgtcatatcatgtgttacatcacgtcacgtgttacctgtagcttgctctttcaccctgtggtcacgtacacagctggctacggtcttctctctgcagagctctcctcccgtgcatggcggctccctgtggggggtgattgggtgggttctgggctttgctaactcaagcggtgctgaatgtacgtgtgcacgtgtgcacgtgtgcatgcatgtgtgcacgagtgcacgggtcctgctggctgttccacagcaggggactgaggagcagagtggcgtggtcagttgctgtccacactggccatgcccacggctgtgccagtattggcagtggctgctgctgcttcacctcccccacacctgcactcagagggaggctctgtcatgcttgtggccttgggtgcagggacagccccaccgcccagaggagaggcctcacctccggcccctcgttggaggctggcagcctggcccttctgcacacatgcaggcctacccagcaccaggaaggagaccctgggagtggcccctgcgtgtcagcattggttccgacctgcagagagcccagccctgggcctcaggaggctgtggagccttgcctggaggagcagggtacactcagctgcgagccacttgcctggggctgcagccccaggggacacaggcctgggacatcccgtgccgcatttgtggccaggtcctctgggagcccctgggactctaggaggagaagcaacccttcctgccccatggccctgggacttccagcaggtcactctgaggtcacctcctacaacctggccctggatttgggagaaagttgagggccggagcatcatttggagctgtttttgttcttctttcggatctggccccatagttgtgcaatgaggctgagctgtggggctggtaacgcttgtgggagtggcgggtgggatgaggtaggggaactgggccccacctgctgggcacctgccgcctgccaggctgggccgggttctgcaggcggcaggagcacgggtggtgagcagcccagcccagcagcctcgcactgcggctgggcggcctccctcacgccctggccccctgcgggctgcagatgcacaggctgccggctgccttgggaaggacggcggggctgctggcgctggtaagggtcttcctcagccagctgacgcctccctccatccggcttttgtttggttttattgggaatggttggaggaaaggccgccacagatggggayggatcttaacctgaaaggctgcgtacagggaactcagcagagggctcagaaaagacagcgccgggtcagctggggactggt

SEQ ID NO: 81301 - DNA, 535 bp, Homo sapiens
tccggggacctcctcggcgggggagtcaaggagccgagagtccatgcccaagttccaaactccaggctcaggtccaaggccccctcgttccctcacggagccggaggatggggcctcccctgttgtmtggctacccaggaagggagcaatggtggtacacagccgtggggacgcatccctgagccatgtatgtgcacacgcacacacacatgtccatacggaggggtctgtgtgcgcatacatgtgtacgtgcatacataggggtgcgttttattttatttttatttttgagacaagagtcttgctctgtcatccaggctggagtgcagtggtgcaatctcagctcactgcaacctccacctcccaggttcaagcgattctcctacctcagcctccctagtagctgggattacaggtgtccgccaccacgcccaactaatttttgaatctttagtagagacgggtttcaccatcttagccaggctggtctcgaactcctgacctaggtgattcgcccacctcagcctcccaaagt

SEQ ID NO: 81302 - DNA, 535 bp, Homo sapiens
tccggggacctcctcggcgggggagtcaaggagccgagagtccatgcccaagttccaaactccaggctcaggtccaaggccccctcgttccctcacggagccggaggatggggcctcccctgttgtatggctacccaggaagggagcaatggtggtacacagccgtggggacgcatccctgagccatgtatgtgcacacgcacacacacatgtccatacggaggggtctgtgtgcgcatacatgtgtacgtgcatacataggggtgcgttttattttatttttwtttttgagacaagagtcttgctctgtcatccaggctggagtgcagtggtgcaatctcagctcactgcaacctccacctcccaggttcaagcgattctcctacctcagcctccctagtagctgggattacaggtgtccgccaccacgcccaactaatttttgaatctttagtagagacgggtttcaccatcttagccaggctggtctcgaactcctgacctaggtgattcgcccacctcagcctcccaaagt

SEQ ID NO: 81303 - DNA, 3479 bp, Homo sapiens
cagaaacctttgaaggaaagtcaatcgtgttataaatatataataaaaatatctgtgcaataataaatattgatgtgacacttagttcatcttattattatcatttgttcatgggaaagcaactctgttgtacttaaaaattccaaaaggtatggaatgcaaatataattttttaaatgactagtggtaaacaaaacacctcggtctgataagctttctctaatttcttctgtctgctactgataatggtctgtatttaatgctgcccctgtgtctggtgtctctaaaatatttaacactggaacaaagatgagctgggctagttactgggctctttttagttgagcgcctgatcccaaaatactcactcctcatctagggttataccagttccatagagataaatatcctcctttcacaaagcatttttgttccatggggaaaaaagatggatggtggcagcccaggataccacgtctgcctagaggattagtaccagtttatatgcagaaggaaatatgccagacaattcaactcttggagcatctcccaatcctccctctgctttgggccattatcataaacctgctgctcccagctaggccactaagcccattagggtcctttcttcccctgggtaaacagaattctttcccactttctttctctgagtaggtgttttgtggatgaaagattttaatatataatataggcttttaaattgaattgaaaatgctgacatgagacacacagaaatagagaatgaccaggcttgcggctgccttaagtgtttctataatacaacagtccccttcttttttattcttcctaccctcattcttggccagttatatcacctgcatctgaagtgtcacagactcttgaccttctcttctcaaattcaactgcaaatttaatttggtaaacatctccttgctcattacctccctgttcaaaaaccttaattgtagtgtagacccattgcctacaagagaccttctcaatcaaggattggcaaacttgctccataaatgatcagatagccaatatccttagctttgggggccggatgatgcctgttgcaactactcaactctgtcttctgccattgtagtgctgaagcagccagagacaatatattaaaaaatgagttgactacattcaaacaaaacattatttatgaacactgaaatttgaatttcatgaaatgttcatattctttttatttttttccaaactttwaaaaaatataacaacccgtcttatgcatgagccatactaaaacaggtggcaggttgggtttgacctataggctatcatttggaaacttccaggtctaaagtcctttagtccaacattcaaattaatacaccttaacaatccagccatctctttagctttagttctcactgttcctactgcatcattatgccactcctaagaaattaagccgctttgttcccttaatgtactgtgtgctctcctatctctgctcttttgataatgtcatttcttccatccagcttcaagacccagtttaagtgtcacttctttcatgaaacttttccataaaagaatcttttcatgctttataacagcaatttctgcctagctctgcattaagcaatttgcatacattttgccctttaaaccttagactgtgaaataggtgccactggaaccattttacacacaggaaattgagattcagcatgattgtgtacccaatgtcataataaatgtccaagccaggattctaactcagatattttggaccccaaaacccatgcactgccttttaaactccaagtacaccaaataggctagattttatgtgtacttcttttatgaggctgattttatttcttcccactattagagttatttgtgtgtgaatgtcttcatctctttttccgcagtctggaattctataaggcacagtccatctttttctttttgtatcctcagagggatttgtataaaataggtgcttaatacacctttgttgacagaatgagcatcattcaatacatacttgtagcaatgaattcctattattaacttttggatttgatttcctataatcactacctttgatgatagaaaagaaacctgtcttttttttttcccagaaggcaaactcagagataaacagaaaatcaaaactggctcccgtcagtacatatggaaagattttacttgtgctcaagtaaacacaagacagttacaaatatgaaatgcatttggccaatgttttggatgttagcaccttctcttggaaaaaaaaatatactagaattgttggtgcattaatgatttcctttagcatgtgatttctcagattggcatgatctttatgggctttatagaaactttgatatcagcaacaatggcactgctggttagcgggtgtagagcctgctcccagcctggtttatgacaggaccagcttctatctctattggatgattggatcatttagaatggaacttttgtctggccatggtatttggcaacaatgacagacacagcattcaacaactgccatcctcctgcaattcaacttgataaatctaaaaagtgactgattctcctgtcttctgatgttaagtgtgacacatcttttcctcctttagatatgatacctgttagaacttagtagattgagaagtggtatggcataatggcacagagtctgagttttgaatgcaagaaccaccatttactcactctatgactgtccatgctttatattatgtatctggcttttgttttcattgcttgtaaaatggagaaaaaataatatcgtcttcacagaatttaaataagacagacagcataaagaacatcctcattacagtgtctggcacgtagtaggtactcaattactgaagttacttccttctttccgtgttatattatgttttaaagcaaggactagcactagttcatacgttagttgtgtaagaatagggttttattacttcattttgttttgcattgtttagttactctctcaggaacatgattgaaatttgattcatgaattataattcaagtctatattaaatgaataatgaacctaaaagttaagactccagatttcattttattttatgtttattttatttttattttattttccttattttttttgagatggagtcttgctctgtcacccaggctggagtgcagtggtgtgatctcagctcactgcaacctccgcctccagggtttaagtgattctcctgcctcagcctcctgagtatctgggattgcaggcgcctgccaccacgcccggctaattttttgtatttttattagagacaaggtttcaccaagttggccaggctagtctcaaactcctgacctcaaatgatccacccacctgggcctcccaaagtgctgggattgcaggcatgagccactgtgcctggacaagaccccagattttaaagttgaggttttgagagcagaca

SEQ ID NO: 81304 - DNA, 987 bp, Homo sapiens
taaatgatgtaaacaagtaaaagtctataacttctatatgcagaagaaagtgcctacataaattttttccactttacttaaatgctatgtctcaggaaaagagtaagaaaaacaaaagttaatctactgttatatattctggttctcctatttttcttattaaaattaacattatcagtcaaggacaaagttgttgtcctcatttcttgttatatgcggaaggctttggtgtgatatctatcagctctttttaaatcaaactgatattggctaatatggattagctgcaggaactaagtaacaaagaatcgacacaaaactcctgtgacaacttcactgagaaaacgtaaggactcatccataatgttttcatcagtttgaagaagtattgaacctagctgtttcaccagaaacttacagcagtttgcaaaatgctgtaaactcctatttctaagtccatatttcagcamaggcagtgggcttgcatttcactaaatagacagctcttacatcaaatgagtcaaaaatgacgctcttttcatattcccttttctctactttttgttttatctaataatattgtatttctattatgtgactagcattctgctaaatgagaggagacaccttaatagtaggagtcatggtttctattggtgactcttaataaaatttgtaattgattcaaaacaaatatgcaaaagttctaaatgtatttcccttcttcctcctctcttctctttttccaccttctcttactttttactaattttttcaccttttctatatctttttctctctttcaccagcctccctttcatctttataattatttattaaacacatagtatatgtgatagatagcagcttatctcagagtgatttggtactgagggatttgattgttaatgggtgataagacaagtatataaatagcttaaataaattttaaatacacacaaaaagtgtcatgagaaaggcacagat

SEQ ID NO: 81305 - DNA, 743 bp, Homo sapiens
cagacccgggccctcttccagctgyccaatcagagcccgctgcagcccactcctcacctgcaggccccttgcccccaactcatgggcagggtccctctgaagctgttaccctcattactagaatgtaaggtcacggggcaatctgtgtggtccacaggtgcatccctggcacctagaacacacaatcaaacattcagtaaatgtttgttgagggtcatatgaatgaatgaatgaaggaagcgcccaacgccagccttttagccaacattctctcatcacgagaattttctaggggctcagacaccagtccctgggtccctccaattccaaagacacacacaactatccagacagttccctcaaatgcctcccccagacttgggagagactagtgcacaggcagcctctccagagcagtccctgcaccagcctcctcaagctccccaaactctcaccctgccttattctccctggagtgggtgagggcccatgctggtagaacagctctcaaccgcccaggcagagatgggctacctgacaccttgtgctttcttcagaacccctcagggcctcagctgaagctcagacagagtgcctgcgtgcgcgcgcacacacacacacacacacacacacaacctaattttcaacacacttgcacaaatatagaaacatcatggggaaaaatgcaaaatacctatgatttctggaacaagatccaagatgacaaagatattccctgctta

SEQ ID NO: 81306 - DNA, 743 bp, Homo sapiens
cagacccgggccctcttccagctgcccaatcagagcccgctgcagcccactcctcacctgcaggccccttgcccccaactcatgggcagggtccctctgaagctgttaccctcattactagaatgtaaggtcacggggcaatctstgtggtccacaggtgcatccctggcacctagaacacacaatcaaacattcagtaaatgtttgttgagggtcatatgaatgaatgaatgaaggaagcgcccaacgccagccttttagccaacattctctcatcacgagaattttctaggggctcagacaccagtccctgggtccctccaattccaaagacacacacaactatccagacagttccctcaaatgcctcccccagacttgggagagactagtgcacaggcagcctctccagagcagtccctgcaccagcctcctcaagctccccaaactctcaccctgccttattctccctggagtgggtgagggcccatgctggtagaacagctctcaaccgcccaggcagagatgggctacctgacaccttgtgctttcttcagaacccctcagggcctcagctgaagctcagacagagtgcctgcgtgcgcgcgcacacacacacacacacacacacacaacctaattttcaacacacttgcacaaatatagaaacatcatggggaaaaatgcaaaatacctatgatttctggaacaagatccaagatgacaaagatattccctgctta

SEQ ID NO: 81307 - DNA, 743 bp, Homo sapiens
cagacccgggccctcttccagctgcccaatcagagcccgctgcagcccactcctcacctgcaggccccttgcccccaactcatgggcagggtccctctgaagctgttaccctcattactagaatgtaaggtcacggggcaatctgtgtggtccacaggtgcatccctggcacctagaacacacaatcaaacattcagtaaatgtttgttgagggtcatatgaatgaatgaatgaaggaagcgcccaacgccagccttttagccaacattctctcatcacgagaattttctaggggctcagacaccagtccctgggtccctccaattccaaagacacacacaactatccagacagttccctcaaatgcctcccccagacttgggagagactagtgcacaggcagcctctccrgagcagtccctgcaccagcctcctcaagctccccaaactctcaccctgccttattctccctggagtgggtgagggcccatgctggtagaacagctctcaaccgcccaggcagagatgggctacctgacaccttgtgctttcttcagaacccctcagggcctcagctgaagctcagacagagtgcctgcgtgcgcgcgcacacacacacacacacacacacacaacctaattttcaacacacttgcacaaatatagaaacatcatggggaaaaatgcaaaatacctatgatttctggaacaagatccaagatgacaaagatattccctgctta

SEQ ID NO: 81308 - DNA, 743 bp, Homo sapiens
cagacccgggccctcttccagctgcccaatcagagcccgctgcagcccactcctcacctgcaggccccttgcccccaactcatgggcagggtccctctgaagctgttaccctcattactagaatgtaaggtcacggggcaatctgtgtggtccacaggtgcatccctggcacctagaacacacaatcaaacattcagtaaatgtttgttgagggtcatatgaatgaatgaatgaaggaagcgcccaacgccagccttttagccaacattctctcatcacgagaattttctaggggctcagacaccagtccctgggtccctccaattccaaagacacacacaactatccagacagttccctcaaatgcctcccccagacttgggagagactagtgcacaggcagcctctccagagcagtccctgcaccagcctcctcaagctccccaaactctcaccctgccttattctccctgsagtgggtgagggcccatgctggtagaacagctctcaaccgcccaggcagagatgggctacctgacaccttgtgctttcttcagaacccctcagggcctcagctgaagctcagacagagtgcctgcgtgcgcgcgcacacacacacacacacacacacacaacctaattttcaacacacttgcacaaatatagaaacatcatggggaaaaatgcaaaatacctatgatttctggaacaagatccaagatgacaaagatattccctgctta

SEQ ID NO: 81309 - DNA, 769 bp, Homo sapiens
atactgtgcttggcacacagccagcactcaaagaatgtcagatgctattctttccctctcctccttcataatagcagcagcaatagtagggggagtagttgttgtaatggtactaaacactggcaaggacttgtaagagtagtggcaaataatgttgtaagagtagtaaacactggcaaaatcacacagcgttcgtagttaggtaggactggggtcaaatcctagtgctgccatttaatcaaggctgctgcaggcatataaagaatctttgtgcaatttataaaagatgtcacccctggaagataggcgacaaacagatgccccttcctctggatagaggaatgtgccgaaggaaagacacaagacttggccagaagagcagctgggygagtggagcactggtggggtttcagcctccgctcaccacctcatcagtcagtaacatcatcaccaccatcaagaacccggaagaaaaactaagcctcagaaaaggtatggacaattgtagtcgatatttaattctccattcctgatcactctaatattccgaattctgtttgtctaatggagagtcttaggccacagctcggatcatggtacctcacccctttgcagaagtctcctggctctctatttcttgctgaattacacacaaattcctcaggctggcattcaggttcccaagggtacctatttatctttgagctttatttcctctgtggcaacttggcagctttgcaaataactgtcctatcctttcctacctttg

SEQ ID NO: 81310 - DNA, 723 bp, Homo sapiens
aagttgagaggcactcgccgaaaacagctggtagcatcatgcctttaaatagccctcgccacgcttccccttggcagcacgcagttggccctggcagggaaagcccaggacagaacaggaaactttagaactttctaaaaagaaaaaagcttgcctttaaaaygtgctcccttctgtgtaaggagcttgcaatgttgtagccccttcccctagaagtttacaaggaaagactaagctgatgaggcttgcctcgggacccagtgtgactctgggcctggggaggtaagtggagggctccccggacccgacccctgcccagctcaggccagcgtccagggcagcagtggctccagcaccatctgctcatcaggcacctgtgggggctatagtgcagctcagctgcagcctctccccttgatgttcgtagctgtaaggtcagggaaggtgacgtcctcacctctaacttagggaacattcagccctccctgaaagtggtactgggatgggccagactccacagtgcacatcaggccagagtccatgcagcagaggttggtggcagcctgtcgatctcagaccctctggagaagcggggccacaaggctctctccggccgcacttccatgttgctggggaaatagcagcaggtgaaacatatggaaggaataagtggccctcacgtctgggtggcagccaacagttgactgtctcctcccacacact

SEQ ID NO: 81311 - DNA, 2272 bp, Homo sapiens
aggttgcggtgagccgagattgcaccactgcattccagcctggtgacagagcgagacaccatctccaaaaaaaaaaaaaaaaaaaaagaaagtagttttgtacagctgctagttcttcaaaaatattttaagtactgtgtatttgcattttgttccaaataggattcaagtcagagttatagtttttgatgaaaatttatgaaatcattttgactccttgaggctatttatctttgagatcagcaaaagaacacttttgaaactgaaccagtttatgaaatagttcttcatcttaagatgaaggtagagtcatccagtaagtgtaaagacacatttttcttccacaggctagagagcaactgattcaacacagcatttcatgagtgtgaaaagaaagatgaatcatcctactttaaatgcaacttttggccattacatctcagttggtttgacaacaagcttagaaatcatttttttttcccctaaatctgttggattcccttctttgaccagaagacaatcaagtgaggtgatcaaaggggtcatgtgtcagaggaaggggcagcttcttcctacataaggtagaagtatgagggaagagactgatagcacacccaggaagttcttttccggaactgaatgaaatcaaaggaaggaaagcaagactcaactggtattaggtaaaggactagaacctagacaggatccagcattgacagctgagtggactgggagggaaggggagtgatatgtttctatctgtgtccctacccaaatctcatgttcaattgtaatccccagtgttggaggtgtggcctggtgggaggtgactgaatcatgagggtggtttctcatggtttaayaccctccccgccttggtgctgtcatcatgatagtgagtttttgtgagatctgtttatataaaagtgtatagcacctctcccctctctatattgctcctgctccaaccatgtgaactgtctgctttcactttgccttccaccatgattgtaagtttcctgaggcttccccagaagcaaagcagatgccagcatcatgcttcctgtatagcctgtggaaccgtgagccaattaaacttcttttctttataaattacccagtctcaggtatttctctgtagcaattcaagaactgcctaacacagggcgttaggtaagaaggagactagaggatgagaggcagcgtaacagataagtgggtggttgtctgtagacaaaccaagattgcttatattgtttatttactcagctagaacagtcttgctttggttagtcagcatattttttaaaaggtctggaacagtattgtgttagtcagagttctctaaaggtacagaataggaaagatgaatatacaaagggcagtttattaaggagtattgactcacatgatcacaaagtgaagtcccacactaggccatctgcaagctgaggagcaaggaagccagtcggagtcccaaaacctcaaaagtacggaagccaacagtgcagccttcagtatttggacccgagagcctgtggcaaatcactggtgtaagtccaagagtccgaaagctgaagaacttggagtctgatgttcgagggcaggaagcacccagtatggaaagaaagatgaagccaaaagactcagggagtctgctcattccacgttctctgcctgctttatcctagccatgcttgcagctgattagatggtgcccacccagattgagggtgggtctgcctctcccagtccactgactcagatgttaatctttttaggcaacaccctcacaaacccacccaggaacaatactttgcatccttcaatccaatcaagtcgacactcaatattaaccatcacaagtatatacaaaagcttaccttcacatgggtcttctgacattgtttgctagtgtttgagaggtggagagacataacgagtagcagaagagtgaaaccagaatggaaacaattgggacgtaggctgctggctttcccctctgccccgttactaatgagggtagacattgagaaaccccatttttgtcctttctgcacagattataactatcaattaatgtatcaggtgggaaagtcattgacagtttcataaaattataatatgcaaattccttgtcagtcctttatatcagttagcaatgtattcagcggcacaattgaaactctcaaacaatatttcatttatctctataaacaaaaattccagtgtggacaatccagggttaatgacagtttagtgatgacatctg

SEQ ID NO: 81312 - DNA, 2007 bp, Homo sapiens
cagtttctgaatttccatttgtgaattattcctccagattaaagcagagaaaaagacagcatgtatcagatacatggagaggtaaattgattgattggtagctagatgattgctagatagggatatgagtgcacgtatgctggtggtgtgtctttttttttttttttttttttcatttctccgttttcttcttcttttttaaaatccatgttctgataattcccttgagtaaatactggccaagaaaagaaaaaagaagtcaaagtagcaattcaacagtctagagcacatgaatagaggagagcattgaaagggaaggtttttataaggaattgccactcacatcaagcctctcaggcattgcagctaagtgtacgccaagcaaagggggcccaagatttcttttaaactcttctaaaaggtgagaatgtgcctttctaattaactttaggatatgttgctttaaagagttatttttaacatttaaacataaacaatatcagtactaaatataagatcaaagaaatactgtttccatatggagttgccaaagcacagaagcatggctggaaagtacaagtttcctttgaaggtggtgttgctatcagtattgcttactcagcagtctattaatatcaaaataaagtgcacatatacacatatattcattatatcctgcctggtgtaaaaaaatttcactcttcccacccttaaaaacaaaatccaacatcccaaacctaggccttcagggccctttcactagtttttttttccaaatgaacacatttaaagtaatgtttgaagcctgtggtatcagaatttatttctacaaagttaactctatttaatatccttggctctaagcttaatttgctaaatcatgctgtttttgaaatttattgcaaaattattgttctctagggaaataattaccattcctcttctatggcattgctttcctctgcatgtgaatttaagtaaagagatttaaaatcagctctgtgtttgagtaggtatcaatcaagacagggcgatctaatattatatttgagtttaaaagaatatattctgttcactcaaatatctgatttttctgaatgagaacaataggacattaaaattagaaaagaatcctaagaaatgattgtatgcatctatttatttatagactgccttgttggaaggatcctaggcagcttagaaggatatataaaatttagcaacattacataaattagaagtggacataaagcaaaggagaaaacaccagcataaaaatataaaatggaaccagcaatggagctaatataagctcacagacttccatacatgaagcataaatttgactcagactttttagtttcaaggtaaaaacaaaaacttgctcaagactacatgactcatcagtaattgaggtgttcagaacttcacaacagaagttcaaaacgctttaccaattatttgtttggaagcagactatgatttctcatcctctgcagtgaatgctgttgtggtaataaggaggaggaggttgaccatactgtgtctgtttttcaatattttggtaatgcttcctgattctcttttggggaattgcctttcccttgttttaagtgaagatgctgtgtccctgtccctcccaagctcccacctggcccaatctgactytgtcccacccaggacattgaatcttaaacaggctgtgcaatagcaagaggagacaaatgactgtggctgcttccttcccagtggttgtgcacaaccaagaaagtgactggtttgtgctaatgcccaggttccagtccctctcagagcctggttctccaaccttcctatcagttctttgaaccatccaatatcaaccagtaaatgtcttttctgcttaagttctgttgcctaaaaccacagaaccctaagtgaaacacaatgtgagccaggctacctaagtgcaaatgggttaaatgatgtgtctggagcctatagggaattttagttaattgtggaacc

SEQ ID NO: 81313 - DNA, 2016 bp, Homo sapiens
gggagagagccatttaaaattattggtgtgtttcatagttttaagattgcttccatttggaagagaatgggggtttggagatttcccagtgaagaacaattgaaaattattggagccctcctctttaaaggtgatcagagctctgaacatggacattgcagtgagatttaaaattatgagagctctttgaattgtttaaaacattgattttttataaaatggatttccacattttatttcttcagtgactaggtaattacagctgcctagaatctgagatactttattctgaaactagtattttctctctcattccttcccttttctttccttctgcatttttttttctccttaataagttttctagtttcccttgcttctgggatagacacatcattctttgttcttgctcataaatcactctgtgaccaaggaaccaggaagttattaggggtgaggggaaggtcaggtcgaaaattcagattgatctaacctattctcacaaaatagcactttgcctaccttacacccaaagcaaagcaccaatgccagctactgcaatatgacttttaataacgcttcatgaaagaaaagacttcagcagcttttacagtaagtgtgataatgattcataggaactacgaagttgtcactagtaagtatttagttacagttacattttcccatacacatcattccaagtacactttcttccttcttccctcctgtttctcctttctctcttctcttctttcgtctcttgtyaataccgacagttgaaaaggaaattctgtaattcagtgtggagactgatgaaactggaaagtggatcctttagttgggaactctagatgttgttcttcccatgtgttagaaattggtcttgtgtaaaaacacacacacacacacacacacagagtcttgtgcaaactaacaagggatgtgatcagagataattaattcaagaactctagtttatatagcaaattctgtctttctctccattcgtaaaaaaattctctccccttgctccgtcgtcctttctgttgcttatgatatttggtaatgggcaggaagagggttccatgtgttttgtacaaagctgtatcaaagtgaattgaacatagtattaggtctttgtcagcctcaactcacacctgccacacacaaggtttgttggcctttcatgcacatcatatcttgagtctaaatctaaaggaacagggaaggcaatagagcaaagctatccagatgttgctcagtctgtgcgattgtaaattttaaaagtaccagcttttcatccagattttagtgcattaggaactatatgaaaattccaagacatacttttattgaaatgtctggccatttctatatgaattttggaacagatgtactgaggttggcaataaaactgtgataataaggaacatttccacatcaactcactaaactactaatctataatgaggggcaagactcagcagtggaggagggtggattttcatgattatcattatttgtaacacagtgtcaatgatgcaaattcatccttgactttagttttgctcaagatttcagggggattgatgctgacatgtacatggtctgctttattccaaaatacattgacaattgaatttcagttttactttttaaaatcaacaataataacatagaaatatgctacatgtctttgagtttatccttataaaagttatcattgtatcattatatgtgatacccccaagaaacccaaatcaagtgcttggagatccttagaatttagaagtctgagtctaattgattctcagggtctatgcagagagtagaggtttgcactccaaaagctgggggcttggtctgggtgtgcctgtggtgtgaccactgtctttacagctcacacctctagatggagaagaaggtatgctgtcttgctgccttctcattcttagtcacaacccagctcattgactcctccatttgagaacattccaggatgcagtttcaggaagg

SEQ ID NO: 81314 - DNA, 1374 bp, Homo sapiens
atagggtttccatgagaacttagataataagatgcaagtaaaggacttggaacagagtctggcacctggtaagttgttaacgtcattgccctttgattgtccagtctgccctttcacagaactcagcgtgtttgggtttcctttcctaagatgcagcagctgccagtaaagtccattcaccccagaataagggtctggtaaatgaactatttgcagaaagccaggccttgcagggtgctttcaatgggcaagaggacacgatgacaggtgccgacgaggtattcctctccacttcctgggaaagagggcaagcctgtaacaggtgcagtcatgggggccccagtaggggatggctgagaggatgaagcttccattttcagagtttggatgaaaacaatcagagccccttttccagtggaacttgtaactgcttactcatcacaaataacttaaagcatgtcatcaccattcctggctscaggaatgaatcctgcccagagaggagatctgttttcttccttaaagccctaagagtgttctgcttcaattccctgtgtgggacatagatatattaaatacaaaaaaaaatgaccataaagtgaacattaaggttgagaaatgaggtctgaggatgccaggaaattcaaaagtaagtgttcccccagcacctctaattcagccatctttgcagtaatgcatcctttccgatttctgaatcctcagcggaattcccatttcacatagactctggatccttcaactaagccaggggagggatgtttgggggttcctctccctccttctcatttccccaggtcgtgggaaaatcctgtctaggacccttccaccaagaccttgaatgaggccaggcatggcaaagtactcttgagagccccagggaggagctcagccccaggaggctggactagttcctttcccagcccctcccggagagccaggaggctactcctggctccacatagcaaatgtatacatgcagatatccaggatgcattagtggttcgacacaactgatgtgctcaggcacctccggggtacattagttgaagtggctacggcagctggtggctcctcttcagccataatttatctattgcactttacttaatgtgcaaaattaaatttatgctgaatctgtgtgtattacctactgtgcatgaacggcatgaaatataccacaaagcaaatcagcacagagccatgctcttaattgctaatggctttcaacacacttcattgtgatctaaaccaacttggaatccattctccattgagaatcccactcatatcgaggttgaaagtgcttcttccgagaaccttctggagaactgaaggagacaatgagcaatgctt

SEQ ID NO: 81315 - DNA, 723 bp, Homo sapiens
ataaaaagtaaaattattgagatatattttactttgtattttataaaaatatactttgatgccaagtttgctgatcagttttgtcaagtagactatgcagtagtttatgtcaactatcttcttaattcttcccccaaatttcactcaaacatttcatcatttttctctgccttcaaatattattagcaaaactctgctaatcagagaagtggaagatgtcataaactgtactttctttttttgttttggttttgttttgtttttgagacagtcttactctgtcacacagacgggagtatagtggaataatcacggctcactgaagtctcgaactcctttgatcaagcaattctctcayctcagcccccaagtaactaggactacaggcatgtggcactgcaccctgctaatacttttatttttttatagagatagtatcttaccatgttgcccaacccggtctcaaactcctgggctcaagtgatcctctttcttaagcctcccaaagtgctggtattacaggtgtgaccaccacacccagccttgtactttgtttattaagttttcctaatagattctgtaactgaaatgtaaaaaaaacttttatatgtagcctaagctgactctattatttatcagagaaatactacaacctgacaaatatgttggttatatacttatgtggcctgctaaatttgcagagacagagtaagtaaaggtgga

SEQ ID NO: 81316 - DNA, 758 bp, Homo sapiens
taaaatgaatttgctcaactccaacagacaatataaaaatacgaagatrgatagacagatgggaaatagatggataaacagatggtcatatcactttggaaaaataaagttaaaacttgcttgtcattcaaattaacagtgaacagcattctttaaacttgcaccttggatcagagctaacagtataagtgctaaaccatagcactatatcatgtgacctttaaaataaaaacaagtacaaagactatttcgagatttttacttcagatctcaaacaattcaaaagactgctgatacaagtaatttccatgtttatggcagaaaataaaattttataattaatatatttataaaccaaagatatccagaaattagtttaccttccctactcaggattgaggttcaagggagaactgtgtttttaaagggactgaaaccttgaagaggtctttcacatcacttgtaagttggattcctaggtattttattctctttgaagcaattgtgaatgggagttcactcatgatttggctctctgtttgtctgttattggtgtataaaaatgcttgtgatttttgcacattgattttgtgtcctaaaactttgctgaagttgcttatcagcttaaggagattttgggctgagacgatggggttttctaaatatacaatcctatcatctgcaaacagagacaatttgacttcctcttttcctaattgaatgccctttatttctttctcctgcctgattgccctggc

SEQ ID NO: 81317 - DNA, 614 bp, Homo sapiens
acttgaggccaagatttggagaccagcctggccaacacggcaaaaccctgtctctactaaaaatacaaagattatctgggcgtggtggtgcacacctgtagtcccagctactctggaggctgaggtaggagagttgcttgaacctgggaggcggagctgcagtgagccgagatcaagacactgcactccagcctggcgacagagcgagactgtctcaagaaaaaaaaaaaattaactcgtctttaccttgttcagaaatctccaaaggtttttctctgcatatagaaaagaaaccctgcccatggccactattcttggctcaaagtctttacgatgactgttgctctgcttgaaatgctctccctccagatcttcccaagatgaccttattctcatcatccaggtttcaaaacacgtgttttctcttcatgagatattcagttgccattcaagttaaagcagtttctcctccctrctttatcacattgtctgttttttcatagtacttgctacttcttgtaactacctcatttctttttgtctttctctccccaagagaatgtcatctccttgagagtaggattactgtcagcctattttacctagaatagtgt

SEQ ID NO: 81318 - DNA, 1908 bp, Homo sapiens
tccaaacttatattcttcacattggccacttatagcatrttttcaaaaccctagtgtgattcatttatatctctgctcatctatcatttccatgcacaaaaaaccttaaatgactttaggtggcatactttaattctttctattttttgaattttcaaaaatgagcatctttttttttccccatccattggaccctgatatggtttggctctgtgttcccacccaaatctcatcttgaattgtaatccccacgtgtggagggagggaggtaattggatcacgggggtggtttcctccacgctgttcttgtgatagtgaggggattctcacgagatctgatggctttaaaagcatggaacttccttgtttgcttgcccttctctctcctctgtctactgaagaaggtgctggctttccgtttgcctcccgccatgattgtaagtttcctgaggcgtccccagccatgtggaactgggagtcacttaaatctctttcctttataaattacccagtctcgggtatttctttatagcagtaggaaaatggactaatacagacccccacggcttagagataaaaactcaaactccttaatatcttcttgcatcggggcccaatttttctttaacaattctatctcctcttattgttctataggtactttgctctgtaaaaatttcattctactttatgttttttcaaacataaatgaacaatttttacccctgtttttgcttatcctatgtcatcttccttgaatgccaatttatgatgtctacctcttagaatcctgttcttcaagatttagattgaatcctaatgtttttcatatccttctctgatatccccatcaaaattttctcttttcaccgagaacttaaactttgctttgttgtatgtgtttttcttatattcaagtttcattcttgcttgcatttgtattcatcacagaacctagtagtgtgccttgctgctagtattcatttactaaatgcttattgtctagaaaaataaaataaaataaaataaaataaatgacccaatgacgcctctccctcagtggttttacccggcagcactaaactattcccttaggatagcacaatctaaaaagatgaaagtaccaaacattagcctgatagtttttaaacctttaaaagccaagaaaatctaataatgaatgcatcaaaaatttgtttttctgtttcattatttctctgttctttgtattactgattaacttgtaatcaccatgctaatgaagtcccttgtgtgctacttcacatctttaatctatgcccataaggtgagctgcaaatatactccttaatcacaattagaatctaatgaaatacttttaatgcagcaacctgttattgccctcatttctgaaaaacaaaaaagtttaaaaatggggaaatagcactacatttgcaagcaaagacatgatttcacttagtatatttgtgtgtgtaatgtgtaagaagacccatctgaataatactattatctcatcttatacatatgattggaggtatagctaataacaaaaggtgttatatataaataataataataaattagaaatatcccagcaacgaacattaaccatgtaatatgcaaatcagagaatcagatatgatgctaggtctataaaatataatggcagaagaacgttattacctaagcttgaagaacagtgtcagcaaatattttgcaagtatataagctgtcataataatatttctagtctgtgttttccacaggatatgccaaaaataagcatcacattcaatatttgtggctttaaaaagccagtgtctttgtgaactgacttaacattacattttttgaatatattttacaaataaaataaaaaagaataagataattgaaatccatttagga

SEQ ID NO: 81319 - DNA, 674 bp, Homo sapiens
acccaatcttatgatttgatgaatctggatgcaacccagctcatgatgggcagttcttgcctcatagttacttgacgtcatgtggtcagactctgtaactctacaggtgcctaatagcatgccataaactggttttacaaacatttatagttctctatttcagataactttaagaaccctaagggtctgcactacaattctactattggagtttaacctgtggcttcacatgatgcctagagttgtggaatactataattatgttgcagtctggaatttctaaagagccttttcctgttctggggcccactcagagatggaaaccttccctattggtaaataggttggaggagtatccaaaatgcattyatagctgaggctgcaactcggaaaatcttatggggagcttaggagctaggctggcctttcagagttttcccaatagaagcaaagaagatgagtctttgtaaactgtggaggaggtaaaaccttggccaaggcatttccctatggccaaagaaatttctagggatgattcatcagtcatcagtatcttaggaccttggggatgagtaccttggtcctgaagatgttatctgggtggagcaccgtggtatctattagagtgggtctgcggataagaggagctgcatccaaatgcaatgctggtcata

SEQ ID NO: 81320 - DNA, 374 bp, Homo sapiens
tgctcagtaaccacctgcagttaatgacaaactctggctaagcatagggcaggttcaaggagagtagcctcagagtcatttcagacacttggtggattctttccaagagtaacaacataaaccccagggataaacacttgataatttttctaaagaaagtgacaccaaagatrccagtagggttatatataattagtgtgccattaaagagatttgagtaagacctacccaggagattttctttttgctcactagatgctgcttgtctgaacaggtttcggcctatttttgcctctttttctttcacaaaagccaaggacaatagagagataatgggacacatttaggaaaatgaaaacaggaatttaatatgc

SEQ ID NO: 81321 - DNA, 1025 bp, Homo sapiens
tgcatatatagttatcactttgtatacaatttccaggggattaacagcctggggaaggaggcaatggatgcttcttctttatcgattaagtacattctgacagacactgacaccattgtcattatctccaacaacacaggctcgggggagaagaaggaactgaagtggggtgaaggtggagaggtgtgagcagttaagttcagcgagaagttctgaataatctgtccttccctaccctcccccctttggcaggggtcagtttttatagccacagcccaactccctaatggcatttggttttctggtaaagatcaaaagtgcacttggcatttcctgagcataaacagcataccagcctatactggctagaatcgatggatccataaccatgtgaaaatgtgaatgcatttctgtagatgggcagctgtgggtctggaaaatatccagtttcaaaagcaaaacaaatgataaaagtagttaaataaggattctggcttgatgttcacctaagtttaycaaatgcatccctttcattttcatggaaaattaattctggcctgtaattcatttctatgactgattccttttgtggaagttgaagtaatagaaaatgactttctgaggaagtcctctggagttgttttctgagtatgctctttaattctcttaaagaaatgtctgtctgtaccagtagaagtgacctttcttctggtttaatttctgaagagatcaatgattataggataataactttttaaatcattcaagaggtgtattgacaatttgctataggccaatccctgaagaatgcaacatggcccctacgttccaagatcttgcagtttggtagaggaaacacataaaacatcttgtcctagaaactctgagattcaccattcatatcaccaacatagatggctcatttaaaacccaatggcccaatcatatcacccatgcttttttcatcataattactaacaaattcgtacaatatgtgcttcaacctgcagtattttgttacaatc

SEQ ID NO: 81322 - DNA, 1025 bp, Homo sapiens
tgcatatatagttatcactttgtatacaatttccaggggattaacagcctggggaaggaggcaatggatgcttcttctttatcgattaagtacattctgacagacactgacaccattgtcattatctccaacaacacaggctcgggggagaagaaggaactgaagtggggtgaaggtggagaggtgtgagcagttaagttcagcgagaagttctgaataatctgtccttccctaccctcccccctttggcaggggtcagtttttatagccacagcccaactccctaatggcatttggttttctggtaaagatcaaaagtgcacttggcatttcctgagcataaacagcataccagcctatactggctagaatcgatggatccataaccatgtgaaaatgtgaatgcatttctgtagatgggcagctgtgggtctggaaaatatccagtttcaaaagcaaaacaaatgataaaagtagttaaataaggattctggcttgatgttcacctaagtttaccaaatgcatccctttcattttcatggaaaattaattctggcctgtaattcatttctatgactgattccttttgtggaagttgaagtaayagaaaatgactttctgaggaagtcctctggagttgttttctgagtatgctctttaattctcttaaagaaatgtctgtctgtaccagtagaagtgacctttcttctggtttaatttctgaagagatcaatgattataggataataactttttaaatcattcaagaggtgtattgacaatttgctataggccaatccctgaagaatgcaacatggcccctacgttccaagatcttgcagtttggtagaggaaacacataaaacatcttgtcctagaaactctgagattcaccattcatatcaccaacatagatggctcatttaaaacccaatggcccaatcatatcacccatgcttttttcatcataattactaacaaattcgtacaatatgtgcttcaacctgcagtattttgttacaatc

SEQ ID NO: 81323 - DNA, 644 bp, Homo sapiens
ccaccagaaatactaaatcagaatctctgatttggggcctgagaacctagattttaagaaaataactacatgatatgtataaataccatgagataacttctgcagaaggttcatttcatttgtcatgtatcacctgtcctggtttaaacctgaagaagttatcttatttccaaaacccagggtggtttttaagatggcacctatatactgagtagagtaacaagttggctcaagttaaaagtaaaaggaattataaaatctggccactagtagttcaagtgatgggcaaaattaatccacatttttaagtgacaaaaaatattataatagaaawcaaaatagtataatgctttagtgagttttgaaaataaaggcctgaagaaaagagaaatgtaaaaaaggaggctttgactatgtaacactaaaaataggggaaaaaatcatccagggcttttagtgggtttaacatctggtttttgttatagcatggttgatttgattatctctgatatataatatggctgcaaaaacatgaagaatcgaaaaatgatcatctttgagactccacaatgacaggggcagagccagctttatttaaggaaaggggcctgcattgggaccgagaaagggaccatctccatggt

SEQ ID NO: 81324 - DNA, 840 bp, Homo sapiens
acccagcaggccctggtgcattatgttcccctccctgtgtccatgtgttctcactgttcaactcccacttgtgagtgagaacatgtggtgtgtggttttctgttcatgtgttagtttgctgagaatgatggttccagcttcatccatgtccctgcaaagggcatgaactcattcttttttatggctgcatagtattccatgggtatatgtgccacattttctttatccagtctatcattgatgggcatttgggttggttccaattctttgctattgtaaatagtgctgcaataaacagtttttcataatacacatttttcctgaactttttgaagtccccctcatattatytttagtaaatgtatctctatggctttatttttatttgcagatagcttgcaaagtattctaagctgatgttcttgttttttagcaaaatagttctccaaatagagagcgatagttttctaatctttaatctgaaatttctaggtgattatttatggtactacaattaagtgactcaaactttacaattagacctcattatttattatctcataacctaataacatttttatattactgagagctgcttatgttgttaatgactcattagcatgactccacttgcaatgggaatgcaaaccaggtacttccaaaagtaactaatacccagttttgattctgtggagggcaacaaagcaggagtcaaaataaatggagaagaatgagaaagacattttttttccagaagaatgctagtttagacataacatagatgtaaaaattttcccaattttaatttttctagcatgcttactttgaaagattacatta

SEQ ID NO: 81325 - DNA, 756 bp, Homo sapiens
actgtgcttgctcaaatccagataagcataaaaaaatagaggctgtactattaactccatggtttgtgtgctctcttgctgcatgacactaacagttactttgttgtaaacacgtggatcaatcataaatgtacaagaagtcagaaatgtagacagccctggtggtttagaggctaaggatgttcaacaggtccaggaagaaatttaattctgatgagggtcttcaacccagtctctcagactttgaccctcacatagttcccccttccttggaattcaggtttggcctagaatctgggtaacacacaaagttgaatcagtctggacccatggagaatgtatgggcatcatgcctagaggagtttcggatcatactgctgcacactgcactgttgagataacaccctagagaataacttggtgttcttaccataggcctggcctactattttccagctctcttgaaggcccattgckaatagggacactatattttggactgtgagcctccacttgctggaaataagaagcacctctgtgaagaatcccttactgtattatacttccagcattttaaaaccatatatccttatgccccaggtggctcgactttgaacacttttcccctgcattcattctattgtaatactagccatactttattagctctatagagggtgaagtatggcagaatattccctgctcaaaaaaaaacaaaacgctttggcataagaattattttgagttaaagtcact

SEQ ID NO: 81326 - DNA, 469 bp, Homo sapiens
cttcttcctcagaatctttttctttctgtttcccttatggaattggtagcttcataatatgggccatacgcatggtaaatgctatgctattatgcattggaaatgaagatgtggtgttgataaaagggaaatcatgcagatgccaggctgtccccagggccccagatcattcccaggggtaggacggagggcctctgaggccattttgtttgtttkttttttttttttttactttcaaggggctaggaaaatcaggatgtatgttgtctaccaaaaatttctggttctcaaggactctctagtccctggataacactgggcataaccatgcttgatgttcaaatgaaattcatagcagtttaatcagttgatcccattgcttttttatattctgttattaatactgatttataaaacccagttattttcctcattattgcttctcagttctgtgctttctatgaattcc

SEQ ID NO: 81327 - DNA, 469 bp, Homo sapiens
cttcttcctcagaatctttttctttctgtttcccttatggaattggtagcttcataatatgggccatacgcatggtaaatgctatgctattatgcattggaaatgaagatgtggtgttgataaaagggaaatcatgcagatgccaggctgtccccagggccccagatcattcccaggggtaggacggagggcctctgaggccattttgtttgttttttttttttttttttactttcaaggggctaggaraatcaggatgtatgttgtctaccaaaaatttctggttctcaaggactctctagtccctggataacactgggcataaccatgcttgatgttcaaatgaaattcatagcagtttaatcagttgatcccattgcttttttatattctgttattaatactgatttataaaacccagttattttcctcattattgcttctcagttctgtgctttctatgaattcc

SEQ ID NO: 81328 - DNA, 469 bp, Homo sapiens
cttcttcctcagaatctttttctttctgtttcccttatggaattggtagcttcataatatgggccatacgcatggtaaatgctatgctattatgcattggaaatgaagatgtggtgttgataaaagggaaatcatgcagatgccaggctgtccccagggccccagatcattcccaggggtaggacggagggcctctgaggccattttgtttgttttttttttttttttttactttcaaggggctaggaaaatcaggatgtatgttgtctaccaaaratttctggttctcaaggactctctagtccctggataacactgggcataaccatgcttgatgttcaaatgaaattcatagcagtttaatcagttgatcccattgcttttttatattctgttattaatactgatttataaaacccagttattttcctcattattgcttctcagttctgtgctttctatgaattcc

SEQ ID NO: 81329 - DNA, 549 bp, Homo sapiens
aaaatagagggaagcccttggaaaagaaatgatattagaataatgttgagtctcttgggaatcctgcaagtyttttgcttcagatgcaattgcagtagcattgagagagatgtcaaacgtcaaacacagttctgtcctgaagaaaaggagcagaccttccattggtcctccactccaccaccaccctaagttgagccagtgccatgtccaatatcagcccttgggcttcacctggcctgtgcattcattctagttccactgtctctgccttcatgcttgttacggcacaactctgctacagtattcattccatttctttggaaaggcctgcagttcaacaattgcacatcccattacagaaacagcattgagcatgattttggaaaaatcacacatatatcttatattggacctgagtattcaaagacagtttcagacacccttggtttattattcttttggcttcacaagtacattcatggaatggacatagatgagggatacccagaaactggccaagcacaggggaaaagaaagagggagattcca

SEQ ID NO: 81330 - DNA, 2487 bp, Homo sapiens
actacttaatggattaccaaagaggtagaaaacctgggagttaaccagtagcaaccaacaactatgaaataggaaaactatcaaagaaacatcaaaccaaatgcagccagattcttatgatgcttctggtaaatgctatcacaacttcagcaagtaaataatatgtattgcactgaaacatatcccagaaaacagaaaattataaaatwccccctaataacaacgatgttagaattagcaaagctaaataattacatagaaagctaaaacctatattttggcaacttatgttttacaccttctaccaaaacattctttcttagaatgttttaaagccgaatccttctcatcactcaggttttaactcaaattgcaagtcctcagagtccttccttaaacactctaaggttatgctgcctcaggcactctctaaccaattcaatcaattttattttatttgtcatatgatgatgtgaactgattttactttcactttttaaacatgtttattgtgtgtttctgaccactggagggttagctccatgaaggcacagctgaaacctcaatgttttgaacactgcttaccacatagcaggcactcaatagatatttgtaaatgttgttatatctcacttaggaatacagatataaaatcctataatttaaatattaatacagtgcttcattttaagtataataattatatatacttcatatgaccataacttaaataccacagtgtattaaagagattctagatcataaactgattataacattctacaatataggaaggttggttcaacattaggaaatccataaattttattacttccatacacatgttaaaacacgtgattatcggggtagatattttacaaacattttataaaattaagcaaatattcgtacttgaacatttagtaaaatagctgataatgacaaaggtaactgagtaatgtgtaagcagaaatgaggtttgccgtgctacttatagccctgtgtaacatgccaatagattatgggtggtaacgtggtctgggaacctctgatattgaccaggagagccagcagaaagggttgaactctaatttagctcagtttggttctcttgtttgaagttccatgtgtagctatgcactctggaaatattaagcagaatcgatggaaaaagttatcagttggactaatactctataaagcccacacaagctttgtgaaagctgggctagaatgcatagtccggcctaaaaaaaatatgaaggccccaaactctgtgaacatgcacaaggtcgaggacacccaaaagagtccaagaattttttacatgcgaacacaagcaacagaaaaagaaagcaaaataaccatgccttctgggacagaggacttaagcttaaatctccgaatttcaacattaataatggggacaaaacatgccaattggtaatgatataatattttaagaacctaatgtatttttaaaacttcaagctagaagaaaaatagaactggaaattgctgagacagaattgagtccagaagcagaccaaattttaaaataacatgataaatagaatatttcaaatcagcagaggaaatacggcattaggacagatgactagccatttgtaaaaaatagtgaaatcactcctgtactccttatacctgaataaattccatattcatttctaaataaaacatgaaaatgacattattaaaagttctagaggaaaaatgaaaatggaaataaaactaatcttatgagtctcaaaattgcttctaattctgatcaaaagccagaaagagaaattccacaaaattaaagaataaacactacttgtgataaaaatatgacagcatgtttaacaaatgacaaattgaagcaagtgtgcaatgcttgacagtctactataagctgcttctataagtcattatgaaaaaattactttctgatggaaaatagtaaaacaatgtaaacatgtaattaaaaaataaatgattgataataaattaatcataatcattaattataatcatcaaataggcacaaattataataaagataacattttgcccatcaggagcaacttttaaaattccaataataatgatataataataatcataatgatgggaaaatcaagttttaaaataaattgttaatgtttttgcatacattcataagtagacatcttaaaatatatcacaattatgaaatgagcatatgttgaaattctacttgtgtgatttctctcagttaaataatgtaacaagtggacagccacatgtgtaaagcaatccatacccctgctatttttcaatagaacaaatgagatacaattgaaatgtccatcagtattgaatcatttatcgaaatattggtgtatctttggagaagattctatgcaggtaagacacacagagagattaatgtgttcattttccaatgtgcctctgtacatacaaaaaatcaaaactatacacaaa

SEQ ID NO: 81331 - DNA, 689 bp, Homo sapiens
attttaagtttacagacattgtttggataatcacaatgagttttataaaaaggtcaacatkatgttctttgcagggacatggttggaatgggaggccattatccttagcaaactaatgcagaaacagaaaccaaacactgcatgttttcacttataagtggaagctaaatgatgagaacatatggacacatagaggggaataacacacactgggacctttcagagggtggaaggtgggaagagggagaggatcaggaaaaataattaatgagtactaggctcactacctgggtgatgaaataatctttacaataaacctccatgacacaaatttacctatgtaacaaacatccacatgtacccctgaacataaaagttttaaaaaaggaaatgcaaatcaaaaccacaatgagacaccacctcacagcagtcagaatggcaattattagatcgtcaagaaacaatagatgctggtgaggctgtggagaaataggaatgcctttaccctgttggtgggaatgtaaattagttcaaccattgtggaagaaagtgtggctattcctctagaaccagaaataacatttgacccagcaatctcattactgggtatatatccaaaggaaaataaatcattctactgtaaagacacctgcactcatatgtttattgcaacactatttacaatagca

SEQ ID NO: 81332 - DNA, 689 bp, Homo sapiens
attttaagtttacagacattgtttggataatcacaatgagttttataaaaaggtcaacatgatgttctttgcagggacatggwtggaatgggaggccattatccttagcaaactaatgcagaaacagaaaccaaacactgcatgttttcacttataagtggaagctaaatgatgagaacatatggacacatagaggggaataacacacactgggacctttcagagggtggaaggtgggaagagggagaggatcaggaaaaataattaatgagtactaggctcactacctgggtgatgaaataatctttacaataaacctccatgacacaaatttacctatgtaacaaacatccacatgtacccctgaacataaaagttttaaaaaaggaaatgcaaatcaaaaccacaatgagacaccacctcacagcagtcagaatggcaattattagatcgtcaagaaacaatagatgctggtgaggctgtggagaaataggaatgcctttaccctgttggtgggaatgtaaattagttcaaccattgtggaagaaagtgtggctattcctctagaaccagaaataacatttgacccagcaatctcattactgggtatatatccaaaggaaaataaatcattctactgtaaagacacctgcactcatatgtttattgcaacactatttacaatagca

SEQ ID NO: 81333 - DNA, 752 bp, Homo sapiens
attttgcatttcagccagcaatgaatggggatccctctttatccacatctccatcagtatttggtcttttcagtgtttgggttttttgccattcaatcagtgtgcagtggtgtctcgttttaatttacaattccttaaagacatatgatgttaattgttactatctgtatatcttctctgtaaggtatttattcagatcttttgtctgtttttgttttaatttacttttgaattttaaaggttctttatacttaaaactattttggcacctgaaatacttgccataccctggacaatgtcattgtaagtttatgtgcacaattttaaatgttctccatgaagattgtgtcaagttatattgtcttaatggtgtataccaatacccattttcatacatccttgccagccctaagtgttatcatttcttttttttatctccgataattgtctatagatgaatttaagaagcagctaacaaaatgaactttaatttctgagatacacatttatgaggttgtcctgttttggactgaagcaagagaagtataatttcagttggtgaactaagaaaaaagctgctcacttcaattatgaaatacttcatttcacaaattcttattgactacttactctgtttactaggtataaaataaatactggacctatatgattaagwaggcaagtgaagttgtacactaaaatttatggtgggagacacagatcttcttagagactaaattctattggtggaa

SEQ ID NO: 81334 - DNA, 560 bp, Homo sapiens
tcgaagagagtaaaaattaaactaggcccaagataaacctcaaagcactacattatgtctttgcagattgacatgttttcacatagataatcccaacataattaaaaaatattaatatttctgaaattcacaccaaaagagagtttgaatacaggatgattaattgaatttcctccaacaaaatcatctttatattataaataatataatacaatatatagagaaaaactgaatacaacttcgttattttagtatgttactttgragcacagatttaaagcatcaagtcataactaaagtgccaagacatgcaattcaagccttaagtggagcctgagagaagaaaaatgcccatagcaaaaacaggaatctgtcacaaactaaacagccagagagactagatatccaaaatacttagttgtcctgaatccaatttgaagttgttttatgaactcattctaccctagaccttggcttgcatatctacttagggaaggagagggggccatgaggtggaactcccagtccacttcatgaggaaccccttggacgcagggctt

SEQ ID NO: 81335 - DNA, 526 bp, Homo sapiens
ggatatgccaaaagccatagaataaatatagggcatcttgctaaaatatagaatgaatggccagcacagtggctcatgcctataatcccagcactttgggaggctgaggcgggtggatcacgaggtcaggagatcgagaccatcctggctaacacagtgaaaccccgtctctactaaaaatacaaaaaawtagccgggtgtcttggcacgcgcctgtggtcccagctactcagaaggctgaggcaggagaattccttgaacccgggaggtggaggttgcagtgagctgagatcgcaccactacactccagcctgggcaacagagtgagactccatctcaaaaaaaaaaaaaaaaaaaaaaaaaaaaaattttttttttttttttttggagagagagagagagagagagaataaaggatatttagttgcacaaagtcctggtgtgctaatttttagagaagttaatatatcaaatgaaatatgaaataagaaaatgtcattcagtaaaagcattattcaagtgttag

SEQ ID NO: 81336 - DNA, 1450 bp, Homo sapiens
ttcaactattcatatattaacattttatctggctcttattacatttcaaggttcccaaaagacagaaagtttgtcttttcatttagcattttatacccatacctattgtcatgcttgttaagtataaaacttactaaatatatgttgaaacaattactcctaaaaatatgttcctcacctcaggaataggatacttgactaaagtagggaagcatagttatagacccgtaaatttctggtcaaagttttctgaatacattttgaagcttcatatacaaggcattgaatgacattactactagctaataggttggacagcaataagtaggcacaaacatttgtcaccacaccaaaaatcaatctttagagatattcagcacttagtactaatctcagttgtattataagataacatgatcataatttctgtttgtctctgccagaaacttttatttttatgtcaggttgattaagtttatctgaaacagccggattctaggttataatgtcagcagcggctggaggaggagagaaccatagaatcagaacactttggtttgaatcttggtgcttctacattttaaccactagggctgggaaagttatttattagaaataccatccaaaatcacattaggttaaaattacttcatagagttttgagattatctaatcagataatatacataaaattatgttttaagccatggaattcaaaagtaacatataattgtttctgttaactttctcatcaggatagggatgagtatctctatgttcttttggagataggactagtctttaattttcaaattggaaaagcagattttttttttttgctgaggtttttaggttagagcttagcaaatggtagttccttattcatttataaattctatccccattcatgcatttaacaaattatatttgggaatttaccataagccaagtactgatgaaacacaattatacaatrtgaataatgcaggcagaagcctgcactaatggagtttaatatctagaggagagagtaatatttagtatataaaattacagccaaacaattatttgcaaattttttaagttgtataaacgaaaataatgagggattataaatgataataaagttacaatgggtaagaagagctttcagagttagtcactatattgtgacattaataataaaaatatgaaaaaagttttcttcatttttcaatcgaatattctcataaactgaagaaaccaatatataatagaagtttgtgtactatagatgttactataaatgttaccttttagaataatcatgtcatattttttattttgtcataataaaaatactttgaggttatttttttctgtataattttactgcatcaaaactgttatacgacccaatggtattgaagattaatattgtaaaatatatattttatgaatgatataacaa

SEQ ID NO: 81337 - DNA, 648 bp, Homo sapiens
ggaatacagtatatagttttcctttgttacaaaaatgctaaatgcctgtgtgcccccaaatccttatgatgaaatcctaacccccaatgtgattggggggaactttgagaggtaatgaggtcacaagggtggagagacctcatgaatagaattagcgcccctattagggaccccagagagttctctcgccctccttctaccatgtgaaaatataaagagaagtcagcagtctgcaacccagaccaccagaacccgaccaccttggcactctgatctcagacttccagcctccagaaccgtgagaaataaatttcttttgttaaatatgccacccagtctatggtgggtgacatattaacataactttgttatagcagcccgaaagaaaatagcctccaatatataaaaagttaatatgacattgtttgcatttaaatatggcatatttatctgatgatttggaaactcacaataattaagccatctttttccttctttttttgatcctggaagtgtgcctatttttcaatttttaatttctgtgggtacatagtaggtgtatatatttatgagctacatgagatayggtgatacgggcgtgcagtgcataataatcacatcatggtaaatgggttagctatcccctca

SEQ ID NO: 81338 - DNA, 585 bp, Homo sapiens
atttataaagtctttgacatattaaatccaaagggcattcattttggtattgaacatttttctcaaaaagcaaaaataattacaaggacaactaaaaaaaaaaaaactgaaaggcagttacgcagttgaatactgactagtgacaaataccaagacattttctaccaaatgatattcagttaatgttctcggtttcaggttccaaggtatgacccttgtggtccctttgggtcatgatgttgctcacacagacagacattgagattcytgtcctcctctctcttcagcttgtgaaagttcatcctgtctggtctctgtatcccaagacaggctgaacatttatttgcctttaggctgcatgtgaaggattctcttactgcttctaggcctccacatcagctcatgattcttctctgattccagagagtccaacaggacaaagtacctcaaaaatactcagagccacaatgtgttgttcacatcctctcattcaagtgagaaagtacagagctcctgtcgtgaagtatatgtttttgatcttgacttaggcttatttgtgcgatcagatgaacccactctaaagtc

SEQ ID NO: 81339 - DNA, 972 bp, Homo sapiens
attgagcattagcttctacggtgagaaaaatgagatttatgggccatgatagtttcctctaaggtttgtgaatacaccagggataattaatactcaatttgatgaactatggacaataaggatttcacacttttcaaaagagaatttgcaaatattccaggtaatttactttaatgttttgcctcttccagatctgtggatttagtatcttacttgccttatcttctaacatttggataaagctgaccacttcttcctattgactactctgattccttatatacaattctgatattataagtagcatacatattataactgttttcttttcactttcctcctctagattatgaatagcttaaagaagggactatgtctttctttttagttccccggcatagagaacgcagcatagaataggtgataaatagckgtttgttaaaataaaaaggaaatacatgtttcatgaaaaactgaaaataaaatttatattattaaaaacttatgttagatattatctcggaaaaaatggaacaggtagaaaagtaaaacatgttcaaacctcagaaatagcagccagttctaaactattttattgttcatattaatgtcatttgaggaaatcgttttgttgcaaagtggtaaaaaggagttttaaaacatattaatgagactatattttcttcttttttttggtctttagtgttcagaagtgtaactaaaggggagatggaagaatatcggtattttattctgatatatgtaaaaatacttttaatcaactgatttttggacataactgagcgaatttttccaacaaaactggctatgctaaagaaccccaaattacggtgttttggatggctaaagaatgtgctgagatgttgattccctgggccatcaagctggtgcatcctcagtgtgattggtaaatatttatttcctacagagtcccaagacgtgagacatggt

SEQ ID NO: 81340 - DNA, 972 bp, Homo sapiens
attgagcattagcttctacggtgagaaaaatgagatttatgggccatgatagtttcctctaaggtttgtgaatacaccagggataattaatactcaatttgatgaactatggacaataaggatttcacacttttcaaaagagaatttgcaaatattccaggtaatttactttaatgttttgcctcttccagatctgtggatttagtatcttacttgccttatcttctaacatttggataaagctgaccacttcttcctattgactactctgattccttatatacaattctgatattataagtagcatacatattataactgttttcttttcactttcctcctctagattatgaatagcttaaagaagggactatgtctttctttttagttccccggcatagagaacgcagcatagaataggtgataaatagcggtttgttaaaataaaaaggaaatacatgtttcatgaaaaactgaaaataaaatttatattattaaaaacttatgttagatattatctcggaaaaaatggaacaggtagaaaagtaaaacatgttcaaacctcagaaatagcagccagttctaaactattttattgttcatattaatgtcatttgaggaaatcgttttgytgcaaagtggtaaaaaggagttttaaaacatattaatgagactatattttcttcttttttttggtctttagtgttcagaagtgtaactaaaggggagatggaagaatatcggtattttattctgatatatgtaaaaatacttttaatcaactgatttttggacataactgagcgaatttttccaacaaaactggctatgctaaagaaccccaaattacggtgttttggatggctaaagaatgtgctgagatgttgattccctgggccatcaagctggtgcatcctcagtgtgattggtaaatatttatttcctacagagtcccaagacgtgagacatggt

SEQ ID NO: 81341 - DNA, 511 bp, Homo sapiens
acatcagcttcttcagactctttgaagaatgatctttgctgacctactttattgaaggaggtactgagggatcacctatgggtaaagtgaagaatatttagtgtcaaaatttaaaatgtgttacattcagagagaaagggcctcattcagacataattctttaaggggcactgtataacttcagccacactaattttgactctagaaattttcatagttccaccagtccattatgtatttataataataaccagatggctttgtcagcttagcactttatgcaggcaaagaaagcattcattaataaaactgagtccatacactgtaataaggaatayatgcagtttacaatttggactattctgaactacatcattgctacgcaagaccattctctattttttcttcaataaggataagtgggtgtccagaatggctacaggtattttcatttaaggtgggagaaatttcctgtgaatcacagcttactttgtcccaacttacatatttc

SEQ ID NO: 81342 - DNA, 804 bp, Homo sapiens
ccaagaccaccccctggtttgatacttccctataaggactcacaggactcaacttataatcatgttcatggcaaagattggttacagggaaaaggaacaaatcaaaatcaagaaagggagaaagcacatggggcagacgtcagaggaaaccaggcataagctatcaagagttgtcttccaggggagtcacacagaacgttctttattcccccagccagtgatttgtaacaacatgtgtgaaatkttatctgccagggaagcttgttagagactcagcaccctgggtttttattgggggctggtcacatgggcactctctatgtagcttgtaccaaaatgtcaggtttccaaaaggaaagcagatgtctagcataaaccatattgtttatgtaatttaggcacagtgagccactcttattatttagggagagttttatattagtgcagggaaccatttgccacacaagctcatagacaccagccaagagacaaccttgcaagcagatgtctccaaagatagcagttccaggctcttttctgcaaatatgccaaggtaaatttctggactattttttaagactgaagagaagagatcttagcttttctggacaaccctgaacttgacttatctaatgaaactgtcagaaatggtagcaaggctccataatataggtcactgccaagtgacaagtgaataggctctttgaacatatttcatcactgccacccatccactgctttttcatttcttttccgaagaaaccctcatccccacttcccattttaaagaaaagaatctgataa

SEQ ID NO: 81343 - DNA, 1198 bp, Homo sapiens
ttgtacatataaaataatacagccacgaattcttgatgtgattttcgtagctgctaaatgaagccaaacaacagagaggaaagcccctatccttttactcatccaccccttaaaacccagagtccagaattagtcctaagcctctagttccatgccttgttgtgacttaaataccaagtgcccttcccaaggacaacactccaaaccccaataaggatggtgctacctctttaatattgcccacaactggaaaggacctagggcaagaagaggcttttataatccttccctgctcattcataggaggctcagctccctcaggctctgctacagcttagagaggaaaacagatggtgaaactttattatcccttccaagtctttccatttccttgacagcttcattatatgacattaaatggggcccttcttttggaggaaggtttaaggataaaagagtatggacaatattattcaattattccccaatcccttgaaaaaaaatcagtcaccttatcattatagtatgtctgacatgcaatagcactgagtcgttaagatatatatcgatcccagcccagtcaataacacaattctaagcctcctctcagtctatagcattgacatggcctagattattcacattatattggtttgctaagtatccatttcagatggcagcttctcccttatttgtggtacccactctaaaacctacacactgactcccttgctctctctaggtctccgctctactttcctctgtgctgatgccatttccaggcagtttctctgatagtaacagtttgactccagccttgggcttgaaactaattttcccatatagggtcatggaccatttctgaaccaatcactgttgtcaatgacaaagattatggttcagctctgtatcactttatcttcctaaggggttgggattagggccagctcaattcaaatcacataaattgagtgggaatatgggaaatagagactmggcaaacaataacaacaacaaaattcagttgtatataaatgtctgtgttttgggggagaattggggctaattctttgttttagtggaaaatatgtttttaatgcctcaaatttgaaaatctgaggatgtttatcctcagaaacattgtttatcttaatggttaaagttgtctttactgataatatatctgtatgtatatgca

SEQ ID NO: 81344 - DNA, 544 bp, Homo sapiens
atctgtgcaattatacattctttcagtcaagagtggagtcttcattggctctcctagtagaaagtctcatctgagtgccttgaccctgggcagcttgtatagctcagcacagatatgctgcttttctaacccaggccttgatttcaaccccacccccattaacacctttgagattaaccatttaatttcgaggcacttgaaagaatatcaaagttctgtctgcatttctgcattggttaaactcatagttctttcctctactgaattactcataccatatattaaatagtttctcttcaaagcagtctgtaagtttttgacagagatgtttagtgcctgagtcatgggccatcacaattcaggatcagtcacatctattctcccagctgaaaatactacgatctactctaaagaagctggccatttctactgcctttaattccatygcctaaggtatggtaggctttcttctgcatacaccgtaacttttcctttcaaagccccatcatactgtgatccttatgaagacattaagtagtcatac

SEQ ID NO: 81345 - DNA, 547 bp, Homo sapiens
ctgaaagtcagccctgttggctctctcctgttttcagtcaacatgtatattatcaggttgaatgaggtaaaggtaagcttatcaatcttcaactgacacctagctataagggaagaacaacaatataggtgacagaatcaagattcaaaaatttstctaggctggattgtaggtgagaaattggcaagatgcaatgtaacagacctcattattgagtttttgttttaagttattttcaaaaaacaaggtgagggtatcagtgacttgggtttggtagttgtacatgaaaaagtaattgaagtgctttatttgatgtgctgaattttatttgccaatgtgatgtagctataaaaaattagccctggaatgccttagtaaaagcctgttcttcagaatagaagaaataaataaaagttctgccataatctgtatttttttaggaaaaatctaggaagttacatttaattctaaaactcatacttagagagaaatttcaagaagtatagtgtatttggaggaatatctgcatatcgtaagtaagaactgt

SEQ ID NO: 81346 - DNA, 547 bp, Homo sapiens
ctgaaagtcagccctgttggctctctcctgttttcagtcaacatgtatattatcaggttgaatgaggtaaaggtaagcttatcaatcttcaactgacacctagctataagggaagaacaacaatataggtgacagaatcaagattcaaaaatttgtctaggctggattgtaggtgagaaattggcaagatgcaatgtaacagacctcattattgagtttttgttttaagttattttcaaaaaacaaggtgagggtatcagtgacttgggtttggtagttgtacatgaaaaagtaattgaagtgctttatttgatgtgctgaattttatttgccaatgtgatgtagctataaaaaattagccctggaatgccttagtaaaagcctgttctkcagaatagaagaaataaataaaagttctgccataatctgtatttttttaggaaaaatctaggaagttacatttaattctaaaactcatacttagagagaaatttcaagaagtatagtgtatttggaggaatatctgcatatcgtaagtaagaactgt

SEQ ID NO: 81347 - DNA, 547 bp, Homo sapiens
ctgaaagtcagccctgttggctctctcctgttttcagtcaacatgtatattatcaggttgaatgaggtaaaggtaagcttatcaatcttcaactgacacctagctataagggaagaacaacaatataggtgacagaatcaagattcaaaaatttgtctaggctggattgtaggtgagaaattggcaagatgcaatgtaacagacctcattattgagtttttgttttaagttattttcaaaaaacaaggtgagggtatcagtgacttgggtttggtagttgtacatgaaaaagtaattgaagtgctttatttgatgtgctgaattttatttgccaatgtgatgtagctataaaaaattagccctggaatgccttagtaaaagcctgttcttcagaatagaagaaataaataaaagttctgccataatctgtatttttttaggaaaaatctaggaagttacatttaattctaaaactcatacttagagagaaatttcaagaagtatagtgtatttggaggaatatctgcatatcrtaagtaagaactgt

SEQ ID NO: 81348 - DNA, 696 bp, Homo sapiens
cacacactgccaggcacagagcagtcactgtcactgactcagcaacctccagtgccaggagctgtcctagattctgtgggtacagcctggaataggacagataagcctgccctcgtggagctgacatccatctatgaagccaacaatagggatgaaagaatgaacaaatgaatgaacatgctaggtggttaattaactaacatttgacctattgtccggaaggytcccggacccatctccagctcctgttcctctgcgcttcctgtcttcccctactctctcctgcccaccttctgcttcttctgtctcccccaaaatacacactctcttcgatcattgcacagcccctcatgttcacacagcactcccagtagagtaatctttctacgtgttgtctcctgagctccttccagtccacccaggtcctaggtatgatgaccattttacagataaggaaaccaagccccaccagccagagcccagtgctgcggtccacaccttcccttcttccaccccgtcttcttccccacctccacctttctatctcaccgtcctctctgcttcctgccttctgggttgacctgacaagtggcctctgctctctcagcctgtttcctacctgtgaaatggggtgggcatggaggctcagggagatggtcacagggcctccactgtcccctgtcccgcacccctccg

SEQ ID NO: 81349 - DNA, 696 bp, Homo sapiens
cacacactgccaggcacagagcagtcactgtcactgactcagcaacctccagtgccaggagctgtcctagattctgtgggtacagcctggaataggacagataagcctgccctcgtggagctgacatccatctatgaagccaacaatagggatgaaagaatgaacaaatgaatgaacatgctaggtggttaattaactaacatttgacctattgtccggaaggctcccggacccatctccagctcctgttcctctgcgcttcctgtcttcccctactctctcctgcccaccttctgcttcttctgtctcccccmaaatacacactctcttcgatcattgcacagcccctcatgttcacacagcactcccagtagagtaatctttctacgtgttgtctcctgagctccttccagtccacccaggtcctaggtatgatgaccattttacagataaggaaaccaagccccaccagccagagcccagtgctgcggtccacaccttcccttcttccaccccgtcttcttccccacctccacctttctatctcaccgtcctctctgcttcctgccttctgggttgacctgacaagtggcctctgctctctcagcctgtttcctacctgtgaaatggggtgggcatggaggctcagggagatggtcacagggcctccactgtcccctgtcccgcacccctccg

SEQ ID NO: 81350 - DNA, 1090 bp, Homo sapiens
tgcatatatatggcccccgcattctgccccctctacgccccaccaaagctgcagcacctgctgggtcacctggcagcatttccagggacatgcttcgtcagtgcataaggaccttttactttgtgtggctgcgtagtgcccctgcttctggtctcctcatgatggacattaggtggtttccaatctaggctccgacagaactgcggtggaagtctctgcatgggccactttgcacgtctctgcaggacagactcctccccacagagggcttggtcaaagggcaggtgtgtttgcaatttccctgtacgtggccgcattgccctcctgccagagaggggcagggctggtgccgtggtgccctgtgacacctccacctctgcaggacatgcccagaaggaggccctgtggcygatcccgacctggcctcatgtagcaggtcagggacttcctcactcactccctctctctctctctttctttctttcatggagtctctctctgtcgcccaggctggagtgcagtggtgcgatctcagctcactgcaaccttcgcctcctggtttcaagcaatcctcctgccttagcctcccgagtaactgggattacaggcgcccgccaccatgcctggctaatttttgtatttttagtagagatggggtttcaccatgttgaccaggttggtcttgaactcctgacctcaaatgatccacccgccttggcctcctaaagtgctgggattacaggcgtgatccactgtgcccggcctcatcatctgtttcttttgtggatctccacggaatctagagggatgaatcacatatttttatttgttttaacagagaggtgtcaatataggaaaacaaatctctgctcctaaaagaaatgaggcagagaacctactggaagttagcagcgagtacctgattcaaccatgaacattttaatcttcatgagagattaagttagtgggtttggttccagtttttacagttgtattcatttggtaaatgtttactgaagatgtgtgacaggccctcaattttgctgttgaaccaggaggtgggtttttcctttgcttttgtttgctttcc

SEQ ID NO: 81351 - DNA, 1090 bp, Homo sapiens
tgcatatatatggcccccgcattctgccccctctacgccccaccaaagctgcagcacctgctgggtcacctggcagcatttccagggacatgcttcgtcagtgcataaggaccttttactttgtgtggctgcgtagtgcccctgcttctggtctcctcatgatggacattaggtggtttccaatctaggctccgacagaactgcggtggaagtctctgcatgggccactttgcacgtctctgcaggacagactcctccccacagagggcttggtcaaagggcaggtgtgtttgcaatttccctgtacgtggccgcattgccctcctgccagagaggggcagggctggtgccgtggtgccctgtgacacctccacctctgcaggacatgcccagaaggaggccctgtggccgatcccgacctggcctcatgtagcaggtcagggacttcctcactcactccctctctctctctctttctttctttcatggagtctctctctgtcgcccaggctggagtgcagtggtgcgatctcagctcactgcaaccttcgcctcctggtttcaagcaatcctcctgccttagcctcccgagtaactgggattacaggcgcccgccaccatgcctggctaatttttgtatttttagtagagatggggtttcaccatgttgaccaggttggtcttgaactcctgacctcaaatgatccacccgccttggcctcctaaagtgctgggattacaggcgtgatccactgtgcccggcctcatcatctgtttcttttgtggatctccacggaatctagagggatgaatcacatatttttatttgttttaacagagagktgtcaatataggaaaacaaatctctgctcctaaaagaaatgaggcagagaacctactggaagttagcagcgagtacctgattcaaccatgaacattttaatcttcatgagagattaagttagtgggtttggttccagtttttacagttgtattcatttggtaaatgtttactgaagatgtgtgacaggccctcaattttgctgttgaaccaggaggtgggtttttcctttgcttttgtttgctttcc

SEQ ID NO: 81352 - DNA, 1090 bp, Homo sapiens
tgcatatatatggcccccgcattctgccccctctacgccccaccaaagctgcagcacctgctgggtcacctggcagcatttccagggacatgcttcgtcagtgcataaggaccttttactttgtgtggctgcgtagtgcccctgcttctggtctcctcatgatggacattaggtggtttccaatctaggctccgacagaactgcggtggaagtctctgcatgggccactttgcacgtctctgcaggacagactcctccccacagagggcttggtcaaagggcaggtgtgtttgcaatttccctgtacgtggccgcattgccctcctgccagagaggggcagggctggtgccgtggtgccctgtgacacctccacctctgcaggacatgcccagaaggaggccctgtggccgatcccgacctggcctcatgtagcaggtcagggacttcctcactcactccctctctctctctctttctttctttcatggagtctctctctgtcgcccaggctggagtgcagtggtgcgatctcagctcactgcaaccttcgcctcctggtttcaagcaatcctcctgccttagcctcccgagtaactgggattacaggcgcccgccaccatgcctggctaatttttgtatttttagtagagatggggtttcaccatgttgaccaggttggtcttgaactcctgacctcaaatgatccacccgccttggcctcctaaagtgctgggattacaggcgtgatccactgtgcccggcctcatcatctgtttcttttgtggatctccacggaatctagagggatgaatcacatatttttatttgttttaacagagaggtgtcaatataggaaaacaaatctctgctcctaaaagaaatgaggcagagaacctactggaagttagcagcgagtacctgattcaaccatgaacattttaatcttcatgagagattaagttagtgggtttggttccagtttktacagttgtattcatttggtaaatgtttactgaagatgtgtgacaggccctcaattttgctgttgaaccaggaggtgggtttttcctttgcttttgtttgctttcc

SEQ ID NO: 81353 - DNA, 1143 bp, Homo sapiens
tttaatgcatgacctctgcaggatttaggggcaaaggtataggatgggggaagggatcaagggccctgagtctccgtgttcagttgtgttcagtccctgccctgagggacctcaaagccacccccagtgctcatgcaggcctccctctgtgcccagcacctgctgtcctgggcagtccttcctgccctacgaggtagatgctgcctcatccccattttgcaggagaggaagtgcaggcacagagaggctgaataatagctagcaccaggccacacagcaagtaagaggtggagaagggatttgaacccaggatggctggctccggaactagaggtctcatctgtttctgtactcttgtcttctctgtcttctgtcatttgcgtgctcactgagacccacatgggccagcccctgtgcaagtgctagggtatgacagggacacacaggcacacccatgtacacacagcctggagggacaggagaggcatgggatgggggtggggtctgggcattgtgttttggctgaaggtaagcctattgtttaattttttttttatcaacatctaatcaagtattgggcggttagaaaaaataaagtctactcaagattttttaaaaggacttcatgatctagaaaaataaaatttgccattatgcaagggcctccagctcggggcactcctgtcctggcagaggcgcccctcacaatacctgccacaccccatgcaccatytgagggcctggcttcctgcttggctgggcctcccacgtccccaaacttccaaggccaccccatgccagtgtgcaacatcctacgggggcctggccagggcagttcaggcagctaggtctcgtcgcgcaacccaataaatgaaatttgatttggaggaacatcttttagtgggtgaaaagaaaggaagagagagagagagagctgcacttcagctggccaaattgaaatcagaattgagcagccagtagaaagaggccactgtaccttgtagcctaatccctgtgaaagattaaagatgtctttggccgtatattgtattgattcgtactctgaagtataaatcatctgtgagttgctcagaggagcaccagagaggggagtggtggggagggcatgctggccaggctggg

SEQ ID NO: 81354 - DNA, 1143 bp, Homo sapiens
tttaatgcatgacctctgcaggatttaggggcaaaggtataggatgggggaagggatcaagggccctgagtctccgtgttcagttgtgttcagtccctgccctgagggacctcaaagccacccccagtgctcatgcaggcctccctctgtgcccagcacctgctgtcctgggcagtccttcctgccctacgaggtagatgctgcctcatccccattttgcaggagaggaagtgcaggcacagagaggctgaataatagctagcaccaggccacacagcaagtaagaggtggagaagggatttgaacccaggatggctggctccggaactagaggtctcatctgtttctgtactcttgtcttctctgtcttctgtcatttgcgtgctcactgagacccacatgggccagcccctgtgcaagtgctagggtatgacagggacacacaggcacacccatgtacacacagcctggagggacaggagaggcatgggatgggggtggggtctgggcattgtgttttggctgaaggtaagcctattgtttaattttttttttatcaacatctaatcaagtattgggcggttagaaaaaataaagtctactcaagattttttaaaaggacttcatgatctagaaaaataaaatttgccattatgcaagggcctccagctcggggcactcctgtcctggcagaggcgcccctcacaatacctgccacaccccatgcaccatctgagggcctggcttcctgcttggctgggcctcccacgtccccaaacttccaaggccaccccatgccagtgtgcaacatcctacgggggcctggccagggcagttcaggcagctaggtctcgtcgcgcaacccaataaatgaaatttgatttggaggaacatcttttagtgggtgaaaagaaaggaagagagagagagagagctgcacttcagctggccaaattgaaatcagaattgagcagccagtagaaagaggccactgtaccttgtagcctaatccctgtgaaagattaaagatgtctttggccgtatattgtattgattcrtactctgaagtataaatcatctgtgagttgctcagaggagcaccagagaggggagtggtggggagggcatgctggccaggctggg

SEQ ID NO: 81355 - DNA, 2060 bp, Homo sapiens
acggctcccagctcacccagaacaaaagccaaagtccccacaggcccccccagggccccatgcaatttgccctcctccggccgtatgtctccctgcctcactcattctgcccctgcctcctggttattctccaaatgccgggcaggcaccacctcagggcctttgcacatgccagttcccctgcctggggccctcttcccacagatctccacctggctaatgccctcgctgcagctggggatctgccaaaagtcacccctgcagaaagccagggtgaggaccgaaaggccgtcaaccttgcagggaagagtctcccttacttgcccctctctgtccacttacactgctttgttcctcttcagagcagcatctttcacagctggtatctcaaattataattatacagtgatgtgtttgctwattcactggaagctcctcctgccctttccccaagtgtgagccccacaaggccaggagcttcatctgcttagtccacggccgtaccccagtgtcctggtccaatgcctggcacatagtcagtgctcaataaatattcattctgcagatgaataaattactgtggaggaaagggatgcaaaggctggagggcagaaggaaaaaaatggccacgcccctcctcaccagccatacccctggggcaagtctgtgggattgggaggcccgggtcccaccttctgagtccctgaaagtcccagaagcatgaggggagccagcaccagaggagtggctgccaggggattcaggcctcccagaccactttcagaaaggggccctcacagctcatacttggtcacgcaggagtcacacgtgacttgagggatcctgatccacttctctcttctctctctctctctcacacacacacacacatacacacacacatacacatacatatacacacacacacacacacacaacccttaccatgccaaggtcttccaagcctcagaccaggtggcgaaaccagggaccctttgagattaccctgcccccatccctacctctttcctccctagccctagaactgctggcctctgtggggcagggccttctgaggcctgcccatctgacaagcccaccaatgcttccctggggaaggccagatgaagggaaccaaattctccacttaaaaggaggactcagtcttcccaccttcgagctccagagcaagggccagtttcggagtcatgcagaactggctacaaagcccagctctgccctgacaagctgggagggcccaggcaagctcctgggcaccctgggctgcagtcacctcctctaaagtggggacaatgctcaggacttctgtgcaggggctgaggctggggccggggagcagcatctgtcatgacagttcatgaacatggcctcaaaatgtgtgtattacacacaaggagtctcaggggtctgtacacaggccaggccaggctggctgtgtggctggcatgggaggccgagtctcttcaggctcaagggctctgggaagaaggaagagggaccaggttggggaacatggaatatcaaggcagaaatgtccgcatgcaccattcgtgcccaaatacatgagctcactgaggaaggcacacagtccctttttggtcttagaaatgaaaaaccggaggctcagggagaagtgaatcatgtacggccatacagtggtagagggtggggctgagagtgggacgcaggctgctggacatccccgccccagggcacttggtgggcccatgtaggcctgaggtgggaagcgctgggtggtgaatgtgagacaaggaaggaaacggtgggttcacagcgtccctccagggatgcagagaaaaaggcagctggggcttatctcagccacatccccaaggagctcagagtgggggacttggagtgccaggaaccccaccccagccaggaaagcaggcagaagtccagggtcagcaaacaggtgaagacgctttcctgaaggtcaaggcccaaacccgagctggggtgagcagggccgcaggcttcaccacttgccctttagccaagggaagaaactggaagga

SEQ ID NO: 81356 - DNA, 2060 bp, Homo sapiens
acggctcccagctcacccagaacaaaagccaaagtccccacaggcccccccagggccccatgcaatttgccctcctccggccgtatgtctccctgcctcactcattctgcccctgcctcctggttattctccaaatgccgggcaggcaccacctcagggcctttgcacatgccagttcccctgcctggggccctcttcccacagatctccacctggctaatgccctcgctgcagctggggatctgccaaaagtcacccctgcagaaagccagggtgaggaccgaaaggccgtcaaccttgcagggaagagtctcccttacttgcccctctctgtccacttacactgctttgttcctcttcagagcagcatctttcacagctggtatctcaaattataattatacagtgatgtgtttgctaattcactggaagctcctcctgccctttccccaagtgtgagccccacaaggccaggagcttcatctgcttagtccacggccgtaccccagtgtcctggtccaatgcctggcacatagtcagtgctcaataaatattcattctgcagatgaataaattactgtggaggaaagggatgcaaaggctggagggcagaaggaaaaaaatggccacgcccctcctcaccagccatacccctggggcaagtctgtgggattgggaggcccgggtcccaccttctgagtccctgaaagtcccagaagcatgaggggagccagcaccagaggagtggctgccaggggattcagscctcccagaccactttcagaaaggggccctcacagctcatacttggtcacgcaggagtcacacgtgacttgagggatcctgatccacttctctcttctctctctctctctcacacacacacacacatacacacacacatacacatacatatacacacacacacacacacacaacccttaccatgccaaggtcttccaagcctcagaccaggtggcgaaaccagggaccctttgagattaccctgcccccatccctacctctttcctccctagccctagaactgctggcctctgtggggcagggccttctgaggcctgcccatctgacaagcccaccaatgcttccctggggaaggccagatgaagggaaccaaattctccacttaaaaggaggactcagtcttcccaccttcgagctccagagcaagggccagtttcggagtcatgcagaactggctacaaagcccagctctgccctgacaagctgggagggcccaggcaagctcctgggcaccctgggctgcagtcacctcctctaaagtggggacaatgctcaggacttctgtgcaggggctgaggctggggccggggagcagcatctgtcatgacagttcatgaacatggcctcaaaatgtgtgtattacacacaaggagtctcaggggtctgtacacaggccaggccaggctggctgtgtggctggcatgggaggccgagtctcttcaggctcaagggctctgggaagaaggaagagggaccaggttggggaacatggaatatcaaggcagaaatgtccgcatgcaccattcgtgcccaaatacatgagctcactgaggaaggcacacagtccctttttggtcttagaaatgaaaaaccggaggctcagggagaagtgaatcatgtacggccatacagtggtagagggtggggctgagagtgggacgcaggctgctggacatccccgccccagggcacttggtgggcccatgtaggcctgaggtgggaagcgctgggtggtgaatgtgagacaaggaaggaaacggtgggttcacagcgtccctccagggatgcagagaaaaaggcagctggggcttatctcagccacatccccaaggagctcagagtgggggacttggagtgccaggaaccccaccccagccaggaaagcaggcagaagtccagggtcagcaaacaggtgaagacgctttcctgaaggtcaaggcccaaacccgagctggggtgagcagggccgcaggcttcaccacttgccctttagccaagggaagaaactggaagga

SEQ ID NO: 81357 - DNA, 2060 bp, Homo sapiens
acggctcccagctcacccagaacaaaagccaaagtccccacaggcccccccagggccccatgcaatttgccctcctccggccgtatgtctccctgcctcactcattctgcccctgcctcctggttattctccaaatgccgggcaggcaccacctcagggcctttgcacatgccagttcccctgcctggggccctcttcccacagatctccacctggctaatgccctcgctgcagctggggatctgccaaaagtcacccctgcagaaagccagggtgaggaccgaaaggccgtcaaccttgcagggaagagtctcccttacttgcccctctctgtccacttacactgctttgttcctcttcagagcagcatctttcacagctggtatctcaaattataattatacagtgatgtgtttgctaattcactggaagctcctcctgccctttccccaagtgtgagccccacaaggccaggagcttcatctgcttagtccacggccgtaccccagtgtcctggtccaatgcctggcacatagtcagtgctcaataaatattcattctgcagatgaataaattactgtggaggaaagggatgcaaaggctggagggcagaaggaaaaaaatggccacgcccctcctcaccagccatacccctggggcaagtctgtgggattgggaggcccgggtcccaccttctgagtccctgaaagtcccagaagcatgaggggagccagcaccagaggagtggctgccaggggattcaggcctcccagaccactttcagaaaggggccstcacagctcatacttggtcacgcaggagtcacacgtgacttgagggatcctgatccacttctctcttctctctctctctctcacacacacacacacatacacacacacatacacatacatatacacacacacacacacacacaacccttaccatgccaaggtcttccaagcctcagaccaggtggcgaaaccagggaccctttgagattaccctgcccccatccctacctctttcctccctagccctagaactgctggcctctgtggggcagggccttctgaggcctgcccatctgacaagcccaccaatgcttccctggggaaggccagatgaagggaaccaaattctccacttaaaaggaggactcagtcttcccaccttcgagctccagagcaagggccagtttcggagtcatgcagaactggctacaaagcccagctctgccctgacaagctgggagggcccaggcaagctcctgggcaccctgggctgcagtcacctcctctaaagtggggacaatgctcaggacttctgtgcaggggctgaggctggggccggggagcagcatctgtcatgacagttcatgaacatggcctcaaaatgtgtgtattacacacaaggagtctcaggggtctgtacacaggccaggccaggctggctgtgtggctggcatgggaggccgagtctcttcaggctcaagggctctgggaagaaggaagagggaccaggttggggaacatggaatatcaaggcagaaatgtccgcatgcaccattcgtgcccaaatacatgagctcactgaggaaggcacacagtccctttttggtcttagaaatgaaaaaccggaggctcagggagaagtgaatcatgtacggccatacagtggtagagggtggggctgagagtgggacgcaggctgctggacatccccgccccagggcacttggtgggcccatgtaggcctgaggtgggaagcgctgggtggtgaatgtgagacaaggaaggaaacggtgggttcacagcgtccctccagggatgcagagaaaaaggcagctggggcttatctcagccacatccccaaggagctcagagtgggggacttggagtgccaggaaccccaccccagccaggaaagcaggcagaagtccagggtcagcaaacaggtgaagacgctttcctgaaggtcaaggcccaaacccgagctggggtgagcagggccgcaggcttcaccacttgccctttagccaagggaagaaactggaagga

SEQ ID NO: 81358 - DNA, 1440 bp, Homo sapiens
ggaggtccaggctggggccacctgagccttctacacagacttgccccattacatcagaaaactctgggtggagctgccaggggctcagagtgccggggacacgactaccaccagccccacagggcagtgccagcacccagctccacccatggaggggtccctacctgtgggcagggagatggccgccagggaaggctgcccaaaggcagtgacactgggctgagtcctcagaggatgcaagtggccaggcggcaggcattctggagagaacagggtacgctctggaaggagtggctgctctgtgccaggcaccctgctggcctggggccacaggacacaacacacacacacgcatgcacacacacgcacatgtgcgtgcacacacacacacagctcctcaggtctctcctaagacaccaagaagtcccaagtgctagagaagagcatgtttactaggagctcatggggaggggggagaaggagcaaggtgcttgggcaggactggggcccctgtcagtctggggtcacagagggagccaagggaggyagccactggctgcaccactggccgggccggctctcagttcccagctaaaccctccatatggtttctttccacttagaaagtgggccaattgcgacattcctccccccatctggggagacagatggacagaggaagaggctggactgggaggagagggaagggaaggatgagccacctggctccaggagcgggaaggaaggcaggagaagggagttaattgctctcaaacagggagaaactgttaggttaagtcatatttctgagatgctcctctaagaggatccgcgtgatggtcttgcctggcacctcagggcatatcttgcaagcttcgttttgctggtgaaggaaggattaggtgaccacggctcagtcagcgggagtgtgagtgagccacaagcaacttgagatgcaagtgcagtctgaggagggtttgatattcttgcaactgcaagagattcagaccagaagggagtgcggggggcgggggtgtgcagagctccgtaatactaatgaacatttatggagtgtccaatgcatgggaaatgctattctgcaaattttacatggattcactcatctgaggccagtgtaatcaccatatctccaatttataaatgaagaaattgaggcacagagaggttaagtagcttccccaggatcacaaagatagtcaggggaagaggtggggtttgaacttgggccatctggctccagcggccacctttcatccagtcatgtagtgaatggataggattgtggagttgagggggcttgtgggcccatgggcatgatggggcatggtgcccatgctggggtgagtgcccactggtgttgctgcccccaggatgagaaaccaagtgcccgtgggttccctctgtttcacagccctattg

SEQ ID NO: 81359 - DNA, 1440 bp, Homo sapiens
ggaggtccaggctggggccacctgagccttctacacagacttgccccattacatcagaaaactctgggtggagctgccaggggctcagagtgccggggacacgactaccaccagccccacagggcagtgccagcacccagctccacccatggaggggtccctacctgtgggcagggagatggccgccagggaaggctgcccaaaggcagtgacactgggctgagtcctcagaggatgcaagtggccaggcggcaggcattctggagagaacagggtacgctctggaaggagtggctgctctgtgccaggcaccctgctggcctggggccacaggacacaacacacacacacgcatgcacacacacgcacatgtgcgtgcacacacacacacagctcctcaggtctctcctaagacaccaagaagtcccaagtgctagagaagagcatgtttactaggagctcatggggaggggggagaaggagcaaggtgcttgggcaggactggggcccctgtcagtctggggtcacagagggagccaagggaggcagccactggctgcaccactggccgggccggctctcagttcccagctaaaccctccatatggtttctttccacttagaaagtgggccaattgcgacattcctccccccatctggggagacagatggacagaggaagaggctggactgggaggagagggaagggaaggatgagccacctrgctccaggagcgggaaggaaggcaggagaagggagttaattgctctcaaacagggagaaactgttaggttaagtcatatttctgagatgctcctctaagaggatccgcgtgatggtcttgcctggcacctcagggcatatcttgcaagcttcgttttgctggtgaaggaaggattaggtgaccacggctcagtcagcgggagtgtgagtgagccacaagcaacttgagatgcaagtgcagtctgaggagggtttgatattcttgcaactgcaagagattcagaccagaagggagtgcggggggcgggggtgtgcagagctccgtaatactaatgaacatttatggagtgtccaatgcatgggaaatgctattctgcaaattttacatggattcactcatctgaggccagtgtaatcaccatatctccaatttataaatgaagaaattgaggcacagagaggttaagtagcttccccaggatcacaaagatagtcaggggaagaggtggggtttgaacttgggccatctggctccagcggccacctttcatccagtcatgtagtgaatggataggattgtggagttgagggggcttgtgggcccatgggcatgatggggcatggtgcccatgctggggtgagtgcccactggtgttgctgcccccaggatgagaaaccaagtgcccgtgggttccctctgtttcacagccctattg

SEQ ID NO: 81360 - DNA, 555 bp, Homo sapiens
tttgtcatatcagtagctgcacaccagataagggaatgcattgacttgatatactgagtttgattaactggagtttctccttgataaagtttggtataatccactgtcattctcaaagacctatgtgtcttctgcacagggctgcacacacaaaaagagatgtgataggagtcaccaccctgaacctttcaaatctttgacagtggcattaatttttgcagttcctctaaaagatgccgcgttgctttcggttgctattgtggcagggaagagaagttcagaagcttttcttgagcccctctaattctaacaatgctcactgcataggtcaagacacaactgtggaaattctccctgtgtgtaagtgtagatcccatctgtaaacccaggttctggcaggtaataataccacagtctccatttgtatctgacccccacgcagcttccaccccaccatcaggacacasaggtgttgagtcctccgggagaatgtccaataagtgctgagaagaccgggtgtttctttctctccttctttttcgctgcacatccttt

SEQ ID NO: 81361 - DNA, 635 bp, Homo sapiens
  misc_feature (1)...(635): n = A,T,C or G
tcttcttccatttgtaaaaaagtttggacatgcagagaatctgcgtttggtgcctttcaaatcgcacggaataaaaggtcccgcgtccacggggtggcagagcctcacacacaacacncaargtgatggctcatttctccttttcngcaaggaatttcctcnctttctnttcccagctcaggaatgagccttaggaagaggcagaggtcgaccatttggttcaagcaaggcccggggtccgagagggaggcctagctggaggagattgggcgttgggaggggtgggggagacaccgcaggtgaccggagccccctcctcagcacagcccctagctcaggcccctgaagctctatgggtggaggctgcaatcgttactataaaaccattgtcttagagagcaggcgccttccgcccatggcatggtgccgaatagagatgtgatttcgctttagatatgaacgtgcacatttgcaggaaaacctaattttgggcgtgcctgtgtttatactgtatgaagggcttctccatctgtcgccgttctgtatcaggcattgatggtttattaataccttttccgcaacatggagaaaacagatgatgttttcccccgtgtctgtcattactacggtgagtg

SEQ ID NO: 81362 - DNA, 635 bp, Homo sapiens
  misc_feature (1)...(635): n = A,T,C or G
tcttcttccatttgtaaaaaagtttggacatgcagagaatctgcgtttggtgcctttcaaatcgcacggaataaaaggtcccgcgtccacggggtggcagagcctcacacacaacacncaaggtgatggctcatttctccttttcngcaaggaatttcctcnctttctnttcccagctcaggaatgagccttaggaagaggcagaggtcgaccatttggttcaagcaaggcccggggtccgagagggaggcctagctggaggagattgggcgttgggaggggtgggggagacaccrcaggtgaccggagccccctcctcagcacagcccctagctcaggcccctgaagctctatgggtggaggctgcaatcgttactataaaaccattgtcttagagagcaggcgccttccgcccatggcatggtgccgaatagagatgtgatttcgctttagatatgaacgtgcacatttgcaggaaaacctaattttgggcgtgcctgtgtttatactgtatgaagggcttctccatctgtcgccgttctgtatcaggcattgatggtttattaataccttttccgcaacatggagaaaacagatgatgttttcccccgtgtctgtcattactacggtgagtg

SEQ ID NO: 81363 - DNA, 1273 bp, Homo sapiens
cccgggctccctgctttaaagggcacccccagggcacctgccaaaggagagctttatccctccagggaaaaccaagttgcacccccggaaagcacgccgccccctcctgcagctccctccacccggctggccctccagggcttccgcgcagcccggcccggttctccagcgcggagccgcgttccttttgctatgcaacagtgccacctggtggccagcccgcgcaacagcctcctggaaagggagctctggarccaaggcccctgcgtggaattttgatttttttaaaaaaaaatgactgagccattaaaggtgcccacgttgaattcaacagtgaagagtgacgttcctgacgccgcgctttggaaagcagctcaggggcgctgatgccggcagaaacgtggccagcgcggttcctgagtgggaaaggctaaccccactgccaggcccacggctttgccaagcgacacgtggcggtttatgcagaaggaaggttcatggaatatgagcggtttgtctctggtttttcctttagagtctgtgcgcatataattttttaaacagcccacagagtgcacgctttgggcggtgattgtccaagattcggttaaagtgacaaaaacgacaaagtccttcctcatctcaaggtccagacgggggcaggcgggggatcctgaatgttccctgtcacttctcgctaggcgtcggttctttctcgatggccaacgtgggtctctgctgccagggtgaggaggagggtcactccagcctgggcatccgttagttggtgcctggcggggtttccgtctcgatctcatgtagttcaggcctgcgactccacgcacacctttcaaaggcagcagagacaagcagcgtctgatgcctccgggggcatgcggtggcaaagccagtgagcctgcattcatcagggtcggctccagtggacggggtgtgctgtcccatgcctgggggagcccaggctccaaggtggcttcagagaggtactcaggagggtgacgctttggtgtgaatgcatcccatccgaaattcctgcaatgaaatgtaacaggccgggcctttgggaggggagtaggcggtgaggaaggcctcctctcatgcgaatgggattaagactcctctgaaaaaggctccatgcagcattagcaatgtcccagcttctggctcctaaacttctccttacacagagcacttgaacatggacataattcagccaagatctttgccattttgcaacaaggtcggtctttcctct

SEQ ID NO: 81364 - DNA, 1273 bp, Homo sapiens
cccgggctccctgctttaaagggcacccccagggcacctgccaaaggagagctttatccctccagggaaaaccaagttgcacccccggaaagcacgccgccccctcctgcagctccctccacccggctggccctccagggcttccgcgcagcccggcccggttctccagcgcggagccgcgttccttttgctatgcaacagtgccacctggtggccagcccgcgcaacagcctcctggaaagggagctctggagccaaggcccctgcgtggaattttgatttttttwaaaaaaaatgactgagccattaaaggtgcccacgttgaattcaacagtgaagagtgacgttcctgacgccgcgctttggaaagcagctcaggggcgctgatgccggcagaaacgtggccagcgcggttcctgagtgggaaaggctaaccccactgccaggcccacggctttgccaagcgacacgtggcggtttatgcagaaggaaggttcatggaatatgagcggtttgtctctggtttttcctttagagtctgtgcgcatataattttttaaacagcccacagagtgcacgctttgggcggtgattgtccaagattcggttaaagtgacaaaaacgacaaagtccttcctcatctcaaggtccagacgggggcaggcgggggatcctgaatgttccctgtcacttctcgctaggcgtcggttctttctcgatggccaacgtgggtctctgctgccagggtgaggaggagggtcactccagcctgggcatccgttagttggtgcctggcggggtttccgtctcgatctcatgtagttcaggcctgcgactccacgcacacctttcaaaggcagcagagacaagcagcgtctgatgcctccgggggcatgcggtggcaaagccagtgagcctgcattcatcagggtcggctccagtggacggggtgtgctgtcccatgcctgggggagcccaggctccaaggtggcttcagagaggtactcaggagggtgacgctttggtgtgaatgcatcccatccgaaattcctgcaatgaaatgtaacaggccgggcctttgggaggggagtaggcggtgaggaaggcctcctctcatgcgaatgggattaagactcctctgaaaaaggctccatgcagcattagcaatgtcccagcttctggctcctaaacttctccttacacagagcacttgaacatggacataattcagccaagatctttgccattttgcaacaaggtcggtctttcctct

SEQ ID NO: 81365 - DNA, 1200 bp, Homo sapiens
cattacttgatgggttgactaggaggacactggagtgtcttctcacacagactccatatttagtttgaagacgtccttctatattgccttataatcttccccagggaggccttacagtcttcccattgcgtatattactcctgagcttatgatttcggttgctttgtgaaaggttataaaaaccacaatttctgatgtgttgttgcctgtcatgggctggctgtcgatcaccctctctgacttctcttactcctccaagcaggccgcctgtaggttcacttggatttcccaggtagatggccctatcatctatgaatctgcactttcgtttctttccaaacctcacattgcttgtttcttgtcatattgcatgggctggcatcaccattataatgctaagtggacatggtgatggtgggagtcttagcttccattccccagaaagtagccagatgcaaagctcagtgtacacattttctggaagggaggaacacaccgagccagggaggaggtgaagctgaggcaaggctgcttcttactcagctgctgtggctttttggaagttgcagctcagctggccacgtctgcacaccctctcccacgagaccatacagcgatgctccacctcagaatggtccacagggaggaggaagggagaatagtttctctgcaagctccttcctgtcttctgctctcataggtcagagttgctctcccgaggaattaagttccctgcatcttcaggtggtgttactggcccctcttggcagctgctgggcaggccagagtgtctgagggtttggggaagctggcacattgtgtggagtgagagagagkttcattaaaattcccaattattcctatacattcccaattatagtcccaattgtatttgtggatttatctatttcttattttagttttgtcaatgtttgctttatatgttttaaagctcagttatttggcacatagaagtttaggattgttttctgtttggttgcatgaactctcctatcatcatgaaatgttatctcttctaataatggttttgtttcaaagtccacattgtctgatcttactatcgttatactaggtttttgaaaacattaatgtttgcctaatatatctttttttttattcttttgctttctatcttcctggatcttgatatttagggtttgttttttctaaacaacatgc

SEQ ID NO: 81366 - DNA, 1200 bp, Homo sapiens
cattacttgatgggttgactaggaggacactggagtgtcttctcacacagactccatatttagtttgaagacgtccttctatattgccttataatcttccccagggaggccttacagtcttcccattgcgtatattactcctgagcttatgatttcggttgctttgtgaaaggttataaaaaccacaatttctgatgtgttgttgcctgtcatgggctggctgtcgatcaccctctctgacttctcttactcctccaagcaggccgcctgtaggttcacttggatttcccaggtagatggccctatcatctatgaatctgcactttcgtttctttccaaacctcacattgcttgtttcttgtcatattgcatgggctggcatcaccattataatgctaagtggacatggtgatggtgggagtcttagcttccattccccagaaagtagccagatgcaaagctcagtgtacacattttctggaagggaggaacacaccgagccagggaggaggtgaagctgaggcaaggctgcttcttactcagctgctgtggctttttggaagttgcagctcagctggccacgtctgcacaccctctcccacgagaccatacagcgatgctccacctcagaatggtccacagggaggaggaagggagaatagtttctctgcaagctccttcctgtcttctgctctcataggtcagagttgctctcccgaggaattaagttccctgcatcttcaggtggtgttactggcccctcttggcagctgctgggcaggccagagtgtctgagggtttggggaagctggcacattgtgtggagtgagagagagtttcattaaaattcccaattattcctatacattcccaattatagtcccaattgtatttgtggatttatctatttcttattttagttttgtcaatgtttgctttatatgttttaaagctcagttatttggcacatagaagtttaggattgttttctgtttggttgcatgaactctcctatcatcatgaaatgttatctcttctaataatggttttgtttcaaagtccacattgtctgatcttactatcrttatactaggtttttgaaaacattaatgtttgcctaatatatctttttttttattcttttgctttctatcttcctggatcttgatatttagggtttgttttttctaaacaacatgc

SEQ ID NO: 81367 - DNA, 561 bp, Homo sapiens
gtctgacgggtaatgtgctgaaatttatgaactaccaaaggatctaaaaccggttttttattattttttatttttatttatttatttaatttttttgagacggagtcttgctctgtagcccaggctggcatgatcacagctcactgcaaacttgaactcctagcctcaagtgatcctcccacctcggccacccaaagtgctggaattacttacaggcgtgaaccmccacacccagccttaaactgttttttaaaaaaggaggttgatatagtgttccactaatagcttgggggaaattctttctcaggtatataatacaggaagttatttgacaggcaactatgcttaaatttatgttaattgtgtagaaagaactgagtaaatcatttcctgttttctctccacctgcccccaccaaaaaaagaaaagaaaaaattctaaatttgaccaatacaataatagcaagataacgcaaagattacaatgggatatggcctgggtcaattaaagcaccagcaattggcattggaccctccaccttatgcatgtctatatccagcc

SEQ ID NO: 81368 - DNA, 561 bp, Homo sapiens
gtctgacgggtaatgtgctgaaatttatgaactaccaaaggatctaaaaccggttttttattattttttatttttatttatttatttaatttttttgagacggagtcttgctctgtagcccaggctggcatgatcacagctcactgcaaacttgaactcctagcctcaagtgatcctcccacctcggccacccaaagtgctggaattacttacaggcgtgaacccccacrcccagccttaaactgttttttaaaaaaggaggttgatatagtgttccactaatagcttgggggaaattctttctcaggtatataatacaggaagttatttgacaggcaactatgcttaaatttatgttaattgtgtagaaagaactgagtaaatcatttcctgttttctctccacctgcccccaccaaaaaaagaaaagaaaaaattctaaatttgaccaatacaataatagcaagataacgcaaagattacaatgggatatggcctgggtcaattaaagcaccagcaattggcattggaccctccaccttatgcatgtctatatccagcc

SEQ ID NO: 81369 - DNA, 561 bp, Homo sapiens
gtctgacgggtaatgtgctgaaatttatgaactaccaaaggatctaaaaccggttttttattattttttatttttatttatttatttaatttttttgagacggagtcttgctctgtagcccaggctggcatgatcacagctcactgcaaacttgaactcctagcctcaagtgatcctcccacctcggccacccaaagtgctggaattacttacaggcgtgaacccccacacccagccttaaactgttttttaaaaaaggaggttgatatagtgttccactaatarcttgggggaaattctttctcaggtatataatacaggaagttatttgacaggcaactatgcttaaatttatgttaattgtgtagaaagaactgagtaaatcatttcctgttttctctccacctgcccccaccaaaaaaagaaaagaaaaaattctaaatttgaccaatacaataatagcaagataacgcaaagattacaatgggatatggcctgggtcaattaaagcaccagcaattggcattggaccctccaccttatgcatgtctatatccagcc

SEQ ID NO: 81370 - DNA, 838 bp, Homo sapiens
tttctagttgagtaagatcaaaccaagttcacttcatgagttggtctttcctgattctctctctaataccatcccaatacacagatgagttcctcatgccctatttacaaggccgtctaaattccgtgcctttagctaccacatctaagagctgggaaagtggtacagaagcacaagaggaaggactcttcaaacaatctatgtaaaacagtagttttgagattctttttctatttttttaaaatccagcaggacaactgaaagtaacttgtttgagtacctctccatccatccagacacttgggaaatacaacacagggtaatagttgccacagattccagcttacacagacagattggcagttacagtactagggacaaaggtacagatacgagagactgggccaacatgtatactttcacaaaagtatgaaaaagtgcttctccaaaccgttccatctgtggaatgcaaatactgtacaggtaagatgcaggcctgcttcccgaagtgcacatgcttctgtcagacgttactttcaccrtgcctgctgtttccacaggaagagtctgtctgttccatgcgctcacagtcgaggctgacctcactcgtgtccatactacagtctgactcactgtccgattggtccatctgctcaagttttgtttctccctgtagctctctgctcccggtggtgggatttaggaacgatccctcggagtcaagcaccccagcttgcccggcagcacacaaaactgtttctttggcttgacgaatacagttaagccactgctgtttgttgaaagtgtcattggcttgtagcgagtgggtctgactttg

SEQ ID NO: 81371 - DNA, 838 bp, Homo sapiens
tttctagttgagtaagatcaaaccaagttcacttcatgagttggtctttcctgattctctctctaataccatcccaatacacagatgagttcctcatgccctatttacaaggccgtctaaattccgtgcctttagctaccacatctaagagctgggaaagtggtacagaagcacaagaggaaggactcttcaaacaatctatgtaaaacagtagttttgagattctttttctatttttttaaaatccagcaggacaactgaaagtaacttgtttgagtacctctccatccatccagacacttgggaaatacaacacagggtaatagttgccacagattccagcttacacagacagattggcagttacagtactagggacaaaggtacagatacgagagactgggccaacatgtatactttcacaaaagtatgaaaaagtgcttctccaaaccgttccatctgtggaatgcaaatactgtacaggtaagatgcaggcctgcttcccgaagtgcacatgcttctgtcagacgttactttcaccgtgcctgctgttyccacaggaagagtctgtctgttccatgcgctcacagtcgaggctgacctcactcgtgtccatactacagtctgactcactgtccgattggtccatctgctcaagttttgtttctccctgtagctctctgctcccggtggtgggatttaggaacgatccctcggagtcaagcaccccagcttgcccggcagcacacaaaactgtttctttggcttgacgaatacagttaagccactgctgtttgttgaaagtgtcattggcttgtagcgagtgggtctgactttg

SEQ ID NO: 81372 - DNA, 550 bp, Homo sapiens
cccccgccgcgctgcaggcgagggagactagcttggcctcttcyccggagcgcaggcgtcgcccatttgtgggcaaaacccttcctctgcgcacgagttatctcggcccaaacgggcttcagagcagtggatgcgggacgatctcggttttatgaactatttgcatgtgtacaaaaacctggagaggagataaaagaatgggctaggcggtaatagcctaaaagcctcgacagcctttgcgacctgctattctcaccggatcttgtatctttatgatagattactcgcacccggccttctcttttatctcagagagtgtgacccagtgtcacagctccagcaagcactttcacctgagatcctctgatgggacttaacaacctagtgttaacaggatttggttctggggagtttgaggggaggaggctgttaacttttcccatttttttcctttagtcgcacccccccccaccacacgccatggagaccgcacctggcctccatttgttccctttctatggttacttctgttaaaaatctggccactgat

SEQ ID NO: 81373 - DNA, 550 bp, Homo sapiens
cccccgccgcgctgcaggcgagggagactagcttggcctcttctccggagcgcaggcgtcgcccatttgtgggcaaaacccttcctctgcgcacgagttatctcggcccaaacgggcttcagagcagtggatgcgggacgatctcggttttatgaactatttgcatgtgtacaaaaacctggagaggagataaaagaatgggctaggcggtaatagcctaaaagcctcgacagcctttgcgacctgctattctcaccggatcttgtatctttatgatagattactcgcacccggccttctcttttatctcagagagtgtgacccagtgtcacagctccagcaagcactttcacctgagatcctctgatgggacttaacaacctagtgttaacaggatttggttctggggagtttgaggggaggaggctgttaacttttcccatttttttcctttagtcgcacccccccccmccacacgccatggagaccgcacctggcctccatttgttccctttctatggttacttctgttaaaaatctggccactgat

SEQ ID NO: 81374 - DNA, 657 bp, Homo sapiens
ttgaaatcatttgtgagattttttttcccttgttgatttgtaagggttgttcatatgttgaagttcaatcctttgtcagatatgtttttagtaaatattattttcctamatgtgtaagaaaacttgtttcattttgttggtattttatttcagcaacggaaattttttattttgaccaattctaatttatcatttttttccttttatttgggcttttggggtctcatttaagaaatattagattgtgaaaattttctctgtgttttcttatacacgttttaaagtttttgcctttatattagtgtctatgattaacttcaagttaattttggtacaaaatatgtgataatagttgaggttcattgtttttccaaatggatatcagttgctgaaaggtacttctctgttgaagtaactcacatctttgtcaaaaatcagttggctacatatgcatgtctcagtctgtttgtttaagctgcatttctattcatacaataatacaacattgactatattattgtagttttacagtaaatgctagtatattagaaggcaattgatttttgatttttatattatccttatatcctgtgaatttgctgaactaattttttaaaactctttgtagtggctttttgtagacttcttaggatttct

SEQ ID NO: 81375 - DNA, 819 bp, Homo sapiens
ccaaggtcttctggaagggaagagatcaaaactcaacatttcccaaaagtttttatgcaaattgggatagacagagaaggcccaaccaggacccagtggtgaagaagcaataaagaaagtgaagggcaacaaattcctaagataaaatccctgtgagaatcaaagagtcaggtaacagtggtggtccctgaacctggacgtggtcattatgagaagctatctgtctgagtctatggtgcatccactctggccccaactcagacctgtgagctgcagattgtaaccacagaaagtaggtggtggtggagtcagaaaatgctaccccaaagtgaaggcctcagaagcaaagtttctctttgactttcttctgccctcctgtctcactctcattctgccctgaggcaagacacagaaaatagaatttctcttccccagggtagatcatacaaaacagaaccctttttccccaaaggcagccataaagtgaaaaatattactctaattttcctcacctttctgtgtcacagctggccataacgaaaytctcagcctgggcaacatatcaagaacccacttcaacaaaaaatagaaaataaaaataaattaagcaggtgttgtggtgcgtgctggtagtcctggctacttaggaagcagaggcaggaggatggcttaagccctggagttcaaggctgcagtgagccgtgattattccattgcactctcatctgggtgacggagagagaccctttctctaaaaaacaaacaaacaaaaaaactctataatcccagcactttgggagaccaaggtggacagatcac

SEQ ID NO: 81376 - DNA, 649 bp, Homo sapiens
gggatccaaacccctgcctacactgaatggtgttaacttgaggacaggtaagtactgaaatgatatttgtgatagagtcaggaagaggagggaaaattttgattccaatgaaaggcttagggagagaggacaattcacaatgagtaggtatcatgaaaacactggggatctgtaaagggggcgtggggcacaggatggaaggaaatgagccagcaagaggtgaaggggttcgtattagtctgttttcatgctgctacgaaggcatacccaagactgggtaatttataaagaaaagaggtttaactgagtcatttccacatggctatggaggcctcaggaaactaataatcacagtggaaggtgacataggcacatcttacatggtggcaagtgagagaaatgaggagtgaagtggggaaaagccccttagaaaactgtctgatcttgtgagaactcacacactatcacaagaacagcacgggggagacgtccccataatctaatcacctcccacaaggtcccttccccaacatgtggggattacaattcagattacaaktcaagatgacatttgggggaaacacaaagccagaccatattagagttttagagaataataggaagttcagaaaaacaattttttcatact

SEQ ID NO: 81377 - DNA, 447 bp, Homo sapiens
gaccctctgcaaagccagagtccctgctggtgagcttcctacctcgcagtttgaatcccaggttccaaagagaaagggccaggctccgttccactgcaaatggcgtgaacttctgtggcttcacccgtgctcaggccagatggagttttgccagggagccgttcccacctggctgtctcaaaacctttagacaactgaagtaatagactccaatcgggctgttaattagaccactgtaatgtaataacatatgtgcttgaggggaggttatgctgccgcccaggtatytctggggttgggaacctggaatgatgagttccctaacctacttgaccatatccgacaacaattctccaattatattaattgatatgcaaaatgttctttaatgtctattgtctatatctcaaatgactctaaacttgggcagagaagacagatatgcaa

SEQ ID NO: 81378 - DNA, 624 bp, Homo sapiens
tcctgcctcaccctcamcatagctacggctacagatgagcaccaaaacacccaactaattttttttttttgtagaaagaggagccttgctatgttgcccaagctggcctcaaactcccgccctcaagagatctgcccacctcaacaacctaagtaacaggttctacaggaaaataccactatgccgggataattatattttattaatttttatttgcatagacaggaggtcttgctgtgttgcccagggtggtctcaaactcctggactcaaaccattctcccatctctgcctcccaaagtgctgaagctacgggcataagccacttcacctggcccgacttaagatttctgtaatctagcatcccatacttcatataattgggaaaaacagtagtggtttttttttaattacttagtatttcaacaagaatcaaccatctctcaccattgccagggccctggtcagaaccactatcatctcccacctggaggttgccacagcatggcctccctgcttctacccaaatcttcccacaatctttctcaactcagctgccatgggatgcttttaaatcagtagacagttcgcgtcacctctctgctcagaacccttcctcatctcc

SEQ ID NO: 81379 - DNA, 624 bp, Homo sapiens
tcctgcctcaccctcaccatagctacggctacagatgagcaccaaaacacccarctaattttttttttttgtagaaagaggagccttgctatgttgcccaagctggcctcaaactcccgccctcaagagatctgcccacctcaacaacctaagtaacaggttctacaggaaaataccactatgccgggataattatattttattaatttttatttgcatagacaggaggtcttgctgtgttgcccagggtggtctcaaactcctggactcaaaccattctcccatctctgcctcccaaagtgctgaagctacgggcataagccacttcacctggcccgacttaagatttctgtaatctagcatcccatacttcatataattgggaaaaacagtagtggtttttttttaattacttagtatttcaacaagaatcaaccatctctcaccattgccagggccctggtcagaaccactatcatctcccacctggaggttgccacagcatggcctccctgcttctacccaaatcttcccacaatctttctcaactcagctgccatgggatgcttttaaatcagtagacagttcgcgtcacctctctgctcagaacccttcctcatctcc

SEQ ID NO: 81380 - DNA, 624 bp, Homo sapiens
tcctgcctcaccctcaccatagctacggctacagatgagcaccaaaacacccaactaattttttttttttgtagaaagaggagccttgctatgttgcccaagctggcctcaaactcccgccctcaagagatctgcccacctcaacaacctaagtaacaggttctacaggaaaataccactatgccgggataattatattttattaatttttatttgcatagacaggaggtcttgctgtgttgcccagggtggtctcaaactcctggactcaaaccattctcccatctctgcctcccaaagtgctgaagctacgggcataagccactkcacctggcccgacttaagatttctgtaatctagcatcccatacttcatataattgggaaaaacagtagtggtttttttttaattacttagtatttcaacaagaatcaaccatctctcaccattgccagggccctggtcagaaccactatcatctcccacctggaggttgccacagcatggcctccctgcttctacccaaatcttcccacaatctttctcaactcagctgccatgggatgcttttaaatcagtagacagttcgcgtcacctctctgctcagaacccttcctcatctcc

SEQ ID NO: 81381 - DNA, 624 bp, Homo sapiens
tcctgcctcaccctcaccatagctacggctacagatgagcaccaaaacacccaactaattttttttttttgtagaaagaggagccttgctatgttgcccaagctggcctcaaactcccgccctcaagagatctgcccacctcaacaacctaagtaacaggttctacaggaaaataccactatgccgggataattatattttattaatttttatttgcatagacaggaggtcttgctgtgttgcccagggtggtctcaaactcctggactcaaaccattctcccatctctgcctcccaaagtgctgaagctacgggcataagccacttcacctggcccgacttaagatttctgtaatctagcatcccatacttcatataattgggaaaarcagtagtggtttttttttaattacttagtatttcaacaagaatcaaccatctctcaccattgccagggccctggtcagaaccactatcatctcccacctggaggttgccacagcatggcctccctgcttctacccaaatcttcccacaatctttctcaactcagctgccatgggatgcttttaaatcagtagacagttcgcgtcacctctctgctcagaacccttcctcatctcc

SEQ ID NO: 81382 - DNA, 624 bp, Homo sapiens
tcctgcctcaccctcaccatagctacggctacagatgagcaccaaaacacccaactaattttttttttttgtagaaagaggagccttgctatgttgcccaagctggcctcaaactcccgccctcaagagatctgcccacctcaacaacctaagtaacaggttctacaggaaaataccactatgccgggataattatattttattaatttttatttgcatagacaggaggtcttgctgtgttgcccagggtggtctcaaactcctggactcaaaccattctcccatctctgcctcccaaagtgctgaagctacgggcataagccacttcacctggcccgacttaagatttctgtaatctagcatcccatacttcatataattgggaaaaacagtagtgktttttttttaattacttagtatttcaacaagaatcaaccatctctcaccattgccagggccctggtcagaaccactatcatctcccacctggaggttgccacagcatggcctccctgcttctacccaaatcttcccacaatctttctcaactcagctgccatgggatgcttttaaatcagtagacagttcgcgtcacctctctgctcagaacccttcctcatctcc

SEQ ID NO: 81383 - DNA, 624 bp, Homo sapiens
tcctgcctcaccctcaccatagctacggctacagatgagcaccaaaacacccaactaattttttttttttgtagaaagaggagccttgctatgttgcccaagctggcctcaaactcccgccctcaagagatctgcccacctcaacaacctaagtaacaggttctacaggaaaataccactatgccgggataattatattttattaatttttatttgcatagacaggaggtcttgctgtgttgcccagggtggtctcaaactcctggactcaaaccattctcccatctctgcctcccaaagtgctgaagctacgggcataagccacttcacctggcccgacttaagatttctgtaatctagcatcccatacttcatataattgggaaaaacagtagtggttttttttwaattacttagtatttcaacaagaatcaaccatctctcaccattgccagggccctggtcagaaccactatcatctcccacctggaggttgccacagcatggcctccctgcttctacccaaatcttcccacaatctttctcaactcagctgccatgggatgcttttaaatcagtagacagttcgcgtcacctctctgctcagaacccttcctcatctcc

SEQ ID NO: 81384 - DNA, 1410 bp, Homo sapiens
ggtgtacacacattgtgaaattagtagtgaactcccgctaggatattaggaattttatgacagggtctacaggccctgtgacattagcagtaacgttttcctagaagattacgaagaatattaaagggtgtacaggacctgtgaattacgagtaacatttccatagcatattgcacgtaacatcactgtgtgtacacgccatgtgacattaggggtaacatcccacaaaattataacgaataatttcacaagcagtgcactctctgtgacattaaaagtaacatttccctagaatatgacgacaatatcacggagtgtacaccctctgtgatatgaggagtgacatcttatgaggataatacgagtaatttcacaaggtgtacaaactctgtgacataaggggtgacatccctctaggacattatggataatatcaaaaggaacataccccgtgtgacaataaatgcaacctcccattaggagaataagaataacaccacaaggtgtacacacaatgtgacattattattaaggtaaagctaggatattgggaataacatcacagtgtacagagtcctgtgacatcaggtttaacattcccctgcaaaattacgaataatactgaagggtgtataccccctgcgactttagaagctgcatcttgctagaatatggaagatagtgtcccagggtgtgaaccgagggtggcagtatagaaaggatcctaggaaaaatccgggagtaatatcaccccactatcgccccctggatatgaccatccacatcgcggggggcacccgcccccctgcgatgggggtcctaagagccggrgggggagaggggctggctcttactccctacattgcgggtggtgcctcacccccctgcactattcacaatagcaaagacttggaaccaacccaaatgtccttcaatgatagactggattaagaaaatgtggcacatatacactgtggaatactatgcagccataaaaaggatgagttcatgtcctttgtaaggacatggatgaagctggaaaccgtcattctcagcaagctatcacaggaacaaaaaaagcaaacgcctcatgttctccctcataggtgagaattgaacaatgagaacacttggacacaggaaggggaacatcacatactggggcctgtcatggggtggggagaggggagagggataggattaaggatatatacctaatgtaaatgacgagttaatgggtacagcggtgttggtataacatgggacatgtatacatatgcaacaaacttgcacgttgtgctcatgtaccctagaacttaaagtataacaaaaaaaaatatatatatatatatatatatttaaaatgaaactggttaggttttaaaaggctcctcaatgacaattacttat

SEQ ID NO: 81385 - DNA, 1410 bp, Homo sapiens
ggtgtacacacattgtgaaattagtagtgaactcccgctaggatattaggaattttatgacagggtctacaggccctgtgacattagcagtaacgttttcctagaagattacgaagaatattaaagggtgtacaggacctgtgaattacgagtaacatttccatagcatattgcacgtaacatcactgtgtgtacacgccatgtgacattaggggtaacatcccacaaaattataacgaataatttcacaagcagtgcactctctgtgacattaaaagtaacatttccctagaatatgacgacaatatcacggagtgtacaccctctgtgatatgaggagtgacatcttatgaggataatacgagtaatttcacaaggtgtacaaactctgtgacataaggggtgacatccctctaggacattatggataatatcaaaaggaacataccccgtgtgacaataaatgcaacctcccattaggagaataagaataacaccacaaggtgtacacacaatgtgacattattattaaggtaaagctaggatattgggaataacatcacagtgtacagagtcctgtgacatcaggtttaacattcccctgcaaaattacgaataatactgaagggtgtataccccctgcgactttagaagctgcatcttgctagaatatggaagatagtgtcccagggtgtgaaccgagggtggcagtatagaaaggatcctaggaaaaatccgggagtaatatcaccccactatcgccccctggatatgaccatccacatcgcggggggcacccgcccccctgcgatgggggtcctaagagccggagggggagaggggytggctcttactccctacattgcgggtggtgcctcacccccctgcactattcacaatagcaaagacttggaaccaacccaaatgtccttcaatgatagactggattaagaaaatgtggcacatatacactgtggaatactatgcagccataaaaaggatgagttcatgtcctttgtaaggacatggatgaagctggaaaccgtcattctcagcaagctatcacaggaacaaaaaaagcaaacgcctcatgttctccctcataggtgagaattgaacaatgagaacacttggacacaggaaggggaacatcacatactggggcctgtcatggggtggggagaggggagagggataggattaaggatatatacctaatgtaaatgacgagttaatgggtacagcggtgttggtataacatgggacatgtatacatatgcaacaaacttgcacgttgtgctcatgtaccctagaacttaaagtataacaaaaaaaaatatatatatatatatatatatttaaaatgaaactggttaggttttaaaaggctcctcaatgacaattacttat

SEQ ID NO: 81386 - DNA, 1410 bp, Homo sapiens
ggtgtacacacattgtgaaattagtagtgaactcccgctaggatattaggaattttatgacagggtctacaggccctgtgacattagcagtaacgttttcctagaagattacgaagaatattaaagggtgtacaggacctgtgaattacgagtaacatttccatagcatattgcacgtaacatcactgtgtgtacacgccatgtgacattaggggtaacatcccacaaaattataacgaataatttcacaagcagtgcactctctgtgacattaaaagtaacatttccctagaatatgacgacaatatcacggagtgtacaccctctgtgatatgaggagtgacatcttatgaggataatacgagtaatttcacaaggtgtacaaactctgtgacataaggggtgacatccctctaggacattatggataatatcaaaaggaacataccccgtgtgacaataaatgcaacctcccattaggagaataagaataacaccacaaggtgtacacacaatgtgacattattattaaggtaaagctaggatattgggaataacatcacagtgtacagagtcctgtgacatcaggtttaacattcccctgcaaaattacgaataatactgaagggtgtataccccctgcgactttagaagctgcatcttgctagaatatggaagatagtgtcccagggtgtgaaccgagggtggcagtatagaaaggatcctaggaaaaatccgggagtaatatcaccccactatcgccccctggatatgaccatccacatcgcggggggcacccgcccccctgcgatgggggtcctaagagccggagggggagaggggctggctcttactccctacattgcgggtggtgcctcacccccctgcactattcacaatagcaaagacttggaaccaacccaaatgtccttcaatgatagactggattaagaaaatgtggcacatatacactgtggaatactatgcagccataaaaaggatgagttcatgtcctttgtaaggacatggatgaagctggaaaccrtcattctcagcaagctatcacaggaacaaaaaaagcaaacgcctcatgttctccctcataggtgagaattgaacaatgagaacacttggacacaggaaggggaacatcacatactggggcctgtcatggggtggggagaggggagagggataggattaaggatatatacctaatgtaaatgacgagttaatgggtacagcggtgttggtataacatgggacatgtatacatatgcaacaaacttgcacgttgtgctcatgtaccctagaacttaaagtataacaaaaaaaaatatatatatatatatatatatttaaaatgaaactggttaggttttaaaaggctcctcaatgacaattacttat

SEQ ID NO: 81387 - DNA, 2407 bp, Homo sapiens
ccttcactggccagtgcgaggcagtccaggccgccatttctgggcgctctgtctgttggctcagggtcgctgcttggcgtggagtccggaagagaagagtcgggcactggcagagaccgtccagggaggcgcggagcccgctcagggataaagcggccgcatctgccgtctcagaaacggctacctgggtggttgtcacgaaacaacgaccccggcgcaagagccaacgccgaaggagtggcggctgctcacgggctcttagccgccagcacttcagccgctgctcgcggggagacgccggcaagagctccagctccggagcgacgccaagcctagcgggcccgccctctcgcgatatcttaccttggtttaaattctatcacattggcagctgtttctcactcccctttgcttatcctttttcattttatggatttggaatttattctgtgtctacgaactgagacttccaaccacttctctattataatttctgcaccctgttgctaagttatttcgtgcagtccaatgcctggaaaagtagtctgtatgtttgatgactctgttataccactttattccgagctcggcttttgtttttggcacatcataagtccttttaaaatactgtttgaataaatatggagatgagtgagacggaaaatatcaggtatctttatgcaaggagccattgagatggctattagcagaaccagtgctagtcgttggacttttgatcttattttgagtccaaattaggaattccttctttcatcatgaatttaaaatgcattatttttctcttaaaaatggtgcctgccagatgattgatgactttatacttgaatatcagtcattaaacatttcatttacagtcaaaatatacttaatatactcagcactattaaatctcgttaattctgagaagggattgaatgacttgcagtgtcatgatatctagcaattgggatgttataagaaatacagctgatagagataaatagatgataaataacaatattctttacacaaatttttaaaacaaattacagcttttatttttattttggactaagatataactggtatcaagtcaggaatagtgtgatcttgggaaattcatttataacctcacattcctctgttgtaaaatgaaaaaaaaaataactttctcactgagttgtaaggagtaaacaaaatagaatagtgtctgacaaaaaagaagctctttacaagttaacaataattatgttattatgtaatctcttaattcaaattgacatcaaattagaagtatatttattaaatacatttgtgatgtcaagatacactaatatatctaagagatttaaaaccgaatcatatttgacttcttttcagtgttcattccttttgtaacaagtgtgtggtacttattttaatatttttgttattgttttacttgaaccataaaatcaccacatgctttcagaatacagcattcctagattcattcctgattcacagaactggctatcgtaagaaaacaataataatacattttaagctgattattttatatgttctccaaatcaatcagtttctagactacctcccttggcccactactatagcatattttttgcaaatgtcagggcatatctacagcttctgtaatcataaaaactaattttcagtcttggcactaagactgtttgcatatattcaaaagaatatttgacttttgaccttctattcatttccctaacacttttcaaatttatccttattgattcaattcattctctgtgaaatgtacttttttcatgcctgcgatatttttttgtgtttgacacaaatgtttaagttaatataaaatttaggttaagtacatcaaatactaagaattctagttcaatatatggtgacctttagagaattacttatgttagaaaatacactttgtcaatgaatacttacttagaaaagcattgtgtcctgctgaagtgttgcttaaatagaatttatacagtaataggtcacctttaaaaaatatgccagatcatgaaggaactgagaaataggttgagctaatgaaaaatgcattgatgatgctaagacatttgtctgaatttatagagcaaattgttgggggaggcacaagtaagaaggaggcttaatattcaaaaggtatttttttattagtatcagcggagcaaagaactatgtcttctcccagtatcttaaactaagaaagtagacttgtgacacaggaattttcggtgctgctttgccagctggtgacttctgaggctggtgacgcccctacccargattgcccttggattgccacaggaggtaccccacccacttggttcagtgggctgcctttggcttgtgctccaggctggatcgagcactcacggtg

SEQ ID NO: 81388 - DNA, 762 bp, Homo sapiens
tctgcggtgggtgtcctaagagccagggggggaagaggggctggctgtcagtccccgcctcgcggggtgtgcctcccgcccctgcgatggtggtcccaagagtctgggggggaagagggggctgtcagtccccgcctcgcgggggtgcctccctcaggtgcgatgtgggtcctaagagccaggggtgaagaggggctggctctctgtcctctcgtcgcgggggttgcatccccccctgcgatggggttcccaagaaccaaggggggatgaggggctggctctcagtccccgcctcgtgggggtkcctcccccccctgggatgggggtcccaagagccagggggggaagaggggctggctctcagtccccgcctcgcggagggtgcctccccccccaacgcgatgggggtcccaagagccagtgggggaagaggggctggctctcagccaccacaaaacggggggcctttatgttcaggttttgcccaagagtcagcttattttcttcttgtactagcagggcagttgctgccaaggcccccaaacagggtgccatcctttagaaaccctgtctagttgtttagagatgtaggccaccggcctcttccagggccccacagtttgggttaaaagtccacccgccatcttgtctctctctgacgtgtacaatctaaaaggctttgtcagattgggtagccccagggctgaagctgccagaagtttttcctttaactcatgaaagacttgctgttgttgggatccc

SEQ ID NO: 81389 - DNA, 3229 bp, Homo sapiens
  misc_feature (1)...(3229): n = A,T,C or G
atggagatgtcaaaaaagatataagatggtaaagatcaagtaggaggatacagaagatggtgatgatgatgatgatagtaatagctgttagtattttgtatcgattgtttgggttttatgagcacagtaaatgacactcttttctatatctgagtttacaaccaacagataaattaacaaaaaagttatatagatagctgaaatttcagctgtataattgataataggaggagtagagaccatggctttgggtatgtgggaaagtggacttggtcattctaccaggcatggctaaagcagttattttcaggatgtccttagcagggtaggttctttactacatggaacagaacagatcaaaatgttagcctctgcttaagtaggcagaccctaaaagggatccttccagggaatgatctttgaatgctaggttccttttctccaaacttgccaatcaaccagttatgtaagtcattcctcttactttacggaggggctcctgaggtttggggagagaagtcagggtgagcatcaactctggctaatggagcatgaagagttgggaatatgtgtctgcctctcccctccaactgagtgttaggggctttacactaattstttcactgaatcttcacattttggtcaacactttacagttgaggcaactgaaacttagagcaatttcctaagatcttctaacttggagtggtaagagcatagtatgcctttgacactggcctcatgttcctctgctatattttatgaaacaataaactgaaaggggtgatcagttcatttattcatttttaaaacttatccatgaaagtgtttgttgtggatagggggctaagnnnnnnnnnnnnnnnnnnnnnnnnnnnnnnnnnnnnnnnnnnnnnnnnnnnnnnnnnnnnnnnnnnnnnnnnnnnnnnnnnnnnnnnnnnnnnnnnnnnnttgatgggaaaaggaagagaaatcatcactttacttaccaattttcctttttgaccgagtgagaattttttttcaaccgaatataaaaatatttgacaggttagcatgtactaggtactattccaagtgacgtgtgtgtgtgtgtgtgtgtgtgtgtgtgtgtgtctttaaggcgtatgcattcacatagatgcaagtggaattctacacataaaaatgtaggtacactgttgtccccttttaactgaggaaactagtgttcagagaggttaagtaacctgtgtaacgtcacacagctagtctgtgcagaaccagcacttgatccctggctattttgaccctagagcccaaactcttaaccactgtgttctaaggtgacaaagaaacttgaaatttgaaatataatctaattatttttttcttcattctggaatatctgagtcaaagttctcaaattcacttgcagtttcaaggggtcaatgtaaatgacagagacaggcctgagggtgacatagagaatgaaaaatgtcccatctgcaagagttggggtggggagctggggggcagccagaagccagctgcagaggactgctacaaaaaaaaaagaaataatctgttattatttcagtgttgtgccaatttaggattattatgtcaaatcttgtgattttcacacaatgcaaccaattcaaaaaacagttattaaacataatctgagccaaacaaaacatatctgtgggcctacattacctatcagccaccactttgagagctttgcttcaacccaggccttgaacaaattttctgtggaaaaattatgtatcactgacaataaatcattgataatattcacatttcattgcaaatatctgcttgagcagctctgaaaaacttgaatcccttcctccccctgagacacttaacctgtttcttaattcatgtctccttgctgcgaagttttcctttggtcaggtagaaaatgaccttgctagttctgtttattgtttaacagaactcagtctcaaaatccctgtcataatccataataaaatagagagggcaaaacttaatcagctgtaaatgtacagtagttagcattcaccacaaaatgctaataatatttcgagaatgccatttctcttctggccttttgaccaagttggttaatggactgagacttgggaaataatggaaataatttaggctgagaacttctcagccatgcatcaaccttgaactgaatgccacgcagggaaagcagcactaaggctgtggcccgggtttggcaagcagagctcaccaaccagtatggacacccagaatgctaataaaaggaggatccagtgtttcaaacacaaataatgaatatccaccaattgcacgcctagcaagaggttttcttagaataccacaaaattaaaattgtatggctaatatttaggtaagatccttgaatcctgtggttttaaagaatcttctgcaagatagttcaactctcagtaacatgtactccattgtacctgagattttaggaagtgggacctttcctgaacatcttagactggggagttggccttaggacctaaggtcccaacttagtgttggagctttttaacctaagatattgttaattataactgtcaaattacaatttgacagagtcaatttgtaattgtttatcgacttcctttccccttgaaatagttcctggtaacctgctgaaatgttcccattattgtgtcattagtgtatcaatttctctgaaaacaaagtaaactgatgaggcgaaagcttgttccacatggcacctacctaatgaacagaagggtttattcacttaattattagttatgaatatcaagtgcactattgtcactctttaggttttcacctataaaacattaaaaatctagcatacaaatgaatgtatttgctaagaaaacatttaaaaccacagcggactctgaaatatccacccaccaagctactgggtaacttggatgatgcagctataataatcttagttaggtagtgctccttttcctctctctctctgttgaactatctaagtaggatgttggtaaatggtcttttaaaaataaaaactttggattaaaaggaaaactgaatcccttctatatttttgttactaacaaataatgcttttgtaaatttgaatggaaaacctcttatatgtattgctactgggttgcagttatgtttttgagcttaatttaaaatacactactcaaaaatttcatggaagatgaattccaag

SEQ ID NO: 81390 - DNA, 637 bp, Homo sapiens
tacagccccagccaacagcataactacactctcatgggaaatcctgagccagaaccacccagctaagccactcccagattgstggtgtgcagaagctgtgtgtgagataataatgtctgttgattgttttaggtttccaagatttggggtaatttgttacacagcagtggataactaatacaccaactctggctatacccagctggggagacttacctttgctctgataaaaataacataaacgagactgtagaggttctgttcagaaattattaaggaaagacaactttttcaagtaccctcaagtgtgttcatgattttcagatacatccatttacatataaattgttgtgtgaattgtaagcaatttcatctactcattaaaagaggtttccctgaggattcccactggttaatgctttgcttggtttctgttggtgtatgtgtttcaaaataaaaccaatttaaaaatattccatgattcagacttttgatccataaagacaggctttccaaacaataacctcgatattattctgaatgttttctggaccatccctgtcatgccatcttcaacgtcgatggcaagaaaattcaattactggtgagaacaaatgctaaggcgaagtttcatttg

SEQ ID NO: 81391 - DNA, 637 bp, Homo sapiens
tacagccccagccaacagcataactacactctcatgggaaatcctgagccagaaccacccagctaagccactcccagattgctggtgtgcagaagctgtgtgtgagataataatgtctgttgattgttttaggtttccaagatktggggtaatttgttacacagcagtggataactaatacaccaactctggctatacccagctggggagacttacctttgctctgataaaaataacataaacgagactgtagaggttctgttcagaaattattaaggaaagacaactttttcaagtaccctcaagtgtgttcatgattttcagatacatccatttacatataaattgttgtgtgaattgtaagcaatttcatctactcattaaaagaggtttccctgaggattcccactggttaatgctttgcttggtttctgttggtgtatgtgtttcaaaataaaaccaatttaaaaatattccatgattcagacttttgatccataaagacaggctttccaaacaataacctcgatattattctgaatgttttctggaccatccctgtcatgccatcttcaacgtcgatggcaagaaaattcaattactggtgagaacaaatgctaaggcgaagtttcatttg

SEQ ID NO: 81392 - DNA, 637 bp, Homo sapiens
tacagccccagccaacagcataactacactctcatgggaaatcctgagccagaaccacccagctaagccactcccagattgctggtgtgcagaagctgtgtgtgagataataatgtctgttgattgttttaggtttccaagatttggggtaatttgttacacagcagtggataactaatacaccaactctggctatacccagctggggagacttacctttgctctgataaaaataacataaacgagactgtagaggttctgttcagaaattattaaggaaagacaactttttcaagtaccctcaagtgtgttcatgattttcagatacatccatttacatataaattgttgtgtgaattgtaagcaatttcatctactcattaaaagaggtttccctgaggattcccactggttaatgctttgcttggtttctgttggtgtatgtgtttcaaaataaaaccaatttaaaaatattccatgattcagacttttgatccataaagacaggctttccaaacaataacctcgatattattctgaatgttttctggaccatccctgtcatgccatcttcaacgtcgatggcargaaaattcaattactggtgagaacaaatgctaaggcgaagtttcatttg

SEQ ID NO: 81393 - DNA, 1000 bp, Homo sapiens
ggcttgttttttcattgttctagtaagctgactgtggcgaagaaagttgctctatgaagactgaggtttcagctcaaccttaaggagagaaaggcttcaacaagctggggaacagagtgacccagaagggtgttgagagcccttttatttgctggccttgacctaaatctgctgtagagaggatgtatcactgattgggaagtagttagatgtcaagaattgtgaagggtctgagcttttaccctccttgcaagctaacaggttagctggtcatagtttcgtggatgctgggcagaaggcatgagatgcttgggtcagagacaaaagattttactttattttaattaatcaattaattttttgagatggagtctccctctgtcacttatgctggagtgcagtggcgcagtctcggctcactgcaacctctgcctcccaggttcaagtgattctcctgcctcagcctcctgagtagctggggttataggcgcctaccacagcgcccagctaatttttgtatttttagtagaggtgggctttccccatgttatccaggctggtctcgaactcctgacctcaagtgatccacccacctcggcctcccaaagtgctgggattacaggcctgagacactgcgcccggcccgagacaaaagattttattactcatggcagaggaagcagcatgagcttcagttttgcttcagttcttctttcattcttgggcaagttatgaaacctcttcgggactcagcctctttctatgtaaaatgagaataataaaaataataaaaaataagtctcacggttataataaggaatcaattaatacctgggaaatgctgagaactgtgtttgcttagtgagtgctcaaatgctagttatccttatttagagctgycttcttcttttgaatgttatctgttttgtagaggttcctgtactgttcatatttatggaaatttaggttttctgtttttttttctgttataaatgattat

SEQ ID NO: 81394 - DNA, 1970 bp, Homo sapiens
atttgaaggtaagggaaggaagatagatattacggagtcacactttcccatattcaaaacacaactgactcatgtctattaacacttgaagatttatttttagaatactagcagagaaaaaaaagttttttttccttaactctatagtagataataatagtaattaaagctaataaagatataaacattgtgacactctaagtttatatctatctgacatcataaagtataatttacttattcaggaatcattgctttgtactttattactctgttcttgcaaatgattcaagtgaatcataattgaacctttgcatttcttgtttaagaaccctcagttttcctgagaagagagaagagtttattaaggaggaattacttcagaacactattgggaaacatgtaagattttaaatccaaaaggattaactagtctgatcttgaatatgagatgaggtagatgaggtagattttctttttcttttcttttttctttttccagtgctcacaggatcccaggatttcagtctcattggtttgctttatttatgtattattttatttttagtaggtgacaatgctaagataagggtgacataataatgtttgggaactttgttagtgaatttcaatgactaaggatttaaggctagtaaattggaaaagaaattgatcatgggtgtgtattgacttttatgctgaagctaaacttggccaattcaactcaaaagttttaattggggttttgggaggcctggtaaattacaccccctaccctgggttctccataccctgagttggttgagacagtcatggagtcaggcaggtggaggtgagtatatcaccttacgcactgttgaaacaggctgcctttaggtttgcagccaaggagcctcgctaatgcttctctctggaatttggtggacttttatacctagttgctggcagagctaggcagccacaggcctccacacaggaataggccccacttggctcagaactgaccaaatacgagtatgttctgggaatgcaagccccagagagggagaagaaagtcccaggctcagtttatcctccaaactcattaattctgtcagccactcctcctttagatgcatggtccctcctagcattacatggcacaaaagagtcctctctctccaaactttggtcctacagatctccttctttctgtattggcctccgtcagtcttgagatgcaagagtcagtgtggactcttcatttcttctcatcttcatcacgtatcagttgttaagacttcaggtagggactgttaaagtgtggtctttggccacttgcatcagaatcactgcggagctgttaaaacacatattcctgggctcccacccagacagatagagtcagagtctcttggtgggagtccaggaatctgtacttttaaggagccctcctggtcatctgaggcaagctaacctttgctcacccttgtcctatagatctgatctcaatattgtctccacagttcgtttccctacattgctggtgccaccatcccaggatacagcctcattgatctctctcccattttgtttcctcctctggtcttgtcttcctttgattctttcccgcctactataacctttcaatgagttttgaaattctagtttctaatcctattagctatcaggtaatggcaagttgtgcaatctatgtctgggagagtgtgcatattgatagatttgagatggtaatatttgcctagcaagtatttaaaaactttattttccttagggaggtctttcctggctaaaatatctctctcttttcacccagtttctacggtcaccatgctctgtccttcatagtagcrtaatttgaatttatgtttattatttttattttaaattctggggtacatgtgcaggcataggtaaatgtgtgccacggtggtttgctgcacctatcaacccatcacctaggtattaag

SEQ ID NO: 81395 - DNA, 841 bp, Homo sapiens
ggggcctgctggttataaccacaatcaatcaatcccagcctattttcaggtcctgccagccatcgggacaacttccaggactatgtgagtcttcttttcattatttaaagactggtgaaaggatgcaaaattacctcatgaaagggtcaggctgaccaagtgacaggccagctgagggcttgaggctgtcagaagggcattagcaccttggtcttcgaggcagggcaggcacacttggcatctgggcatcgtttcatccctggttttgggattgggtggtgctgggttagccttacagctctatctaatgcagaggaagtaccaaaggggctaatgagacacttaatactggtttccccactacttcgcagtgtagaactttgaccctagctaagacacagtggtcaaaaactccaaatgctgtgagcattggcccagggcaatactaatggatccacagagcactatgtgcagcagcataatcaggaaatgaggagcagcaaaggcctacattatcacgcctgtgtcttgcacctctgtgaacagcaaaagtggcccactctgtttcttctctgagcaggcaaacatggtcagagctccaccagatgycttcagactaggggtgccaggtaaaatacaggatggccagtcacagggaatttcagataaaaaatatttttagtataagtatatcccaaatagcacatggggtatacttataaaaaaaaaaaagatttgtcatttacctgaaatcaagatgtaatactaccccatcgctggatttattatttgctaaatgtggtaactcctcctatcatccttgccaccattgcagcatgcc

SEQ ID NO: 81396 - DNA, 822 bp, Homo sapiens
gatgtcaagttggataggatataaaaagaggttgagatttcattgttatctggtgacagcatggtaaattaaggagataattactaagataccactagatccagacacaggagatcaacttgcatatctttcagtttctttagtaggtttattattatcaacgtttacaccctttgtttttttgtagtatcaatatgatatctatctatatctatagctatatctatttatatgtatttctgtatctcgtgacaaacaagagcagatttwaaggagtgatcttaaaacggatcactaatatgacaagttcaaacagattcaagctagtaagctacattagaaagattattagttctcagaaataattagcagaactcaggaggaatacctttcttttttggacatcttagcaacaaagatcagatacagagacagtaaaattggttttttttttttaagtttaatccaaacttcagtgtttttcaaatcccctgctcaacataatttgttattcttttataatgtaaacatttgcttgatatttactaatattacttccttctccctcaaaagaagtcccataacatgttgcttagtttctaaaactcagaactcctctgttgaattaataatgacatcatcaaagcaaatatttttgtaatttattacgtgccagacatattcttaagtccttgcatggattacttctctctcacacacacacacatacacacacacacacacaaacacacacacacacaaacacacacacactccccttgagaaaataattcatatcatatctacttttcaaataagaaa

SEQ ID NO: 81397 - DNA, 822 bp, Homo sapiens
gatgtcaagttggataggatataaaaagaggttgagatttcattgttatctggtgacagcatggtaaattaaggagataattactaagataccactagatccagacacaggagatcaacttgcatatctttcagtttctttagtaggtttattattatcaacgtttacaccctttgtttttttgtagtatcaatatgatatctatctatatctatagctatatctatttatatgtatttctgtatctcgtgacaaacaagagcagatttawaggagtgatcttaaaacggatcactaatatgacaagttcaaacagattcaagctagtaagctacattagaaagattattagttctcagaaataattagcagaactcaggaggaatacctttcttttttggacatcttagcaacaaagatcagatacagagacagtaaaattggttttttttttttaagtttaatccaaacttcagtgtttttcaaatcccctgctcaacataatttgttattcttttataatgtaaacatttgcttgatatttactaatattacttccttctccctcaaaagaagtcccataacatgttgcttagtttctaaaactcagaactcctctgttgaattaataatgacatcatcaaagcaaatatttttgtaatttattacgtgccagacatattcttaagtccttgcatggattacttctctctcacacacacacacatacacacacacacacacaaacacacacacacacaaacacacacacactccccttgagaaaataattcatatcatatctacttttcaaataagaaa

SEQ ID NO: 81398 - DNA, 822 bp, Homo sapiens
gatgtcaagttggataggatataaaaagaggttgagatttcattgttatctggtgacagcatggtaaattaaggagataattactaagataccactagatccagacacaggagatcaacttgcatatctttcagtttctttagtaggtttattattatcaacgtttacaccctttgtttttttgtagtatcaatatgatatctatctatatctatagctatatctatttatatgtatttctgtatctcgtgacaaacaagagcagatttaaargagtgatcttaaaacggatcactaatatgacaagttcaaacagattcaagctagtaagctacattagaaagattattagttctcagaaataattagcagaactcaggaggaatacctttcttttttggacatcttagcaacaaagatcagatacagagacagtaaaattggttttttttttttaagtttaatccaaacttcagtgtttttcaaatcccctgctcaacataatttgttattcttttataatgtaaacatttgcttgatatttactaatattacttccttctccctcaaaagaagtcccataacatgttgcttagtttctaaaactcagaactcctctgttgaattaataatgacatcatcaaagcaaatatttttgtaatttattacgtgccagacatattcttaagtccttgcatggattacttctctctcacacacacacacatacacacacacacacacaaacacacacacacacaaacacacacacactccccttgagaaaataattcatatcatatctacttttcaaataagaaa

SEQ ID NO: 81399 - DNA, 822 bp, Homo sapiens
gatgtcaagttggataggatataaaaagaggttgagatttcattgttatctggtgacagcatggtaaattaaggagataattactaagataccactagatccagacacaggagatcaacttgcatatctttcagtttctttagtaggtttattattatcaacgtttacaccctttgtttttttgtagtatcaatatgatatctatctatatctatagctatatctatttatatgtatttctgtatctcgtgacaaacaagagcagatttaaagragtgatcttaaaacggatcactaatatgacaagttcaaacagattcaagctagtaagctacattagaaagattattagttctcagaaataattagcagaactcaggaggaatacctttcttttttggacatcttagcaacaaagatcagatacagagacagtaaaattggttttttttttttaagtttaatccaaacttcagtgtttttcaaatcccctgctcaacataatttgttattcttttataatgtaaacatttgcttgatatttactaatattacttccttctccctcaaaagaagtcccataacatgttgcttagtttctaaaactcagaactcctctgttgaattaataatgacatcatcaaagcaaatatttttgtaatttattacgtgccagacatattcttaagtccttgcatggattacttctctctcacacacacacacatacacacacacacacacaaacacacacacacacaaacacacacacactccccttgagaaaataattcatatcatatctacttttcaaataagaaa

SEQ ID NO: 81400 - DNA, 822 bp, Homo sapiens
gatgtcaagttggataggatataaaaagaggttgagatttcattgttatctggtgacagcatggtaaattaaggagataattactaagataccactagatccagacacaggagatcaacttgcatatctttcagtttctttagtaggtttattattatcaacgtttacaccctttgtttttttgtagtatcaatatgatatctatctatatctatagctatatctatttatatgtatttctgtatctcgtgacaaacaagagcagatttaaaggastgatcttaaaacggatcactaatatgacaagttcaaacagattcaagctagtaagctacattagaaagattattagttctcagaaataattagcagaactcaggaggaatacctttcttttttggacatcttagcaacaaagatcagatacagagacagtaaaattggttttttttttttaagtttaatccaaacttcagtgtttttcaaatcccctgctcaacataatttgttattcttttataatgtaaacatttgcttgatatttactaatattacttccttctccctcaaaagaagtcccataacatgttgcttagtttctaaaactcagaactcctctgttgaattaataatgacatcatcaaagcaaatatttttgtaatttattacgtgccagacatattcttaagtccttgcatggattacttctctctcacacacacacacatacacacacacacacacaaacacacacacacacaaacacacacacactccccttgagaaaataattcatatcatatctacttttcaaataagaaa

SEQ ID NO: 81401 - DNA, 822 bp, Homo sapiens
gatgtcaagttggataggatataaaaagaggttgagatttcattgttatctggtgacagcatggtaaattaaggagataattactaagataccactagatccagacacaggagatcaacttgcatatctttcagtttctttagtaggtttattattatcaacgtttacaccctttgtttttttgtagtatcaatatgatatctatctatatctatagctatatctatttatatgtatttctgtatctcgtgacaaacaagagcagatttaaaggagkgatcttaaaacggatcactaatatgacaagttcaaacagattcaagctagtaagctacattagaaagattattagttctcagaaataattagcagaactcaggaggaatacctttcttttttggacatcttagcaacaaagatcagatacagagacagtaaaattggttttttttttttaagtttaatccaaacttcagtgtttttcaaatcccctgctcaacataatttgttattcttttataatgtaaacatttgcttgatatttactaatattacttccttctccctcaaaagaagtcccataacatgttgcttagtttctaaaactcagaactcctctgttgaattaataatgacatcatcaaagcaaatatttttgtaatttattacgtgccagacatattcttaagtccttgcatggattacttctctctcacacacacacacatacacacacacacacacaaacacacacacacacaaacacacacacactccccttgagaaaataattcatatcatatctacttttcaaataagaaa

SEQ ID NO: 81402 - DNA, 1300 bp, Homo sapiens
tacacactcacacagacatacacagacccatgggcaattcactcatatgtattactgggatagagctcattaaaatggtctcacatagctaaatgtaataatacaagaaagactatctaatatcaaattcagtattcctagatgtgaatattttcagaaataccagataggttaatttaggggaaaaaatgaagaggggagtgaggaggttgattgatttggctgagcatttgctcttattctgatctactattagccaagaagctttggttagacaattttcacttttagcatgagatgtgaagagcatacttttttttttttctttttttctttttttctttttttgagatggagcttcactcttgttgcccaggctggagtgcagtggtgtgatctcagctcaccgcaacctccgccttccaggttcaaacgattctcctgactcagcctccccaatatttggggctacaggtgcctgccatcacacctggctaattttttgtatttttagtagagatgaggtttcactatgttggccaggctgctggtctcgaacccctgacctcgtgatccacccgcctgggcctcccaaagtgctgggattacaggcatggttttttatgcagatcacctcaaattgcatgtgattgaattttaggatttatatccattagaatttttcaacatgagatattcaaaataatgtctttaaaatgtttttaaaagataaatcaaaataaacaacttttaaaagttagtttatgaaatttgacagtttcctctaaaattttttcttttttccttaaatattagtaatttgtattcaagctaaattttattttaaggttttgactgagttttaaattaatagcttattattaattaaaagatcatgtatcaaaaggtttttttytttttggtatcatttcacagtttactcactaagtctcacccagtgagtctcatctttcttcagtggtcttaacaattttggccttgagttaattaattcaaagtctccaggaatgaaagaaagaacaaactaggttcagccacctcattttccattgatggtaaaagaactttagcaatgcaaggttctaatcataaggcttaaaacaaaactgggttgctgcattatcttccaataacttaaacatactaaatatgcaatatgtttcctgaaaaaaaaaattcaagtcacatttacatctaagtgtgtttcattttataagcacagattgattattattctgatatcttttcatccagttaaatgtttaaaaattaaggacca

SEQ ID NO: 81403 - DNA, 1300 bp, Homo sapiens
tacacactcacacagacatacacagacccatgggcaattcactcatatgtattactgggatagagctcattaaaatggtctcacatagctaaatgtaataatacaagaaagactatctaatatcaaattcagtattcctagatgtgaatattttcagaaataccagataggttaatttaggggaaaaaatgaagaggggagtgaggaggttgattgatttggctgagcatttgctcttattctgatctactattagccaagaagctttggttagacaattttcacttttagcatgagatgtgaagagcatacttttttttttttctttttttctttttttctttttttgagatggagcttcactcttgttgcccaggctggagtgcagtggtgtgatctcagctcaccgcaacctccgccttccaggttcaaacgattctcctgactcagcctccccaatatttggggctacaggtgcctgccatcacacctggctaattttttgtatttttagtagagatgaggtttcactatgttggccaggctgctggtctcgaacccctgacctcgtgatccacccgcctgggcctcccaaagtgctgggattacaggcatggttttttatgcagatcacctcaaattgcatgtgattgaattttaggatttatatccattagaatttttcaacatgagatattcaaaataatgtctttaaaatgtttttaaaagataaatcaaaataaacaacttttaaaagttagtttatgaaatttgacagtttcctctaaaattttttcttttttccttaaatattagtaatttgtattcaagctaaattttattttaaggttttgactgagttttaaattaatagcttattattaattaaaagatcatgtatcaaaaggtttttttctttttggtatcayttcacagtttactcactaagtctcacccagtgagtctcatctttcttcagtggtcttaacaattttggccttgagttaattaattcaaagtctccaggaatgaaagaaagaacaaactaggttcagccacctcattttccattgatggtaaaagaactttagcaatgcaaggttctaatcataaggcttaaaacaaaactgggttgctgcattatcttccaataacttaaacatactaaatatgcaatatgtttcctgaaaaaaaaaattcaagtcacatttacatctaagtgtgtttcattttataagcacagattgattattattctgatatcttttcatccagttaaatgtttaaaaattaaggacca

SEQ ID NO: 81404 - DNA, 534 bp, Homo sapiens
aaatagacttttcaagaggaatactcaaagctagaatgccaagaagaattcgggataaattccagaccctctaaaaccagaaaaygacagtacaaaaaaggaaaactagagactaatatctctcataaagatgcaaaattcatcaacaacatattagcaactcaaatccaacaatatataagaagaattgtctgggcacggtggcttacactatgaacctcagcagtttgggaggctaaagtggcaggactgcttgatcccatgagttggagaccagactgggccacatgatgagatctcatccctagaaaaatttaaacaattagccaggcatagtggtgcatgcctatggtcccagctagtcaggagactgaggtgggaggatcattagagcctggaaaattgaggctgcaatgagccatggttatgccattacactccagtctgggtgatagagcaagaccctgtgtcaaaaataaaaataaataagtaaataaaaagaagaagaagaattatgcaatgtaattaagtggg

SEQ ID NO: 81405 - DNA, 453 bp, Homo sapiens
atgagctgctttgtaagaaggagaggtcacacggagagggagagagtcattggagtgagagaatatgaaacctccccgrcatcctgcctaagccaaccccagaaggtctttcagtgaaatggaaacatataataagtacctgtttgcaagactatcacaataacctccaaatggagatgattctttgctgaagaactttgaacaaataaaatgattgtgggtttaagccatgaggtgttgagttgtttgctgtgcagcaagagattacaaaaaaattgaaataaaataaaattttggctcaaagtcaatcacgtgccactgaaaataagtgaaatttatttgttttggaattaggtggttctttcataattctttcacttttcagaatatagtgattactgaaaaggtggtaaaaaacttgctgttggggactacagataagaggatgtgaat

SEQ ID NO: 81406 - DNA, 669 bp, Homo sapiens
tgctatagtaaacaagcaatgttacaattttagaagcctaaaacaacaaaggtttgtttcttgctcctgctacatgacatgcaatatagtctttcaccactagtcacaatccatccattcatttctttcttccatgtatttttcacatttcttaaaattgtagtgaagggcacaggcagggcatttatagcatgaygaatcatggtggatcttgcctcactttctcagacattagattcagtttgtagaccttagtaggtcagccttgagcttgcttcacaccattcttgctcagtgactccagctaacggtgatgtcatcatctcaaccatgatgaggcattctgacagaaggttgagaagaaggcaaatcataactgggagtgatacatatcactttcactaacattttattgactggcatgttctatggcaaattcttctgtgctcctaaggatgaagaagtgtgtactcctaaggatgaagaagtgtatcctactattttgccagaaaatagaaaatcagaatattagtgaacaagcacttaaatttaaatgacctctgaatccttaatcccatctactactgcctccttgatagcatttttttatatattgaagagatttattctgagccaaagatgagtgaccatggcccatgacacagccct

SEQ ID NO: 81407 - DNA, 1920 bp, Homo sapiens
ttcgagatgaggtctggctctgttgcccagactggagtgggaatgtaggtgagcacaaccacatccagctaattaaaaaaagttttcttgtagagataggggtcttgccatattgcccaggctggtctcaaactcctggacataagtgatcctcctgccttggcctcccaaactgttggcattgcaggtgtgagccactgcacctgaccccatctgtatttcctttccactcatctgatgccgaaaatggactttcagtgtgttttccgggagcatcgtgctgctagttgtctaccccgcatgtatttatcggtagcaacagaacccagtgcccactggaggcagagggtgtgcctggctgctcttctagggatgtgtggctgtgccaggccaggcctgcaagacatgagacctgggactccacacaggccccatgaagcacgtcacttctttctacttccgctgagctgcttcagtggacatcaccgactctgacatggcaaaggcctggacactgaaacagcactcagggcctggccggccgcctgctggtgcgcagacaggagacagtgggaggtgagggctgtactgagctcccggagctcgccaagcaggctggcagctgtgcagccctgggagcgcggcggggctcttggcggccttggtgacgcctcagcccacagcggggcctcccgccaggctctgggctgtgtgagccctccttatgcgctgtcctgctcctcacgtgcctccccaactgccctcaagggggtcctgcacgggcgcccccagcaaactcctactcaacaggatcccaaaacaggtgaaaacaagggctttggcctcaattcccttcccactctccacgtggcaggatgtaagagcagcagatsaatgtatgcattgggaaagacaagctgggccggattagaagcgcgcagcaggcggcctgccctccagcaggcgtggaactgccctccctgacgggccctaagccgtttccaggacttgccggttcccacgcccagcatctctgccgcgcgcacagacccagctggaggcgcgacgcccggggaccgccagatggcgccgccgggctggcctgcggagttggcgagctgatggggctcggcaggagggccgggggcagcgcccgcgcaggagagggtcgggcctttgggaagagcggagggcggcccccaggcctctgcttctgtctccgcctgacgaggccacctggctgggaaggacggcctgagagccctggagccccggaggcccggctccaccacccacggccctcggactccacttgggctccctcgggccaccgccattcttcctccccttggacgacatcctccgcccccgcggaagctccaagcccggggagccggctccgcggggctgcgcctccttccggtgtcatctgggccgctggtgtgccgccagccgccgcctccccgtcactccacgccgggtaccggctgcctcctgggaggtgtggggttcagggggctctctctgcggctggcgcttcagagaaggggtcgccctgccggccccaactcgcagccaagcctgtgggcgttcactgctgtgagtccaggagcccagcccaggccccacctcagggctcaagcggcctcctgcaagtgggctgtgggcagagcctgcaggcgctggagaggtggggaagaggaggctgctgttgctggcaggaccaccctgcggcctcatctacccaatacggcataccctggctttaaccctccgcatcggctgcacctgggggctctcagtgccccttggaaactctcaccagctgactgccacccttcgccaccgggcctgctcctggcctcattccgccagtacctgtggcccatccccaagccaggtctctcacacatcctcggc

SEQ ID NO: 81408 - DNA, 1920 bp, Homo sapiens
ttcgagatgaggtctggctctgttgcccagactggagtgggaatgtaggtgagcacaaccacatccagctaattaaaaaaagttttcttgtagagataggggtcttgccatattgcccaggctggtctcaaactcctggacataagtgatcctcctgccttggcctcccaaactgttggcattgcaggtgtgagccactgcacctgaccccatctgtatttcctttccactcatctgatgccgaaaatggactttcagtgtgttttccgggagcatcgtgctgctagttgtctaccccgcatgtatttatcggtagcaacagaacccagtgcccactggaggcagagggtgtgcctggctgctcttctagggatgtgtggctgtgccaggccaggcctgcaagacatgagacctgggactccacacaggccccatgaagcacgtcacttctttctacttccgctgagctgcttcagtggacatcaccgactctgacatggcaaaggcctggacactgaaacagcactcagggcctggccggccgcctgctggtgcgcagacaggagacagtgggaggtgagggctgtactgagctcccggagctcgccaagcaggctggcagctgtgcagccctgggagcgcggcggggctcttggcggccttggtgacgcctcagcccacagcggggcctcccgccaggctctgggctgtgtgagccctccttatgcgctgtcctgctcctcacgtgcctccccaactgccctcaagggggtcctgcacgggcgcccccagcaaactcctactcaacaggatcccaaaacaggtgaaaacaagggctttggcctcaattcccttcccactctccacgtggcaggatgtaagagcagcagatgaatgtatgcattgggaaagacaagctgggccggattagaagcgcgcagcaggcggcctgccctccagcaggcgtggaactgccctccctgacgggccctaagccgtttccaggacttgccggttcccacgcccagcatctctgccgcgcgcacagacccagctggaggcgcgacgcccggggaccgccagatggcgccgccgggctggcctgcggagttggcgagctgatggrgctcggcaggagggccgggggcagcgcccgcgcaggagagggtcgggcctttgggaagagcggagggcggcccccaggcctctgcttctgtctccgcctgacgaggccacctggctgggaaggacggcctgagagccctggagccccggaggcccggctccaccacccacggccctcggactccacttgggctccctcgggccaccgccattcttcctccccttggacgacatcctccgcccccgcggaagctccaagcccggggagccggctccgcggggctgcgcctccttccggtgtcatctgggccgctggtgtgccgccagccgccgcctccccgtcactccacgccgggtaccggctgcctcctgggaggtgtggggttcagggggctctctctgcggctggcgcttcagagaaggggtcgccctgccggccccaactcgcagccaagcctgtgggcgttcactgctgtgagtccaggagcccagcccaggccccacctcagggctcaagcggcctcctgcaagtgggctgtgggcagagcctgcaggcgctggagaggtggggaagaggaggctgctgttgctggcaggaccaccctgcggcctcatctacccaatacggcataccctggctttaaccctccgcatcggctgcacctgggggctctcagtgccccttggaaactctcaccagctgactgccacccttcgccaccgggcctgctcctggcctcattccgccagtacctgtggcccatccccaagccaggtctctcacacatcctcggc

SEQ ID NO: 81409 - DNA, 495 bp, Homo sapiens
tcctcacagaatccactttgcagtgcatgctgcttcacctttgtctcagctgctgactttttttctggccaaagccatgaggctgtttcataaccacaagagtcaccttccagggagggacactgaaaggaaacagttggagtggctcttcagcatctcctgatttctgtcactgtcataaatgcctgaatcaatccccaggtgtcagaaacatgttccttccccagctcctatcaatggcagatccctcctcctcctcacagaggctgcctaccaacatggccgcatctgctctcctgctctgaatggctactttggccttcccagtctctcacctgttccctcctctccagctcctctgccccaacagctttaatttgcatgccctgtccagaatccaaagatccagaagggaaaggaaaggaagggagaaggggccagtggagtraaccctgaactgggccagcctaggagatttctcatctctccttcaca

SEQ ID NO: 81410 - DNA, 672 bp, Homo sapiens
tctgtttccttcactatcttttttcctttgctgtccttgcacttgcttgcctggattttcttcttcctgtttgagaccttcctcccagatctgtgagccgtggttgttaattcgcattgagaagtgaagcactgaaaattgactggagtgtctgcaacgtggctgcacattagcatcacctggaagcattaaaaactacctctcccgggggacagtctcagggccattggatgaagatctgttagattggggtctgcatattgataggttgataaataaagatattgatagagatcggtaggtagaaatacagattttccctcctcagcaattctaatgtgcaagcagggctgagcgttgtatagtcttgggtgacagtgccgggcctctggagagttggtataattaccgtgcagcgaaaccactctgcgttttactgtgccgggtgcctggaagactttgattgcatccatatgattctttttctgtacctctggcaaattgcagattgggaggaattatatatccctacagagacttcagtgaatgaagtttcagggacctrtgagcaagaaggatgaactggcttcccggggaggggccagcagtccttctgccagagaagtcatcagggctgggacaggaagcatgggaagggcagctgtgcagagc

SEQ ID NO: 81411 - DNA, 672 bp, Homo sapiens
tctgtttccttcactatcttttttcctttgctgtccttgcacttgcttgcctggattttcttcttcctgtttgagaccttcctcccagatctgtgagccgtggttgttaattcgcattgagaagtgaagcactgaaaattgactggagtgtctgcaacgtggctgcacattagcatcacctggaagcattaaaaactacctctcccgggggacagtctcagggccattggatgaagatctgttagattggggtctgcatattgataggttgataaataaagatattgatagagatcggtaggtagaaatacagattttccctcctcagcaattctaatgtgcaagcagggctgagcgttgtatagtcttgggtgacagtgccgggcctctggagagttggtataattaccgtgcagcgaaaccactctgcgttttactgtgccgggtgcctggaagactttgattgcatccatatgattctttttctgtacctctggcaaattgcagattgggaggaattatatatccctacagagacttcagtgaatgaagtttcagggacctgtgagcaagaaggatgaactggcttcccggggaggggccagcagtccttctgccagasaagtcatcagggctgggacaggaagcatgggaagggcagctgtgcagagc

SEQ ID NO: 81412 - DNA, 630 bp, Homo sapiens
ggatcctgattttcagatgtctagccaccaataaccctaaacacacaaaactgcacttctcccttttttgtaacgtgaaattttcataacaaacccccaaatcctgagtgctgacaaaaccatcccaacgacatcacccagagtggttatttcctgcgccttggacagctgcgagaatcaatgtgatttcaaacacgaacaactgtgagtggccaaggtcaccctgagatgtcctgagttttgacttacattgcttctgactttcactttttaatggtcggctgaatacttakgctctaccagtctccttccctctggtcgtccccgcgccaaacagaaaccttgtttttcacagagtcctgacagtgacgccgcggctggctgtgagttgccaggtggatctccgcatgctctgctgcacctcctgtgtggctgtggtgtgctgggaagaagcatcaggctccccatgaacaaggaaggcccagctcttcagggcaaagttcaaatgaaggaggaagctcactgcctccctaggcaaagcgggggcaaggcctctgccagcccaggaccctcaggttcccaccttctagcagcttccactccacctgctcttccaggtgccaccagact

SEQ ID NO: 81413 - DNA, 1832 bp, Homo sapiens
cggaagggcggaagtagatgccatgtgcagaggaaaaacgagtgaggcgggtgatggagacccaggaggcatcccaggcagagrgtaccggatggacagtgacacggaggtaaatccaagggccggagcaattttctggggtgactgagcgtacaaaatagaggatggcaagaggcaggttggcaggtgatctaggctcctgcacacctttctgcatggcttaatcccaaaccgcgaaagagctctgggtgaccgcaattcatgttcttttccaatgtctcttatctgatgtctctttcggaagagacacaatttgatcctgaaagcagtcgcagccatcagcaatactcagtcacatgtgctgctggaaaagatcacttggctgcagagtggagagtgggccagggtgaagagtaggccagggtggagagtgggccagaggtggcaggatgcaaggtttagggcaggaggctgttcaaacgtccagcagacacagtagggagttggggagcatgggggccacggcagggcactgtgtagcggccaccccagcctccccaagcaggacaaagggggccctctgggatccataagagcctgtgggcacaccatgtaggggcggtgtctggttggcccatgggcctttgggtctggaatgggtggagcccagggtgcagccacagcccaaggaggggccagggctggaggagccagggctggaggagccagggctggaggagccggggccatcgatgagcgtcctggggagaagggcccatgattcctgatggaggaggcccagaacactgtaggcatcatgtactcagtgctgagtgaaaagcttcccgccactcagaatggtcacgctcgggatggctgagacatctgcaactcacaactctcacctcccagctgtggcactgaaagcctccctcagagccttggtttcctaacccaccgaacaggattaactgcacttgccagaaagggcttgtggtagcatttcataggacagtgcaggccaatgctctttggaagtcgcagatgcagggcacagatgggagatggcatggacaggtcctgctcgtcaaatagccggggagtctcccatgcttcttggtctccctaagctgggccacatggcagctctgatccatggcacgtgagcagaggggaccgtgtcactcccaggcagaggcaggtctgagctgtgagccctgtagcctggccagaaccggtgtcccagggcaaggaagaagcctttagtatgttcacgctgttgaggctcacccagcctgactggccagaaatcagttaggccacagacaaccctgtggcctcaggtagaaggccactgtctcattctgaatggtagttttcaaaaactcaaggaaccgcgtgaggaaggaagggggatttataaattcctgattccattagctttgctctgtaattttgggtgagtcacagcatgcacaaattagagggctgaaaacatctcccagacagtctggcagaagccccccctgagaacgaggaaaccgaggcccaggaaggagcagagtcgctcaggggctgctccagcggccacgggcctcggggacaacgcaggcccagcccggggagaagccccacgccagccttctctctctccctgcagggaagaggcagccacacaactgggcatgtccttctggcctgcacacctgggagtctccaacagacgctcactcgggtcctggggtaaggatacctcccaggtcgcttactggagaaggagccacacatgtgtccctgggtctgatggttgcaagaggaaacggaaagtgggg

SEQ ID NO: 81414 - DNA, 1832 bp, Homo sapiens
cggaagggcggaagtagatgccatgtgcagaggaaaaacgagtgaggcgggtgatggagacccaggaggcatcccaggcagagggtaccggatggacagtgacacggaggtaaatccaagggccggagcaattttctggggtgactgagcgtacaaaatagaggatggcaagaggcaggttggcaggtgatctaggctcctgcacacctttctgcatggcttaatcccaaaccgcgaaagagctctgggtgaccgcaattcatgttcttttccaatgtctcttatctgatgtctctttcggaagagacacaatttgatcctgaragcagtcgcagccatcagcaatactcagtcacatgtgctgctggaaaagatcacttggctgcagagtggagagtgggccagggtgaagagtaggccagggtggagagtgggccagaggtggcaggatgcaaggtttagggcaggaggctgttcaaacgtccagcagacacagtagggagttggggagcatgggggccacggcagggcactgtgtagcggccaccccagcctccccaagcaggacaaagggggccctctgggatccataagagcctgtgggcacaccatgtaggggcggtgtctggttggcccatgggcctttgggtctggaatgggtggagcccagggtgcagccacagcccaaggaggggccagggctggaggagccagggctggaggagccagggctggaggagccggggccatcgatgagcgtcctggggagaagggcccatgattcctgatggaggaggcccagaacactgtaggcatcatgtactcagtgctgagtgaaaagcttcccgccactcagaatggtcacgctcgggatggctgagacatctgcaactcacaactctcacctcccagctgtggcactgaaagcctccctcagagccttggtttcctaacccaccgaacaggattaactgcacttgccagaaagggcttgtggtagcatttcataggacagtgcaggccaatgctctttggaagtcgcagatgcagggcacagatgggagatggcatggacaggtcctgctcgtcaaatagccggggagtctcccatgcttcttggtctccctaagctgggccacatggcagctctgatccatggcacgtgagcagaggggaccgtgtcactcccaggcagaggcaggtctgagctgtgagccctgtagcctggccagaaccggtgtcccagggcaaggaagaagcctttagtatgttcacgctgttgaggctcacccagcctgactggccagaaatcagttaggccacagacaaccctgtggcctcaggtagaaggccactgtctcattctgaatggtagttttcaaaaactcaaggaaccgcgtgaggaaggaagggggatttataaattcctgattccattagctttgctctgtaattttgggtgagtcacagcatgcacaaattagagggctgaaaacatctcccagacagtctggcagaagccccccctgagaacgaggaaaccgaggcccaggaaggagcagagtcgctcaggggctgctccagcggccacgggcctcggggacaacgcaggcccagcccggggagaagccccacgccagccttctctctctccctgcagggaagaggcagccacacaactgggcatgtccttctggcctgcacacctgggagtctccaacagacgctcactcgggtcctggggtaaggatacctcccaggtcgcttactggagaaggagccacacatgtgtccctgggtctgatggttgcaagaggaaacggaaagtgggg

SEQ ID NO: 81415 - DNA, 1832 bp, Homo sapiens
cggaagggcggaagtagatgccatgtgcagaggaaaaacgagtgaggcgggtgatggagacccaggaggcatcccaggcagagggtaccggatggacagtgacacggaggtaaatccaagggccggagcaattttctggggtgactgagcgtacaaaatagaggatggcaagaggcaggttggcaggtgatctaggctcctgcacacctttctgcatggcttaatcccaaaccgcgaaagagctctgggtgaccgcaattcatgttcttttccaatgtctcttatctgatgtctctttcggaagagacacaatttgatcctgaaagcagtcgyagccatcagcaatactcagtcacatgtgctgctggaaaagatcacttggctgcagagtggagagtgggccagggtgaagagtaggccagggtggagagtgggccagaggtggcaggatgcaaggtttagggcaggaggctgttcaaacgtccagcagacacagtagggagttggggagcatgggggccacggcagggcactgtgtagcggccaccccagcctccccaagcaggacaaagggggccctctgggatccataagagcctgtgggcacaccatgtaggggcggtgtctggttggcccatgggcctttgggtctggaatgggtggagcccagggtgcagccacagcccaaggaggggccagggctggaggagccagggctggaggagccagggctggaggagccggggccatcgatgagcgtcctggggagaagggcccatgattcctgatggaggaggcccagaacactgtaggcatcatgtactcagtgctgagtgaaaagcttcccgccactcagaatggtcacgctcgggatggctgagacatctgcaactcacaactctcacctcccagctgtggcactgaaagcctccctcagagccttggtttcctaacccaccgaacaggattaactgcacttgccagaaagggcttgtggtagcatttcataggacagtgcaggccaatgctctttggaagtcgcagatgcagggcacagatgggagatggcatggacaggtcctgctcgtcaaatagccggggagtctcccatgcttcttggtctccctaagctgggccacatggcagctctgatccatggcacgtgagcagaggggaccgtgtcactcccaggcagaggcaggtctgagctgtgagccctgtagcctggccagaaccggtgtcccagggcaaggaagaagcctttagtatgttcacgctgttgaggctcacccagcctgactggccagaaatcagttaggccacagacaaccctgtggcctcaggtagaaggccactgtctcattctgaatggtagttttcaaaaactcaaggaaccgcgtgaggaaggaagggggatttataaattcctgattccattagctttgctctgtaattttgggtgagtcacagcatgcacaaattagagggctgaaaacatctcccagacagtctggcagaagccccccctgagaacgaggaaaccgaggcccaggaaggagcagagtcgctcaggggctgctccagcggccacgggcctcggggacaacgcaggcccagcccggggagaagccccacgccagccttctctctctccctgcagggaagaggcagccacacaactgggcatgtccttctggcctgcacacctgggagtctccaacagacgctcactcgggtcctggggtaaggatacctcccaggtcgcttactggagaaggagccacacatgtgtccctgggtctgatggttgcaagaggaaacggaaagtgggg

SEQ ID NO: 81416 - DNA, 1832 bp, Homo sapiens
cggaagggcggaagtagatgccatgtgcagaggaaaaacgagtgaggcgggtgatggagacccaggaggcatcccaggcagagggtaccggatggacagtgacacggaggtaaatccaagggccggagcaattttctggggtgactgagcgtacaaaatagaggatggcaagaggcaggttggcaggtgatctaggctcctgcacacctttctgcatggcttaatcccaaaccgcgaaagagctctgggtgaccgcaattcatgttcttttccaatgtctcttatctgatgtctctttcggaagagacacaatttgatcctgaaagcagtcgcagccatcagcaatactcagtcacatgtgctgctggaaaagatcacttggctgcagagtggagagtgggccagggtgragagtaggccagggtggagagtgggccagaggtggcaggatgcaaggtttagggcaggaggctgttcaaacgtccagcagacacagtagggagttggggagcatgggggccacggcagggcactgtgtagcggccaccccagcctccccaagcaggacaaagggggccctctgggatccataagagcctgtgggcacaccatgtaggggcggtgtctggttggcccatgggcctttgggtctggaatgggtggagcccagggtgcagccacagcccaaggaggggccagggctggaggagccagggctggaggagccagggctggaggagccggggccatcgatgagcgtcctggggagaagggcccatgattcctgatggaggaggcccagaacactgtaggcatcatgtactcagtgctgagtgaaaagcttcccgccactcagaatggtcacgctcgggatggctgagacatctgcaactcacaactctcacctcccagctgtggcactgaaagcctccctcagagccttggtttcctaacccaccgaacaggattaactgcacttgccagaaagggcttgtggtagcatttcataggacagtgcaggccaatgctctttggaagtcgcagatgcagggcacagatgggagatggcatggacaggtcctgctcgtcaaatagccggggagtctcccatgcttcttggtctccctaagctgggccacatggcagctctgatccatggcacgtgagcagaggggaccgtgtcactcccaggcagaggcaggtctgagctgtgagccctgtagcctggccagaaccggtgtcccagggcaaggaagaagcctttagtatgttcacgctgttgaggctcacccagcctgactggccagaaatcagttaggccacagacaaccctgtggcctcaggtagaaggccactgtctcattctgaatggtagttttcaaaaactcaaggaaccgcgtgaggaaggaagggggatttataaattcctgattccattagctttgctctgtaattttgggtgagtcacagcatgcacaaattagagggctgaaaacatctcccagacagtctggcagaagccccccctgagaacgaggaaaccgaggcccaggaaggagcagagtcgctcaggggctgctccagcggccacgggcctcggggacaacgcaggcccagcccggggagaagccccacgccagccttctctctctccctgcagggaagaggcagccacacaactgggcatgtccttctggcctgcacacctgggagtctccaacagacgctcactcgggtcctggggtaaggatacctcccaggtcgcttactggagaaggagccacacatgtgtccctgggtctgatggttgcaagaggaaacggaaagtgggg

SEQ ID NO: 81417 - DNA, 1832 bp, Homo sapiens
cggaagggcggaagtagatgccatgtgcagaggaaaaacgagtgaggcgggtgatggagacccaggaggcatcccaggcagagggtaccggatggacagtgacacggaggtaaatccaagggccggagcaattttctggggtgactgagcgtacaaaatagaggatggcaagaggcaggttggcaggtgatctaggctcctgcacacctttctgcatggcttaatcccaaaccgcgaaagagctctgggtgaccgcaattcatgttcttttccaatgtctcttatctgatgtctctttcggaagagacacaatttgatcctgaaagcagtcgcagccatcagcaatactcagtcacatgtgctgctggaaaagatcacttggctgcagagtggagagtgggccagggtgaagagtaggccagggtggagagtgggccagaggtggcaggatgcaaggtttagggcaggaggctgttcaaacgtccagcagacacagtagggagttggggagcatgggggccacggcagggcactgtgkagcggccaccccagcctccccaagcaggacaaagggggccctctgggatccataagagcctgtgggcacaccatgtaggggcggtgtctggttggcccatgggcctttgggtctggaatgggtggagcccagggtgcagccacagcccaaggaggggccagggctggaggagccagggctggaggagccagggctggaggagccggggccatcgatgagcgtcctggggagaagggcccatgattcctgatggaggaggcccagaacactgtaggcatcatgtactcagtgctgagtgaaaagcttcccgccactcagaatggtcacgctcgggatggctgagacatctgcaactcacaactctcacctcccagctgtggcactgaaagcctccctcagagccttggtttcctaacccaccgaacaggattaactgcacttgccagaaagggcttgtggtagcatttcataggacagtgcaggccaatgctctttggaagtcgcagatgcagggcacagatgggagatggcatggacaggtcctgctcgtcaaatagccggggagtctcccatgcttcttggtctccctaagctgggccacatggcagctctgatccatggcacgtgagcagaggggaccgtgtcactcccaggcagaggcaggtctgagctgtgagccctgtagcctggccagaaccggtgtcccagggcaaggaagaagcctttagtatgttcacgctgttgaggctcacccagcctgactggccagaaatcagttaggccacagacaaccctgtggcctcaggtagaaggccactgtctcattctgaatggtagttttcaaaaactcaaggaaccgcgtgaggaaggaagggggatttataaattcctgattccattagctttgctctgtaattttgggtgagtcacagcatgcacaaattagagggctgaaaacatctcccagacagtctggcagaagccccccctgagaacgaggaaaccgaggcccaggaaggagcagagtcgctcaggggctgctccagcggccacgggcctcggggacaacgcaggcccagcccggggagaagccccacgccagccttctctctctccctgcagggaagaggcagccacacaactgggcatgtccttctggcctgcacacctgggagtctccaacagacgctcactcgggtcctggggtaaggatacctcccaggtcgcttactggagaaggagccacacatgtgtccctgggtctgatggttgcaagaggaaacggaaagtgggg

SEQ ID NO: 81418 - DNA, 506 bp, Homo sapiens
tttgagacgagtctcactgtgttgccccagctggagtgcagtggcamcatcttggctccctgcagcctctgcctccagggttcaagcaattctcccgcctcagcctcctgagcagctggtactacaggtgcccgccaccacacccagctaatttttgtatttttagtagagacagggtttcgccatgttggccaggctggtcttgaactcctgatctcaggtgatctgcctaccttggcctaccaaaatgctgggattacagccgtgagccaccgcacccagcctggtgactataatttttaaacagagtcagagaaggaaacttgtagaaaagatcaaagactacagaagggtctatctctctaaaaaggagtaaaaagaaatagaagaaggtgtgaaagaacaacaaaatttaaaaccaaaagataatttatggaatactacaatagacttgtgccatggacaaacggcaaattctttgaaaaatatacttcctgataagcatc

SEQ ID NO: 81419 - DNA, 1008 bp, Homo sapiens
  misc_feature (1)...(1008): n = A,T,C or G
agtctgcaagcaactgattgactatggtctctgtgtggtcaaacctctctgctaatgttcatctgtatttacagatgctcccagtgctagcatcactgcttcaactccaactcagatcatcaggcattagattcttataaggagcatgcaacctacatccctcgaatgtgcagttcacagtagggttcgcactcctatgagaatctaatgctgctactgatttgacaggaggcagagctcaggcggtgatgcgagctaggagtggctgtaaatacagataaagcttcccttgcttgcctgcccactgcttgcctcctgctgtgcaacccagttcctaacaggtcacagaccagttggggatccttgatttatgatattggatagcctcttacaaggtattaaaaatgatgtttgctcatagaaaaatatactaaaatgccagtagacattttaattagaaggattacggatgattttaattttcttctttgcaattttctatattttccaaaatttctaccatcaattattataattagataagaagtttatttttattttattttttaaaattttatttatttatttttgagactgagtcttgcactgtcgcccgggctggagtgcagtggcaygatctcggctcactgcaacctctgcctcccaggttcaagcgactctcctgcctcagcctcccgtatttatttatttttgagacagagtctcgctctgtcacccaggctggagtgcagtgacgcgatctcagctcactgcaacctctgcccccgggttcaagctattcttctgcctcggcctcctgagcagctggaactacaggcacctgccaccacgcccggctaattnttttttttttttttttttgtatttttagtaaagatgggatttcatcatgttagccaggatggtctaaatctcctgacctcgtgatctgcccgcctcggcctgccaaagtgctgggattacaggtgtgagccactgctcctggcc

SEQ ID NO: 81420 - DNA, 1226 bp, Homo sapiens
  misc_feature (1)...(1226): n = A,T,C or G
gcttcttgactccacaggaaaggagttgttaattttttccccaattcctatattagatgacagaagcactagataaaagcagatgagtaataatcattcactgttcatagggaaaattaagttcagaactgatctctatctttaatattcttcttggtcaaaatgatacaatttgtttgggcaaagtgggagggttttttaaaaggcgatggaggtgcgagcaggagaaaaggtgacaactgaacagattagttgaaaacttgtagggcctcatttctcagagcaaaggaatgtttggtgcttcactgagagaaactaagaatccctctctccttttcagatagagctaggatgagagaggttagccaaaccctgctgattcacacaaacatttgcttcctaaacttgggagtaaatcaactttgggaaacatatcttctgaaaacataattttgcaggacagcctcccatctaaccagctaccataaaaagatactagttaaasagtaaacttctttttcctgtctggttcttataccctaatctgttggggaaaaaaagaagtgaaggaatatatgatttggcctgtcatttaacatattcaacattttaaaaaggagaaatccaaaacaccatattaatatcaacaacgataatgatagtttatagacaatttttaaataccaaaaaattaaaaaataatttataattcacatttgaaataaattacattattttctgtaatggatttacccttctaataatgtattgctttggcaaagagtaaaattatttttgtactcctagccctaaagcaggctgctagctagggtggcaaagggagacttttctaaaataatccacagagccagtaacaagcactaatgatgtattataacttcatggtatttcagcatgcatatacctttagatatacattatccttaatttacattagtagaggaaagtgttatagagacagacattgttaactttcttgaatatccattcttctccaccctttctcttccctgataacaaaaaagagttttgtttaggtatctagcttccaaatgctcaaggagaaaatctccagctccaggacacaaatcagtcttggactccnnnnnnnnnnnnnnnnnnnnnnnnnnnnnnnnnnnnnnnnnnnnnnnnnnnnnnnnnnnnnnnnnnnnnnnnnnnnnnnnnnnnnnnnnnnnnnnnnnnna

SEQ ID NO: 81421 - DNA, 1226 bp, Homo sapiens
  misc_feature (1)...(1226): n = A,T,C or G
gcttcttgactccacaggaaaggagttgttaattttttccccaattcctatattagatgacagaagcactagataaaagcagatgagtaataatcattcactgttcatagggaaaattaagttcagaactgatctctatctttaatattcttcttggtcaaaatgatacaatttgtttgggcaaagtgggagggttttttaaaaggcgatggaggtgcgagcaggagaaaaggtgacaactgaacagattagttgaaaacttgtagggcctcatttctcagagcaaaggaatgtttggtgcttcactgagagaaactaagaatccctctctccttttcagatagagctaggatgagagaggttagccaaaccctgctgattcacacaaacatttgcttcctaaacttgggagtaaatcaactttgggaaacatatcttctgaaaacataattttgcaggacagcctcccatctaaccagctaccataaaaagatactagttaaagagtaaacttctttttcctgtctggttcttataccctaatctgttggggaaaaaaagaagtgaaggaatatatgatttggcctgtcatttaacatattcaacattttaaaaaggagaaatccaaaacaccatattaatatcaacaacgataatgatagtttatagacaatttttaaataccaaaaaattaaaaaataatttataattcacatttgaaataaattacattattttctgtaatggatttacccttctaataatgtattgctttggcaaagagtaaaattatttttgtactcctagccctaaagcaggctgctagctagggtggcaaagggagacttttctaaaataatccacagagccagtaacaagcactaatgatgtattataacttcatggtatttcagcatgcatatacctttagatatacattatccttaatttacattagtagaggaaagtgttatagagacagacattgttaactttcttgaatatccattcttctccaccctttctcttccctgataacaaaaaagagttttgtttaggtatctagcttccaaatgctcaaggaraaaatctccagctccaggacacaaatcagtcttggactccnnnnnnnnnnnnnnnnnnnnnnnnnnnnnnnnnnnnnnnnnnnnnnnnnnnnnnnnnnnnnnnnnnnnnnnnnnnnnnnnnnnnnnnnnnnnnnnnnnnna

SEQ ID NO: 81422 - DNA, 3601 bp, Homo sapiens
tttaacatttatgtcctaggatttccagaaggagagaaaaagaaagtagagtgaagaaacaataactaatatttccccaaatttgacaaaagacacaaccctaaagattcaagcagcttgacaaactccatacaggataaacccaagaaatgcacatcagttcttggaggcctctgctccgagtaactgtgaatatctaatgagacagatacgcctgccaggaccacaacggccaagtgtgctgttatgatggttgggcaacaaatgtcagcattgccttctggtgattaaaaagaaaaggtctgattgtccctggtggcttgtgcctataatcccagtactctgggaagctgaggcaggaggactgattaaggccaagagtttgagaacaacctgggcaacatagcaagaccctggcaaaaaaaaaaaaaaaaaaaaaatttaaattatccaggtgtagtggaatgcacctgtagtatcagctacttgggaggctgatgtgggagaatcccttgagcccaagagttcaaggttacaatgagctatgataggaccattgcattctagcctgggtgacagagggagaccctgtctccaaaataataataataataataaaagggagaggaaaggccttaatttactctttaaaactgagatttccaagatgagaagctacaatgattgctaatggaaagattaactttatgttaacctaataaggccaactaatagataagatcctagaagaaaattaagccctcaaatccccagaatctcaccccttctacattattatttctccatacatacatacaaaccactttccttgccttgacacacagaagcaaggaaacaaacaaacaaaaaaataagtgtcttttataaaacctctgtgcaatgaatgttaatccattaacctttcattgagcaatgcattaggtgacaccctgaagctggaatcccttcctgagaagcaaacaaggagttcatgccattatggaggttatctggaagatagacactaagaaagcaacaatttaatatgtgctgtgaaggacaaagccaggctatgagaacataaacaaggggatccttaacctggaagatcagataagacttcccagaggaggtgcgtcgaaacagtacacagaaggaggagtaagtgagacgacagcagagactcacatgtattctacatattttgatcacaatctgatccagataacttcctacttttgagaagccttcattttatcaagggatacaaaactgcaaattaattatttaactcggtagtacatgagtgaggagaaagggggccacaaatttctaggactacacagtacaggcagattttttgaaggaatttgtcataaataattaattttgactgtktcagttttatgtaataaaaatatcactgagtttgcctttgttagtacgcactgcaaaattgtaaatgcatacctttttgcatgttttaatcatgccaagaaatacgttctatgaacaaaataaagaaaattcttcccatttgtaaaaggaaagaccagctaatattttgtggtccaggtctttcctgttcaccattaaacataccatatctccttgcatacttactacacaaaagaggtaccaagtacaattctgtttggtggttgaatacacacagaacctgaaaattagcacccagaaatcctcccatcctacaaaggtgggtgaattccttgtcttattttgcttggctttctaatggaaatccaatcaaatgactgagtaggtgaaatgggtatagaaggatgtggggacacgtgtgatttcacttgccccactaaaagcacagcagtgactccagatccttcagacatgctggggatcttcagagccagaagcctgaggagaggacttcaatttaagagcatctgagactgaactccagaaagccctgttgacctccccctgttgcagggactactgtgaagaaccctactctatgagttgtagacatggcctctgtctaaagtgtcttgactcgttggtgatgaagacagataacagggttatcacctctcccgagtgctttcagtactcctgggagaaacagattcaggagaacctggcactgggcaacatggtcagacttatcagagagctggagcagtcatgaacacaggcctgaatttgccctgaggtggtgaacttctatgtgacaatagcagaaaaaaactcagaaagaaattgacccatttgcctgacctattttgaagatccctatttactattctgcaaatacaacttctgtttctcttgtctccggcatttggagagagtgaaccaagatggtcttttcatttgtctccagtgtcttgacatcgctcagacacagacagtccagatcagcatggccctgaggcagctggcagcagagacaaaagtgatgatacctgtgctgggcaggcgctgctggaggctgaggtttgtgtatgtttgagtctggatccagccatagccaatggcttccttgtgttttctaatgacttgcagagcatcagatgcacaaatgcctcaaagagaccaccagagaaaaccttgaaacattcatctctgcagctcatgtcctgggttcctctggctttccttccagctgccacagttgggaggaggtaggattaagagagttagctgactcacctgtgggtattggcagggaatctgtatattgtcaaggaatgtctcctatatcttcagaccttgagtactgggaagcccttgcgtctcaagggaaaatattaagttgctatcagttctcaacaatgaattgttctccatatgaacccaactttgtctgtgacctgaaagccatttcatttcccaaggtctgttggtttccttctatatacagtcacacgtgtctgcctcaaagcccgtgcgtccattcttctgccttgagatgccaggagggaacacggaacccataaagatctgtcccaaagcagctacagatactgcaattctgccacagtcccctaaagacgatatgccaactataaagaaagaaacggcaaatgggagaagaccactggttcatttacttccaggatcttctgatattaccaggtatttctaagaggctacatccataaactgctccttcaagatgaatcaagaacctgtttctggaaagtgcctcggctggatcgatataaaatgtcatggatatgtgggtgagttgtgaacaaagaaaaaatgatcacatttaaaatctgaactatcaagtaagaaagggaaaaaaattactttaaagtttatatggaaccaaaaaagagcccgcatcaccaagtcaatcctaagccaaaagaacaaagccggtcacatcaggctacctgacttcacactatactacaaggctacagtaaccaaaacagcatggtactggtatagatcaatggaacagaacagagcgctcagaaataacgccgcatatctacaactatctgatctttgacaaacttgagaaaaacaagcaatggggaaaggattccctatttaataaatggtgctgggaaaattggctagccatatgtagaaagctgaaact

SEQ ID NO: 81423 - DNA, 3601 bp, Homo sapiens
tttaacatttatgtcctaggatttccagaaggagagaaaaagaaagtagagtgaagaaacaataactaatatttccccaaatttgacaaaagacacaaccctaaagattcaagcagcttgacaaactccatacaggataaacccaagaaatgcacatcagttcttggaggcctctgctccgagtaactgtgaatatctaatgagacagatacgcctgccaggaccacaacggccaagtgtgctgttatgatggttgggcaacaaatgtcagcattgccttctggtgattaaaaagaaaaggtctgattgtccctggtggcttgtgcctataatcccagtactctgggaagctgaggcaggaggactgattaaggccaagagtttgagaacaacctgggcaacatagcaagaccctggcaaaaaaaaaaaaaaaaaaaaaatttaaattatccaggtgtagtggaatgcacctgtagtatcagctacttgggaggctgatgtgggagaatcccttgagcccaagagttcaaggttacaatgagctatgataggaccattgcattctagcctgggtgacagagggagaccctgtctccaaaataataataataataataaaagggagaggaaaggccttaatttactctttaaaactgagatttccaagatgagaagctacaatgattgctaatggaaagattaactttatgttaacctaataaggccaactaatagataagatcctagaagaaaattaagccctcaaatccccagaatctcaccccttctacattattatttctccatacatacatacaaaccactttccttgccttgacacacagaagcaaggaaacaaacaaacaaaaaaataagtgtcttttataaaacctctgtgcaatgaatgttaatccattaacctttcattgagcaatgcattaggtgacaccctgaagctggaatcccttcctgagaagcaaacaaggagttcatgccattatggaggttatctggaagatagacactaagaaagcaacaatttaatatgtgctgtgaaggacaaagccaggctatgagaacataaacaaggggatccttaacctggaagatcagataagacttcccagaggaggtgcgtcgaaacagtacacagaaggaggagtaagtgagacgacagcagagactcacatgtattctacatattttgatcacaatctgatccagataacttcctacttttgagaagccttcattttatcaagggatacaaaactgcaaattaattatttaactcggtagtacatgagtgaggagaaagggggccacaaatttctaggactacacagtacaggcagattttttgaaggaatttgtcataaataattaattttgactgtgtcagttttatgtaataaaaatatcactgagtttgcctttgttagtacgcactgcaaaattgtaaatgcatacctttttgcatgttttaatcatgccaagaaatacgttctatgaacaaaataaagaaaattcttcccatttgtaaaaggaaagaccagctaatattttgtsgtccaggtctttcctgttcaccattaaacataccatatctccttgcatacttactacacaaaagaggtaccaagtacaattctgtttggtggttgaatacacacagaacctgaaaattagcacccagaaatcctcccatcctacaaaggtgggtgaattccttgtcttattttgcttggctttctaatggaaatccaatcaaatgactgagtaggtgaaatgggtatagaaggatgtggggacacgtgtgatttcacttgccccactaaaagcacagcagtgactccagatccttcagacatgctggggatcttcagagccagaagcctgaggagaggacttcaatttaagagcatctgagactgaactccagaaagccctgttgacctccccctgttgcagggactactgtgaagaaccctactctatgagttgtagacatggcctctgtctaaagtgtcttgactcgttggtgatgaagacagataacagggttatcacctctcccgagtgctttcagtactcctgggagaaacagattcaggagaacctggcactgggcaacatggtcagacttatcagagagctggagcagtcatgaacacaggcctgaatttgccctgaggtggtgaacttctatgtgacaatagcagaaaaaaactcagaaagaaattgacccatttgcctgacctattttgaagatccctatttactattctgcaaatacaacttctgtttctcttgtctccggcatttggagagagtgaaccaagatggtcttttcatttgtctccagtgtcttgacatcgctcagacacagacagtccagatcagcatggccctgaggcagctggcagcagagacaaaagtgatgatacctgtgctgggcaggcgctgctggaggctgaggtttgtgtatgtttgagtctggatccagccatagccaatggcttccttgtgttttctaatgacttgcagagcatcagatgcacaaatgcctcaaagagaccaccagagaaaaccttgaaacattcatctctgcagctcatgtcctgggttcctctggctttccttccagctgccacagttgggaggaggtaggattaagagagttagctgactcacctgtgggtattggcagggaatctgtatattgtcaaggaatgtctcctatatcttcagaccttgagtactgggaagcccttgcgtctcaagggaaaatattaagttgctatcagttctcaacaatgaattgttctccatatgaacccaactttgtctgtgacctgaaagccatttcatttcccaaggtctgttggtttccttctatatacagtcacacgtgtctgcctcaaagcccgtgcgtccattcttctgccttgagatgccaggagggaacacggaacccataaagatctgtcccaaagcagctacagatactgcaattctgccacagtcccctaaagacgatatgccaactataaagaaagaaacggcaaatgggagaagaccactggttcatttacttccaggatcttctgatattaccaggtatttctaagaggctacatccataaactgctccttcaagatgaatcaagaacctgtttctggaaagtgcctcggctggatcgatataaaatgtcatggatatgtgggtgagttgtgaacaaagaaaaaatgatcacatttaaaatctgaactatcaagtaagaaagggaaaaaaattactttaaagtttatatggaaccaaaaaagagcccgcatcaccaagtcaatcctaagccaaaagaacaaagccggtcacatcaggctacctgacttcacactatactacaaggctacagtaaccaaaacagcatggtactggtatagatcaatggaacagaacagagcgctcagaaataacgccgcatatctacaactatctgatctttgacaaacttgagaaaaacaagcaatggggaaaggattccctatttaataaatggtgctgggaaaattggctagccatatgtagaaagctgaaact

SEQ ID NO: 81424 - DNA, 3601 bp, Homo sapiens
tttaacatttatgtcctaggatttccagaaggagagaaaaagaaagtagagtgaagaaacaataactaatatttccccaaatttgacaaaagacacaaccctaaagattcaagcagcttgacaaactccatacaggataaacccaagaaatgcacatcagttcttggaggcctctgctccgagtaactgtgaatatctaatgagacagatacgcctgccaggaccacaacggccaagtgtgctgttatgatggttgggcaacaaatgtcagcattgccttctggtgattaaaaagaaaaggtctgattgtccctggtggcttgtgcctataatcccagtactctgggaagctgaggcaggaggactgattaaggccaagagtttgagaacaacctgggcaacatagcaagaccctggcaaaaaaaaaaaaaaaaaaaaaatttaaattatccaggtgtagtggaatgcacctgtagtatcagctacttgggaggctgatgtgggagaatcccttgagcccaagagttcaaggttacaatgagctatgataggaccattgcattctagcctgggtgacagagggagaccctgtctccaaaataataataataataataaaagggagaggaaaggccttaatttactctttaaaactgagatttccaagatgagaagctacaatgattgctaatggaaagattaactttatgttaacctaataaggccaactaatagataagatcctagaagaaaattaagccctcaaatccccagaatctcaccccttctacattattatttctccatacatacatacaaaccactttccttgccttgacacacagaagcaaggaaacaaacaaacaaaaaaataagtgtcttttataaaacctctgtgcaatgaatgttaatccattaacctttcattgagcaatgcattaggtgacaccctgaagctggaatcccttcctgagaagcaaacaaggagttcatgccattatggaggttatctggaagatagacactaagaaagcaacaatttaatatgtgctgtgaaggacaaagccaggctatgagaacataaacaaggggatccttaacctggaagatcagataagacttcccagaggaggtgcgtcgaaacagtacacagaaggaggagtaagtgagacgacagcagagactcacatgtattctacatattttgatcacaatctgatccagataacttcctacttttgagaagccttcattttatcaagggatacaaaactgcaaattaattatttaactcggtagtacatgagtgaggagaaagggggccacaaatttctaggactacacagtacaggcagattttttgaaggaatttgtcataaataattaattttgactgtgtcagttttatgtaataaaaatatcactgagtttgcctttgttagtacgcactgcaaaattgtaaatgcatacctttttgcatgttttaatcatgccaagaaatacgttctatgaacaaaataaagaaaattcttcccatttgtaaaaggaaagaccagctaatattttgtggtccaggtctttcctgttcaccattaaacataccatatctccttgcatacttactacacaaaagaggtaccaagtacaattctgtttggtggttgaatacacacagaacctgaaaattagcacccagaaatcctcccatcctacaaaggtggrtgaattccttgtcttattttgcttggctttctaatggaaatccaatcaaatgactgagtaggtgaaatgggtatagaaggatgtggggacacgtgtgatttcacttgccccactaaaagcacagcagtgactccagatccttcagacatgctggggatcttcagagccagaagcctgaggagaggacttcaatttaagagcatctgagactgaactccagaaagccctgttgacctccccctgttgcagggactactgtgaagaaccctactctatgagttgtagacatggcctctgtctaaagtgtcttgactcgttggtgatgaagacagataacagggttatcacctctcccgagtgctttcagtactcctgggagaaacagattcaggagaacctggcactgggcaacatggtcagacttatcagagagctggagcagtcatgaacacaggcctgaatttgccctgaggtggtgaacttctatgtgacaatagcagaaaaaaactcagaaagaaattgacccatttgcctgacctattttgaagatccctatttactattctgcaaatacaacttctgtttctcttgtctccggcatttggagagagtgaaccaagatggtcttttcatttgtctccagtgtcttgacatcgctcagacacagacagtccagatcagcatggccctgaggcagctggcagcagagacaaaagtgatgatacctgtgctgggcaggcgctgctggaggctgaggtttgtgtatgtttgagtctggatccagccatagccaatggcttccttgtgttttctaatgacttgcagagcatcagatgcacaaatgcctcaaagagaccaccagagaaaaccttgaaacattcatctctgcagctcatgtcctgggttcctctggctttccttccagctgccacagttgggaggaggtaggattaagagagttagctgactcacctgtgggtattggcagggaatctgtatattgtcaaggaatgtctcctatatcttcagaccttgagtactgggaagcccttgcgtctcaagggaaaatattaagttgctatcagttctcaacaatgaattgttctccatatgaacccaactttgtctgtgacctgaaagccatttcatttcccaaggtctgttggtttccttctatatacagtcacacgtgtctgcctcaaagcccgtgcgtccattcttctgccttgagatgccaggagggaacacggaacccataaagatctgtcccaaagcagctacagatactgcaattctgccacagtcccctaaagacgatatgccaactataaagaaagaaacggcaaatgggagaagaccactggttcatttacttccaggatcttctgatattaccaggtatttctaagaggctacatccataaactgctccttcaagatgaatcaagaacctgtttctggaaagtgcctcggctggatcgatataaaatgtcatggatatgtgggtgagttgtgaacaaagaaaaaatgatcacatttaaaatctgaactatcaagtaagaaagggaaaaaaattactttaaagtttatatggaaccaaaaaagagcccgcatcaccaagtcaatcctaagccaaaagaacaaagccggtcacatcaggctacctgacttcacactatactacaaggctacagtaaccaaaacagcatggtactggtatagatcaatggaacagaacagagcgctcagaaataacgccgcatatctacaactatctgatctttgacaaacttgagaaaaacaagcaatggggaaaggattccctatttaataaatggtgctgggaaaattggctagccatatgtagaaagctgaaact

SEQ ID NO: 81425 - DNA, 3601 bp, Homo sapiens
tttaacatttatgtcctaggatttccagaaggagagaaaaagaaagtagagtgaagaaacaataactaatatttccccaaatttgacaaaagacacaaccctaaagattcaagcagcttgacaaactccatacaggataaacccaagaaatgcacatcagttcttggaggcctctgctccgagtaactgtgaatatctaatgagacagatacgcctgccaggaccacaacggccaagtgtgctgttatgatggttgggcaacaaatgtcagcattgccttctggtgattaaaaagaaaaggtctgattgtccctggtggcttgtgcctataatcccagtactctgggaagctgaggcaggaggactgattaaggccaagagtttgagaacaacctgggcaacatagcaagaccctggcaaaaaaaaaaaaaaaaaaaaaatttaaattatccaggtgtagtggaatgcacctgtagtatcagctacttgggaggctgatgtgggagaatcccttgagcccaagagttcaaggttacaatgagctatgataggaccattgcattctagcctgggtgacagagggagaccctgtctccaaaataataataataataataaaagggagaggaaaggccttaatttactctttaaaactgagatttccaagatgagaagctacaatgattgctaatggaaagattaactttatgttaacctaataaggccaactaatagataagatcctagaagaaaattaagccctcaaatccccagaatctcaccccttctacattattatttctccatacatacatacaaaccactttccttgccttgacacacagaagcaaggaaacaaacaaacaaaaaaataagtgtcttttataaaacctctgtgcaatgaatgttaatccattaacctttcattgagcaatgcattaggtgacaccctgaagctggaatcccttcctgagaagcaaacaaggagttcatgccattatggaggttatctggaagatagacactaagaaagcaacaatttaatatgtgctgtgaaggacaaagccaggctatgagaacataaacaaggggatccttaacctggaagatcagataagacttcccagaggaggtgcgtcgaaacagtacacagaaggaggagtaagtgagacgacagcagagactcacatgtattctacatattttgatcacaatctgatccagataacttcctacttttgagaagccttcattttatcaagggatacaaaactgcaaattaattatttaactcggtagtacatgagtgaggagaaagggggccacaaatttctaggactacacagtacaggcagattttttgaaggaatttgtcataaataattaattttgactgtgtcagttttatgtaataaaaatatcactgagtttgcctttgttagtacgcactgcaaaattgtaaatgcatacctttttgcatgttttaatcatgccaagaaatacgttctatgaacaaaataaagaaaattcttcccatttgtaaaaggaaagaccagctaatattttgtggtccaggtctttcctgttcaccattaaacataccatatctccttgcatacttactacacaaaagaggtaccaagtacaattctgtttggtggttgaatacacacagaacctgaaaattagcacccagaaatcctcccatcctacaaaggtgggtgaattccttgtcttattttgcttggctttctaatggaaatccaatcaaatgactgagtaggtgaaatgggtatagaaggatgtggggacacgtgtgatttcacttgccccactaaaagcacagcagtgactccagatccttcagacatgctggggatcttcagagccagaagcctgaggagaggacytcaatttaagagcatctgagactgaactccagaaagccctgttgacctccccctgttgcagggactactgtgaagaaccctactctatgagttgtagacatggcctctgtctaaagtgtcttgactcgttggtgatgaagacagataacagggttatcacctctcccgagtgctttcagtactcctgggagaaacagattcaggagaacctggcactgggcaacatggtcagacttatcagagagctggagcagtcatgaacacaggcctgaatttgccctgaggtggtgaacttctatgtgacaatagcagaaaaaaactcagaaagaaattgacccatttgcctgacctattttgaagatccctatttactattctgcaaatacaacttctgtttctcttgtctccggcatttggagagagtgaaccaagatggtcttttcatttgtctccagtgtcttgacatcgctcagacacagacagtccagatcagcatggccctgaggcagctggcagcagagacaaaagtgatgatacctgtgctgggcaggcgctgctggaggctgaggtttgtgtatgtttgagtctggatccagccatagccaatggcttccttgtgttttctaatgacttgcagagcatcagatgcacaaatgcctcaaagagaccaccagagaaaaccttgaaacattcatctctgcagctcatgtcctgggttcctctggctttccttccagctgccacagttgggaggaggtaggattaagagagttagctgactcacctgtgggtattggcagggaatctgtatattgtcaaggaatgtctcctatatcttcagaccttgagtactgggaagcccttgcgtctcaagggaaaatattaagttgctatcagttctcaacaatgaattgttctccatatgaacccaactttgtctgtgacctgaaagccatttcatttcccaaggtctgttggtttccttctatatacagtcacacgtgtctgcctcaaagcccgtgcgtccattcttctgccttgagatgccaggagggaacacggaacccataaagatctgtcccaaagcagctacagatactgcaattctgccacagtcccctaaagacgatatgccaactataaagaaagaaacggcaaatgggagaagaccactggttcatttacttccaggatcttctgatattaccaggtatttctaagaggctacatccataaactgctccttcaagatgaatcaagaacctgtttctggaaagtgcctcggctggatcgatataaaatgtcatggatatgtgggtgagttgtgaacaaagaaaaaatgatcacatttaaaatctgaactatcaagtaagaaagggaaaaaaattactttaaagtttatatggaaccaaaaaagagcccgcatcaccaagtcaatcctaagccaaaagaacaaagccggtcacatcaggctacctgacttcacactatactacaaggctacagtaaccaaaacagcatggtactggtatagatcaatggaacagaacagagcgctcagaaataacgccgcatatctacaactatctgatctttgacaaacttgagaaaaacaagcaatggggaaaggattccctatttaataaatggtgctgggaaaattggctagccatatgtagaaagctgaaact

SEQ ID NO: 81426 - DNA, 3204 bp, Homo sapiens
ttaccggtgaattccttctggtcgactgaaaatagtattaatagtgtataaatatatgtgtgttagtttgtaatagggaggagaggaggcaggcagaggatagattttgtttggaattattgactaacagttgaaacctgaccaatgatttggtacattcattcattcctttattcaatgattcatacagctgttctgcaaggagatattcattcattcaatcattcatacattcattccacaaaaacatattcagtcactcattcatacattcattttgcagggagatataactgagcactcactatgtacctgggacttatccatatgtgaattttcttgagaagagaacttgggacttaacattaaggaatttaaaatttagatcagtaataagattgcatgagagttgaataaggacataagaattgaacaggaaatatcataagagacaaactaagtgttgcagaatgaaagtggcagagtagttaaggaacacctagatgaaaagtataatcttgaagaatttaggattcaatttgatacttgagtttctaagatgggatagatttacataggagtgagcacattccaggtggggagaatggtgtgagcaaaaacctagaagcagaggtatggtgggggcattgacattcaggccagccaagttttgatcacagggatcatgtttgtgaggcagaagagcaatatgagtttcatttgatgatgtagaataataccatttttgcctttcctcatcacagttatcacacagaatcataatgatcaatgttcctgtgtgttttctccattagattgagagtccttaagatcaaggaatgagtatttttttgtgggggcttttaagtacccttaattacacaaagctgtgcacccagttattgagtggagactgactaggcacatgtctggaatgagacagtggggagccagcccctgcttccctttcttggtgcgtgttacatgttgcacattagccaaagtggttttctcatttataaaatcattaagttattatgtggctcctcatccatgtggttagagaaagtagaggtctctgtgagcctcgcaacactattattagagttaggccatcagtgaactgtgagtaagaggatgcatggtggtgaactaatggacagctgtttaccaaggatttacttctctccacacatatgttaaatactatgggggcatataaaaagtgcatataggatcacataagagctgtgtccttcagaagtatacagcatactggactgatgaggttcctctacacgcaatagaaataaaagaatgtctgtaatagtccatggcacctgccttggtttatttttatctataaagttggagtggatgatctataaggatcctttgagtttgaagctgatggagagctcaaagagttcagcaggggtaaataactagaaagggcaggcaatgcttattcagcactttcttcataaacagagtttgtaggcagggtaagggtgggtgaaaggtggagctgggaatctatcagctggggtttgaatgggagtggagaaagcatcccaagagtggagaaagccacagcaaggggcagaacgtgaaagagcatgcagaatggaggctgcgtgtggcatccaggcgggcctcagatggcaccgatcctcagacagtggtcagggtaacactttcaagacagctcccttgtgagctttagtacctctctttagaagttgctggcagtgcattggctgggatcctgaaagttcatgctctgtgctagtgtatggggaacattttgatacttgggttagtgatttctgggactgaatattaaggacttgattttctgtccgttccacctgctttcaggaccactggagatagtcccttggcttttactgaagctggaagatttgtgtccatgtacaagatcaacaaccattatttccttggacttytaactcactccagcattgaacagctgctgttttccaagttaagggtttttttttttttttttttttttttagccaattatagctcacaaaagtttgtgcttgctctgtccaggtgggtctgccagaggccccctgacccaaatgttctgtccccacatcatgtggcagcacaacccaattagaggtgaccagggcagctgtccacataattgtatgcagttaacatctaacccttggctttcttggcaaagcaaaggcattggccttttggcttctgctggtccggtcagcaattacccagttattaaaactaaataattgccattagctcttgtcctcagtgcatcctgagtctcactgcaggtggatcttcatctcatttgcaaagctctccaatgcaaggcaagggatacttgtccttcagacactaggcaggtacaacagcagagcagtctccctgtgtgccacagtttccagctgcttttgcgtttcgaggtgttactgtgaattttgcgcttctgccacagagccgatgccttgtgtgtctgtgtgcttgtgtattcagagggctgctgttttattgttgggttggggggattttcctttgctttttcttagctggatattgccttttggtggtggcttgaaattcagttcgggggtgtgaactttctcttcatttttttctccttttctttctttcgagttctcatttctgaagagatttctgttcttaaatcctagcattaaatggaggtgttttcattttctctgggagaagtttcacagcacaggtgtgtgcttgattctctacttgcggttccccactgccaccacccccccccccacacccgctgccttgatgctgatagtggctgtctaaagtacaaagggaaagttaagcttacaggttgtccttctctttgattgtattcttggctgtagcttctcagccctttgcaggaggaactcacatcagtctggaacataaaaacaggagaattttcagccctggaaataattgcttcttggagtagatcctttgggagcctccacactgaggaatgaagtttgactaagccccagcaatgaataggacttggatgaggagaaagggtctgagatctgtgtttcgaggcaaggaaaattctggcaggatccgtttgcatatatattgaggcctaattaggccctcggtgtgtttggaaactgctttgttgcggtgggtatgata

SEQ ID NO: 81427 - DNA, 3204 bp, Homo sapiens
ttaccggtgaattccttctggtcgactgaaaatagtattaatagtgtataaatatatgtgtgttagtttgtaatagggaggagaggaggcaggcagaggatagattttgtttggaattattgactaacagttgaaacctgaccaatgatttggtacattcattcattcctttattcaatgattcatacagctgttctgcaaggagatattcattcattcaatcattcatacattcattccacaaaaacatattcagtcactcattcatacattcattttgcagggagatataactgagcactcactatgtacctgggacttatccatatgtgaattttcttgagaagagaacttgggacttaacattaaggaatttaaaatttagatcagtaataagattgcatgagagttgaataaggacataagaattgaacaggaaatatcataagagacaaactaagtgttgcagaatgaaagtggcagagtagttaaggaacacctagatgaaaagtataatcttgaagaatttaggattcaatttgatacttgagtttctaagatgggatagatttacataggagtgagcacattccaggtggggagaatggtgtgagcaaaaacctagaagcagaggtatggtgggggcattgacattcaggccagccaagttttgatcacagggatcatgtttgtgaggcagaagagcaatatgagtttcatttgatgatgtagaataataccatttttgcctttcctcatcacagttatcacacagaatcataatgatcaatgttcctgtgtgttttctccattagattgagagtccttaagatcaaggaatgagtatttttttgtgggggcttttaagtacccttaattacacaaagctgtgcacccagttattgagtggagactgactaggcacatgtctggaatgagacagtggggagccagcccctgcttccctttcttggtgcgtgttacatgttgcacattagccaaagtggttttctcatttataaaatcattaagttattatgtggctcctcatccatgtggttagagaaagtagaggtctctgtgagcctcgcaacactattattagagttaggccatcagtgaactgtgagtaagaggatgcatggtggtgaactaatggacagctgtttaccaaggatttacttctctccacacatatgttaaatactatgggggcatataaaaagtgcatataggatcacataagagctgtgtccttcagaagtatacagcatactggactgatgaggttcctctacacgcaatagaaataaaagaatgtctgtaatagtccatggcacctgccttggtttatttttatctataaagttggagtggatgatctataaggatcctttgagtttgaagctgatggagagctcaaagagttcagcaggggtaaataactagaaagggcaggcaatgcttattcagcactttcttcataaacagagtttgtaggcagggtaagggtgggtgaaaggtggagctgggaatctatcagctggggtttgaatgggagtggagaaagcatcccaagagtggagaaagccacagcaaggggcagaacgtgaaagagcatgcagaatggaggctgcgtgtggcatccaggcgggcctcagatggcaccgatcctcagacagtggtcagggtaacactttcaagacagctcccttgtgagctttagtacctctctttagaagttgctggcagtgcattggctgggatcctgaaagttcatgctctgtgctagtgtatggggaacattttgatacttgggttagtgatttctgggactgaatattaaggacttgattttctgtccgttccacctgctttcaggaccactggagatagtcccttggcttttactgaagctggaagatttgtgtccatgtacaagatcaacaaccattatttccttggacttttaactcactccagcattgaacagctgctgttttccaagttaagggtttttttttttttttttttttttttagccaattatagctcacaaaagtttgtgcttgctctgtccaggtgggtctgccagaggccccctgacccaaatgttctgtccccacatcatgtggcagcacaacccaattagaggtgaccagggcagctgtccacataattgtatgcagttaacatctaacccttggctttcttggcaaagcaaaggcattggccttttggcttctgctggtccggtcagcaattacccagttattaaaactaaataattgccattagctcttgtcctcagtgcatcctgagtctcactgcaggtggatcttcatctcatttgcaaagctctccaatgcaaggcaagggatacttgtccttcagacactaggcaggtacaacagcagagcagtctccctgtgtgccacagtttccagctgcttttgcgtttcgaggtgttactgtgaattttgcgcttctgccacagagccgatgccttgtgtgtctgtgtgcttgtgtattcagagggctgctgttttattgttgggttggggggattttcctttgctttttcttagctggatattgccttttggtggtggcttgaaattcagttcgggggtgtgaactttctcttcatttttttctccttttctttctttcgagttctcatttctgaagagatttctgttcttaaatcctagcattaaatggaggtgttttcattttctctgggagaagtttcacagcacaggtgtgtgcttgattctctacttgcggttccccactgccaccacccccccccccmcacccgctgccttgatgctgatagtggctgtctaaagtacaaagggaaagttaagcttacaggttgtccttctctttgattgtattcttggctgtagcttctcagccctttgcaggaggaactcacatcagtctggaacataaaaacaggagaattttcagccctggaaataattgcttcttggagtagatcctttgggagcctccacactgaggaatgaagtttgactaagccccagcaatgaataggacttggatgaggagaaagggtctgagatctgtgtttcgaggcaaggaaaattctggcaggatccgtttgcatatatattgaggcctaattaggccctcggtgtgtttggaaactgctttgttgcggtgggtatgata

SEQ ID NO: 81428 - DNA, 964 bp, Homo sapiens
aagcagggctttcagggtatccatcacccaaataacatatattgagaccagattgatgttttctgatgcacatctcttggcargccattcctttgttctcaaaacatcaatcatttccctgcctgcaaaagtccatagccttcagccgagaatgtaaggctgtctgctatctggctgccaccatcatctgccctgcaccgctccgctaaatgagcctctggtctctgacctgactccctgcgtatgaacctctccccatgagatgctgctcttggcttactccagagctacttcctccccatcctgcaatgcttatcctaaattccagtccctttctagggatctagtgactaggacagaaagcacatatctaggcaaaatttgtggctctgccacttttcagctgtgtgaccttcggcaagacacttcacttaagctctatagcttccatttcctcctgtgtaaaataagtgtgaaagctctgcctcaccaggcaactgtgaggagtaaatgaggcaaagcactgtgttccttcatgtctcctggcaagttccctctcttctcagaaaccagcctcaactccctcaggcaagttctgttctcttgcatgtgcaacttagagtaattatcctggtggtggttgattgtttgcaggtcccactcccatgaagctgggacctctttgagaacaggcactcaggtttttcatctttgtattgccaggaaatgaacaaatgaatgaatgtgtaaaatatctggtccagttcctggcacacgaaatgtaccagtaaatattttcccttcctatatggtacttttaatatgttgttttgtgttataattattacgtgcatgtcttatctctttccctggattttaagttccttgaagcaatgggcttttcttaatcatttttagaattttgttttttaaatttacatacagtacaattcactctttgtgg

SEQ ID NO: 81429 - DNA, 964 bp, Homo sapiens
aagcagggctttcagggtatccatcacccaaataacatatattgagaccagattgatgttttctgatgcacatctcttggcaggccattcctttgttctcaaaacatcaatcatttccctgcctgcaaaagtccatagccttcagccgagaatgtaaggctgtctgctatctggctgccaccatcatctgccctgcaccgctccgctaaatgagcctctggtctctgacctgactccctgcgtatgaacctctccccatgagatgctgctcttggcttactccagagctacttcctccccatcctgcaatgcttatcctaaattccagtccctttctagggatctagtgactaggacagaaagcacatatctaggcaaaatttgtggctctgccacttttcagctgtgtgaccttcggcaagacacttcacttaagctctatagcttccatttcctcctgtgtaaaataagtgtgaaagctctgcctcaccaggcaactgtgaggagtaaatgaggcaaagcactgtgttccttcatgtctcctggcaagttccctctcttctcagaaaccagcctcaactccctcaggcaagttctgttctcttgcatgtgcaacttagagtaattatcstggtggtggttgattgtttgcaggtcccactcccatgaagctgggacctctttgagaacaggcactcaggtttttcatctttgtattgccaggaaatgaacaaatgaatgaatgtgtaaaatatctggtccagttcctggcacacgaaatgtaccagtaaatattttcccttcctatatggtacttttaatatgttgttttgtgttataattattacgtgcatgtcttatctctttccctggattttaagttccttgaagcaatgggcttttcttaatcatttttagaattttgttttttaaatttacatacagtacaattcactctttgtgg

SEQ ID NO: 81430 - DNA, 763 bp, Homo sapiens
ttttttccagagcttctcccccagaataggaccagcagtcccagttgacctgggactagggctacttgggatgcaagacttccagtgttcaatctggtatgttccctgctccaataccatctctagttattgacatttgcctgtttttagggtactgctgaattccctgttgggcctctgtggtttagctctgattgtctgtccatccatatggtgcaggcattgccttttgccataagtatttgtgttcactcattgtctcccaatctgaactgtaattaatttgaggatgaggatcatgtcatattctgtggattctttcaagcacctagcacaggactttcatgtggtagatgttgagatattatttgctgcatgaaggaatggtgaataaattaccattgaataaattacgtagttgtaatgagagaatgtattgtaactatgttgatggatttttattgttttgttgattgcaaaagaatatatattcattgtacttttgtggaaagtttgggaaaaatagaaaagcrtacatatatctcttgtaaacccactatccagaaatacataactactattaatatctttgtgtgcatccctccaacgtcttccctccttcctatccttctgtttgtccagtcatcatctgcatatttccatgtctttaaaaaaaacttggatcttatagtacatatagttttgtatattcttagaagggatatatgtgtgtgtgtatatatatatatatatataagatgca

SEQ ID NO: 81431 - DNA, 763 bp, Homo sapiens
ttttttccagagcttctcccccagaataggaccagcagtcccagttgacctgggactagggctacttgggatgcaagacttccagtgttcaatctggtatgttccctgctccaataccatctctagttattgacatttgcctgtttttagggtactgctgaattccctgttgggcctctgtggtttagctctgattgtctgtccatccatatggtgcaggcattgccttttgccataagtatttgtgttcactcattgtctcccaatctgaactgtaattaatttgaggatgaggatcatgtcatattctgtggattctttcaagcacctagcacaggactttcatgtggtagatgttgagatattatttgctgcatgaaggaatggtgaataaattaccattgaataaattacgtagttgtaatgagagaatgtattgtaactatgttgatggatttttattgttttgttgattgcaaaagaatatatattcattgtacttttgtggaaagtttgggaaaaatagaaaagcatacatatatctcttgtaaacccactatccagaaatacataactactattaatatctttgtgtgcatccctccaacrtcttccctccttcctatccttctgtttgtccagtcatcatctgcatatttccatgtctttaaaaaaaacttggatcttatagtacatatagttttgtatattcttagaagggatatatgtgtgtgtgtatatatatatatatatataagatgca

SEQ ID NO: 81432 - DNA, 975 bp, Homo sapiens
agtattattcagccctaaaaaagaggaaaccctgccatttgtgacaacatacaagaacctggaggacattatgctgagtgaaataagccagacacagaaggacaaatactacatgatctcatttatataatgaacctaaaatagtcaaacttataaaagcagagagtgaaatgctggtgtctgggggctgggatgagggggcaagtgggaggtatcagtcaaaggatacaacgtttcagtgatataagatgaataaatcctagagatggacagcgcagcatagtgcctgtggtcaacaattctctattatatacttaaacatctgctaagagggcagatcttgtgttaagagttctcattacaaaataataataactaataaaaagggcaggaggaaactytcggaggtgctggataggtttatagcatagattatggtgatggtttcaagggtgtacactatttcctaacttgtcattaaatatttcacatacttaaaatatgtaccgctttttgtatgtcagccataacttgctagtttcttcaaaagtatacttctatataagtatatactaatagatccttttagatgttttggtctacttttctatcccctctgttcatctttctcaattgataggctttttgatgtagatgtgacagtagaaaacagctgtaagatacaaatgattaagaaaggaaaaccacagcattaattgaggatgatagcctcattaactcagtttttttggtaaaatcttgagtaggaaacccccttcaaaccttcaaactcgcaaagacccaaggcttgtagccacgttcaccatgcaaatggaacatcgctcctcaaacctcaactaattgttatgtttaacttttttaaacaaaccataacaaatactaagtgtagctaatcattccctgattcctttggtattctttgtaacagcactaattacgataaacacatttgga

SEQ ID NO: 81433 - DNA, 717 bp, Homo sapiens
ccaaatttgggcctgcatcaaactgagtcaaattcctggagtcatgttaccactacccactggacaatgagtgtggccactacctactggtatcctcctctacccaagctccttagaggtcactgtcaggacaaacagggccttacttttccatagatccttaaacactgtgattcaggaggctggtcacacttctcagagacccccttctatgctgccccgctggcttccacacagcacactactaaggttatgacttgtcacccagcaccaaatggattacaaatgcaaaactttgcacatcttttctgctaaggagatgaacaaaaacaattttctggkaaacttcaagagatgatggtttcagcctttctgcatgtgccactgtccagcagtagcaaggaacctcttagggtgtcaatctaaactaacttccaccctcacctggcagtaacaaggtagcacctcccctcccctgtcccccaccactatcatgatataagagaaagcctgctaaaacagaaggtcaaaataagatccagagtcatacagtacccaaatgtccaggatacaattttttaaaaaaacactgataccaagaacaaggaaaatcccaacttgagtgagaaaagacaatacgtgccaacactgagaggatacagatgttggaattttctgataaggagtttaaagtagccgtcataaaaatgtctcaat

SEQ ID NO: 81434 - DNA, 1508 bp, Homo sapiens
aagtcagtcaaggcataaagggggacaagtgggacaaaaggcttgtcatctgtcagaaacattgaaaacagccagtacatgccactgatagaaaatctctctacaagtgaaatcaaactggagtgaactgcaccttaccttgctctgattaccaaagctgacaaggcagacagtgtggggagtggacagaagaggccattgttcttggtcattctatactcagartgaggttatgctttgcatatggcgatgcctgggagaccgactacccttggagatttaattccacaagtccctgctgagtatctacatcagccttgcattacgttactcttttacaaacacaaatcccaacaagtataaaccaaatacctgcccattttccttgggacccaagtcaattataagtaataaagcaaacgaagtcctggctctcatgaagctcacaatctagagtgggaggtagacaatgaactagtgtgctaataagtaagttcaaaacctgaaactatgacgcacaatggaaacaaacagggaccatgacagagactgagagagggtagctccttctaaaaggagattccatttaggctaaacctgaaaaattgagtcatgcaaagagttaaataaagagctttgcagtgagaatggcatgtatgaggatcctagggaagaaagagattgacttttttaaggaattacagaaaggcagtaaggctgaaatacagtgagcaagagagagaggcacgcaatgagaacacactatgtgttacagcctcctagtttcacactgggaagacataaagtgggaggaaagaactcacatgtattaagtaccttgtgtctcaagcaataggagaaaaaaaaattttttttttttgaggcagaatctcactctgttgctcaggctggagtgcagtggcacgatctcggctactgcaacctccgcctcccgggtacaagtgattctcatgtctcagcctcccaagcagctgggactacaggcacacgccaccacgccctgctaattttttgtatttttagtagagatggggtttcaccatgttggccaggctggttttcaactcctgacctcaggtgatctgcccgcctcagcctcccaaagtgctgggattacaggtgtgatacactgctcccggccagatactatttaaccatggcctttgcctttacctgtagaagcttacagacaagtaacatatgtgaaacagaatagtcagtcatgcagcagatgtttttattggtcttgatgtggtaagaactgtgagtaaggtaaaaatctcacttccaccctcggccaaaataatacctaatcccaactagcttagtgcatctccctaaacacagcactgagctagtccattactattaagttattagtatacttacaatctaggtttcctaacaagaaagatgaacagaccctgaatggacattttaaccatcaagctggaatttttaagggccacatgtttttacaacttcca

SEQ ID NO: 81435 - DNA, 1508 bp, Homo sapiens
aagtcagtcaaggcataaagggggacaagtgggacaaaaggcttgtcatctgtcagaaacattgaaaacagccagtacatgccactgatagaaaatctctctacaagtgaaatcaaactggagtgaactgcaccttaccttgctctgattaccaaagctgacaaggcagacagtgtggggagtggacagaagaggccattgttcttggtcattctatactcagaatgaggttatgctttgcatatggcgatgcctgggagaccgactacccttggagatttaattccacaagtccctgctgagtatctacatcagccttgcattacgttactcttttacaaacacaaatcccaacaagtataaaccaaatacctgcccattttccttgggacccaagtcaattataagtaataaagcaaacgaagtcctggctctcatgaagctcacaatctagagtgggaggtagacaatgaactagtgtgctaataagtaagttcaaaacctgaaactatgacgcacaatggaaacaaacagggaccatgacagagactgagagagggyagctccttctaaaaggagattccatttaggctaaacctgaaaaattgagtcatgcaaagagttaaataaagagctttgcagtgagaatggcatgtatgaggatcctagggaagaaagagattgacttttttaaggaattacagaaaggcagtaaggctgaaatacagtgagcaagagagagaggcacgcaatgagaacacactatgtgttacagcctcctagtttcacactgggaagacataaagtgggaggaaagaactcacatgtattaagtaccttgtgtctcaagcaataggagaaaaaaaaattttttttttttgaggcagaatctcactctgttgctcaggctggagtgcagtggcacgatctcggctactgcaacctccgcctcccgggtacaagtgattctcatgtctcagcctcccaagcagctgggactacaggcacacgccaccacgccctgctaattttttgtatttttagtagagatggggtttcaccatgttggccaggctggttttcaactcctgacctcaggtgatctgcccgcctcagcctcccaaagtgctgggattacaggtgtgatacactgctcccggccagatactatttaaccatggcctttgcctttacctgtagaagcttacagacaagtaacatatgtgaaacagaatagtcagtcatgcagcagatgtttttattggtcttgatgtggtaagaactgtgagtaaggtaaaaatctcacttccaccctcggccaaaataatacctaatcccaactagcttagtgcatctccctaaacacagcactgagctagtccattactattaagttattagtatacttacaatctaggtttcctaacaagaaagatgaacagaccctgaatggacattttaaccatcaagctggaatttttaagggccacatgtttttacaacttcca

SEQ ID NO: 81436 - DNA, 782 bp, Homo sapiens
ttagactgtggatctaataatagaagcgtacggcggcttatcaatcaaaaaagttgcaagaactgctaactcgtgccccyatgcctaacaacgtggctttctcaacttttaaaggattagtcatccgttggccttaggaaccaaaaacattagtgcaactccaaataaaagtaacaaatatgtatatttccactactataataaccccaatccccttaagcctaccaatcattatcaccttaattaatccctgcaaaaaaggttcatacccaaattacgtaaaaatatctatcgcagccgccttcatcattagcctcatccccacagcaatgtttatatgtatagaccaagtcattacctcaaactgacattgaataactattcaaattattaaactctcactaagcttcaaacgagaccacttttccaccatatttatcccagtagcactattcgttacctgatctattgtagaatcctcaatatgatacataaactcagaccctaacattaatcaattttttaaatatttacttattttcctcatcacaatattaattctggttaccgccaacaacctctttcaacgctttgtgggataagaaggcataggaatcatgtctttcttactaactggctgatggtacagccgagcagatgctaatacagcagccctccagacagttctgtataactgcatcagagatactggctttattttagctatagcatgatttcccttaacctccaacacatgaaaagcttcaacaagggtttattct

SEQ ID NO: 81437 - DNA, 782 bp, Homo sapiens
ttagactgtggatctaataatagaagcgtacggcggcttatcaatcaaaaaagttgcaagaactgctaactcgtgcccccaygcctaacaacgtggctttctcaacttttaaaggattagtcatccgttggccttaggaaccaaaaacattagtgcaactccaaataaaagtaacaaatatgtatatttccactactataataaccccaatccccttaagcctaccaatcattatcaccttaattaatccctgcaaaaaaggttcatacccaaattacgtaaaaatatctatcgcagccgccttcatcattagcctcatccccacagcaatgtttatatgtatagaccaagtcattacctcaaactgacattgaataactattcaaattattaaactctcactaagcttcaaacgagaccacttttccaccatatttatcccagtagcactattcgttacctgatctattgtagaatcctcaatatgatacataaactcagaccctaacattaatcaattttttaaatatttacttattttcctcatcacaatattaattctggttaccgccaacaacctctttcaacgctttgtgggataagaaggcataggaatcatgtctttcttactaactggctgatggtacagccgagcagatgctaatacagcagccctccagacagttctgtataactgcatcagagatactggctttattttagctatagcatgatttcccttaacctccaacacatgaaaagcttcaacaagggtttattct

SEQ ID NO: 81438 - DNA, 716 bp, Homo sapiens
ctcatataccaacgcctgagccctttctattactcttattgccacctccttaacagctgtctatagtatctgtatccttcactctaataggacagcctcgcttcataactctattattaacgaaaataatccattcctaattaacccaactaagtgcctaaaaatcggtagcatcttcgctggattcctcatcaccaacagtattattcctgtttcayctccccaaacaaccataccacttcacctaaagttcacagccctagctgtgaccaccctaggcctcttcctagcaatagagcttaatctcataactaataatcttaaactaaggttcccattacagacattcaacttctctaatatactaggattttattcactcacaattcaccgttcaatcccccactcaagcctattcacaaaccaaaatctggctttacttctactagacctaatttgactagaaaagtccataccaaaagccaaagtccatttcacaaacccaagtttcaacttccattaccatatctactcaaaaaggcccaattaaactctactttctctccttttttattccatccctctaaccctattgttaatagtctaatctattatcccgagaaatttcaattgcgacataaatgctaacaaataatgatcaaccagcaactaccactaatcaacatccataactatacaaggcagccacacccaca

SEQ ID NO: 81439 - DNA, 716 bp, Homo sapiens
ctcatataccaacgcctgagccctttctattactcttattgccacctccttaacagctgtctatagtatctgtatccttcactctaataggacagcctcgcttcataactctattattaacgaaaataatccattcctaattaacccaactaagtgcctaaaaatcggtagcatcttcgctggattcctcatcaccaacagtattattcctgtttcacctccccaaacaaccataccacttcacctaaagttcacagccctagctgtgaccaccctaggcctcttcctagcaatagagcttaatctcataactaataatcttaaactaaggttcccattacagacattcaacttctctaatatactaggattttattcactcacaattcaccgttcaatcccccactcaagcctattcacaaaccaaaatctggctttacttctactagacctaatttgactagaaaagtccatascaaaagccaaagtccatttcacaaacccaagtttcaacttccattaccatatctactcaaaaaggcccaattaaactctactttctctccttttttattccatccctctaaccctattgttaatagtctaatctattatcccgagaaatttcaattgcgacataaatgctaacaaataatgatcaaccagcaactaccactaatcaacatccataactatacaaggcagccacacccaca

SEQ ID NO: 81440 - DNA, 716 bp, Homo sapiens
ctcatataccaacgcctgagccctttctattactcttattgccacctccttaacagctgtctatagtatctgtatccttcactctaataggacagcctcgcttcataactctattattaacgaaaataatccattcctaattaacccaactaagtgcctaaaaatcggtagcatcttcgctggattcctcatcaccaacagtattattcctgtttcacctccccaaacaaccataccacttcacctaaagttcacagccctagctgtgaccaccctaggcctcttcctagcaatagagcttaatctcataactaataatcttaaactaaggttcccattacagacattcaacttctctaatatactaggattttattcactcacaattcaccgttcaatcccccactcaagcctattcacaaaccaaaatctggctttacttctactagacctaatttgactagaaaagtccataccaaaagccaaagtccatttcacaaacccaagtttcaacttccattaccatatctactcaaaaaggcccaattaaactctactttctctccttttttattccatccctctaaccctattgttaatagtctaatctattatcccgagaaatttcaattrcgacataaatgctaacaaataatgatcaaccagcaactaccactaatcaacatccataactatacaaggcagccacacccaca

SEQ ID NO: 81441 - DNA, 716 bp, Homo sapiens
ctcatataccaacgcctgagccctttctattactcttattgccacctccttaacagctgtctatagtatctgtatccttcactctaataggacagcctcgcttcataactctattattaacgaaaataatccattcctaattaacccaactaagtgcctaaaaatcggtagcatcttcgctggattcctcatcaccaacagtattattcctgtttcacctccccaaacaaccataccacttcacctaaagttcacagccctagctgtgaccaccctaggcctcttcctagcaatagagcttaatctcataactaataatcttaaactaaggttcccattacagacattcaacttctctaatatactaggattttattcactcacaattcaccgttcaatcccccactcaagcctattcacaaaccaaaatctggctttacttctactagacctaatttgactagaaaagtccataccaaaagccaaagtccatttcacaaacccaagtttcaacttccattaccatatctactcaaaaaggcccaattaaactctactttctctccttttttattccatccctctaaccctattgttaatagtctaatctattatcccgagaaatttcaattgcgacataaatgctaacaaataatgatcaaccagcaactaccactaatcaacatccataactmtacaaggcagccacacccaca

SEQ ID NO: 81442 - DNA, 658 bp, Homo sapiens
aacaccagctgtctgactgcagaactcaggcacattaatggcttcccacgctgtctgccattggaacaggacctggtgccctgtattaggacagaggtgaacagctcccaaacgaggccctctctcttcttcytgcaacatcctcaaggtctgcgaagaggttccagagagcccctcagtcccagctgtcaactttttctctaaacaaccatgatttatttgtaaacacaaactaacattttgatttcttttagtttatttttcttttctattgctagcctggacatttccaaaacattggtggtagcatactgaaaagatcaattccatttcaaagaactgactcacggttgctttctgttggtattgctcacccagcatgcagtctccctgctcatctcaagtgggttaatggacttggaagtctgcattttaggctgaagtgtatgctttaaattgaagaagcagcgtgttgtgttgtgccgtgttgaggtgtgttgtgctgtgccgggatgtgctgggctgtgctctgctgtcttatctcatcttgtctgatgttactgacatagtagaatgcagatttcattgtggtgtaaaatgtcttctgggttatttcaaagcagccattgaaaattccctttctaacactgtcagaatt

SEQ ID NO: 81443 - DNA, 858 bp, Homo sapiens
actatggtgataataatacctacctcaaaagatcattgtggagaaaaatacgacagtgtatataaaaacctaaacatagtacaaggcaagtagtagtttcttttctttttttttttttttttgagatggagtcttgctctgtcacccaggctggagtgcagtggtgcgatcgtggctyactgcaaacctccacctcccgggttcaagcgagtctcgtgcctcagcctcctaagtagctgggactacaggcacgtgccaccaccctcggctaattttttgtatttttttagtagagacgaggtttcaccatgttggccaggatggtctcgatttcctgacccagtgatctgcccacctcagcctcccaaagtgctgggattaccggtgtgagccaccatgcctggcctgcaaatagtagtttctaaatctttgttatttcctgtctccttttaattttgctttgatcacagaaaaatagagctaactacaatttgggtcatgagaattatagaatttttgagcaggaagagaatctgttgatggtcttatcagtgggtctctgtgtgcttctgtgtgcatgacaatggcctgagcacttgctaaaaatgcagattctagggcctcatctccagagattgttattcacctgatctaggacacaatccagaaacttttattttatttttaaatgattaattagtttagtttatagagacagtatctcactcttttgctcagggctggtcttgaactcgtgggctcaagcgatcctcccaccttggcctcccgaagtgttggaattgcaagtgtgagccacccaggtcattctgatgcaggtgatccaagaaccacagatta

SEQ ID NO: 81444 - DNA, 1267 bp, Homo sapiens
aacttattttaagttgaaaatgtcataagtcaaaaatgcattttgtacacatatcctacagaacatcatagtttagcctagccacatcttaaatgtgctcagaacacttacataaacctagacacggataagcattttgtagacatgatgggatgtgaaaacacaaagcacaatgccaaaaatactaacctggtaacacagtatattgtagagtatcagtgtactgctactcatgattatgtgcctgactgggggctgaagttcattgccagtgcccagaattgccagagaatatcatgcaccatattggtatcccataacatcatgctatataccttaaataaacacaataaaaaagtaataacagctattatttattgattattacttgtgctaggcacaagtagggtgcttgtcgccatcctatgtaaattaagtattatttgcctattgtaaaatggggaaagtaagtctcaggaaagttaaataacatacatgaaattatgaggttgataaattgtattaattaaggttttccagagaaatgaaaccaataggatacatttatatgtctatatccatctctatattgagagaaataatgagacagagacacactcagattgctttaagaaattggcttctgtgattatgggggctggcaagtctaaaatccataggcagattgacagcctggaaatttagtaaagagttgatgttgaggccttgagtctaattcttcagggttgtaggctggaaactcaggcaaagtttctatgttcaatcttgaggagattttttttttttctgggaaatttcagtctttgcttttaaggccttcaactgattggataggatccatccacattataaagagtaatctgctttactccaggtctactgacttaaatgcaaatcacatctaaaaatattttccccagcaacatctagactagtgtttgactaaacaacagggtatcctagcccagcaaaattgactcataaatttaatgatcacgcaattggtaattctaaatccagtcagaagtctacattctgtgtccacagtgtcatgtctagatgttggtccagtctcccatggactgtgccttgttatttgttttctctttgctaagccacatcccctgagggctctgtttatgctcaytgcaaaatctttgactttttaacttactgggcatattgtcttcctacttttgttctcttctgttattttatttacttgactctgacatgtctcattccc

SEQ ID NO: 81445 - DNA, 1267 bp, Homo sapiens
aacttattttaagttgaaaatgtcataagtcaaaaatgcattttgtacacatatcctacagaacatcatagtttagcctagccacatcttaaatgtgctcagaacacttacataaacctagacacggataagcattttgtagacatgatgggatgtgaaaacacaaagcacaatgccaaaaatactaacctggtaacacagtatattgtagagtatcagtgtactgctactcatgattatgtgcctgactgggggctgaagttcattgccagtgcccagaattgccagagaatatcatgcaccatattggtatcccataacatcatgctatataccttaaataaacacaataaaaaagtaataacagctattatttattgattattacttgtgctaggcacaagtagggtgcttgtcgccatcctatgtaaattaagtattatttgcctattgtaaaatggggaaagtaagtctcaggaaagttaaataacatacatgaaattatgaggttgataaattgtattaattaaggttttccagagaaatgaaaccaataggatacatttatatgtctatatccatctctatattgagagaaataatgagacagagacacactcagattgctttaagaaattggcttctgtgattatgggggctggcaagtctaaaatccataggcagattgacagcctggaaatttagtaaagagttgatgttgaggccttgagtctaattcttcagggttgtaggctggaaactcaggcaaagtttctatgttcaatcttgaggagattttttttttttctgggaaatttcagtctttgcttttaaggccttcaactgattggataggatccatccacattataaagagtaatctgctttactccaggtctactgacttaaatgcaaatcacatctaaaaatattttccccagcaacatctagactagtgtttgactaaacaacagggtatcctagcccagcaaaattgactcataaatttaatgatcacgcaattggtaattctaaatccagtcagaagtctacattctgtgtccacagtgtcatgtctagatgttggtccagtctcccatggactgtgccttgttatttgttttctctttgctaagccacatcccctgagggctctgtttatgctcattgcaaaatctttgactttttaacttactgggcatattgtcttcctacttttgttctsttctgttattttatttacttgactctgacatgtctcattccc

SEQ ID NO: 81446 - DNA, 699 bp, Homo sapiens
aatttgcaatcaatttttatatttagcataatacttttatgaattctagaaaatataattgtaggtgccttagaaatgtagtgcactaatgaaagacagaaacatcctttctttawtcctgatctctgtgtgtgctttaaccttggaaaaactgttttttgaggatttgttgggagttgattattgctgttttctagaaatgagaagaagcatgtgagtttggcagcttggcccttggagtataaaacagcatcatctatgttgttcaagacttccgatcgaattacacttctgctaaagccaaatacatcaaaatctactatttgattacagtagctattgttattttaaaatattttttaaaacatgtagcctctttccctgagagttgctttgctttatttggccaaagctattatgatcaccattgtcacccaccaaatggatcggtcagcttactatctactcattcaaaaagcaattattgcacactttctgtatgccaagcactttcaatatgcagacattccggtaatggggactggcaagtaaatcagcaagtattatgactgaggcctgcgcagggcatgtgggaactcagagaaaggcatccatcatgttattttctagcagataaagtaaaatcatgtttcatgtttctatatcccacttcttgcttcagctcgcaataaaaccact

SEQ ID NO: 81447 - DNA, 699 bp, Homo sapiens
aatttgcaatcaatttttatatttagcataatacttttatgaattctagaaaatataattgtaggtgccttagaaatgtagtgcactaatgaaagacagaaacatcctttctttattcctgatctctgtgtgtgctttaaccttggaaaaactgttttttgaggatttgttgggagttgattattgctgttttctagaaatgagaagaagcatgtgagyttggcagcttggcccttggagtataaaacagcatcatctatgttgttcaagacttccgatcgaattacacttctgctaaagccaaatacatcaaaatctactatttgattacagtagctattgttattttaaaatattttttaaaacatgtagcctctttccctgagagttgctttgctttatttggccaaagctattatgatcaccattgtcacccaccaaatggatcggtcagcttactatctactcattcaaaaagcaattattgcacactttctgtatgccaagcactttcaatatgcagacattccggtaatggggactggcaagtaaatcagcaagtattatgactgaggcctgcgcagggcatgtgggaactcagagaaaggcatccatcatgttattttctagcagataaagtaaaatcatgtttcatgtttctatatcccacttcttgcttcagctcgcaataaaaccact

SEQ ID NO: 81448 - DNA, 699 bp, Homo sapiens
aatttgcaatcaatttttatatttagcataatacttttatgaattctagaaaatataattgtaggtgccttagaaatgtagtgcactaatgaaagacagaaacatcctttctttattcctgatctctgtgtgtgctttaaccttggaaaaactgttttttgaggatttgttgggagttgattattgctgttttctagaaatgagaagaagcatgtgagtttggcagcttggcccttggagtataaaacagcatcatctatgttgttcaagacttccgatcgaattacacttctgctaaagccaaatacatcaaaatctactatttgattacagtagctattgttattttaaaatattttttaaaasatgtagcctctttccctgagagttgctttgctttatttggccaaagctattatgatcaccattgtcacccaccaaatggatcggtcagcttactatctactcattcaaaaagcaattattgcacactttctgtatgccaagcactttcaatatgcagacattccggtaatggggactggcaagtaaatcagcaagtattatgactgaggcctgcgcagggcatgtgggaactcagagaaaggcatccatcatgttattttctagcagataaagtaaaatcatgtttcatgtttctatatcccacttcttgcttcagctcgcaataaaaccact

SEQ ID NO: 81449 - DNA, 689 bp, Homo sapiens
cattcatggaggtggagccctcatgacttaaacacctcttaaaggtcccacctcttaatactggtacaatgycagttgagtttcagcatgagttttggaggggacaatcattcaaaccacatttaaaaaccttcaataatttatttttatgttattgccttttggatgatagaaacaacacatggtcactgtaaacaattttgaaactactacaatagtataagggaaaagaacattaaaatacctataatttcactgcatttcagatgacagtttcaactgagtctaggctttccagctaccctcaccaagcggtcagatatgtgagcacatcattttggaccttaaaaagcagtccagctacccaatgaatactattaaatggcatcagtcaatgacacttggagtcaaagaattgcccagctgagctctgtttaaatttctgacccacaaaataatgagagatagtacaataggtaagttaagccacaaagttttgggagcaatgtgttaattattagcaataggtaactaggacaatatctttaattaagccactgagtttagcaagtacatttaatgttacctgtaaacctgagttctggtgattaaaacccattttataaaattttaaaatatattttaaaataaatagcagttttctagtccagcaaacctatgtaagaggg

SEQ ID NO: 81450 - DNA, 633 bp, Homo sapiens
acgatgcttaagattgtgtaactgaatatcgcatcagaacaatcaaggttacccttcaaagcagttatagaattatcttctcctaactaaatataggtaccttaacaaacagaagggyttccccatgagccaaatgaaatggcctttatatttgagatactcgcttacttaaaaaataaaaaaggaagcaatttgctaaatttgcagcttttccttcctagaactttgagttaaaatacttgcaaggaaagatttttcacatgatgtatatttagaaataagaaaaagaattaagtaaaaggtaaatttgttattggtgaaaggagagggtttgcatagagttttatattctatctcttgggtatgtttaatcttctgaattttaaaaacgattaccttgtatctaccttttctctttcttgattcctttatttaacctttgaatttagtaaaaagtagtctctgttttattatagttataaagattaaagctgatctttacattttccttttttaaattcaaaactttggtcatttttcttttttaataaagatggttatataaaattgatccacctacaaatgatgtaggaatttcagggtcttattgagattagtctctatttattaatt

SEQ ID NO: 81451 - DNA, 674 bp, Homo sapiens
tttttcccatcccctgttccaaggccttgctccaaacattgtcctccctctctcttctctgcagttagatcattagtcacattataaaaacatactcaggtcttctcactcaaataaaaccgttctttcattctgtctgctgttcaaatwctcatttccctttccttttgtgaccaagctgcttttggtactcttactgaaagtttctttgtgaacaactttcctaaacttgttaaacctctaaagatcagacttgtttttataagtctaatacttctgctcaagaagtcactcaaggccaggctgcggtggctcacgcctgtaatcccagcattttgggaggtcgcggtgggtggatcagctgaggtcaggagttcgagatcagcctggccaaaatggtgaaacccctgtctctactaaaaatacaaaaattggccaggggtggtagtgcatgcctgtaatcccagctacttgggaggctgaggcagaattgcttgaacccgggaggcggaggttgcagtgagccaaaatcgtgccattgcactccagcctgggcaacaaaagtgaaactccctctcaaaacaaaaaaagtttctccttccttgactctcatgatgttccatactccatttcttacttacttctctcttcctttgctgtctgtattttccttg

SEQ ID NO: 81452 - DNA, 1038 bp, Homo sapiens
agaatctaaaggaaaagaaaaatttctacatggaaatatctgcagtgtcaaagaaaagatgccacaggaagaaagcagccctaaaataaaatgctgacaggcataaaacaaaagttatatatctataatatgctataatttaacraagatacaaaatgaagaggagtaataatataaagataatgtattaagtctttaaatgaagacaaaatgtacattgaaatattttggttaactggcaggaactaaacaagacttttgatgttagggctgattatgctgaagtgttgttatttgtgtgccactaaattttatgatttacctccacaaattgcatgagcaatttatggaactatcatccagtgaacaaaagacaggataacaaaatgaattaatattacagtacatggtgttcaatactattattctagtgggaatactctcggtctgaactgatccagcagtttttgtgaaatgtaaacctcttcaatacaaatgggcattcattactgaaatctggccataagtaaaaactgaaacctaattattccctgttaagttctagagaaaaaacaatcaggtctgtgactactgtactctgtcacacttcaaaaatagcggccagctccaaaaatctaggagcagcaaaccaccaccaccaccacaaaatgatttgctgttctgctattaggtttttggaaatgtgtgttattaaggatattttaacataataggtatatgagccttaagaagcccaagtctagtctctgcctcatacctcaggaatcacctcttctactctggaaagttaaaaccatgctttgagttagagtaaatttatcactaaattcaacttaactcattggatgtgtcttgatttctagaaaagattttgatttgttcaggacttctctgttcataagcagcacaattggaaatggactccaggtatctctatgccaagtacagtcatcttccatttactcttctaattaaatttgaatgctttcttttaaaacttgagattgagcccatgca

SEQ ID NO: 81453 - DNA, 535 bp, Homo sapiens
cacgctcatccctggcttccagaggtcttccctttccttgagccagctctttcccagagcctctctcctgctggacggcagcctctttgctctcatctcttcctcctcagatgctctggggcaggagtccctgttatggatctgggccagactcagtttagaaacatcttagaaattcttgagatattactgtttcaagtgggtctgggaatcagaaagccctgcaggggctgcagaaagcatccatgggggtcactggttgtccctgtgcccagcttacctagaccccaagcacttctagctggctcaccctcccctatccaacgtaggggtgtctaacaaaacaccascctctgcaggacccaggtggacctctccccacagctggttaccactgtctggggaaggcccagatggagggcccatttgttaactggtctgtggcttctgtgaccaatccacaatgtaaggacacacctacctgtcgtggagggcaggagaggagtgtgcacagtgatgaaatcacagagaggcc

SEQ ID NO: 81454 - DNA, 544 bp, Homo sapiens
aaagaagcaacagtaaatactacctattttggatatctactggttttaagataaagatgggaacatgtgatggttaattttatgtgtcaacttaaatggattaagagatgctcatagctgcagatagcaggtcattgggcgtcttggccttcataaccatatgagcctattcctaaaataaatccctgttatgtatctctctatatatcctattaattctgtttttctggggaaccctgactaatacagatttgaatattgggggttttagctcaaagatacatggcatagtatgtctaggttaacaagtagataaattttagtaagacagtaaagataacagattcggctaataaaagtatgtrttattaaatgcttctacaataacctttagactgcagcaaaatgaaaaaaataggtttccaagaatctataaatcaacatgacatattaaaatgttgtaaaaaactaagcaaatctatatttttcaccctcttattttgtctagaagatgaaacacaatcttgttttgaactggcttaaa

SEQ ID NO: 81455 - DNA, 1653 bp, Homo sapiens
atttcccagttctgacatccccagttctgtttcccagttctgcccttcccagttctgccttttcatagtacttattcactatgtaccaggtactttgctaaatattttataagaattacaacaggttctaactgaatacagctacataagtgacctcagctataccacmcagcacacaaaaatcaaccacatgagtttagtcaactcacagaattgtgaaaattaaaagcctgccattggtttaagtcactacgttttggagtggtttgttacataccaatagataacttaaacattctgtgttctcaccctaacacacatcgaagttatatctttatatcagggtcaacaggtccacttagctgagcaaaccctgagagaagactgtgaacaaaagaaaacaccttcagcacagcaaagttttttgggtttttttgtttgtttttgtttttgagatgaagtcttgctctgtcacccaggctggagtgcaatggcatgatctcggctcactgcaacctccatctcttgggttcaagtgattctcatattagcctcccgagtagctgggattacaggcatagggcaccacacctggctaattttttgtatttttggtagagatggtatttcaccatgttagccaggctggtcttgaactcctgacctcaagtgatccgcccgcctcggcctcccaaagtgctgggattacaggagtgagctgccgtgcccagccggcaaagttgattctgaaaccctgtattacctcaataatcgttgaagtgcctattatatgcaatgcagcacagccgggtggctaagggtgtgagttttggatccatgtgttaaaatcctggctgtcctacctgctagctgtaggaacttgaggaaagcgctcggacttctctggtcctcagtttctctatattgtaaaatggaaattaatcataactacttcctgagggtgctggcagcagtaaacatgataaagtatggaaagcacacatgagcgcacatacacacaccacaccacaccacacacaccacaccacacaccacacacccagccttcctaggaaacttctattcatgcttcagccatcatttcacaagtgccacttcttcaggaaagcctttcctaaagatcaccctctctgacttcagcaggcctccctgctatattcaagcaccatgtattttcctttcgtaagtacacatcatcaatttgaattttgtgttcatttgcgcatcatttatttatgttaatctcacccactacacaccatcagttccatgagaacagggtctgcggtgacctcccacatttttctagcacttaacacaaatcttggcacacagaagataagtattcaacaaaagaaaagcatttaccaaaagctgacaatgcgccaggacctccgtaaataagagtttggcattgtgttatgtgcttctgcaggagtgagtctcgcctttaaaaaccttagagtctaacgggaaacacaacacatacagaagtcaccatctgacactgcagacggtcagcaatgcctagacagagtgccctgtgagttctgagaaggtggagatcaactgactcttgatgatgacaatccaaaaagactttacaaaggagcagtggcttaagggtaccca

SEQ ID NO: 81456 - DNA, 455 bp, Homo sapiens
ctcacgcacactggctcttatgttaacattctcccagagaccacggaaatatgtttagaaaagaaagttacagattggcagcagaagtctctgcttctggatcattatgttaagtctaaagacaaccagaaaagaaacgctgctctgtgtccccggtcattgtaaaagtccccagcatggagctcgtcagatgacactgcaatcctatggyctccaggcaaatccttttctgaactgaaaatgtggtctttggcccctcaaaaccaactcaccgagcctggggaatacgacccacttataatgtccaagaccttcctctcatcccaagtttatgacaatttccacccataatcaaaatttcctaaacttactttctgtttttttgttttttttcatttggtagagacagagtctccttctgttgcccaggctgatatcaaactcctgagctcaag

SEQ ID NO: 81457 - DNA, 725 bp, Homo sapiens
cagcctcaggaagagggtctctataggggtaagaatcagatggaggaggcatagattcttacagggaaaacactataaaacaagttcatccaacctgaggcccaggacggctttgaatgcggcccagcacaaattcataaacttgcttaaaatatyatgaggtgttttttttgcaattttttttttttttagttcatcagctgttgttagtgtattttatgtgtgacccaagacaattcttcttccagtgtggcccggggaagccgaaagattggacacccttgctataaaaggacagggactggagtctttcattcttaccagaagtttaagtaacaggaaaaaaagggcctggtcaaaattgcctatctttgcagttttaagctcagatcagctaaggttttcccattagtatcagaaacgtgattaagttagcagtctttgttaggatttaaattatgtatttctgagagatttttattaaattttcattgaaatatccaaatgggttgtgaatatcaagttgtcatgcactcttctggttcagtttaatctagaggaaatgtgaatttgattatatagaaatgaaaacagtttaatgcttaagtggttagatatccattacatattcttcctattccctcagttttccttgactcggtcactagatgtattatgttctgtaatcttggtcttctgcttaattcctgtcatgggtgctgaaa

SEQ ID NO: 81458 - DNA, 747 bp, Homo sapiens
tctccagggcctgttaggatgccctgagctgcctcattcagttgctcatgctgttgcctgcgtgcttcaaattcctttagcataaactgaaatagaaatgacaccaagatgtttagacaggaaaaaaacagatctatctaaaagcagtgtcaggccaggcacagtggctcatgcctgtaatcgcagcactttgggaggccgaggtgggaggatcacttgaggtcaggagttcaagactagcctggccaacgtggcgaaaccccgtctctactaaaaatacaaaaattagtggggcgtgctggtgaacacctgtagtcccagctactcgggaggctgaggcacgagaattgcttgaacccaggaggccgaggttgcagtgagctgaggcagcaccactgcactccagcctrggcaacagagtgagaccttgtctccaaaaaagaaaaagcagtgtcaaaacaaaaactgatgttggattgtgccaaatagtgccaactactttaaaactataagccagaaaactaaaggaccaggctattaggctgaggcagtatcacttaacaattgcttaataaaaacttactttgaaaggatcactgattgttcctattttatttcttttccttatttgtcccattctgtttcaatgtcagttactaaggccagacacggctgagaaattaaagttggcattcatctgctttgccatgcaatacccaagcctctgaattgggagttcagaacact

SEQ ID NO: 81459 - DNA, 1034 bp, Homo sapiens
agatgaaactggtcaggctttttcagatgaaaaagcccaaatttcaagtgtcattgcagaaaagtggttagcagggcaaaatgatttgtcatattttgccattgatttaagtgccataatcctcttttattcaaccatccaaaggaaccaccatttttaagcaataaaagagccattccatatttaacagtagcattatgagagataatggctccaagataaaataattatctatgaattataatttcaagtcattcagcaaggtgtcatgctgatgaataagtgttaactggggagtgttttaagaacwtattttatagagatgaatgtgccaaaaatacatgggatcttcaacaataattttcagccttttgcttttgcagtaaaataattgcataatgaattattttatgtaacctaaatataacattagtaactgaattaaaatccttaaagccaataatcattactaaaaataagagattcaaaaatatgattttgtttctcttatacctgtaagtctacataatttcttcaacagagaaagcaaatattgtaatattctctggacagtcaatcttctcaatctttcagagggttgctgacatactaaacttggttaattgaatcaaatgtcctggttaggtccacaaacacacaacacataaatcaggagcctctttttgaaacttttttgacatacccttttcatatgacttttctgtctgctttgaaatagtgtacatagtattttttcttatataaaaattagccattaggggaaattcctatattttggatgcctaatgagaagtttaattatattctcaagagtggtatgtgctagtatctcttcaataatacatcagaatatattagatttgttaagtttttttttgcacactggaaaactgttggtatatattccttctacaaaatcaaatgactataacattaatattatagtatctcaggcctaaggtgagaaattacttaatctaaccttcttgccatacaggaatgccttctatact

SEQ ID NO: 81460 - DNA, 594 bp, Homo sapiens
gatcctaaggtttgacctcagtgcttttgcatcacagagggcgactttgcaccttccgcctggaactgctgtccccactcggggctgtaggcactccccagaatcgggcttcctgttgaggagaaacagcacgtctgtgttttccagtcgtggctgatccccgtaagatcagcgcgtccakcccatgggctgcaccgtttcatcctgctttgcggctgtttctcaaacttcaacgccgggactcagggcttgggaacaagctgggaggatttgctgaaagctgcacagtatgaatcaccccttgcttgcctcagagacattggagccgcctggtgataagacgactggtgggatgcgaggcgatcggacgcctgcccgggccgcaggagcaatgcggcgcacatcagggtgccggtcacgtcgcctgtctggcggcccctgtgcccggtcctgttcgtcgaatcaactttgccatctggtggctgttcggtgcttctccacttactgggttgtcccagaaccattgtctgatgcctgagattccaggcgagctggggtgcctttctgccttgatacggacagtaactcaggaaa

SEQ ID NO: 81461 - DNA, 594 bp, Homo sapiens
gatcctaaggtttgacctcagtgcttttgcatcacagagggcgactttgcaccttccgcctggaactgctgtccccactcggggctgtaggcactccccagaatcgggcttcctgttgaggagaaacagcacgtctgtgttttccagtcgtggctgatccccgtaagatcagcgcgtccagcccatgggctgcaccgtttcatcckgctttgcggctgtttctcaaacttcaacgccgggactcagggcttgggaacaagctgggaggatttgctgaaagctgcacagtatgaatcaccccttgcttgcctcagagacattggagccgcctggtgataagacgactggtgggatgcgaggcgatcggacgcctgcccgggccgcaggagcaatgcggcgcacatcagggtgccggtcacgtcgcctgtctggcggcccctgtgcccggtcctgttcgtcgaatcaactttgccatctggtggctgttcggtgcttctccacttactgggttgtcccagaaccattgtctgatgcctgagattccaggcgagctggggtgcctttctgccttgatacggacagtaactcaggaaa

SEQ ID NO: 81462 - DNA, 594 bp, Homo sapiens
gatcctaaggtttgacctcagtgcttttgcatcacagagggcgactttgcaccttccgcctggaactgctgtccccactcggggctgtaggcactccccagaatcgggcttcctgttgaggagaaacagcacgtctgtgttttccagtcgtggctgatccccgtaagatcagcgcgtccagcccatgggctgcaccgtttcatcctgctttgcggctgtttctcaaacttcaacgccgggactcagggcttgggaacaagctgggaggatttgctgaaagctgcacagtatgaatcaccccttgcytgcctcagagacattggagccgcctggtgataagacgactggtgggatgcgaggcgatcggacgcctgcccgggccgcaggagcaatgcggcgcacatcagggtgccggtcacgtcgcctgtctggcggcccctgtgcccggtcctgttcgtcgaatcaactttgccatctggtggctgttcggtgcttctccacttactgggttgtcccagaaccattgtctgatgcctgagattccaggcgagctggggtgcctttctgccttgatacggacagtaactcaggaaa

SEQ ID NO: 81463 - DNA, 1069 bp, Homo sapiens
tgcatgcaccacacacatgcacacagttacacaccactcgcacatgtacacatgtgcgcaccacacacatgcagttacgcaccactcacacatgtaaacatgcacacaccacacctgcacaatgccgattgtgctgttctggggggcagttggctccaggggcttctggaaacctctgtacagtagcaggaccctggatctatgtgaattcgtacctggagttctagtacacgcagacggcaggtggaggggagtggggccggtcccctgggctccacagaccctgcagctggattgtgtcgcatggaagagccgtgagaacccaaagtgcttcatgtgcactttttgctgccccaggaagtgagtggcagcgcctgtatccagtctcactaaggactggtggcttctcatctatagtgggggcttgaggttggcagcacagacaagccctggccccctctccccagccaagccgagggaggcyacatggggcatggacagatggagatgaagctcagtgctgaccagcggtggctgaatatccccctgtcttgctgcctggggaggacagggctgagctgacctctcccaagctctccccagaacaagttgccctctgtctaggggagtgagtgagccggggaccctgcacgggacaccggaacccacactccatcctcccagtgtctgcagcgccttgtcaggggctgtgaagggagcgtgagattttaggatccttttggacgaagccatcttgctgtgaccgtcctgtgtggtgccctggggttccatcctaagtttctcttccaaccatcgtgagtgtggacagaagccagcctttccctcagcgcgggtggccccggccccttctgtgcctcaaagtagaggcgagagtgcccctgtctcagtctcctccttccctaatctccgcctggagcagaaccctagctccatctcagggctgctctgggggctgtgggacccctgggcggtgtggaaggaggaccctggggggcagagggaataagatggggtccagcaggccagcctttctgatgtgacctcatgc

SEQ ID NO: 81464 - DNA, 1069 bp, Homo sapiens
tgcatgcaccacacacatgcacacagttacacaccactcgcacatgtacacatgtgcgcaccacacacatgcagttacgcaccactcacacatgtaaacatgcacacaccacacctgcacaatgccgattgtgctgttctggggggcagttggctccaggggcttctggaaacctctgtacagtagcaggaccctggatctatgtgaattcgtacctggagttctagtacacgcagacggcaggtggaggggagtggggccggtcccctgggctccacagaccctgcagctggattgtgtcgcatggaagagccgtgagaacccaaagtgcttcatgtgcactttttgctgccccaggaagtgagtggcagcgcctgtatccagtctcactaaggactggtggcttctcatctatagtgggggcttgaggttggcagcacagacaagccctggccccctctccccagccaagccgagggaggctacatggggcatggacagatggagatgaagctcagtgctgaccagcggtggctgaatatccccctgtcttgctgcctggggaggacagggctgagctgacctctcccaagctctccccagaacaagttgccctctgtctaggggagtgagtgagccggggaccctgcacgggacaccggaacccacactccatcctcccagtgtctgcagcgccttgtcaggggctgtgaagggagcgtgagattttaggatccttttggacgaagccatcttgctgtgaccgtcctgtgtggtgccctggggttccatcctaagtttctcttccaaccatcgtgagtgtggacagaagccagcctttccctcagcgcrggtggccccggccccttctgtgcctcaaagtagaggcgagagtgcccctgtctcagtctcctccttccctaatctccgcctggagcagaaccctagctccatctcagggctgctctgggggctgtgggacccctgggcggtgtggaaggaggaccctggggggcagagggaataagatggggtccagcaggccagcctttctgatgtgacctcatgc

SEQ ID NO: 81465 - DNA, 605 bp, Homo sapiens
catccacgcatgtgagctcacaccagatgcaaacctcgagccttcatgggccaggcatttcatgatcttcactaatgaaaactcagtcagttagaactggcctcattctgatagtcatcctcttggggtcttcagaaattgtcaacaggcttgctttgcatttctatcacccagggcagtagggggtaagcttgtgcttaactggagggaagcaggcaaaggtgtggctaaaaaycaccttccaagtaatgaggcagtactgcaaggggaatagtgcctgactaccagtaaccaaggtaaggtcaagaacaggcaggggtgagtattagcagggagatttcctgtttgctgcaatcagattttctgtcatgaatggccattaggtcattaactgtttgaatattcagatgaggacagctgtgaagtccccttccccgcatacctctgatgctccataataggatactaggggggcgttttcaattgtcccctccctgccctattcagaaattctggccttcaggtgaggaaaaaggagttgtgtttactacctgttctagagaaggctctgtgtcagtcaggggccagcgcagcatctcacagct

SEQ ID NO: 81466 - DNA, 605 bp, Homo sapiens
catccacgcatgtgagctcacaccagatgcaaacctcgagccttcatgggccaggcatttcatgatcttcactaatgaaaactcagtcagttagaactggcctcattctgatagtcatcctcttggggtcttcagaaattgtcaacaggcttgctttgcatttctatcacccagggcagtagggggtaagcttgtgcttaactggagggaagcaggcaaaggtgtggctaaaaaccaccttccaagtaatgaggcagtactgcaaggggaatagtgcctgactaccagtaaccaaggtaaggtcaagaacaggcaggggtgagtattagcagggagayttcctgtttgctgcaatcagattttctgtcatgaatggccattaggtcattaactgtttgaatattcagatgaggacagctgtgaagtccccttccccgcatacctctgatgctccataataggatactaggggggcgttttcaattgtcccctccctgccctattcagaaattctggccttcaggtgaggaaaaaggagttgtgtttactacctgttctagagaaggctctgtgtcagtcaggggccagcgcagcatctcacagct

SEQ ID NO: 81467 - DNA, 605 bp, Homo sapiens
catccacgcatgtgagctcacaccagatgcaaacctcgagccttcatgggccaggcatttcatgatcttcactaatgaaaactcagtcagttagaactggcctcattctgatagtcatcctcttggggtcttcagaaattgtcaacaggcttgctttgcatttctatcacccagggcagtagggggtaagcttgtgcttaactggagggaagcaggcaaaggtgtggctaaaaaccaccttccaagtaatgaggcagtactgcaaggggaatagtgcctgactaccagtaaccaaggtaaggtcaagaacaggcaggggtgagtattagcagggagatttcctgtttgctgcaatcagattttctgtcatgaatggccattaggtcattaactgtttgratattcagatgaggacagctgtgaagtccccttccccgcatacctctgatgctccataataggatactaggggggcgttttcaattgtcccctccctgccctattcagaaattctggccttcaggtgaggaaaaaggagttgtgtttactacctgttctagagaaggctctgtgtcagtcaggggccagcgcagcatctcacagct

SEQ ID NO: 81468 - DNA, 1240 bp, Homo sapiens
tttttgtatttttagcatagatggggtttctccatgttctttaggctggtctcaagctccctacctgagatgatccgcccaccttggcctcccaaagtgctgggattacaggcgtgagccaccgcatccagcccgcagggcttttagcctgctcttccctctgctaagaacactcttttctccttgcccccttagggatgacttctctgaacccctcggctgggtcagaacccctcgttacaagttctcatctcactccacatttgtctatcaaaccatttaccacaattggcatggtagcaggatctcagtgtttgaatattcagtgtatcattgatatgtggaaatatattgcttttcttctttttttctgcgtttgctacaaaaagagtcattttttccatttggcgtgcaaaaatgactcttctcggatcacagtgaaattgttcctccctccctccactctttccacctcatgcaggccaggcaattctaatgaccaagggcatcctactcttgagagaagagaaacattttctgttggaaatgatttaggagaagttctgataggggatcaaatttttcctgatggaagaggttccattggagcattcattaatgttgaggtaaaacattaatagcccaagggtaggaacttgggacacctggaggcaggatcaagttgctaataaggagaagcttctgagaggcactgggctaagcccaattagttgactgtgagaatatctgctgccaggatgtgtctgacatgtggactgagaaaagagccatagagagagtggcaagcccagtaggctgccttcctgcaggtggcatttccaggtcacctgcacccaggctactctctccaacccccatgtaaggagagcttcagggcatttctaaaccccaggggatctctagaaccctatgraagactaaggaggaatgagacttctttagagcctgactgggtgctcaagagcactccaggctgacccggagcagaaactgttgtataatttattaatgatttgtttgctatctgggcgtcttccacttcactcagcagaatgtaacttccaagagagtgggaaggtatctgtcctgatcaccactgtacaacacacctgatgcagcagttggctcacaactctcgttgaatatctccatgggcctcaattcagcacctagaaaatggggagattgggtcctgttactggttcttgtgatgatttga

SEQ ID NO: 81469 - DNA, 661 bp, Homo sapiens
tgccagctcagttttcatgatcataggctgggtccaaggcttgcatgttatagcaagcagcagcaggatgagcctcatcagaattgatggctggagaactaccaactgttcttctggcataatggagagctgaagttccagctttttccacgatgaggattgattgattgaatgccttaagcactggaccataactggtttccatggagcttcgcaggaaatttatttcctgagagaacatgtggttcactgctcaactccttggatacttgatgacctgctcctccgatttatctagtgctgtatgtagcattcttgaactaaarttctaggctcttctctggttggcccattctctgctgagtcaagtcctaggtccagcccagtgtgtttttatttgaatggttggaattctggagctgagccttattatcccttaggacaatatttctctactgtggctgcaccgtggaaacacctaaagacagtgcagaaaatatctatgccttggcccaccatataacagaaactaactttttcagggtaaagcattggcttccgtatctttcaaattgtcccgagtgattctgatccacagtgaaaactgaaaactgttctaatattcaccttgccggaaaagtaagactatgtgaagtgaacc

SEQ ID NO: 81470 - DNA, 661 bp, Homo sapiens
tgccagctcagttttcatgatcataggctgggtccaaggcttgcatgttatagcaagcagcagcaggatgagcctcatcagaattgatggctggagaactaccaactgttcttctggcataatggagagctgaagttccagctttttccacgatgaggattgattgattgaatgccttaagcactggaccataactggtttccatggagcttcgcaggaaatttatttcctgagagaacatgtggttcactgctcaactccttggatacttgatgacctgctcctccgatttatctagtgctgtatgtagcattcttgaactaaagttctaggctcttctctggttggcccattctctgctgagtcaagtcctaggtccagcccagtgtgtttttatttgaatggttggaattctggagctgagcyttattatcccttaggacaatatttctctactgtggctgcaccgtggaaacacctaaagacagtgcagaaaatatctatgccttggcccaccatataacagaaactaactttttcagggtaaagcattggcttccgtatctttcaaattgtcccgagtgattctgatccacagtgaaaactgaaaactgttctaatattcaccttgccggaaaagtaagactatgtgaagtgaacc

SEQ ID NO: 81471 - DNA, 661 bp, Homo sapiens
tgccagctcagttttcatgatcataggctgggtccaaggcttgcatgttatagcaagcagcagcaggatgagcctcatcagaattgatggctggagaactaccaactgttcttctggcataatggagagctgaagttccagctttttccacgatgaggattgattgattgaatgccttaagcactggaccataactggtttccatggagcttcgcaggaaatttatttcctgagagaacatgtggttcactgctcaactccttggatacttgatgacctgctcctccgatttatctagtgctgtatgtagcattcttgaactaaagttctaggctcttctctggttggcccattctctgctgagtcaagtcctaggtccagcccagtgtgtttttatttgaatggttggaattctggagctgagccttattatcccttaggacaatatttctctactgtggctgcaccgtggaaacacctaaagacagtgcagaaaatatctatgccttggcccaccatataacagaaactaactttttcagggtaaagcattggcttcygtatctttcaaattgtcccgagtgattctgatccacagtgaaaactgaaaactgttctaatattcaccttgccggaaaagtaagactatgtgaagtgaacc

SEQ ID NO: 81472 - DNA, 660 bp, Homo sapiens
agaaagttaaaacttgtattcaaaatggatatcaagacaacataaaatggtaagaattcactacagggtggaaatacagtcactctcaacagatcagaaacccatactacactatgcatggatgtaggccaaattcacactactctgtgttgtgtggttctgtgctgatacaacaccaaaacagaccaggaacaatwcaaacctgcagctcccagggagggaaaaaatgttaagctgtcacctgggataactccataatgtttaggtatagacaagatttctgggaaaacacaactctcgctgaaggcacaccaacagaacagaaatgacaaaacctgaaggttagactagtcagatttaaaaattagataattaatggccgtactagttttctgtgactgctataacaaatggccacaaactgggtagcttaaaataacagaactctgaaatcgaggtgttaacaggagcacactccctctgaaggctctaggggagagtccattccttgcctcttccagcttccagtggctccaggtatttattggtatatagtaacatcactctaatccctgccttggtctttacatcacactctcctcaatgtttctcaaaatgcctgctgcatttttcttatagggatacatgtgattacattta

SEQ ID NO: 81473 - DNA, 807 bp, Homo sapiens
aaacagccgtgggatgtgtcttcatgacattgggatggccacacagaagcaggtcaccaggaatggcagtgcctctgaatcctggtgcaattggaccagagagtcagtatctcccaaatgtatgggaaagtccccatcccaagaacagatcaagaaagtcttttctgacttttgccatggtaagaaattgtgaaagaagcaagccccaataactcaaagcagatgaagtgtgacctatctgaaatttgtaatcyttcaaccctattaatcccctggcattttctttccttccggcttaaagggaggtcgtttttcaacctttccaagcaccactggacttgcagtgtccccaggctttgggattagaagatgcaggaggaagggaaatgtcttctctggcttttggccctagctcttaaagaggcagcaagggttgacgtccacctccagggcactgatatttctcattatttatatccagtggcagggtagaatgttggaaggaagacagagagtactgaatcccttgtcctgaaaaaattctgtaatataggagcagccagttgacttccctgtgtccttatccctctgtacacaggacaaaacaggcctaggagggcaagagagtgctgagaagggcctgggtgggcagagcattccacagaaccaagggaacactctttgtgcacaaagaacctctgtaacgtttccttgctgctttttttcccccttcaaaatgaatttgtcctgttttaggaaaaggcacttaaggtaagtctaactttttcttgatttatttcctaggta

SEQ ID NO: 81474 - DNA, 807 bp, Homo sapiens
aaacagccgtgggatgtgtcttcatgacattgggatggccacacagaagcaggtcaccaggaatggcagtgcctctgaatcctggtgcaattggaccagagagtcagtatctcccaaatgtatgggaaagtccccatcccaagaacagatcaagaaagtcttttctgacttttgccatggtaagaaattgtgaaagaagcaagccccaataactcaaagcagatgaagtgtgacctatctgaaatttgtaatccttcaaccctattaatcccctggcattttctttccttccggcttaaaggraggtcgtttttcaacctttccaagcaccactggacttgcagtgtccccaggctttgggattagaagatgcaggaggaagggaaatgtcttctctggcttttggccctagctcttaaagaggcagcaagggttgacgtccacctccagggcactgatatttctcattatttatatccagtggcagggtagaatgttggaaggaagacagagagtactgaatcccttgtcctgaaaaaattctgtaatataggagcagccagttgacttccctgtgtccttatccctctgtacacaggacaaaacaggcctaggagggcaagagagtgctgagaagggcctgggtgggcagagcattccacagaaccaagggaacactctttgtgcacaaagaacctctgtaacgtttccttgctgctttttttcccccttcaaaatgaatttgtcctgttttaggaaaaggcacttaaggtaagtctaactttttcttgatttatttcctaggta

SEQ ID NO: 81475 - DNA, 807 bp, Homo sapiens
aaacagccgtgggatgtgtcttcatgacattgggatggccacacagaagcaggtcaccaggaatggcagtgcctctgaatcctggtgcaattggaccagagagtcagtatctcccaaatgtatgggaaagtccccatcccaagaacagatcaagaaagtcttttctgacttttgccatggtaagaaattgtgaaagaagcaagccccaataactcaaagcagatgaagtgtgacctatctgaaatttgtaatccttcaaccctattaatcccctggcattttctttccttccggcttaaagggaggtcgtttttcaacctttccaagcaccactggacttgcagtgtccccaggctttgggattagaagatgcaggagkaagggaaatgtcttctctggcttttggccctagctcttaaagaggcagcaagggttgacgtccacctccagggcactgatatttctcattatttatatccagtggcagggtagaatgttggaaggaagacagagagtactgaatcccttgtcctgaaaaaattctgtaatataggagcagccagttgacttccctgtgtccttatccctctgtacacaggacaaaacaggcctaggagggcaagagagtgctgagaagggcctgggtgggcagagcattccacagaaccaagggaacactctttgtgcacaaagaacctctgtaacgtttccttgctgctttttttcccccttcaaaatgaatttgtcctgttttaggaaaaggcacttaaggtaagtctaactttttcttgatttatttcctaggta

SEQ ID NO: 81476 - DNA, 807 bp, Homo sapiens
aaacagccgtgggatgtgtcttcatgacattgggatggccacacagaagcaggtcaccaggaatggcagtgcctctgaatcctggtgcaattggaccagagagtcagtatctcccaaatgtatgggaaagtccccatcccaagaacagatcaagaaagtcttttctgacttttgccatggtaagaaattgtgaaagaagcaagccccaataactcaaagcagatgaagtgtgacctatctgaaatttgtaatccttcaaccctattaatcccctggcattttctttccttccggcttaaagggaggtcgtttttcaacctttccaagcaccactggacttgcagtgtccccaggctttgggattagaagatgcaggaggaagggaaatgtcttctctggcttttggccctagctcttaaagaggcagcaagggttgacgtccacctccagggcactgatatttctcattatttatatccagtggcagggtagaatgttggaaggaagacagagagtactgaatcccttgtcctgaaaaaattctgtaatataggagcagccagttgacttccctgtgtccttatccctctgtacacaggacaaaacaggcctaggagggcaagagagtgctgagaagggcctgggtggkcagagcattccacagaaccaagggaacactctttgtgcacaaagaacctctgtaacgtttccttgctgctttttttcccccttcaaaatgaatttgtcctgttttaggaaaaggcacttaaggtaagtctaactttttcttgatttatttcctaggta

SEQ ID NO: 81477 - DNA, 826 bp, Homo sapiens
agggcacccttggaatccatggcctcccagaaccttagaatgtgagcttatttagaaatagtgtctttatagatattattagttaaggaccttaagatgaaatcatgcaggattataggatagatagaaccttataatgactaatgtcattataagaagagaagacacagagaagaaggtgaggtgccgatggggtcgaaactggagtgatggtgtctgtaagccaagaaacagctaggatgcagggatggagggctgccaccaggagcctgggagaggcatagcacagagtctccctgcagccaccaggaggaaccagccctcccacaccttggtcttggacttctgggtctctagaattgtgagagaataaatgtatgctgtttaaagccacccggtttgtgacagtttgttatggcagcccgattctgtctccctccctgaatccaccggtggcccgggtaggagttagagggggaggtgccttatcgccattgctcaccgcttctcctcatctgttgggaaagtgggagaggaactgggttttccaacatttcatttaaatctgacaccaactggagttagtatagactcagagtagaggacacagtcccacaagactgtcccccactgcagataccaagcacaagtcccaggttgtgacctgtatgtacttctgatccacctgcataaatgaccccctccttgggtgtgagaatttactaytaaggctcacagaactcaaggaaacacttacttaggtttaccagtttactgtttaataaaggataagatagatgaagaggggcacagggcgaggtccaga

SEQ ID NO: 81478 - DNA, 644 bp, Homo sapiens
cattaaatattgccaaatccttacaaataattggttttaatattttttcccacataaatttaattttattcacaaatgatttatttttttaacaaatgctgtttctgtttgttttattctgctttttaawtttttttccttattgtgaaagtctccaaatgtattctttactaggtgttctcaattttactttgaaattggagaccataattgctttcatcagaatcagatagcataatagaatgattagttttcaccagttagaaacattatactgctgatttctgtttgactcgtattatattattttaatttttttcctgacacattttactgagccaacattttcattaacatttattagtgtttggctcctaatggtgtagtaaccttgaaattatccatattgaatttcactttgttttgatgtgttatttctttaatatattgaggtccttagtgtatctttctttctttcagagaattagcaatcatgccctacctagtattcctaggaccttctacaaaattaatgaacatattctcaattcctttattcaggtcattggtaaaggtattaagtaacacgggtttatatatctcccaaaatacctaactaagatggataccactgaaagacgtgt

SEQ ID NO: 81479 - DNA, 1111 bp, Homo sapiens
cggcagacctctaactgagagattttttggtgaattgttcttaattcataaagacaaatgctttcctgaatttcttattcatgtttttttgtcattttaagtgcactctcaattttgtaccttttctgcaccctacgtggagaagaaragttgtcacttatgctaaattgtttcttagtattctctcatttcctggatacttcatatgcagtttctccttctctttgtttctaaacagtggatatgtaccggttgtttaataacaacagattacctcaatttaccatgccaccaaagaatgtacaagtaaaatcaatgctaataacaaaaattacccactcatagacataaagatggcaacaatagaaactgtggactactagagggggaagggagagaaaggggcaagggacaaaaaacttttggatactatactcagtacctgggggacaggatcaattgtaccccaaacctcatcatcacacaatatacacaggtaaaagccctgcatatgtgcccccgcaaatctgaaataaaagtttaaattttaaaaaataaccaattgcaagccaatttgttggtgcaatttaacctatgggaatgctgcactcataggaacagggatgtcttctgctatcaaaagtgcttctttggtgttgaagatttttttttaaaatatgtcttggtcttaaatatacttaaaaatattttcataattgctattttagtttttgaaatatttctgatgaattaatgtttaattataatagggcttctatgttttcctgtctttccgaatgctgactataaatctattttctgaatatgtcatacatcatttctgagttatgtgcatgttttaaaattaacttgagttgcaaatatcgcttttaaagtgcagtagtaatttatagtaaaatagaaaaatgatttcagtggcagtactatttcaaatactagtgttgctattaaaactcaatttttcatgtctatattgtgtatgagttttttgaaacaatgataacagcatataagaaaatgatttcttatatctgtatttcttatatttggaatatgtgatatttaataaataatttaacttaaatatgca

SEQ ID NO: 81480 - DNA, 1111 bp, Homo sapiens
cggcagacctctaactgagagattttttggtgaattgttcttaattcataaagacaaatgctttcctgaatttcttattcatgtttttttgtcattttaagtgcactctcaattttgtaccttttctgcaccctacgtggagaagaaaagttgtcacttatgctaaattgtttcttagtattctctcatttcctggatacttcatatgcagtttctccttctctttgtttctaaacagtggatatgtaccggttgtttaataacaacagattacctcaatttaccatgccaccaaagaatgtacaagtaaaatcaatgctaataacaaaaattacccactcatagacataaagatggcaacaatagaaactgtggactactagagggggaagggagagaaaggggcaagggacaaaaaacttttggatactatactcagtacctgggggacaggatcaattgtaccccaaacctcatcatcacacaatatacacaggtaaaagccctgcatatgtgcccccgcaaatctgaaataaaagtttaaattttaaaaaataaccaattgcaagccaatttgttggtgcaatttaacctatgggaatgctgcactcataggaacagggatgtcttctgctatcaaaagtgcttctttggtgttgaagatttttttttwaaatatgtcttggtcttaaatatacttaaaaatattttcataattgctattttagtttttgaaatatttctgatgaattaatgtttaattataatagggcttctatgttttcctgtctttccgaatgctgactataaatctattttctgaatatgtcatacatcatttctgagttatgtgcatgttttaaaattaacttgagttgcaaatatcgcttttaaagtgcagtagtaatttatagtaaaatagaaaaatgatttcagtggcagtactatttcaaatactagtgttgctattaaaactcaatttttcatgtctatattgtgtatgagttttttgaaacaatgataacagcatataagaaaatgatttcttatatctgtatttcttatatttggaatatgtgatatttaataaataatttaacttaaatatgca

SEQ ID NO: 81481 - DNA, 717 bp, Homo sapiens
tttttatggttagctaattttacatttttactacttcaatctgtgcaggttccttaatgcagctcttcccatatatgtattttttgttttttgcttttcattcacaatcttaaattttattgtatttttctcacttacttgttcttgtcagttcaagccctaccattcctgaaaatgttcacatccaatgttaacacacaatgaactgagtaatcatggacaaaatagaaatgtatataaggaatccagaatagcatctagcaagtagaacaagctcaatgaatgctggtatgtctatatctatatctatgttcattattattacatcagtcaatcaatcaatcaatcagtcatctgtgtgtatgtgggtgggggtgtgtgtggkgtgtgtgtgtgtgtgagagtgtgtgtgtgtgtgtatgtgtgtagctatatctaccttcatctctatacatggtgagagaaacagagaaagagaacaaattatgtatgtggtaatagaagaagaaaggagacctttttctaaactctataaagtaaaatgtttactagttcaatagggtgaaataaaagagatgaaaatcatatttgaacttgatatgtcataggggtatctcgcctttgaacagaagttctgaatctcatattctcttattaagtgctccaacccatcacagagcttctctattccacattgcaagagaagccattctaaag

SEQ ID NO: 81482 - DNA, 2258 bp, Homo sapiens
actagtgcctcctgacacaaaagaataggaagctcacagtaccacctctgatgtattcttgcccaaaacagagatgtatctgataggtccctagatctaactgccagtttgctgggaaaacaggggataaagaaacctaaataacaacaaaatggtgcagtcaataatttctaggatggagattctacatgacaagttaattcttcaacaataaagtggtcagggaaaaacaaagagggaagagaatctatagtcaaaagacatatcctatagatgctatactgggagttcatgtggatcccagttcccctcaaaccaactgtaataccatcatcatcttcaaggagtttattcatcttagatgaatgtttaatggtaataacaaattattatttgttaacaataataccatggatatgttgaaaaaagtgtccatatcttttagaaatacctctgaagtattaatggattaaaatctamgacatttacctttaaaataacccatgggggaggagcaatggttcaactagatgaagcaaggttggccatgtgtataattgatgaagcaagtgatagatactcatggtttctttctactttagcatatgtttggagaaactcataatgaaaaattaaccttttaaattaaaaaaaagcattttgagaaggtgaagaatgttgacccaagaaatatcctaggaattttgagcaaggttgagaaagttaagagcatttttgaggttggcaaacaagaatttatagtgataccaatttatcttattgcataattttctgaaggagtataggctcctgcggtagagagtaggtgtgggggtggtagcatagataatgtgtataaaagtaattagctttgtatttgttttttttaaccatcagagaaatataatgaaatatagagcagcaagagagatacaagtaatggtgagggtgttagttaaattatggaccttgtaaactcaactggattattttaaatgaagtgattaaagaaggtaatagattggggattgagaaatggaatagataccagcctggaaatcttataatcaaagcatgaactcagagaaagtgaatgcatatgacatctagaagaaatggtgattgtggtctgttaaaaggattcttttaattcataattttaatactccatattttgaaggcattccggaagggccaaaaatcacttgaatctatttcagctttcttggctaatgatttgacttacataattctgaccgtgttgcatgatagattactgtaatggctctctaacagctcttcctataacttctctaacaaataatctgtaccaggcaacattattcttcataaaacactgctttcataatgtactccctcacacaagagtctcaggacgaggagccatctgcgagtctagtgtgactgaacctgtcattcctaggcctctcttaagtggccaaaccctgtacatttttgtttcccagttgctaattctcatcagcctcagctccaagaagacacatcttcttcctattacttcttttctttttgttttctaaattctgaattccttttcttccctaatgtttttcacatcaaatcaataatcccatcaaaaccaagataaacacaacataacaaaagctgtctgtgtgggttcaaaccctagcctgatcacgtattagccaaatgcaatatagtggtgataatgagtacttatcctaaggattgataatgagtagttaaccttatgtaaccttacacgtattacatataatacatgtaagattcttaaaacaatactcaccattactcaaccatttttctaactacttatgaaaagccctttttgccatatttccttatttgattccctttagtagagatacagaattgctatatctcaaaatatttacacatggtattctatagatttgttctataattacatgaaaaaataattacgacctctactatccttgtattcactatgtttaagtagtgttttgcaccattagttacttaataatgcttatgattaatcaaatgttaaatatctaaattaaataaaggaagcaaacaaatgtattaataaatgaatctaggaatgaattactaaacaaaatagcataaatttatccagtgaagtttcagagaaataaactatctcaaattcccaacttgttctaaagtaagatgctaatttctcactctggattcaacattaacactctggagttatacatccaattaat

SEQ ID NO: 81483 - DNA, 542 bp, Homo sapiens
aaaaaagcataagaaatcagctgggcgtggtggctcacgcctgaattcccagcactttgggaggccgaggcgggtggatcacaaagtcaggagatcaagaccatcctggctaacacagtgacaccctgtctctactaaaaatacaaaaatttagccagacgtggtgacatgcacctgtagtcccagctactcgggaggctgaggcagaagaatcacttgaacctgggaggcggaggttgcagtgagccaagatcgtgccactgcactccagcctgggcgacaaagcgagactctgtccccccccmaaaaaaaaaaaaaaaaaaaaaaaaaaagcataagaaatcattttgctacataaggagtagctttcttcagttgccacctttacttctgagctgcaattcccttttctgttgttcatgtcccaaattcaacttgcagaactctgctatttggcagctcagatttttagccttccacagcctattgctggcttcttggcagagtatcaaacctgtccaggcaggacatcagaccagtcc

SEQ ID NO: 81484 - DNA, 1323 bp, Homo sapiens
aaactgataatagagttttgacttgtcaagggggaaaactgaggagacacacatgaatgcaggtgctgtaggcagagtggccatgaaagatagctgtccttggggatctgcagaaagcatgaggagagtttcaagacttaactgtctggatttggaggttcaagccaaacggcagcatgtctcaacaatcatctgggttataagtgtttattcatttggtagtaggcaaattacttttgccttcccatgttgatgataagtcccatgagtagagtccatgttgtctctcctgtctcaaagtctctcacactgggtcaagctcaaagtaactgtttatataccttgtctctccactttccattgcttctctatatcaatgttgggccgataactggtacaattttgcttttatcaagtcggtttccagatctatagaagaaaaagaagcaaaaagaggagaggggaagaggagggccctgtaattgttctctggatgttaaactcctgatggtggccagattcctccattatctggcttcattccgtttatctaacctcatctgcttttgcccacatggttctcttttccaggaatatcgagttccactctgtctactcacatagcatgaagagtctcatctcagtgtcctttttgatgctgctgttcccacctgaaacaccctccactctcctctctacctaccaaatcctgcttgttctcaaattctagcgagagacggagttcccctaagaaatctatttgatttccattttaattgcatttatagttagtactatgtccaatgacattcattattgttctcttggtgattttatgatggccagtcttctcataatcagcttgaggactaaaatagtgacttgtaattttcatgtagtaggtacttagtacttactcagtgttttctaagtcccttccctaaatgagttcaccaaggacaggggctttgttttgtttcctactcttcccccaaagccagaacttgcctggaaaatcgtgggtactcagtgaatatttattgaatgaattaatgaatgaataacagcctgccaacctttatgagatccagcagtgcagaacaatctgttttctttcccacatactatttcagactttttcatctctcccttgactctattacaattcctttgttgaatttttcagccttttagataatttcaaatgccactacctagctccttcagtgtggtrtcagtcagtcttaaagcacagcacttatttcaaatcacatttgtgccaaatttagtccatttatactgaaagagaaaacagggtagcca

SEQ ID NO: 81485 - DNA, 1323 bp, Homo sapiens
aaactgataatagagttttgacttgtcaagggggaaaactgaggagacacacatgaatgcaggtgctgtaggcagagtggccatgaaagatagctgtccttggggatctgcagaaagcatgaggagagtttcaagacttaactgtctggatttggaggttcaagccaaacggcagcatgtctcaacaatcatctgggttataagtgtttattcatttggtagtaggcaaattacttttgccttcccatgttgatgataagtcccatgagtagagtccatgttgtctctcctgtctcaaagtctctcacactgggtcaagctcaaagtaactgtttatataccttgtctctccactttccattgcttctctatatcaatgttgggccgataactggtacaattttgcttttatcaagtcggtttccagatctatagaagaaaaagaagcaaaaagaggagaggggaagaggagggccctgtaattgttctctggatgttaaactcctgatggtggccagattcctccattatctggcttcattccgtttatctaacctcatctgcttttgcccacatggttctcttttccaggaatatcgagttccactctgtctactcacatagcatgaagagtctcatctcagtgtcctttttgatgctgctgttcccacctgaaacaccctccactctcctctctacctaccaaatcctgcttgttctcaaattctagcgagagacggagttcccctaagaaatctatttgatttccattttaattgcatttatagttagtactatgtccaatgacattcattattgttctcttggtgattttatgatggccagtcttctcataatcagcttgaggactaaaatagtgacttgtaattttcatgtagtaggtacttagtacttactcagtgttttctaagtcccttccctaaatgagttcaccaaggacaggggctttgttttgtttcctactcttcccccaaagccagaacttgcctggaaaatcgtgggtactcagtgaatatttattgaatgaattaatgaatgaataacagcctgccaacctttatgagatccagcagtgcagaacaatctgttttctttcccacatactatttcagactttttcatctctcccttgactctattacaattcctttgttgaatttttcagccttttagataatttcaaatgccactacctagctccttcagtgtggtgtcagtcagtcttaaagcacagcacttatttcaaatcacatttgtgccaaatttagtccatttatactgaaaragaaaacagggtagcca

SEQ ID NO: 81486 - DNA, 709 bp, Homo sapiens
taaaccaagagaaaaaagatgaataaatttgaccgcattaaaatttaaagcttatttataaaaagacatcataaaaaaattaaaaggcaagtcacagacagagaagatatttcaagcatatatctgatgaagaatgatatcaggaatatatatatttttaagctcaataagaaaaagacaagaattaaatagaaaaaaatgggcaagggtatgaataggcaattcacagaaacagaaaaacaaatcaccatttatgttattctctgctagtatccagagaactacaacatctaataaaattgagaatacagatcccctattttattgccattctttttttttttttttttttttttttcagagayggagtcttgctctgtcacccaggctggagtgcaatggtgtgatctcagctcactgcaacctctgcctcccggattctagcaattctcctgcttcagcctcccaggtagctgggattataggcacatgctgccacgcccggctaattttttttatttttagtagagacaaggtttcaccgtgttgcccaggctggtctcgagctcctgagctcaggcagtccacctggctcagcctcccaaagtgctaggattacaggcgtgagccactgcgcctggcctggcattcttttttaaggtatatgtgtgtattagaaaagctcttgtatatgtgaacaagtagttat

SEQ ID NO: 81487 - DNA, 709 bp, Homo sapiens
taaaccaagagaaaaaagatgaataaatttgaccgcattaaaatttaaagcttatttataaaaagacatcataaaaaaattaaaaggcaagtcacagacagagaagatatttcaagcatatatctgatgaagaatgatatcaggaatatatatatttttaagctcaataagaaaaagacaagaattaaatagaaaaaaatgggcaagggtatgaataggcaattcacagaaacagaaaaacaaatcaccatttatgttattctctgctagtatccagagaactacaacatctaataaaattgagaatacagatcccctattttattgccattctttttttttttttttttttttttttcagagatggagtcttgctctgtcrcccaggctggagtgcaatggtgtgatctcagctcactgcaacctctgcctcccggattctagcaattctcctgcttcagcctcccaggtagctgggattataggcacatgctgccacgcccggctaattttttttatttttagtagagacaaggtttcaccgtgttgcccaggctggtctcgagctcctgagctcaggcagtccacctggctcagcctcccaaagtgctaggattacaggcgtgagccactgcgcctggcctggcattcttttttaaggtatatgtgtgtattagaaaagctcttgtatatgtgaacaagtagttat

SEQ ID NO: 81488 - DNA, 709 bp, Homo sapiens
taaaccaagagaaaaaagatgaataaatttgaccgcattaaaatttaaagcttatttataaaaagacatcataaaaaaattaaaaggcaagtcacagacagagaagatatttcaagcatatatctgatgaagaatgatatcaggaatatatatatttttaagctcaataagaaaaagacaagaattaaatagaaaaaaatgggcaagggtatgaataggcaattcacagaaacagaaaaacaaatcaccatttatgttattctctgctagtatccagagaactacaacatctaataaaattgagaatacagatcccctattttattgccattctttttttttttttttttttttttttcagagatggagtcttgctctgtcacccaggctggagtgcaatggtgtsatctcagctcactgcaacctctgcctcccggattctagcaattctcctgcttcagcctcccaggtagctgggattataggcacatgctgccacgcccggctaattttttttatttttagtagagacaaggtttcaccgtgttgcccaggctggtctcgagctcctgagctcaggcagtccacctggctcagcctcccaaagtgctaggattacaggcgtgagccactgcgcctggcctggcattcttttttaaggtatatgtgtgtattagaaaagctcttgtatatgtgaacaagtagttat

SEQ ID NO: 81489 - DNA, 752 bp, Homo sapiens
atccgttaattcaactgtatatttactgagtcttgctatgtccaggcactgtttagccactcactccatatgacctagtgaaggagagaggggagtttggcgtggctcattttctttccgagtgtggcactgccatctcctttaacttttctctaggacctccattcctatgaatctgggtagtgaacagagttgactccaaaaagtttaaaccagaaaatttaccaaaaaaaaaaaaaaaaaaaaatcaggggagattactcaagcatattttaggattcctgatttgtttaggaactttaaatcataaattgctctttgctttgaaagcccagagccacaagaacagcctgcttaatttgacttttcaatgtttccatatagaaccaagcctccttgtgggtgaggaatgtagctcaggtgcccagtcagagtgctagtttatggaaagtgtgcattgaattgactgtaatatctttccttttttagccattaatggtccctacaaaaaggtgtttatagtcaaataagtttgggagaggctgcatattgcaaagcttcttggagattcacattgcttcttggcatgttcaaggctctcacaggtcctrccatcaatgaatgggttttgtctaagatacttcaaacttatttgattggagaatttattttcatgcaactactcttctgtggaataccttttaggaaacacaaagcacgttatcccttgaaatgtactttttttgtgagtg

SEQ ID NO: 81490 - DNA, 732 bp, Homo sapiens
ggctaagaagactattatcataggggagagagaataaactcagtttcactgaaacaaaaggcaggaggggttttaaaccctcctgtgagctagtagcaaagtactacaagtttagacgggaagttggtcaatgtgattagactatctgtttgctaatgagttaagctaattagagagttaaactcctatgctctcagagactgggagatggggggctatttttcttgatgatgacatttcaaaaggatggtagtttggtccttgagaaagacatttttkggggctgtaagactggcaagaggctgggagatttatctacatttcaaaggggcggagaaagatatgcaatcacaatatttctaaaatgctctaggacaagagaggtcaagagcctacagtcagaaagaaacctatttagaaacctatttaaagtttagttgagctgaggggatatgttaagaacaccttggtcaccaccccgagtttcatggcagaagcaaaatatgcagatgataatatattggtgagtgaggattatatcaatcttctggaagcttaatcatttctctctaggcccagacttacacataaatacatgtgttagaatagtcctatgtgtaactagtatgaataactcttggggaccacattacctgaaccaagtacagcccatcatactctaaaataaacattactcaatgtgattgctaaaacataatacatagatcttta

SEQ ID NO: 81491 - DNA, 636 bp, Homo sapiens
cctgtaattccagctacttgggaggctgaggcacaagagagtcacttgaacttgggaggtggaggttgcagtgagccaggattgtgccattgtactccagcttgggtgacagagtgagactctgtctcaaaaaaaaaaaataattttttctgcttctttttacctttttcatgtggcaactggaaaatttacagacacatatgtggctcacattatatttcttttggatagcacttctctagactttggtatctattaccttgtcaaagtttttctggccaaaagagagtaaattagaatktaattttccagaaatatattgtacttcccttgtaaaatgccctcagtatatactacatgaggtacatactttatggtataagcagaattggtcacccagaacaaggcaggtattattacaaacttggtatcttctaataaagacataaataggattattgaaaaacccaaaatgcagaggaaagaagggcaagtagaatgtttaaaattgggtaaaggtggggaggcagagatgtatttattatgaagctagtgaagtttaagttgaaacttcagggcccttcacttatactggtctcttccaagatcctaagatgatactagcatgggttcaca

SEQ ID NO: 81492 - DNA, 636 bp, Homo sapiens
cctgtaattccagctacttgggaggctgaggcacaagagagtcacttgaacttgggaggtggaggttgcagtgagccaggattgtgccattgtactccagcttgggtgacagagtgagactctgtctcaaaaaaaaaaaataattttttctgcttctttttacctttttcatgtggcaactggaaaatttacagacacatatgtggctcacattatatttcttttggatagcacttctctagactttggtatctattaccttgtcaaagtttttctggccaaaagagagtaaattagaatttaattttccagaaatatattgtacttcccttgtaaaatgccctcagtatatactacatgaggtacatactttatggtataagcagaattkgtcacccagaacaaggcaggtattattacaaacttggtatcttctaataaagacataaataggattattgaaaaacccaaaatgcagaggaaagaagggcaagtagaatgtttaaaattgggtaaaggtggggaggcagagatgtatttattatgaagctagtgaagtttaagttgaaacttcagggcccttcacttatactggtctcttccaagatcctaagatgatactagcatgggttcaca

SEQ ID NO: 81493 - DNA, 1055 bp, Homo sapiens
ggctaatttttgtatttgttgtagagacaggttttcactgtgttgcctaggctggtctcaaactcctggtgtcaagggatccactgatctcggcctcccaaagtgctgggattacagaaatgagccaccacgtctggccctgggcttacctttcaagtcaactttgattcattgtcttccttgaaacaccacattcagtgattagtcaaataatgaacattattcttgcacaactcttttgaatctatcaattactttctactcatttagtacatattcactggggagatgctctgtgccagacactgtagtaagatcaggtaattcagaggaagtatagacaccccagacctcaaacgaagacaagataaatatggacaagggaagatccacctccacattcaccattttcagtctttctgtcatttccagctaaataacgtcttcaaaaatgtttcaaaataactaagtcactatttcaaactctttcaataatagcacccttctatacgctggactactcttaattttctcattataacatgatcttgcttttcttttaatttttgtctttgctttctacctgaatttttattttgcattatgaaattgataggtccattactggatggcatggttcaattctccagtatgtctgttgatttgtgttctactaaatcttccaattactgagagaggagtgttaatgactgcaactataactggatttttctatttttacttggcgtatccaattttgtttatgagttttgaagctctgtgtcctcatatacatttgggacaatattctcctgaaaaattgacaatcataattatttaggaggcctcattattcctgaaaagtttctctgctttcaaatctactttgtctgattttatatatatacaccayagctgtctttgattaatgcttgcatgaggtatcttttcccactcttttctttcaatctgctctataacttttattcttatttataagtgtattgcaggtggctttctttagtcagcatatttatttttaacacattctgatg

SEQ ID NO: 81494 - DNA, 682 bp, Homo sapiens
ctgggaaacatgggctaatacagtgggaatcgtgctggaagttacgagcagaggagcctgggtggggacttatattggccttgacggcccgtggaaagaaactggcggtaattccttccgttttccgtcaatttcttcacgggttgctcagaagctacggaagcaaagtagaaaggagtgagaagggcaggccaaagtaccggcggaaggtgatggcgttgcgtttaaaagggtggtcactgaaaccccttgtcatgaaacagtgaagcaggtgacatttgaactttccttcctcagaattgtattttaattgaaatgtcagggttcggagaaatttgccgaggatcataaacaagttagcaaagatcgcaggttctttccagttccgagaagttcagaaaagtttctttggtgattgraataacgttcgcctttaaacttctcaagaggtttagggggggttttagtaagcggggccggttagctcagttggttagagcgtggtgctaataacgctaaggtcgcgggttcgatacccgtactggccacacgtgactttttaatgttcatcttacagtaacagttgtgtgcagtgatatcaaaagtcacgggagaacaagaaaagaaatttaataaatggtgctgggaaaactggctagccatatgtagaaagctgaaactg

SEQ ID NO: 81495 - DNA, 682 bp, Homo sapiens
ctgggaaacatgggctaatacagtgggaatcgtgctggaagttacgagcagaggagcctgggtggggacttatattggccttgacggcccgtggaaagaaactggcggtaattccttccgttttccgtcaatttcttcacgggttgctcagaagctacggaagcaaagtagaaaggagtgagaagggcaggccaaagtaccggcggaaggtgatggcgttgcgtttaaaagggtggtcactgaaaccccttgtcatgaaacagtgaagcaggtgacatttgaactttccttcctcagaattgtattttaattgaaatgtcagggttcggagaaatttgccgaggatcataaacaagttagcaaagatcgcaggttctttccagttccgagaagttcagaaaagtttctttggtgattggaataacgttcgcctttaaacttctcaagaggtttagggggggttttagtaagcggggccggttagctcagttggttagagcgtggtgctaataacgctaaggtcgcgggttcgatmcccgtactggccacacgtgactttttaatgttcatcttacagtaacagttgtgtgcagtgatatcaaaagtcacgggagaacaagaaaagaaatttaataaatggtgctgggaaaactggctagccatatgtagaaagctgaaactg

SEQ ID NO: 81496 - DNA, 682 bp, Homo sapiens
ctgggaaacatgggctaatacagtgggaatcgtgctggaagttacgagcagaggagcctgggtggggacttatattggccttgacggcccgtggaaagaaactggcggtaattccttccgttttccgtcaatttcttcacgggttgctcagaagctacggaagcaaagtagaaaggagtgagaagggcaggccaaagtaccggcggaaggtgatggcgttgcgtttaaaagggtggtcactgaaaccccttgtcatgaaacagtgaagcaggtgacatttgaactttccttcctcagaattgtattttaattgaaatgtcagggttcggagaaatttgccgaggatcataaacaagttagcaaagatcgcaggttctttccagttccgagaagttcagaaaagtttctttggtgattggaataacgttcgcctttaaacttctcaagaggtttagggggggttttagtaagcggggccggttagctcagttggttagagcgtggtgctaataacgctaaggtcgcgggttcgatacccgtactggccacacgtgactttttaatgttcatcttacagtaacagttgtgtgcagtgatatcaaaagtcacgggagaacaagaaaagaaatttaataaatggtgctgggaaaactggctagccatatgkagaaagctgaaactg

SEQ ID NO: 81497 - DNA, 1071 bp, Homo sapiens
agtttttggaataaataagctctgaaataggattaactttgtcataacatactgcccttactttcaggaggaagaagttaaagctccatgttttgccccaaagggaaaagtgttaaaactgacctttgagtaagtataatggcatttagattattatattatgattaaaatgaactctaatttcagatgtattatgagaccctgacctttttctatattagcagtataatgcttttagaaatggaaaataatagctgtcttgagcttgtaagtgactatccaatatgagatgtcaattgctcgctcattctcttttcacctgggagtacagctggtaacacagtctttattgatctcctagaaaggcaatagatgtaagcacatcaaatacctacttggcattccacttatctggaatgaagagtcatctacaatggcatatctaatacttagaatactatgtgcttgatagaatgtataagcttttattaaatcaattaattaagatgtacttgtccaagcacatgcacataaaattaatatgttcctgctcaagtagttcgtagaaggcaaataggattctttatatgccatacagaacactaactgctgtctgattttaagaaaacttagcaattgccctaacatgtaaattttgaaaagtgacctctttattagggcacaacccttctaggagagaatgtgttggagactagcagcaggaggttgctgtatatcctcttgctctcttatcccagagtctctgctactataacagaataagatcctatagcccttggctctgtaacaaaaattccycaatctgcttcatgggtcctgcattttctttttgggggtttgcaggagcccaataataatacttcttgtttgtttggagtttgcaggagcccagtaaataatagttctctatcttttctaaattatgacattgttgtgacaaaaaatattaagtcaagcaggcataagaaaagcaatcaaacatttattactgataaatatagtcttggaaggtgtggctttttatcagtaggcacttcctggagagtcagg

SEQ ID NO: 81498 - DNA, 1167 bp, Homo sapiens
acacacacacacacacacacacacacacacactttgcttttgctataagactttttttcctttttttttttgacaaagtctcactctgtccccactttggcctcccaaagtgctgggattacaggcgtgagccaccgcgcctggcccattatttttcttagattaaaatcatgttttctttctattttgtcctgaaatcatatttatagatatgctatttaatacatttgcaaatctttaagtagtgatctttttcccatcaaatacctttggggaatttggatttgaaagcattaggagatatttggcaagattcaggatagaaggaggctaaagaatatttgaaattatggaaagaaagcagttttcatgggataaagtatttctggatgtggcagtgctgtatattttagagataagtggaagaaaatattccagtaaaataccrtggaaatagatgaaggagctagaacattcacgtctcaccttcccaattttggctataggtttatatagaagataatttaagggacaagaaaaacaaaagactacaaatttggttcaatgtacactgctcaggtgaaggatgcaccaaaatctcacaaatccccaccaaagaacttacacatgtgaccgaataccacctgtttcccgaaaacctatagaaaggagaaaattctaaaaatgggcaaatttatttatcattctagcatctgatattagttccctgaggaagaatatttctgaccataatatgagctcaatgtgaaaaaataactcattaagatctaatcagctaatgacatcttagtgtggttgtattgttttagacctcaattcctgaaggtttttagtgaaaggcaaagtgtcagtttcatctgtgagaagatctggaacaagtcaattttagacacatttctaagattccttgagcctgatccaccatcgatcaatttttctcactttcctttctttaagaggtaaaattgggtaactctaactttctagcccagagataaatgaaccttttcattttaaactgcctcccagcacatcctttttaatgtagagagatcaaactaacaagaaatgaaattttaaaagctttcatatacgtcagctgcaatggtggtcactcgggtcttctctaccattagtctgaatgca

SEQ ID NO: 81499 - DNA, 1167 bp, Homo sapiens
acacacacacacacacacacacacacacacactttgcttttgctataagactttttttcctttttttttttgacaaagtctcactctgtccccactttggcctcccaaagtgctgggattacaggcgtgagccaccgcgcctggcccattatttttcttagattaaaatcatgttttctttctattttgtcctgaaatcatatttatagatatgctatttaatacatttgcaaatctttaagtagtgatctttttcccatcaaatacctttggggaatttggatttgaaagcattaggagatatttggcaagattcaggatagaaggaggctaaagaatatttgaaattatggaaagaaagcagttttcatgggataaagtatttctggatgtggcagtgctgtatattttagagataagtggaagaaaatattccagtaaaataccgtggaaatagatgaaggagctagaacattcacgtctcaccttcccaattttggctataggtttatatagaagataatttaagggacaagaaaaacaaaagactacaaatttggttcaawgtacactgctcaggtgaaggatgcaccaaaatctcacaaatccccaccaaagaacttacacatgtgaccgaataccacctgtttcccgaaaacctatagaaaggagaaaattctaaaaatgggcaaatttatttatcattctagcatctgatattagttccctgaggaagaatatttctgaccataatatgagctcaatgtgaaaaaataactcattaagatctaatcagctaatgacatcttagtgtggttgtattgttttagacctcaattcctgaaggtttttagtgaaaggcaaagtgtcagtttcatctgtgagaagatctggaacaagtcaattttagacacatttctaagattccttgagcctgatccaccatcgatcaatttttctcactttcctttctttaagaggtaaaattgggtaactctaactttctagcccagagataaatgaaccttttcattttaaactgcctcccagcacatcctttttaatgtagagagatcaaactaacaagaaatgaaattttaaaagctttcatatacgtcagctgcaatggtggtcactcgggtcttctctaccattagtctgaatgca

SEQ ID NO: 81500 - DNA, 669 bp, Homo sapiens
ggcctcctctcctcaactgtccccacctttcaaactgtttccaaagcccttcagcctttggaaacagaaaggagatcttcaggggcctatggaaccctgcacacacatctacccccacctcccaacttcagatagagcagcaccactttttaacattttacaagttggattctgaataaaagtttgcctgaaagaaattttccaaagaagggaagaagaggaggaataattaggctagtgagttggcacagcccattcaactttttttttttcttgagacagggtctcactctgttgccaaggctggagtgcagtggtgcgatcacagctcactgaagccttgacctcctgggctcaagcaatccttacacctcagcctctggagtagctgggattacaagtgcatgccaccatgcccagctattattttttctctcttgtagagatgaggtctcactatgttgcctaggctgatctcgaattcctgagctcaagcaatcctttcaccttggcctcccaaagtgctgggattacaggcatgcgccactgtgcctggtccccgtccactttttacacrtgatgacttaaccacggctgagaatctcagatatatttttgttctaatgacttcaagaagacagttttttcgtagcagatgttgagtaaaat

SEQ ID NO: 81501 - DNA, 661 bp, Homo sapiens
agccatgcctgataccatttaatccttgggcttttcaattacmtgagtcagtaaattatctatgtttgcctgtcagaaagggttttgtgagttctagcactgaacgaatggtcccagcaggaacaaactgcctagggatgggggcataggagtggagttggtggaggaggtttacttgatttcccctcagacatttcaccaggcatctcatcccccaagttgctaccttagcaattctccctcctttttgcagtcatccttcctattgtttttgcttgtattcctatctttttgtaaactcctccttgcttaaaaagcagcatctgagatgctggcctgaggccgtctgcccttcccaagagaatacacatgcttgctattctttacagtaaaaccaaggtccacattgtgtttccccagggctcccagaacctgagttgagaggtggggattttgcagggactccatcagtgtgcagcatctgtacctgcctccagcgactgctgacacgagcggccacatctccacactttcgccccactaccttatgtgtgccacaacccctccaacaatgcaaactcttgttcatttgctcagaacatgaatgaatcatgccagggaaactcctggccactggaccacattttgctgtgttagcaat

SEQ ID NO: 81502 - DNA, 661 bp, Homo sapiens
agccatgcctgataccatttaatccttgggcttttcaattacatgagtcagtaaattatctatgtttgcctgtcagaaagggttttgtgagttctagcactgaacgaatggtcccagcaggaacaaactgcctagggatgggggcataggagtggagttggtggaggaggtttacttgatttcccctcagacatttcaccaggcatctcaycccccaagttgctaccttagcaattctccctcctttttgcagtcatccttcctattgtttttgcttgtattcctatctttttgtaaactcctccttgcttaaaaagcagcatctgagatgctggcctgaggccgtctgcccttcccaagagaatacacatgcttgctattctttacagtaaaaccaaggtccacattgtgtttccccagggctcccagaacctgagttgagaggtggggattttgcagggactccatcagtgtgcagcatctgtacctgcctccagcgactgctgacacgagcggccacatctccacactttcgccccactaccttatgtgtgccacaacccctccaacaatgcaaactcttgttcatttgctcagaacatgaatgaatcatgccagggaaactcctggccactggaccacattttgctgtgttagcaat

SEQ ID NO: 81503 - DNA, 714 bp, Homo sapiens
ctcagtgaatttgaaaaataaggaagtgttttctggaaaggataattatttatacagtattgtttggggattttatttgaatttctccaaattataatttgtatctttgtttaaaaaagagaagagctctcaaaatgctaccaatttagtgtgtaccttactagatctttttttatgcctaaaatggtattttagcaaattactattgaattcagccttttccaatgcagctcctttttaattattttattatttttatttttcttaggaaacagtttgcccaggctggactgtagtggcaccatcatagctcactacagcctccaactccaagtgttcctcccacctcagcctcctaagtagctaggaccacaggtgtgtgccaccacacccagctaattttttttttttctattttttgtagagacagggtctcgctttgttgccaaggctggtcttgaaatcctagtttcaagytattctcccacctcagccttccgaagtgctggattacaggtgtgagacactgagcctggcccttttgaaaaataaatgcttaattattttcttttccttataactttttaaaataatgaagcagttccccaccatacgaaaatgtaatcaatatgttttttaaaaaacgtcattaacagtgcatggatttaaacacaattgatctttttataaatctaacttctttactcaaacttt

SEQ ID NO: 81504 - DNA, 714 bp, Homo sapiens
ctcagtgaatttgaaaaataaggaagtgttttctggaaaggataattatttatacagtattgtttggggattttatttgaatttctccaaattataatttgtatctttgtttaaaaaagagaagagctctcaaaatgctaccaatttagtgtgtaccttactagatctttttttatgcctaaaatggtattttagcaaattactattgaattcagccttttccaatgcagctcctttttaattattttattatttttatttttcttaggaaacagtttgcccaggctggactgtagtggcaccatcatagctcactacagcctccaactccaagtgttcctcccacctcagcctcctaagtagctaggaccacaggtgtgtgccaccacacccagctaattttttttttttctattttttgtagagacagggtctcgctttgttgccaaggctggtcttgaaatcctagtttcaagctattctcccacctcagccttccgaagtgctggattacargtgtgagacactgagcctggcccttttgaaaaataaatgcttaattattttcttttccttataactttttaaaataatgaagcagttccccaccatacgaaaatgtaatcaatatgttttttaaaaaacgtcattaacagtgcatggatttaaacacaattgatctttttataaatctaacttctttactcaaacttt

SEQ ID NO: 81505 - DNA, 714 bp, Homo sapiens
ctcagtgaatttgaaaaataaggaagtgttttctggaaaggataattatttatacagtattgtttggggattttatttgaatttctccaaattataatttgtatctttgtttaaaaaagagaagagctctcaaaatgctaccaatttagtgtgtaccttactagatctttttttatgcctaaaatggtattttagcaaattactattgaattcagccttttccaatgcagctcctttttaattattttattatttttatttttcttaggaaacagtttgcccaggctggactgtagtggcaccatcatagctcactacagcctccaactccaagtgttcctcccacctcagcctcctaagtagctaggaccacaggtgtgtgccaccacacccagctaattttttttttttctattttttgtagagacagggtctcgctttgttgccaaggctggtcttgaaatcctagtttcaagctattctcccacctcagccttccgaagtgctggattacaggtgtgagacactgagcctggcccttttgaaaaataaatgcttaattattttcttttccttataactttttaaaataatgaagcagttccccaccatacgaaaatgtaatcaatatgttttttaaaaaacgtcattaacwgtgcatggatttaaacacaattgatctttttataaatctaacttctttactcaaacttt

SEQ ID NO: 81506 - DNA, 905 bp, Homo sapiens
ttgaaaaataagtcaccattactttctgttttttccattgagattgctgagctgagcatatttcatacacagagcactctgtttgggcctcttgacaaagaaattttatttttataaacttcaccttctggagataatgataacctttccttttttactctctatattcactgtcttcttaatggtatttccatggaggagctttttataccttcatcagggtacagtaaaaatgctgccctgtgtaaaaggattatgatggtgtacagattttcactgtcagacaccttcctttgggtaaatatttatgtgaaatgaggcaccgaatttaaaatagtcctaaagaagctgcatactctccttgacaacaacaacaaagaagtttgtgtgtgcacagttggtttagcagtgtctggcatagagaaatgaagacaaaaatacactttggtcctgtaatatttatagcattgccagtttaaccgtcgtgtcctatttaggaatattttttgagtgagctttattttaatatccaagarcacagtcttaagttgctgagcgacgctcaagctaactggagaggacagagaagtacttgcgtgctgttctgtgaaggatgaagagggaacttggcgttggtggcatcttcctaaattcttgcttactccaacaaagaagacattgctaacaatgaggtagccacttgcaaatgctgtgttaagctttgtaggcttttgtaagaaacattgtcttcatgagtttatacgtgagaaaggcaagagattccgttttgtaattctgagtaatgcctatccacgtatggcagcaacttgtgtgtgtggcgctcctattatgagagagtgagccagtccacatagtgctcatattccaggtgactgcaagtgaag

SEQ ID NO: 81507 - DNA, 905 bp, Homo sapiens
ttgaaaaataagtcaccattactttctgttttttccattgagattgctgagctgagcatatttcatacacagagcactctgtttgggcctcttgacaaagaaattttatttttataaacttcaccttctggagataatgataacctttccttttttactctctatattcactgtcttcttaatggtatttccatggaggagctttttataccttcatcagggtacagtaaaaatgctgccctgtgtaaaaggattatgatggtgtacagattttcactgtcagacaccttcctttgggtaaatatttatgtgaaatgaggcaccgaatttaaaatagtcctaaagaagctgcatactctccttgacaacaacaacaaagaagtttgtgtgtgcacagttggtttagcagtgtctggcatagagaaatgaagacaaaaatacactttggtcctgtaatatttatagcattgccagtttaaccgtcgtgtcctatttaggaatattttttgagtgagctttattttaatatccaagagcacagtcttaagttgctgagcgacgctcaagctaactggagaggacagagaagtacttgcgtgctgttctgtgaaggatgaagagggaacttggcgttggtggcatcttcctaaattcttgcttacyccaacaaagaagacattgctaacaatgaggtagccacttgcaaatgctgtgttaagctttgtaggcttttgtaagaaacattgtcttcatgagtttatacgtgagaaaggcaagagattccgttttgtaattctgagtaatgcctatccacgtatggcagcaacttgtgtgtgtggcgctcctattatgagagagtgagccagtccacatagtgctcatattccaggtgactgcaagtgaag

SEQ ID NO: 81508 - DNA, 3143 bp, Homo sapiens
aggcaaacaataaaactatgaagagaaatagtgtatctttggaggctctgctcacccagggagtatagattgcagcctgcgaaatccaatggttttttttttttttttttttttttgagacggagtctcgctttgtcgctcaggctggagtgtagtggcgcgatctcggctcactgcaagcaccgcctcgcggattcatgccattctcctgcctcagcctcccgagtagctgggactacaggcacctgccatcacgcctggctaattttttgtatttttagtagagacagagtttcaccgtgttagccaggatggtcttgatctcctgacctcgtgatccgcccgcctcggcctcccaaagtgctgggattacaggcatgagccaccgtgcccggccagtcatattctttaaacataacagcagactcaaagcatgacaatgaagagcaaagctccatctattagataatggtataccaaacaataataactatctctttaaacatcatcaaagcccaaattatctcatttcatactggggacgtgggcggggaaggtatgcatgtaactttctttcctttatgtttcccagtataggagaaactagtgtgattgtatttaacaaaagaagaaaatttaagttaatgacaataaataaacatatgatatgcattcatgtattcgtgtaaggactaagccatagcatttcaatatctgcctaataatataaaatacttttagaatcaaatgctaaacaaacacaatgtgcaattttgtctttggctggacctactctaatttttattcctaaagactatttgataattggtaaaatgaagaaaatgaaaaaaaatagctttcatctctgcttaagagaaactgatgtcaactcagcaagtgtgaaagtaatgacatgagggggaagaatacgcagaagagaaaaaaaaatgaagcaaggagtgcatgggaataacagtagtcaataagctctggtacataacttttgagggcctgcaataaggagaaaccattagatagattggccactcacaagctctttcctaaaggcggaacaactacactttcttacccagacctcatcctattatatgacttcaattcttatttctgtactgacagttttcatatctataagtgcatttctgttattccattcaaactctagccattatttccaattatctttcagactcttgtattcagatatcttcctgccatttgaaactcaacattaaccacagcatcttttcttctccaaagaatgaaggcagcctcggtgattcatattgcatattttctttgaaatctctttcatctgctctatcatttttatttctactgccatgagtgctgtactctacttttttcaagcatgaattcctgaaatattcaatttgatggtctcccaaactctaaattttctctacctttattctgcttcctattgccagactcaatgaatttaaatatggctccctcctttgcagccttacrgagaactaatttccaaccatattcaatgcattatttctttgcttggcttcatttaagttttagctaatacttattaagcacagacactgagccaagtactcaacggggattgtctcatttgctatgcagaatagggtagatatagtattgttcttattttaataagaagaaaattgaagtttacagagattaactaacttgccacttgtcagacatagctagtgagagtagagtaggaatataactcatatcaaccaagcttcaaagctggtgctctgaatgactctgctatattccttgcacaccacttaccttcacttcctcctaatgtcaacatttttcctttcatttagaatcaatttatgtctctttctctcccttgcttctccttcaccatctcacctcttttctctgccctctatttctacacacacacacacacacacacacacacaaaaggtctccttatgccatcttctttacatagaacacttttttttatcttcaggttctcctctttcataagggcttccatcaatacttatcattgcatattttcctatactttcaaatcttacagtacctacagtttatcatataaattgttaacagtttgccttgcattgttcactgtattttctcatattcttatctccaaaactcattcagggctccttaatgcaaggaatttgtatttctctgtaatatatttcataaatgtacattgtcattatttctattattatacttctgtatattctgatctccaccagtatactcagcatgtaatgggtactctatagatctacgttcatatattaattccaaggtggaaactaaaatatagagctttggttttctaattcagttgaataaaactgcaactcataaccaactctaagtctttagagctagaaaagtggtttactgttaggaaagctttttgtcctctacaatttgaaggtcagaatactcaaacctgtttgaaagcaaagaaaaaaaagacaaaaagatttcttataagtaacaataaaacgattcaaaatgcatatccagtgaaaaaatatttaatattgatattcagtagataaagccactagtattctcagagaaaatgtgaagatgtgagaaaaaaacaataaattatcccaagcttcaccagaaaacaaaaatacaaagtacaaaggtaattcttagtgagaaggaaagatattttagtttaggctaaaaaagacctttgcagttgtcagaaatgcaatggaatgaaactttaccaacactggagaatcacccatcagcaatgtaatgaggtacattcctatttgagagagaggataaattaataaattctaaccttatttgtacacttttaattcttgaatctagattgataagttctttagtgcctgaaaatattcagttgaaaccagagtagatattttaaaccctggctgcacattagattctctcagaaagttttttggaaaatattagtgttaaagtaacaactatagactgattaaatcagaacctaaggacaggatctggatgatcatattattttaagtgcttccaaggtgaatttagtgtgcatctaggactaaggacactgccataaagcatggctg

SEQ ID NO: 81509 - DNA, 926 bp, Homo sapiens
caataaacagaatagcatttttgcaaggatttagatgaataatatgaataatcataacttttgagttcatttatcaccacaactgaagataccagagggaaattatcttttttaatacattkatattttcagagcagtttatgttcagaggaaattgagtcaaagatacagattcccctgcaccagctgccctcacacacgcatagtctcttccattatcaacatccacaccaatgacattttatatggtgaaattctacttagataataaatgagataaatatcatctcatacttatgaatattttgaccacaggtgggtcagttgactagaggacattattgtttgatgggtataggcaatatattccaaaattcccactattccagtgatttggcatttcagagctttgggtattgccatctcggtaaactctgaattgtagctgactggtaaataccactggacactctctaaacataaccaaaacaaaaaaatcaacctaactatagaattttctagacacaatctgaccatttacattcagagtctccctccggtcagtcttttctggttctgcataaccccctacagctgtggataccagcactcaggccattccttggcactctcttgacagaggcacgtttctcattgaaaggtggtagttaacctttcagagatggaaataggatcttttttcctgaattggagcctgcagcacataggtaagaagggagaatcttgtccattgcaaaggtagagagccagagcccttttcctgtatatcatgttcaaatctattgacaaacagaatatatcatttgatttatttctctgtatgcttctaaatgacatagtcatttatcagctatgaagtctagccagtcagttctaataatgttccaaattttgtaaaaaagcaa

SEQ ID NO: 81510 - DNA, 926 bp, Homo sapiens
caataaacagaatagcatttttgcaaggatttagatgaataatatgaataatcataacttttgagttcatttatcaccacaactgaagataccagagggaaattatcttttttaatacatttatattttcagagcagtttatgttcagaggaaattgagtcaaagatacagattcccctgcaccagctgccctcacacacgcatagtctcttccattatcaacatccacaccaatgacattttatatggtgaaattctacttagataataaatgagataaatatcatctcatacttatgaatattttgaccacaggtgggtcagttgactagaggacattattgtttgatgggtataggcaatatattccaaaattcccactattccagtgatttggcatttcagagctttgggtattgccatctcggtaaactctgaattgyagctgactggtaaataccactggacactctctaaacataaccaaaacaaaaaaatcaacctaactatagaattttctagacacaatctgaccatttacattcagagtctccctccggtcagtcttttctggttctgcataaccccctacagctgtggataccagcactcaggccattccttggcactctcttgacagaggcacgtttctcattgaaaggtggtagttaacctttcagagatggaaataggatcttttttcctgaattggagcctgcagcacataggtaagaagggagaatcttgtccattgcaaaggtagagagccagagcccttttcctgtatatcatgttcaaatctattgacaaacagaatatatcatttgatttatttctctgtatgcttctaaatgacatagtcatttatcagctatgaagtctagccagtcagttctaataatgttccaaattttgtaaaaaagcaa

SEQ ID NO: 81511 - DNA, 636 bp, Homo sapiens
gaacaagttttgtctttgtgcmctctggctggtaggaccaaatctgcagaattgtgttacatctgggcagtatcctgagtgggcttttggcaaaaaaggatggattgagaaggggtaatgagtagcaagaagcataagaaaatcatatcctgaggaatgattgacaaaactgtggaaatttctcttgaaaacaagaaaacaattagtgggaggctacccgacagcttatttagattatctacctgggctgcagagaagggttccactggatctgatgatgatactggaggcaaaactaacttcatggaatggaaatgattggcagacaaatttcaatgcaataaaaggaaaaaaataccacaattacacagtgtagttaataaaaagtaaatgaggtttattgtgatccagggaatgcctctcaactagaatcaagggctagattaagctattacttagtgtggaagctgaagaaaaaagcagacaaccctgcaattgcttttgcttttgtcacagaggtaatgcaatgcaaagctgaaatttcttagattgaaagatatttagtagtgaattcagaggatcattgttagttctccttagggtaagacataatatttgcacattatttttaaaagc

SEQ ID NO: 81512 - DNA, 636 bp, Homo sapiens
gaacaagttttgtctttgtgcactctggctggtaggaccaaatctgcagaattgtgttacatctgggcagtatcctgagtgggcttttggcaaaaaaggatggattgagaaggggtaatgagtagcaagaagcataagaaaatcatatcctgaggaatgattgacaaaactgtggaaatttctcttgaaaacaagaaaacaattagygggaggctacccgacagcttatttagattatctacctgggctgcagagaagggttccactggatctgatgatgatactggaggcaaaactaacttcatggaatggaaatgattggcagacaaatttcaatgcaataaaaggaaaaaaataccacaattacacagtgtagttaataaaaagtaaatgaggtttattgtgatccagggaatgcctctcaactagaatcaagggctagattaagctattacttagtgtggaagctgaagaaaaaagcagacaaccctgcaattgcttttgcttttgtcacagaggtaatgcaatgcaaagctgaaatttcttagattgaaagatatttagtagtgaattcagaggatcattgttagttctccttagggtaagacataatatttgcacattatttttaaaagc

SEQ ID NO: 81513 - DNA, 2089 bp, Homo sapiens
  misc_feature (1)...(2089): n = A,T,C or G
tctagatagggtcagtaaatgtttgttgacatagttttgaatccattcaaattatcaaataatgatttaaacactattattttccattttaaaacattaaaaaatgtttggaatgaccttgaggattttgaaagtaggaatattcaattgtctttatgtattacaaaagtacttgagtaaaatttgtacaagttttaattttgaacggatttagcctgccgaaagaaagttaactcaaatgtacgctctcaccccgccaacagacaaattgtttgacaagttgagtttagttatttggtatattccatctacaacgacagtcttccaaatttataccttttgttttgggcatagatcataacaaattattttaattttttcccgatagtaactatacagtggtttttgtatattttgtatatttcggaccatcactgtgctatgggattaaaactatggcatcaacgtagaagaaaatgatcatcttattccagtcttcctcagtcaccttcttccacaatactttgtgaaaactcggtatgccagacccagatgcagcacagataaggctaatcacataaacgagaaaataaaacctattccctcttatcctagttcctaatgaattgacaaaagaagaaaaagcaagagtaacatgtgcctcacygcccccacaacactcctcaagttgaaagcccaggaaagggtagaattcagtgtgggaagcaacgaaagaagggcttttaagaatcccactttacatgcagtattctgtgggcagaccacctcccagctgcctcacacaaacctcaaaataaattcagtggaatttcattgttaagctgacagaagactgaagttttgcttcctatatgataagaatgaaacaaaaattcttctcatgcttctgaagggcatggggatgtttagagtacggccagtggctctcacaagagggaatcattgaggcaggccaatgttttctcaaaactagaacactgggtccagcggccaatagcagagaaatcatattaaagtcacagacctaagggatgtctacgggaatatcaatggatgaaggggagataagccactggggaagaccatgagatactatctccattgagagaagacagacaataagttactgtgggaacataagttacaccaatgttgtcagctggagattcctgcagattatctgggacaaggccagtcatcctcagctcaactgtcaccagtctggggaggaaccttagctattggatggtaaataccagcatgatccaaagtctgcctcatggatccataaaacccatatcttctctgcaagcgtaaggtccctatcacaaaaaaactgcaacctcatatactaaaaggccacttcatgccaccttgagagacaggatttatctgaaacagagataaaattgcctaaaggaacagttttaatttcctgattagaccaaaatccataattatttatttcctcttcaactgtgagggaagagcagatgaatttataaaaattctgtttttctgaatgtatttaatacatgagtaagaattgnctttttttttttttttttttttttttttttggaaacagagtctgactctgtcgcccaggctggagtgcagtggcgcgatctcggctcactgcaagctccgccccctgggttcacgtcattcttctgcctcagcctcctgagtagctgggactacaggaacccaccaccacgcctggctaattttttgtattttttagtaaagacggggtatcaccgtgtttgccaggatggtctcgatctcctgacctcgtgatccgcccgccttggcctttcaaagtgctgggattacaggcatgagccaccgcacccggccatgagtaagaaatttacctactatctttaggagcattgtctggcatctttaaaaacctctgtgaacatataacgaggccctgttgaaagtgatgattttatttatgagcatataactgcatccacagctgattacaaacctgtaatcttaattagagagccaaggtacattgggttcatggatgcaattccaagtgaaataaaga

SEQ ID NO: 81514 - DNA, 2089 bp, Homo sapiens
  misc_feature (1)...(2089): n = A,T,C or G
tctagatagggtcagtaaatgtttgttgacatagttttgaatccattcaaattatcaaataatgatttaaacactattattttccattttaaaacattaaaaaatgtttggaatgaccttgaggattttgaaagtaggaatattcaattgtctttatgtattacaaaagtacttgagtaaaatttgtacaagttttaattttgaacggatttagcctgccgaaagaaagttaactcaaatgtacgctctcaccccgccaacagacaaattgtttgacaagttgagtttagttatttggtatattccatctacaacgacagtcttccaaatttataccttttgttttgggcatagatcataacaaattattttaattttttcccgatagtaactatacagtggtttttgtatattttgtatatttcggaccatcactgtgctatgggattaaaactatggcatcaacgtagaagaaaatgatcatcttattccagtcttcctcagtcaccttcttccacaatactttgtgaaaactcggtatgccagacccagatgcagcacagataaggctaatcacataaacgagaaaataaaacctattccctcttatcctagttcctaatgaattgacaaaagaagaaaaagcaagagtaacatgtgcctcaccgcccccacaacactcctcaagttgaaagcccaggaaagggtagaattcagtgtgggaagcaacgaaagaagggcttttaagaatcccactttacatgcagtattctgtgggcagaccacctcccagctgcctcacacaaacctcaaaataaattcagtggaatttcattgttaagctgacagaagactgaagttttgcttcctatatgataagaatgaaacaaaaattcttctcatgcttctgaagggcatggggatgtttagagtacggccagtggctctcacaagagggaatcattgaggcaggccaatgttttctcaaaactagaacactgggtccagcggccaatagcagagaaatcatattaaagtcacmgacctaagggatgtctacgggaatatcaatggatgaaggggagataagccactggggaagaccatgagatactatctccattgagagaagacagacaataagttactgtgggaacataagttacaccaatgttgtcagctggagattcctgcagattatctgggacaaggccagtcatcctcagctcaactgtcaccagtctggggaggaaccttagctattggatggtaaataccagcatgatccaaagtctgcctcatggatccataaaacccatatcttctctgcaagcgtaaggtccctatcacaaaaaaactgcaacctcatatactaaaaggccacttcatgccaccttgagagacaggatttatctgaaacagagataaaattgcctaaaggaacagttttaatttcctgattagaccaaaatccataattatttatttcctcttcaactgtgagggaagagcagatgaatttataaaaattctgtttttctgaatgtatttaatacatgagtaagaattgnctttttttttttttttttttttttttttttggaaacagagtctgactctgtcgcccaggctggagtgcagtggcgcgatctcggctcactgcaagctccgccccctgggttcacgtcattcttctgcctcagcctcctgagtagctgggactacaggaacccaccaccacgcctggctaattttttgtattttttagtaaagacggggtatcaccgtgtttgccaggatggtctcgatctcctgacctcgtgatccgcccgccttggcctttcaaagtgctgggattacaggcatgagccaccgcacccggccatgagtaagaaatttacctactatctttaggagcattgtctggcatctttaaaaacctctgtgaacatataacgaggccctgttgaaagtgatgattttatttatgagcatataactgcatccacagctgattacaaacctgtaatcttaattagagagccaaggtacattgggttcatggatgcaattccaagtgaaataaaga

SEQ ID NO: 81515 - DNA, 562 bp, Homo sapiens
taaaaataataccaatcacatattgcacctaggaattcctctaaggagagtagcaaatatcttcccatgcatgtgtgtatgcatgcatgtttacaaaaacatttgagaaaaatttttgaaaatccttaatttctgttgattttcctccatagttttatgaggctgacagtatctactaagtggcttacaaaatattttctctacctatttaattgaataactgatctaaatattggttatgaaaccayttatacagagctttattggaccatctagtatttttaggttggtctacattattagttcattgagtgaaggaacagttttaattgtctttgaactcttagacctcaacagtggtttggcaaataagtaggttgtataattcattctcacactgctataaagaactacataaggctgggtgatttatgaagaaaagaagtttaattgactcacaattctgtaggctgtaaaggagacatggctggggaggcctcaggaaacttacaatcatggcagaagcaaggggaaagcaagcacatcttcacattgctggcag

SEQ ID NO: 81516 - DNA, 562 bp, Homo sapiens
tgattacctctagggaagtgggaaatgatcaggattaagggtgtggtcaaaaagacatttacatttacttgtaaagttttatttgtttaatatgcagaatgaattaatgtattgcctgtaaaattaaaaatgcattttaagggaaggtggactaattcatctagatttatcattatctgggtttgtagtttaatggaaagcttatgataccttgcaaaattcaattatatgccggactctcttagaaaccaggaaaatgccattggtttgtcataaaattataatttaataagatgcatttctactgaattagtattgcaaytactagtgcatatgtgtaaaaatagcaaataatgcagccgcaaaattttacatttataaaccacctatcttttagagtattggtatattcccatcagtcactttaacaaaaccagcttcacattttaaaatagcaaattatttaatatatgtaaaagtgcttcctcaacattcaccatgaaacagtatttgtgaatactgtcaacaaaataaaaaaaaagtcaacttatgatacattttc

SEQ ID NO: 81517 - DNA, 659 bp, Homo sapiens
gatatacctcttgttggatatacatccagtaagaayatctaaggaaaacttgctttataattccaaagcagaaagttctttagagttttttcccaaaaattgttgtttgttttccttaaggagagtccttactggttagttcaaagtagctcctttcttcttcaatgataactaaactcattatgataataaagaaactaaagaatcttgggaactgaggtacagtaataatgggaaatttatcctctgaaaagagaatttctctcgggtctacgattgcctgcgatggaggacgacttatatcttaatgagatagtgttgggcgggaatctcacttcagatacaggacaagaaatctaatacattatctgattatgtaaggatagatttttaatcaaattatttggataagtgtgattatttagaaccaatttcaatacttgtttaaaggagtggcaagaaaaacccacaataaaagaaaggagccatctttccaaccatgttaaagaggcacaaatcaattcttgagttataccctgctatggtttgaggggatttgtcctctcaaatctcatgttcaaatttgatccgcagtgctggaagtgaggcctaatgggaggtgtatggataatgggggtggatccctcatgaatggcttg

SEQ ID NO: 81518 - DNA, 998 bp, Homo sapiens
tgcagaaaccagctatatgaaaagtagaccctcattatactgggttttgcaacctgagaatattgttattttcaatccacatttggttgaaagaaatccatgtataagtggacctgtacagttcaaacccatgttgttcaggggtcaactgtatatgaggtaacaatacaaatggctgttcaccattcattagaagcaatgggggctgatagaaaatggaacatcaatataaagcttaaaaaaccctataactttaaatttgacatcaagcaaaattgtatttctaaaacaaaggcaaaaaaagattattttagataaatagcacatacatatactaaaattggaacaatacagagaagattagcatrgcccctgcgcaaggatgacatgcaaattcgtgaagtgttccatattaaaaaaaaaaaaaaagaaaagaaaattcgccaccagcaggagtgcactacaagcatatgtgaaagtccttgaactgaaagagaatgacaccaggtggaaactaagatctacagatcttcaggaagaaacaaaatacatgggtatgaagatggcaaatatgtgggcaaatgtaaaagacacatgtacacaggcaaatgtatttctcttactttctttaaaaaacattttgttatttaagacaatctgtaacaaagtataaagaatgaatacatgttctgacagcaactggataccttgctagtagaatacaaaatggtagagccactctggtaaacaatttgacagtttcttacaatgttaaacatataattaccatcttactcagcaaaactattcctgagtatttccccactggaaatgaaaacatgttcacatgaagacttgtaattcactgttcagagcaactttattcacattagctgaaaactggaaacccaaatttccaacagtaatgtgaatggataaactgtggtatatctaaaaaatggaagaccgttcaataataaattaggaagaactaacct

SEQ ID NO: 81519 - DNA, 632 bp, Homo sapiens
tgagagctgtaggagagagctgaataccagcaactatctccccttttagccaagaagagagttaaaaagaggtcccattacccctccatttgtaccagtagttctcaagtctgcctgtacattagaatatagtgggaagtcttcwaaaatatattttcatggcaaacatcagactatttaaattagaaattctgagaaggagttctgagactatgtgtttttaaaaagttgcctaggtgattttacaggtcaaccaaaactgagaaacactgatctaaaatgtagaaaaccttgtcatcagtcctggactaaactctcttaaaatgcagccactcaccttcagcctgagagccaaagaagtacagaaaatatcaactaataagttaatattttcttattagggagtaaaatatttggtgaaaccctttggctagtctttgctggtgtcctgaaatttacagccactgtcatcaataaaaggatcaaaatatcatctggtctagtaaggggagccacctctaatttcctataacaactttcttagtgtaatgtctggtacacaatatgcctgtaataaatggtagtagttattagtagttccacagaaaatttatcttaagtttatgaacctt

SEQ ID NO: 81520 - DNA, 632 bp, Homo sapiens
tgagagctgtaggagagagctgaataccagcaactatctccccttttagccaagaagagagttaaaaagaggtcccattacccctccatttgtaccagtagttctcaagtctgcctgtacattagaatatagtgggaagtcttctaaaatatattttcatggcaaacatcagactatttaaattagaaattctgagaaggagttctgagactatgtgtttttaaaaagttgcctaggtgattttacaggtcaaccaaaactgagaaacactgrtctaaaatgtagaaaaccttgtcatcagtcctggactaaactctcttaaaatgcagccactcaccttcagcctgagagccaaagaagtacagaaaatatcaactaataagttaatattttcttattagggagtaaaatatttggtgaaaccctttggctagtctttgctggtgtcctgaaatttacagccactgtcatcaataaaaggatcaaaatatcatctggtctagtaaggggagccacctctaatttcctataacaactttcttagtgtaatgtctggtacacaatatgcctgtaataaatggtagtagttattagtagttccacagaaaatttatcttaagtttatgaacctt

SEQ ID NO: 81521 - DNA, 768 bp, Homo sapiens
attcaatatgttggtaaagattaaacatcatagacaatgaataaatgtagaagacaatatttttatagtagtaatatcatggaaatggaagaataaggcactcaaaggaactatccctccattgaaaccattcaaactggcaataactgatagaatacagtttttcagaattctagaatctaatccaaaacttacagcaaatggaagactacttaatgaagagtagggcagttgctttttagtaagagagcattgtggcatttttgctcacttgcatactatttctcattcccgagcatggtagtgatgacaccagcattcctggtgtagccattgttcactttaaaatgtttaattttatgttaaatgagtgttaccttagtttcacraaaaaaaagaagaggaagaagaagaaggtttctacagctgcatttttcaagatatgtgaccatggaatttcaccttgggaaaaacacagacaaccccaaattgaggaacttgctacaaaatgattggcctataatcttcaattatgccaagatcctgatagacaaaggaaatcagaaaaattcttccaaattgaaagaggcacaataaatgtagtgtatcctcgtgaataggaacctttttctataaatgacattagaacaactagtgatttctgactggaatctgtgaattagattattgtattttaacagtgttaatatcctaatttagatgatagtactgtgtttatgtagctgtgtccttttaaatgcatactga

SEQ ID NO: 81522 - DNA, 768 bp, Homo sapiens
attcaatatgttggtaaagattaaacatcatagacaatgaataaatgtagaagacaatatttttatagtagtaatatcatggaaatggaagaataaggcactcaaaggaactatccctccattgaaaccattcaaactggcaataactgatagaatacagtttttcagaattctagaatctaatccaaaacttacagcaaatggaagactacttaatgaagagtagggcagttgctttttagtaagagagcattgtggcatttttgctcacttgcatactatttctcattcccgagcatggtagtgatgacaccagcattcctggtgtagccattgttcactttaaaatgtttaattttatgttaaatgagtgttaccttagtttcacgaaaaaaaagaaraggaagaagaagaaggtttctacagctgcatttttcaagatatgtgaccatggaatttcaccttgggaaaaacacagacaaccccaaattgaggaacttgctacaaaatgattggcctataatcttcaattatgccaagatcctgatagacaaaggaaatcagaaaaattcttccaaattgaaagaggcacaataaatgtagtgtatcctcgtgaataggaacctttttctataaatgacattagaacaactagtgatttctgactggaatctgtgaattagattattgtattttaacagtgttaatatcctaatttagatgatagtactgtgtttatgtagctgtgtccttttaaatgcatactga

SEQ ID NO: 81523 - DNA, 768 bp, Homo sapiens
attcaatatgttggtaaagattaaacatcatagacaatgaataaatgtagaagacaatatttttatagtagtaatatcatggaaatggaagaataaggcactcaaaggaactatccctccattgaaaccattcaaactggcaataactgatagaatacagtttttcagaattctagaatctaatccaaaacttacagcaaatggaagactacttaatgaagagtagggcagttgctttttagtaagagagcattgtggcatttttgctcacttgcatactatttctcattcccgagcatggtagtgatgacaccagcattcctggtgtagccattgttcactttaaaatgtttaattttatgttaaatgagtgttaccttagtttcacgaaaaaaaagaagaggaagaagaagaaggtttctacagctgcatttttcaagatatgtgaccatggaatttcaccttgggaaaaacacagacaaccccaaattgagkaacttgctacaaaatgattggcctataatcttcaattatgccaagatcctgatagacaaaggaaatcagaaaaattcttccaaattgaaagaggcacaataaatgtagtgtatcctcgtgaataggaacctttttctataaatgacattagaacaactagtgatttctgactggaatctgtgaattagattattgtattttaacagtgttaatatcctaatttagatgatagtactgtgtttatgtagctgtgtccttttaaatgcatactga

SEQ ID NO: 81524 - DNA, 1265 bp, Homo sapiens
aggtgggggaaaggagggatataagaggagatattaaagcctggatatgaattgtgcttcgaaattcttctatcggggaattgtggacaattgttgacaattccgccatagaagacagaacagctacttgtcttgtggattctggtcaacttccgtattctttggagagtgattggcttagatgggacttccccaggagaagatgctaaatcaaggatcaaagtgcaagcagttaatttatggaacaatggtaggagagtagggaagtgaracaggaaagtgagaaggtaagcattaaggagagtgtcatcaagccagctaccaccctgagggactgggagttaatccctctggggaagatctggcagccagtgtggaaaacactcactcaaagtcatcccacctgaggggcaagggagcaccaactctttttagtcatgagttgaggactattcatggggacattaattccacaatactttgcttgcctccaaaacagcaaagtgggcttaggcaagaagaaaacactcttcggtaaagaaagactcatgctgggagttgaaatttgggtagatgtgcacagaagtggtccgggtgaggggatccgggtggtgcgttgatagcattagcaactgtgattttgcaactgaaaggaatttatggtggggataggacagcagaggacatacactcgtatatttatatacataaaaatgtatatatgcatttatttgttgcagaaatcatacctgaatggttggaaattggcacagagaagaataggaaaaagttacagttctgtttaagaaaaaataaataccacttaagacgaaataagtttccttcttcctgtttcatctgtactgctttcacccttttggaaatgggatgtagcaaagggaagatgttgttcttatgactaaatatgatttgaagataaaaatgctaacaggaattatttggcaacatggaacttgctctaagcctacctgaaacttgtgatacattttgtgataacatcataggccacaaaaatcatgaaaccatgctcatgaactagagctcatcgtgtcatgcctatcatagttttattaggtaacttgctacactgaattataaagaagaatatttatttattgggtttactttatgagccatttgctataaaggaaagtctaatgagcatctccccttggtgttgattgtattcttcttttccctacaacatacatgagcgtaaaacaacgtattttcgaatctcacag

SEQ ID NO: 81525 - DNA, 1622 bp, Homo sapiens
  misc_feature (1)...(1622): n = A,T,C or G
cccctccaagctgctcccaccacactcttcattctcggagacctcaaggaagcagtgtcaaatgcagctgcatgtctgtaagggacttctgaacgaagcctctcaccacaagattccaatgcctgcctctttgcctttcaaacctacaggggtttggaaggagtgacagttcctgagacactcataggaatcctgggaggcaagaagtcccccagcaatgnnnnnnnnnnnnnnnnnnnnnnnnnnnnnnnnnnnnnnnnnnnnnnnnnnnnnnnnnnnnnnnnnnnnnnnnnnnnnnnnnnnnnnnnnnnnnnnnnnnnaaaacttggaagcaccaaatggcctttagtaggtgaatggatgagtaagctctggaccatccagacaatggaatattattcagtgataaaaagaaatgagctggccggatgaggtggctcacgcctgtaatcccagcactttgggaggctgaggcgggtggatcacctgaggtcaggacttttagaccagcctggccaaaatggtgaaactctgtctctactaaaaaaaaaaaaatacaaaaattagccaggcatggtggtgcatgcctgtagtcccagctacttgggaggctgaggcaagagaatcgcttgaatccaggaggcagaggttgcagtgagccgagatcgtgccactgcactccagcctgggtgacagagcaagactccaaccctcccaaaaaaaagaaaggaaaggaaaggactatcaagtcaaactgaaatgcatatgattaagtgaaagaagccagaatgatatatactgtatgattctaactgwatgacattctggaaaaaggcaaaattatggagagagtaaaaaaaaaatcagtggatgccaacaggtggtgtgagagatggatgaatacacagagcacagaggacttttagggcaggagaaccactctgtgtgatactacaacagtgtatccatgtcattagacatttgtccagacccatagagtctgcaacaccaagagtgaaccctactgtaaactacacactctaggtgataatgatgtgtcaacatagatgtattgattatgacaaatgtacagctctggtgggggatgtgataacaggggaggctgtgcttgtgagggaatggggatggggtaaattgggaatctctgtggcttctgcccaattttactgtgaacctaaaactgctctaaaaaataaggtctattaaaacaattaaaaaaaaaaaaaacaggtaccaatccccttgaagattgactggactggataagtgtatgaagccccctgccaccaccaccccccagcccagccccacacacagctgtcattcctccagggggcctgttctccagcaaatgacaaaggtccctgaaccaggcccagcctgcctttgtgacagtgttgggtggaaggtccacagccccagaaggaaattctgaccatctcctgcagccccctctcaccatcctccggcttgcctccctgttcccccaaacaaacacttttccccgtggtcaccagggccctcccccgtctccatccctgcatttgtcacattgcatgtctgcaagtctcaagcctcctgataataacgatggcagcaca

SEQ ID NO: 81526 - DNA, 1622 bp, Homo sapiens
  misc_feature (1)...(1622): n = A,T,C or G
cccctccaagctgctcccaccacactcttcattctcggagacctcaaggaagcagtgtcaaatgcagctgcatgtctgtaagggacttctgaacgaagcctctcaccacaagattccaatgcctgcctctttgcctttcaaacctacaggggtttggaaggagtgacagttcctgagacactcataggaatcctgggaggcaagaagtcccccagcaatgnnnnnnnnnnnnnnnnnnnnnnnnnnnnnnnnnnnnnnnnnnnnnnnnnnnnnnnnnnnnnnnnnnnnnnnnnnnnnnnnnnnnnnnnnnnnnnnnnnnnaaaacttggaagcaccaaatggcctttagtaggtgaatggatgagtaagctctggaccatccagacaatggaatattattcagtgataaaaagaaatgagctggccggatgaggtggctcacgcctgtaatcccagcactttgggaggctgaggcgggtggatcacctgaggtcaggacttttagaccagcctggccaaaatggtgaaactctgtctctactaaaaaaaaaaaaatacaaaaattagccaggcatggtggtgcatgcctgtagtcccagctacttgggaggctgaggcaagagaatcgcttgaatccaggaggcagaggttgcagtgagccgagatcgtgccactgcactccagcctgggtgacagagcaagactccaaccctcccaaaaaaaagaaaggaaaggaaaggactatcaagtcaaactgaaatgcatatgattaagtgaaagaagccagaatgatatatactgtatgattctaactgaatgacattctggaaaaaggcaaaattatggagagagtaaaaaaaaaatcagtggatgccaacaggtggtgtgagagatggatgaatacacagagcacagaggacttttagggcaggrgaaccactctgtgtgatactacaacagtgtatccatgtcattagacatttgtccagacccatagagtctgcaacaccaagagtgaaccctactgtaaactacacactctaggtgataatgatgtgtcaacatagatgtattgattatgacaaatgtacagctctggtgggggatgtgataacaggggaggctgtgcttgtgagggaatggggatggggtaaattgggaatctctgtggcttctgcccaattttactgtgaacctaaaactgctctaaaaaataaggtctattaaaacaattaaaaaaaaaaaaaacaggtaccaatccccttgaagattgactggactggataagtgtatgaagccccctgccaccaccaccccccagcccagccccacacacagctgtcattcctccagggggcctgttctccagcaaatgacaaaggtccctgaaccaggcccagcctgcctttgtgacagtgttgggtggaaggtccacagccccagaaggaaattctgaccatctcctgcagccccctctcaccatcctccggcttgcctccctgttcccccaaacaaacacttttccccgtggtcaccagggccctcccccgtctccatccctgcatttgtcacattgcatgtctgcaagtctcaagcctcctgataataacgatggcagcaca

SEQ ID NO: 81527 - DNA, 1622 bp, Homo sapiens
  misc_feature (1)...(1622): n = A,T,C or G
cccctccaagctgctcccaccacactcttcattctcggagacctcaaggaagcagtgtcaaatgcagctgcatgtctgtaagggacttctgaacgaagcctctcaccacaagattccaatgcctgcctctttgcctttcaaacctacaggggtttggaaggagtgacagttcctgagacactcataggaatcctgggaggcaagaagtcccccagcaatgnnnnnnnnnnnnnnnnnnnnnnnnnnnnnnnnnnnnnnnnnnnnnnnnnnnnnnnnnnnnnnnnnnnnnnnnnnnnnnnnnnnnnnnnnnnnnnnnnnnnaaaacttggaagcaccaaatggcctttagtaggtgaatggatgagtaagctctggaccatccagacaatggaatattattcagtgataaaaagaaatgagctggccggatgaggtggctcacgcctgtaatcccagcactttgggaggctgaggcgggtggatcacctgaggtcaggacttttagaccagcctggccaaaatggtgaaactctgtctctactaaaaaaaaaaaaatacaaaaattagccaggcatggtggtgcatgcctgtagtcccagctacttgggaggctgaggcaagagaatcgcttgaatccaggaggcagaggttgcagtgagccgagatcgtgccactgcactccagcctgggtgacagagcaagactccaaccctcccaaaaaaaagaaaggaaaggaaaggactatcaagtcaaactgaaatgcatatgattaagtgaaagaagccagaatgatatatactgtatgattctaactgaatgacattctggaaaaaggcaaaattatggagagagtaaaaaaaaaatcagtggatgccaacaggtggtgtgagagatggatgaatacacagagcacagaggacttttagggcaggagaaccactctgtgtgatactacaacagtgtatccatgtcattagacatttgtccagacccatagagtctgcaacaccaagagtgaaccctactgtaaactacacactctaggtgataatgatgtgtcaacatagatgtattgattatgacaaatgtacrgctctggtgggggatgtgataacaggggaggctgtgcttgtgagggaatggggatggggtaaattgggaatctctgtggcttctgcccaattttactgtgaacctaaaactgctctaaaaaataaggtctattaaaacaattaaaaaaaaaaaaaacaggtaccaatccccttgaagattgactggactggataagtgtatgaagccccctgccaccaccaccccccagcccagccccacacacagctgtcattcctccagggggcctgttctccagcaaatgacaaaggtccctgaaccaggcccagcctgcctttgtgacagtgttgggtggaaggtccacagccccagaaggaaattctgaccatctcctgcagccccctctcaccatcctccggcttgcctccctgttcccccaaacaaacacttttccccgtggtcaccagggccctcccccgtctccatccctgcatttgtcacattgcatgtctgcaagtctcaagcctcctgataataacgatggcagcaca

SEQ ID NO: 81528 - DNA, 1622 bp, Homo sapiens
  misc_feature (1)...(1622): n = A,T,C or G
cccctccaagctgctcccaccacactcttcattctcggagacctcaaggaagcagtgtcaaatgcagctgcatgtctgtaagggacttctgaacgaagcctctcaccacaagattccaatgcctgcctctttgcctttcaaacctacaggggtttggaaggagtgacagttcctgagacactcataggaatcctgggaggcaagaagtcccccagcaatgnnnnnnnnnnnnnnnnnnnnnnnnnnnnnnnnnnnnnnnnnnnnnnnnnnnnnnnnnnnnnnnnnnnnnnnnnnnnnnnnnnnnnnnnnnnnnnnnnnnnaaaacttggaagcaccaaatggcctttagtaggtgaatggatgagtaagctctggaccatccagacaatggaatattattcagtgataaaaagaaatgagctggccggatgaggtggctcacgcctgtaatcccagcactttgggaggctgaggcgggtggatcacctgaggtcaggacttttagaccagcctggccaaaatggtgaaactctgtctctactaaaaaaaaaaaaatacaaaaattagccaggcatggtggtgcatgcctgtagtcccagctacttgggaggctgaggcaagagaatcgcttgaatccaggaggcagaggttgcagtgagccgagatcgtgccactgcactccagcctgggtgacagagcaagactccaaccctcccaaaaaaaagaaaggaaaggaaaggactatcaagtcaaactgaaatgcatatgattaagtgaaagaagccagaatgatatatactgtatgattctaactgaatgacattctggaaaaaggcaaaattatggagagagtaaaaaaaaaatcagtggatgccaacaggtggtgtgagagatggatgaatacacagagcacagaggacttttagggcaggagaaccactctgtgtgatactacaacagtgtatccatgtcattagacatttgtccagacccatagagtctgcaacaccaagagtgaaccctactgtaaactacacactctaggtgataatgatgtgtcaacatagatgtattgattatgacaaatgtacagctctggtgggggatgtgataacaggggaggctgtgcttgtgagggaatggggatggggtaaattgggaatctctgtggcttctgcccaattttactgtgaacctaaaactgctctaaaaaataaggtctattaaaacaattaaaaaaaaaaaaaacaggtaccaatccccttgaagattgactggactggataagtgtatgaagccccctgccrccaccaccccccagcccagccccacacacagctgtcattcctccagggggcctgttctccagcaaatgacaaaggtccctgaaccaggcccagcctgcctttgtgacagtgttgggtggaaggtccacagccccagaaggaaattctgaccatctcctgcagccccctctcaccatcctccggcttgcctccctgttcccccaaacaaacacttttccccgtggtcaccagggccctcccccgtctccatccctgcatttgtcacattgcatgtctgcaagtctcaagcctcctgataataacgatggcagcaca

SEQ ID NO: 81529 - DNA, 764 bp, Homo sapiens
atttcttagttttgataactgtccatggttatgaaagaggttaatgctagggaaagctggctgaaggcagcaagaataaagattaataattagaatagagtaatgcctggcacatagtcaatgccccatcagcatggagatgaggctgatgagagtcgctagatgggagtgagatggggaggagggattgaattgttgttgtgttgtggaggtagggtttgaactggggcttaaaggctgggcaagacttaggttaagtakcgaggcgaagcgagggtaagggagtttgggagcattcagaaggtaagtgccatgtatttgggaaggagagtgagaagcaaaaccccctgaggggcgacgatttgtgttggtgagttctgggagaggagattaaagaaatttaactttttgttaaattttaaaaaacaaataaatgatttttaataaacttatggacttgtgcaaacatcacaatccaatttgctttatcataatcacacacacacacacacactttctctctctctcttctctctatcgcacacactcataggtaattttttttctgaaccttttaagaatagcttggagacgttgaaacttttttcctttaaatatttggtgggtgttttctaagaaccacaaggctatcaacatcagaaaattaaacatcggtgcaaaactattctctactccagaattcacattcagttttcatcaattgctctgataatgtctttcatggctattttttcccaggtcca

SEQ ID NO: 81530 - DNA, 590 bp, Homo sapiens
acctatgtatcagtcgggtgcagtggttcgtacctataatctcagcactttgggaggccaaggtgagtggatcacctgaggtcaggagattgagaccagcctgaccaacatggtgaaaccccctctctactaaaaatacaaaaattagctgggtgtggtggcaggtgcctgtaatcccaactactcaggaggctgaggcgggagaatctctkgaacccaggaggcggaggttgcagtgagccaagatcatggcattgcactccagcctgagtgcaatgaaaaaaagaaaaagaaaacctatgtatctggcatacaggtcaatataaacaacaggaaaggatggataaataaatgaactagacctggagtctgctcccccattacaatgtccctatgaagccccacttttagaggcaggctggctgggggaggtcagccgagggtggctcagaaagagggaggaggctgactcaggtgccaggatgaggccttgggaggtccagcggggctttctctgactcaggaagtctagagcagtagcccagggcctgccctgtgcctgggacccaaggtccttagctttcagcaga

SEQ ID NO: 81531 - DNA, 2004 bp, Homo sapiens
ggccaggtcggggtggggacggatggcttcccaacgacagggagggaggcttgggcctttggcaacttctacctcgagtcctggtttcattggccccattctcccccaagcccttccacaggccacccatctaggggcccgtgaccccatctccaggccagccaacccactctagcacccccattctgcctcccttccctgtgcccccaggatgcccaggtctcacctggtggacctggtgctgctgagaagcctctgtctgtggaggcgctggtgtcccacagaggcagggtgaaagcagcatcagcaccctctgcccaacccctgctgggcctggaagggccacccctttccctggcacactcagggccaggaagatctgctctctgatggctctgcccacaccctaggacactgggtcctcatctcctgtaccctccagatcaggccggctggagccaaagctggggggcagggctctggcattgctgggcctctgccgagagtctgtcagtgctgaggcctgcttggcaacagtggggaaagcagcagctccctgggacatgatgagtgataagggacagaaacacacctgaaggccattccatgccatcgggcagagggctcaggatccaggagtggggaggtgatgcaggaagccaggcacacrctcccttttcccaccaacaccctgtcctgaccaaggacaattttggagaaaactcaaccaagaactggagatccaggctctctgtgggccagggtcagggttcagtctatgtctaagatcagggctcagagaatggccaggatcagggctgagtctgtgacaagtgtcagggctcagtgtggggtcaggggtaggcgagtctggaatttgaatgcttgccaggctagacctaggctctctctcacactgttcttcccctgccctaccctctcatcagagggcatctgaagacctgaaataacccatcctgatacctgaaataaattggatgggaactctggcctcacatcaataaatgtttcaacaataatactttgaaaacagccacagtgtccaggacaggatgggggttgggccccgagggttgggtgatattccttctgtcatgagccagcttcagccccctgggccagggcctccctggccctctagtccacgacagcattccccttctcctctgagctccagagccttgctaggcctgcagtccaggtgcagttacaccctgctgttccatggtagagtcctgcccctctccacacccctccatgcgcctccctgcacagctgagcacagaggggacccttctcccactgaccgttcagggccgtggcttcccagctgctccattccacttggctccctggggcaggaggagggggctgcacgaggctcatcctgtatccctcctccagggccagaggaggggctgtgtggaaccccaaagggtcctggagagtagtggggggcagcgggcaaggtggggccccaaggggaggagcagaacagaagcaggtcactcgggggctgagccaggaagacatttgcctagacaaacgggccatggggccagcagatgatgcactttgcctgtgtaccttccagggcaggcttccctagctgcagggatggggggccaggctggcctgctctttcctgcctcccagcccaagctccggtggaggcggggcggcattccatcttactctcctgtgtggcccttggcaagtgcctgccagatccagaccttaatctcctatctgttaccttactcatcagagagaagtgctctgaaggtctgggggcccaggccccttgatcaggacagaacttggggctcacaggaagaacagggaagaaagggttggggaacctgggaccctgcacatcgtctgcaaattctgaattctccatgtggcattcaaggcctcggtgcttcagctgcagcctgccttgctgacctcagtcctggggctgggtggaccaggaagtgc

SEQ ID NO: 81532 - DNA, 751 bp, Homo sapiens
cctttgggaacaataagcagaacgggtagagatggagtcattggaagaagagataacaccagttaaactgtgttgctggtcctagctacttgtgtcctgtaggcagaactgtggtgtsatgctttctctgatggttatctccttggcttaatagcctagttatggctgtttgcttaaacacacatacgcacacgcacacacaagcttaagcaggaagggaaatttatgaggagaatacaaggaacccaagaacaaagaatagagtagctggacttcctggaagactggagtcagctactattaagacattgagaaccaaacctgctatatttcctctgtcatcctgggaccacatattctctcacctctgcttctttttgaacatgactagattctcctatctattaaatctattggcttctctccatttctactgccatgacccgactttaaagtactacccaccctttttttgcctggaaaactaaaatggtcccctaatttttctccccaaatcgactcttggccatttcaaaactgttttcctcattacagccagagtaacttgtttaaagtgaaaaatttattcagtggtatttccattactgctatgataaacatcaaaatcttttttaaattttattttttgagaaagggtcttgctgtgttgacaagacaggtctctaactccaagcctcaaacgatcctcctcccttagcctcctgagttgctgggattacaggaacaagcc

SEQ ID NO: 81533 - DNA, 751 bp, Homo sapiens
cctttgggaacaataagcagaacgggtagagatggagtcattggaagaagagataacaccagttaaactgtgttgctggtcctagctacttgtgtcctgtaggcagaactgtggtgtgatgctttctctgatggttatctccttggcttaatagcctagttatggctgtttgcttaaacacacatacgcacacgcacacacaagcttaagcaggaagggaaatttatgaggagaatacaaggaacccaagaacaaagaatagagtagctggacttcctggaagactggagtcagctactattaagacattgagaaccaaacctgctatatttcctctgtcatcctgggaccacatattctctcacctctgcttctttttgaacatgactagattctcctatctattaaatctattggcttctctccatttctactgccatgacccgactttaaagtactacccaccctttttttgcctggaaaactaaaatggtcccctaatttttctccccaaatcgactcttggccatttcaaaactgttttcctcattacagccagagtaasttgtttaaagtgaaaaatttattcagtggtatttccattactgctatgataaacatcaaaatcttttttaaattttattttttgagaaagggtcttgctgtgttgacaagacaggtctctaactccaagcctcaaacgatcctcctcccttagcctcctgagttgctgggattacaggaacaagcc

SEQ ID NO: 81534 - DNA, 511 bp, Homo sapiens
ctttgaaaatgtctccattatctaaagaaaataaaaagtcaaccagatacgtagacatagtcgtattacactgagaaatggtctaaagaagcaacaattgttatctattatccaggtatctgtttgtctcttccacgtgactgtgagccccttgggaataagaaccatgtagagttcacctcagctcccccagtaactagcatggtatctggaacattgcaractttaataaatgtttaaagaataaataaattaccaaaggagtgaatgagtacagtaatatgtttattagtaaatactagaaggaattagttctaataaattacattttaaagaagttctaataatatcacatttaaaaatcctgtattaatatatgttctaataatatcatagttcttataatatctagttctaaaaatagaatgagatagttctattagttctaataatatcacattttaaaaccctgtattaatatatgttaacatcaaaattgctttcttattca

SEQ ID NO: 81535 - DNA, 1822 bp, Homo sapiens
ctgggcctttccagcctggcaaagaaatccaaggcacaaaatatggttagggctcttagatacagtgatttccaaggatctttgtgctctgacttccaagaccctgcatatctatttcccgagggccctaccattagcataactatgaaactgaatttgctgatcaaattgccttttttttttttttccaatcaggaaatatatccaggccgcggcagcctytccaaactcccgggcttcccacagaatgcgctcgaatgacactggaaagatttcaaaaatccaggcctccccctgttttaattcctttcttcccccaacagatgttgcaggcctggtgaggaagcccatcgtgtgtgactctcacgccactgacggggtttcgtggtgcggccaaattcctctatggccatccccagcatcagtccttccagattgaggaagccccttccaggaatgagctccatatttaaaggagtggaggagatgaacacctctccaccttggagccaagaggttaagctttcaggaggccccagggctgggcaggaaggattgaagctgtccctctgcccatccctcagagctgtttctctggactttaattgaaggtcgtgatcctcaaaccttcattttaatgactagttgcaacctcttctcttcttcagaccttgacccagcttctcaaccagccagagccactggtttggatttcatcttctatataatttagggatgcctagaccaagggaccttggcaagtggtaacacttctctggcctttggcttcctgatctataagctgatgggaacacgagcaacgactgccaagggctcctccagttttaatgtcctgggggagcagtcacataacctctttgggcaaatgcaccaaaaacctgtgtgtagagtcaggctgtggggaaaagctgtcgtgactatgatccacagctttctcatttacagacttccccgttctgagggtcaccgtccacattcgtgaaaggggtagaggactgaacctacctctggagttgttctgagaattacacgaggtggtgcatggagggtgctgggcaaagggcttggcacagagtaagggcccaataaatggagccactcattcagagaccgttgctaactaacctgctctcccacaggccccggccgaccaggatcccctggttccccctgcaaagagacaaagaggaggatggattgggatgggagatgaaagtctagacctcctggggaagtcccaggcctgctggccttagctgccattagtggggatgaaccagggatcttatctccagtgtgtggccttggagacccccaacaaatgggcagagtcaaaggggtacttggacagaacctcaggcagacatgactctagtcacccattccctctgagggggccttggcttactcagcacctggatgtgtatgtctcatctaggtccttcagaagcccattgcattttgtggaggtggaaaatgaggcccagagaggtgaagtgacctgcctgaggtcacacagtgagccagaggtagggctagaaccgaaaccttggtctgcccggttgaaatgcacattctgggccaggtgcggtggctcacgcctgtaatcccagcactttgggaacccgaggcaggcgaatcacctgaggtcaggagttcgagaccagcctggccaacatggagaaaccccatctctactaaaaatacaaaaaattagctgggtgtggtgctgcatgcctgtaatcccagctactggggaggctgaggcaagagaattgcttgaacccaggaggtggaggtt

SEQ ID NO: 81536 - DNA, 1822 bp, Homo sapiens
ctgggcctttccagcctggcaaagaaatccaaggcacaaaatatggttagggctcttagatacagtgatttccaaggatctttgtgctctgacttccaagaccctgcatatctatttcccgagggccctaccattagcataactatgaaactgaatttgctgatcaaattgccttttttttttttttccaatcaggaaatatatccaggccgcggcagcctttccaaactcccgggcttcccacagaatgcgctcgaatgacactggaaagatttcaaaaatccaggcctccccctgttttaattcctttcttcccccaacagatgttgcaggcctggtgaggaagcccatcgtgtgtgactctcacgccactgacggggtttcgtggtgcggccaaattcctctatggccatccccagcatcagtccttccrgattgaggaagccccttccaggaatgagctccatatttaaaggagtggaggagatgaacacctctccaccttggagccaagaggttaagctttcaggaggccccagggctgggcaggaaggattgaagctgtccctctgcccatccctcagagctgtttctctggactttaattgaaggtcgtgatcctcaaaccttcattttaatgactagttgcaacctcttctcttcttcagaccttgacccagcttctcaaccagccagagccactggtttggatttcatcttctatataatttagggatgcctagaccaagggaccttggcaagtggtaacacttctctggcctttggcttcctgatctataagctgatgggaacacgagcaacgactgccaagggctcctccagttttaatgtcctgggggagcagtcacataacctctttgggcaaatgcaccaaaaacctgtgtgtagagtcaggctgtggggaaaagctgtcgtgactatgatccacagctttctcatttacagacttccccgttctgagggtcaccgtccacattcgtgaaaggggtagaggactgaacctacctctggagttgttctgagaattacacgaggtggtgcatggagggtgctgggcaaagggcttggcacagagtaagggcccaataaatggagccactcattcagagaccgttgctaactaacctgctctcccacaggccccggccgaccaggatcccctggttccccctgcaaagagacaaagaggaggatggattgggatgggagatgaaagtctagacctcctggggaagtcccaggcctgctggccttagctgccattagtggggatgaaccagggatcttatctccagtgtgtggccttggagacccccaacaaatgggcagagtcaaaggggtacttggacagaacctcaggcagacatgactctagtcacccattccctctgagggggccttggcttactcagcacctggatgtgtatgtctcatctaggtccttcagaagcccattgcattttgtggaggtggaaaatgaggcccagagaggtgaagtgacctgcctgaggtcacacagtgagccagaggtagggctagaaccgaaaccttggtctgcccggttgaaatgcacattctgggccaggtgcggtggctcacgcctgtaatcccagcactttgggaacccgaggcaggcgaatcacctgaggtcaggagttcgagaccagcctggccaacatggagaaaccccatctctactaaaaatacaaaaaattagctgggtgtggtgctgcatgcctgtaatcccagctactggggaggctgaggcaagagaattgcttgaacccaggaggtggaggtt

SEQ ID NO: 81537 - DNA, 2300 bp, Homo sapiens
aatattcatgatcaaggacaggaccctgagccgagctccatcagggcagtctggagccttgttcttagggaactcactgtctggcaggggacacagtacaagtcccccaaaatcagaggagaaaggtggcaccaccagtgaggggaggacatgcctctcagagcatctagagagggaaatggccactttctgagcaggtggggaaaaagggctctgagcagggtggtgtggagaggctgggtgragggggtcccgggcgggtagcagtctgtgtgtgtgtgtgtgtacagaggcccacggcaggcggttcagtggggctggagtgcagagctgtaaggcggggagcaggagaacatcagagagatgcactcactggggtcctgatgtctggttagggagccagggtgtcattctgagagcaatagggagccatggatggtgtgtgagcggagagcagagctttgccctcagaagaacaactgggtagcagtaaagaagaaagagagaaagcaagaggctggggcccagaaataagttaaaaggtcacactgtaaagtccaaggaagagatgacaagaggatcaaggatggagaagactggattatttcgagggcagccgtcttacaggtgggtccttgctcatgatggaccctaggaaggaagccaggaccaggggaacagcagggcaggggcaggggcagggggaggggaaaatctcatgcaattaccttgtctccttggaatccgggatctcctgacacacctggaaccccttgttcaccctaagtacacaccagcaaagaaggttacaatggaggccacgtgggttctggaagcctcccccacagaccccctggcgaggtacagctgtgccgaggctgtttcccaagtcggatccggccagcagcagccttgtgagaggaaaggacgggcccctggcgaggaaagcaggcggtggcggggggtgagctggccaatgtgcagacttgcctggggctgctcggatggctgaaaatgccactaacagaagctaagctgcccactgcccagtgtcaactggccttgcctggagaactgatgcagagcaaatcaagtgtttgatccttcaacctcttcatcattaacgggtgttgtcacacaggggtgaaggcagcgtgtgcaagggcccccacaccaacgtggtttcggagcgtttgtgtctgctcaatttttcaccatcagactgagctgtcacttcctcctcatgtgggagtttctgtgccagcaagcagctttggtctatttttttttttttttttttttttgagatggagtctcactctagttgctcaggttggagagcagtggtgcaatcttggctctgtgcagctttgacctcccggactcaggtgattctctcacctcagcctccccagtagctgggactacaggcgcgtgccaccacgcccagctaattttttttttttttttttgtatttttagtaaagatggggtttcgccatgttgcccaagctggtcttgaactcctgaactcagatgatctgcccgcctcgtgctgggattacaggcgtgagccactgtgcctggccggtctacttctaattaactattttaatcagctatagcatgggaaatcagatttcctggcttgttgagactatgtgtaaacagcgagtaaattggtcttgacttaagtctgggtgtttgtcttctaacacgatgtactgcacaggcttcgtgacactgattctggctgctggaggcctcttctgctccctccctgtttttagccatattctgaacaggcagtccagattgggagctgcttccccttagggccgaaaccacctcacacagccctggcctcactctatccagccctccacgttggacattactgacactctgtcagccccaggattccgaaaacatttacatccctgggagcaggaggaagaatggggagaaaaacccaggaaaaatggaaaaccttagaaaacccacacatggctaaggccatgacctaacaaaagaacttccttagtagaacaaaagtcagaattaaaaaaaaaattttttttcaacttactttggtttttccaatttggaaaatcctgtacaacatcctggtatttggggaaccacaggactttttttttttttttttttttttaatgtccaagagaggagtgaaggggtgaaaaaaaggagtgaaaatagaaaaacaaggaaagtttaaaaggcacctaggaaatcaggacaatgaatttgaagggagctgggctcggagcaggagcttt

SEQ ID NO: 81538 - DNA, 703 bp, Homo sapiens
caaggggggcagaggtgggttgtggctggaggcttgggcatgacaggaggagatggaagaggtagaaacaggtagagaaaggactggggttggcatggcacccagctggctacccagggataggcttgagtaaaacaatctggagatgtccattttcacccagcaattctaatgttctaagagtccaggggcctgcaaatctctttctctccctgggtcttggtttctccatctgtgagacgtaggaactgtgaaatgtgacctcccagagtctcaccagctctgaccttctgacttagttctgcttcacagttgaggtctctggagccaggtaactttctacttaccagctgcgtggcctcaggcaagcttcttttttgagagggagtcttgctctgttgcccaggctggagtgcagtggcacgatcttggctcactgcaacttctgcctcccaggttcaagcgattctcctgcctcagcctcccaagtagctgggattacaggcacccacsaccacgcccagctaatttttgtatttttagtagagacggggtttcaccatattggccagactggtctcgaactcctgaccttatgatccgcccgccttggcctcccaaagtgctgggattataggcatgagccactgtgcccggcccaagcaagcttcttatttcatagtgggtaggaggattaatgggt

SEQ ID NO: 81539 - DNA, 1919 bp, Homo sapiens
ggtgtttgtccaggaatcacccctcatggtgaaaactgcgtctcgaatatgcacagcacttcatagtttatagagtgcttttacacccgttatctcttcgctgatgtccagctgacagtgatgatggtggtggtgaccaataatagttagcttttatccagcattcacatgccagacacactgctaagctatttacatggtttatctctttcaatccttgcagtaatcctttgatcctgattttacaaacgaggaaacttgcccagggtcacacaactattcagtagcggtagcaagatttgaacttaggcagcataacccgagggttgagggaggcatcgtcccctgagcagagaatcttggaattagaaggagccagaaccccaggttcacacagcactgwctcactcggtggtattagggagtctccacctgtctgcacttcagttgtcccatctgtaactgaagagggttaaggaaggtgacttgcaaggctcctctgagcactggcagatgtctgaggatttggggcatctctaggaacccccagagactgttctgcatgagattcacaaggacgcccacccccaggggtccagttagcccctggagtgtggtcttaggcagagcccaggtgagggccctttgttgaaaacccgactagccacctggaacaggctgtctgcctctgagaggagaacaggtggccaggacgacaagccagaaatggaatcccagagccagaggagtctgcaggagagttattcaggccagccccctgtcttcatgccaggctgtgcttagaagctgaggctcccagcaggaagggatccgggcacaactttgtgcccagatctgctctacattggcccacgcctcagctcggagtcttctgcctttatctgtgccatctctggaccgctccattggaaaatcttcccaactgaactagaaactgccccagcaactccctcacacccacctcctgccccagagctcaggcctcagcaggcccagcttgaagcaatgagcaatcatgagttgctttcttgagcctctcttctaggcagggccaagccccaggctccagcttcatgccctctgcttcctgtgctctctctcctctggatgcacaccagtttatcagtgtccctcgtaaaccttggcactgggggacagaactggtaaagacacactatgcttttccaagcctgctcttctcgcccatcccttcctgatggacgccgcccctcagcagccatgcccgtgctgcactccacacctgctctgctcacggtgatgagggtgacagcccacgccccatcctggaatcctgcatgccccatcctggaaccccacctgcccccaatctctctcagagtacgcaaagattaccgtgatgagataaggcaagcttagagtgacactgattgcttcaaaaccataaaaagcccatgccagcctggtgcagtggctcacacctgtaatcccagcactttggaaggccaaagtgagtggatcatctgaggtcaggagttcgagaccagcctagccaacatggtgaaaccctgtctctactaaaaatacaaaaattagccaggcatggtggcgcgtgcctgcagtcccagctagttgggaggcgggggcacttgaacctgggaggtggaggttgcagtgagttgagatcatgccactgcactccagcctgggcaacagaatgagatccgtctaaaaaaaaaaaaaaaaagcccatgccaagggttgcctttccaaggaaataacctcaggtgccccaaaggtccgaagccccaagaagaccttggttacagccctatcactgtaaagaggatacgctcaggatcctgcttcaaagtccagctccaccgctagccagttgtgggcctctgggccagaccact

SEQ ID NO: 81540 - DNA, 1120 bp, Homo sapiens
aatgcaaagtgaaaccactgcacaccctctaacatcaaaaaggacagatagcaacaagtgttgacaagaatgtggagaaactggaatcctcagcactgctggtgggaatgtaaatggtggagccactgtggaaaacagtctgacagttcctccaacagttaaacccagtgcctagcccagggctggcatcctcatctttggtacccatgtaccagttggtgcctttatctttwttttacagatgagcaaagcggagctcagagaagctaagtgattcaggaggcagtagaatgcaccagccttagcagctcaggccctggagccctgccccaaatcccagtcattctgctgggctactcatgggactctggacaagctaagtcactttgcaaggcctctgttttcccacctaaaacgaccacagttagcaacctctcagcttagagctgatggaaaattcaggtaaaaagctggcactgcctggctccggtaagtgctccataaacgtgagctcctaagacccagagtcagacagctggaaggggcagccatgggttcacacctgggcccgactctccccacatatctaatgtgtgctaattggcaagcagcagatgctgataaaataatctgaactgtatgaacgggcttcttgcatccccaaaacagcagcctgcactccctcctctagggaccgtctggtgtaagtaactacagaggctcctcaaattacgatggggttatgcccctataaacccgctgtaaagtcgaaaaatcataaatcgaaccattgtaaaagtagggactgtctgggctgggttttcatacacccccaccttctgttaatttgatgaccaacttggcctgaaagttacccaaaactctccctagggccaacactgaaaaagtccctctgggctggaaagtctcggctgcaggggctatgggacggctgcccagcagggggcagcacaggcccactccgctttccaaactacactggtctcaaccactgggcccgttcagtcctgctgaccagcagctggagaaatttcagggtgtcaccagcgcaaattctagcagcattagaagcaccatcattattggcaacttctatgta

SEQ ID NO: 81541 - DNA, 3385 bp, Homo sapiens
gagcgctgagatgaggcccgagctgctacaaacacgcacttccacgcagagcgtccaggctggggcggcagggcgaggatacagaagtgttgggaggggggacgggccaaagtgaggtattaaataataaaaatcaaatccaattcccaaagagacacaactttaggagagaaatacacaaatagagactttcacatacattttccccttctataaaaataattccatggttaaaataacctcaaaatccaattcaagcgccracttgttcgctgatgtagcacaattcagaggacgctgaacgtcactatggtgtcgaactccgagattcccattattattctgtctccttgacccaaatttacacttggagctaatgacaatgggtttctacagaatttaatgacaatgaaaaagcaggaacgatgattgcatcttgcaaggacaggctcctggaagtgaggacctcggaagaggcgatgcggcttcctgagatggttccatgttgatgcttcacctctaagcctagccctgacccaacgccgcttttgtgattggtttcttcaaggtcaagttttcacccaagacctctccagggcacgccttccaaggccagcctcacctccctccaggaccgtgaagggccaagccaacatgcttcgcacccaggcctccctgctgccttaaaaggacagacatttcaaagtccataagttatatggtaaatctctctacttctggtttctggtagggtttttgtttttgtttttgttttgcttttttttttttttttccttttttcttttcttttttcctccttagcagattacctgatgagcacaagggcgatgctaggaaaattcaaaaattccccaaactttgtcatttggaggagagagaaagatgcggatgatgccccacatccaaaagtttcttcaaagtctgtggcaaaataatggtagcaccttcagaatcttaaatagggattttttttttttccttaaaaaaatcacatacactgtgagagacaattgtgagcaccagcgatttcacagtgggaggtagcaaacgtgggcacccccagcccgaggatctcgccgcttcccacgcctggctgctccttcccatcctctcacctctttcccgggtgaaaaaaaaatagtaacgcaccttctttttgtttgtttaaataatatatatatacacttctgtctttccttttctccttttttcatgtctcctttctaatattgcacatcaatagctccctagcagggaccagctgacgagacgcccctttccctcaagttggcttgaatgtggggctctttgggcaggaagctggggagggaacggggtggccgcagagctgagaggccacggggctcaggcaggttgcaggtccagcttactctggctggctctttggttggtctttggggctaagctgggatccattgttcccaaggacaccctatcccctcctacccccacccacttctactgggcagacaacagctggggtctgcccaaggacccttgggcaggggagctgcctctcctggagccatctgcccctcagtaccctccccttgcctcttcctcttccctcctccatgaggcctagagtggccacgaggtcagaggtcagaggaagcacgcaggtccaacttccaggcggtactgcttccctgatgaggcaggagggaggttgtccacactgatgatgggcagctgttgggggtcttgggtccggaaggtgaagagtgtctgatgccagcggccatcttggacctgaaggcagaaggaaaagtgcacacgtacatccatcgtgattcttatcatacatcatgagcattttcccttccatctttcctcacaatttttaatggctatactgtatttcattgtagcaatgacctatatggcacatttagattgcttccactctttttattcttgtaagtaatgctgtcatgaacatcactgtaactaaacctttgtgtgcattcttatttccctagaacaaattctagaaggattgttctagattgctagaccaaaaaacaagtacatctcatatacatatatatatattttttaatttattttttcaataagtttttggggaacaggtggggtttgggtacatgaataagttctttagtgtacacggtacccaatgtgtagtcttttacctctcacccctctcccacccttttccctaagtcctcaaattccgttgtaccattcttatgcctttgtgtcttcatagcttagctcccctgaaaataagtacatttctaaggttttggatatatattagagctgctatccagaaagcctctaccaatttattttcttccaacagcttcatgcgagattgttggtttccccacatcctcatgaacactgtgtagtattattagttttgtttagtcttataaaactgatttttgccttttctcaactttctgtcttcccctcccctgacaacccaccctgttcaggacatttgaaaatgaccaaaaaatataatgagaagaaattagcctgactagggtgggagcaggaagaagaaatgtatcttctttgaaagagccttgcaagtaagtacaacatctactagcccaaagaatttttaccagcccagacctcccctcatagcttcccagagaggaaagtgagtaaaaacgattttagaaaactgttatattacacaaagatgaaatcatatctatcacattaatatagtatactattaaaatgttagatataatcttataatagaaacacatttttccaaacaagtgtttttccagttgtccccacatgaagggcctaggaggggctctgagagttaccttgcagccatccatggacacctcgggccggaactgacccccagcttcaaaaatctgtccattccaggcccggaagcgtacggcctgcttggctggggtctgcccagtgccctcctgccacacggtcatgttaaggcagtggatggtgatgtgctgggtcacctcggagcttagcaggtgcaggaaattcatctggacccggctgatggcaaactcgacctatagagaagcaacggcagtgagcggctcaggctgccccccacacccccccacaccgagggttccctgcctctctatggagggaacagggataggccccttcctggcaagcatttcctgatatgctcccagacatgtgcccacttgatagacggggaaactgaggtctgcgtgagctggtcttacaggttcttggctgcgtaagtgggaagggcctgcctgactccagagccagagcttcaaagatcttggtgccatctgatccactcccttactgtatggggggtctttgggctgagcta

SEQ ID NO: 81542 - DNA, 3385 bp, Homo sapiens
gagcgctgagatgaggcccgagctgctacaaacacgcacttccacgcagagcgtccaggctggggcggcagggcgaggatacagaagtgttgggaggggggacgggccaaagtgaggtattaaataataaaaatcaaatccaattcccaaagagacacaactttaggagagaaatacacaaatagagactttcacatacattttccccttctataaaaataattccatggttaaaataacctcaaaatccaattcaagcgccaacttgttcgctgatgtagcacaattcagaggacgctgaacgtcactatggtgtcgaactccgagattcccattattattctgtctccttgacccaaatttacacttggagctaatgacaatgggtttctacagaatttaatgacaatgaaaaagcaggaacgatgattgcatcttgcaaggacaggctcctggaagtgaggacctcggaagaggcgatgcggcttcctgagatggttccatgttgatgcttcacctctaagcctagccctgacccaacgccgcttttgtgattggtttcttcaaggtcaagttttcacccaagacctctccagggcacgccttccaaggccagcctcacctccctccaggaccgtgaagggccaagccaacatgcttcgcacccaggcctccctgctgccttaaaaggacagacatttcaaagtccataagttatatggtaaatctctctacttctggtttctggtagggtttttgtttttgtttttgttttgcttttttttttttttttccttttttcttttcttttttcctccttagcagattacctgatgagcacaagggcgatgctaggaaaattcaaaaattccccaaactttgtcatttggaggagagagaaagatgcggatgatgccccacatccaaaagtttcttcaaagtctgtggcaaaataatggtagcaccttcagaatcttaaatagggattttttttttttccttaaaaaaatcacatacactgtgagagacaattgtgagcaccagcgatttcacagtgggaggtagcaaacgtgggcacccccagcccgaggatctcgccgcttcccacgcctggctgctccttcccatcctctcacctctttcccgggtgaaaaaaaaatagtaacgcaccttctttttgtttgtttaaataatatatatatacacttctgtctttccttttctccttttttcatgtctcctttctaatattgcacatcaatagctccctagcagggaccagctgacgagacgccccyttccctcaagttggcttgaatgtggggctctttgggcaggaagctggggagggaacggggtggccgcagagctgagaggccacggggctcaggcaggttgcaggtccagcttactctggctggctctttggttggtctttggggctaagctgggatccattgttcccaaggacaccctatcccctcctacccccacccacttctactgggcagacaacagctggggtctgcccaaggacccttgggcaggggagctgcctctcctggagccatctgcccctcagtaccctccccttgcctcttcctcttccctcctccatgaggcctagagtggccacgaggtcagaggtcagaggaagcacgcaggtccaacttccaggcggtactgcttccctgatgaggcaggagggaggttgtccacactgatgatgggcagctgttgggggtcttgggtccggaaggtgaagagtgtctgatgccagcggccatcttggacctgaaggcagaaggaaaagtgcacacgtacatccatcgtgattcttatcatacatcatgagcattttcccttccatctttcctcacaatttttaatggctatactgtatttcattgtagcaatgacctatatggcacatttagattgcttccactctttttattcttgtaagtaatgctgtcatgaacatcactgtaactaaacctttgtgtgcattcttatttccctagaacaaattctagaaggattgttctagattgctagaccaaaaaacaagtacatctcatatacatatatatatattttttaatttattttttcaataagtttttggggaacaggtggggtttgggtacatgaataagttctttagtgtacacggtacccaatgtgtagtcttttacctctcacccctctcccacccttttccctaagtcctcaaattccgttgtaccattcttatgcctttgtgtcttcatagcttagctcccctgaaaataagtacatttctaaggttttggatatatattagagctgctatccagaaagcctctaccaatttattttcttccaacagcttcatgcgagattgttggtttccccacatcctcatgaacactgtgtagtattattagttttgtttagtcttataaaactgatttttgccttttctcaactttctgtcttcccctcccctgacaacccaccctgttcaggacatttgaaaatgaccaaaaaatataatgagaagaaattagcctgactagggtgggagcaggaagaagaaatgtatcttctttgaaagagccttgcaagtaagtacaacatctactagcccaaagaatttttaccagcccagacctcccctcatagcttcccagagaggaaagtgagtaaaaacgattttagaaaactgttatattacacaaagatgaaatcatatctatcacattaatatagtatactattaaaatgttagatataatcttataatagaaacacatttttccaaacaagtgtttttccagttgtccccacatgaagggcctaggaggggctctgagagttaccttgcagccatccatggacacctcgggccggaactgacccccagcttcaaaaatctgtccattccaggcccggaagcgtacggcctgcttggctggggtctgcccagtgccctcctgccacacggtcatgttaaggcagtggatggtgatgtgctgggtcacctcggagcttagcaggtgcaggaaattcatctggacccggctgatggcaaactcgacctatagagaagcaacggcagtgagcggctcaggctgccccccacacccccccacaccgagggttccctgcctctctatggagggaacagggataggccccttcctggcaagcatttcctgatatgctcccagacatgtgcccacttgatagacggggaaactgaggtctgcgtgagctggtcttacaggttcttggctgcgtaagtgggaagggcctgcctgactccagagccagagcttcaaagatcttggtgccatctgatccactcccttactgtatggggggtctttgggctgagcta

SEQ ID NO: 81543 - DNA, 662 bp, Homo sapiens
acccagtaggtacctgcaggcagcgtgggatggaggtgatgtatgtatctgggggatgagcccattccttggttctgtagatggaccctgcatcttgtgacctgccgagccccaggtgagcatgaagtcaggktgggtgagcagaaaagggattcctccaaccgagatggaaggaaaccttctgggcagagctcacaactggcagagcccccagaggaggggtcacatggctaagtacttgcctatgttgctactgggatgtatccattttacagagaagacaactgacattgagagaggctgggtcacttgcacaagggtttgggggatcacctagttgaatggattcttcgaggcctagggctcctcctagggcctgccgggggagggtaggagtcaggtctcccaccccatcagccagcgctgctgcttacatctagcttccccactgggcttctcaggaagccaaaacctttgcagctcaagagtggaacaaccagccatctagtcccagccgcttgtgcagaggaggcaagggcagctcgggatggggccgtggcttgccccagctcacagaccaagtctgaggcagaactgacattggaactcaggtctgtctggctccgcagcttgtccttcacagcaccacatcagctcacaga

SEQ ID NO: 81544 - DNA, 2472 bp, Homo sapiens
ttccatcctctagctcagggcctggaacacactaaatcctccataagtacctgttggagagctggaggaatgaacgaatctaataatgccttctaagtgagaaaaggcatctggctgatgaacatgttctgcccccaccttgacctctcattcccaaggaccccaccacttgatgaggcactcaaggctcagggaatcctggggacccccgcaaggcccctgcagccttagggcagatttggtgttagggtcccattctcagcagccacagagactgcttctagagctgcagatgctccggcgcagaggccttggggcacaccagggcctccttgtttcagagtctgtgttaaccccttctgtgccagccctggcaggctgcgagggcccaggagggacccggggtactgagtggcaccttctgtggcttcctgtggaatcggctggggcgggtggccgtctaccatggctgagctgtcctcctccagcacgaggaaggggtcggctgggcagcacgcccgggccagcgtgagtcaccaacagcaggatttagttagtggggagctgactcagcaaaagaaaggcgtgctggggaggcagggggcaagcgaagcgttccagctgagccagcaggggaggggaggaggaggaaagacaggagggactcaggcgacgaaggtaggacttagacacgtgggttctggggccagtttgggattgccttggacgtgacaccacaccaacaccttggaccttctggcactcctggccctccacatccccactggcatgggggggcagggtccagggatcagcgaggatccttccagcaattcctctcctctactgaatcttgagccaaggcgtggggaatgaacatgccttcccctctgccttggtggctccttccttgaccactaaccactggggttccttgctctctgtcccaagcctctcctgctcagcatcctctccccactcttcactgggtgatcttattcatgggcaagacttcaattcccatgtccacacagatgatggagtcgcagttttagtcattacaagattgatgtccatttctgcttcttgactataagccccgtgagggcagggattgcatgttttcgttccagcgctgggtacaaagatgatacccagcacatagtgctgaatgtggatctgacagctcctgcgggctgggcacagtggcagtgacaccagcctcggctgctgcagggggtgagcccccacaggcttctccagccatgggtaccccaggggctttctcctgctggccctgaagctgacctcagcctcagacacgagggtgcagctgctttccccagagcaaacacccaccttttcgccttttggtccaggaggtccaaggggtcccacaatgcctttgtgtccctgcaggcaaacaagaaggagggaagtgagaatgaggactcaggaaggacaaaggacatggactccaagatggggatactgggctgcaaaactgggtcccagctctgccccagctggctgtgtggctctgagtaagtctgtgcctgtctgggccctggccttccagatgtgccgtgctggtcccagacacaccccaaaggggtgttccagctgggatgggtgggggccccaccctggagcagacctggaagggtgactcgggagaaccagctttgttctcccagccagaaccagggacaggggcaaaatgcttgcctcaacagaccttcccaggctttggctaggcctgcaggtatggacacccactgtgggctcctcgcaacacccctccaggtcttgtctcgcctcttttcctctcctcctcctcccttccctgctgcatttcttccagacactggatctagagccacaaggaccagggctaggatcccacctccaaactgaagtggtcaggcctcgtgcatgctctttatcctcctgagccctggtttccccttctgagtaggcaccatatctctctgagccctggtttctccagatgtgtaacatgggtttggctcagccatgtctaagaaggtgccaacctggatgcagaaatggtcccttccccagacagcagacaaggcatgcagagcgcccaccctgggcaggaaatacccaagaaggcttggggtggcacatttcgctctggcagccccaaccacacctgtcccatccatgatcctccaccccaaccacggctctgggcccagcgctccctggggcaggtgagaycccacatcttcagtattccaggggtcagccttcagctgggaggtggtggggcagaggctggcatgggcctgtgtttccaggcctgcaggacagagtcagggggtggggtgaggtgatatctgcttacatcataaccagccagtcccggttctccttgggcccccatgcgtcccggagcaccctacaagaggaggagaccctcgttggtatggagtgtggctctca

SEQ ID NO: 81545 - DNA, 2472 bp, Homo sapiens
ttccatcctctagctcagggcctggaacacactaaatcctccataagtacctgttggagagctggaggaatgaacgaatctaataatgccttctaagtgagaaaaggcatctggctgatgaacatgttctgcccccaccttgacctctcattcccaaggaccccaccacttgatgaggcactcaaggctcagggaatcctggggacccccgcaaggcccctgcagccttagggcagatttggtgttagggtcccattctcagcagccacagagactgcttctagagctgcagatgctccggcgcagaggccttggggcacaccagggcctccttgtttcagagtctgtgttaaccccttctgtgccagccctggcaggctgcgagggcccaggagggacccggggtactgagtggcaccttctgtggcttcctgtggaatcggctggggcgggtggccgtctaccatggctgagctgtcctcctccagcacgaggaaggggtcggctgggcagcacgcccgggccagcgtgagtcaccaacagcaggatttagttagtggggagctgactcagcaaaagaaaggcgtgctggggaggcagggggcaagcgaagcgttccagctgagccagcaggggaggggaggaggaggaaagacaggagggactcaggcgacgaaggtaggacttagacacgtgggttctggggccagtttgggattgccttggacgtgacaccacaccaacaccttggaccttctggcactcctggccctccacatccccactggcatgggggggcagggtccagggatcagcgaggatccttccagcaattcctctcctctactgaatcttgagccaaggcgtggggaatgaacatgccttcccctctgccttggtggctccttccttgaccactaaccactggggttccttgctctctgtcccaagcctctcctgctcagcatcctctccccactcttcactgggtgatcttattcatgggcaagacttcaattcccatgtccacacagatgatggagtcgcagttttagtcattacaagattgatgtccatttctgcttcttgactataagccccgtgagggcagggattgcatgttttcgttccagcgctgggtacaaagatgatacccagcacatagtgctgaatgtggatctgacagctcctgcgggctgggcacagtggcagtgacaccagcctcggctgctgcagggggtgagcccccacaggcttctccagccatgggtaccccaggggctttctcctgctggccctgaagctgacctcagcctcagacacgagggtgcagctgctttccccagagcaaacacccaccttttcgccttttggtccaggaggtccaaggggtcccacaatgcctttgtgtccctgcaggcaaacaagaaggagggaagtgagaatgaggactcaggaaggacaaaggacatggactccaagatggggatactgggctgcaaaactgggtcccagctctgccccagctggctgtgtggctctgagtaagtctgtgcctgtctgggccctggccttccagatgtgccgtgctggtcccagacacaccccaaaggggtgttccagctgggatgggtgggggccccaccctggagcagacctggaagggtgactcgggagaaccagctttgttctcccagccagaaccagggacaggggcaaaatgcttgcctcaacagaccttcccaggctttggctaggcctgcaggtatggacacccactgtgggctcctcgcaacacccctccaggtcttgtctcgcctcttttcctctcctcctcctcccttccctgctgcatttcttccagacactggatctagagccacaaggaccagggctaggatcccacctccaaactgaagtggtcaggcctcgtgcatgctctttatcctcctgagccctggtttccccttctgagtaggcaccatatctctctgagccctggtttctccagatgtgtaacatgggtttggctcagccatgtctaagaaggtgccaacctggatgcagaaatggtcccttccccagacagcagacaaggcatgcagagcgcccaccctgggcaggaaatacccaagaaggcttggggtggcacatttcgctctggcagccccaaccacacctgtcccatccatgatcctccaccccaaccacggctctgggcccagcgctccctggggcaggtgagaccccacatcttcagtattccaggggtcagccttcagctgggaggtggtggggcagaggctggcatgggcctgtgtttccaggcctgcaggacagagtcrgggggtggggtgaggtgatatctgcttacatcataaccagccagtcccggttctccttgggcccccatgcgtcccggagcaccctacaagaggaggagaccctcgttggtatggagtgtggctctca

SEQ ID NO: 81546 - DNA, 714 bp, Homo sapiens
tgggacagggcttatgaacgcaaccactgtagtcagctcacttgatccacagcctggcacctccactgtctggctagggagcctcgaatgggtcccaaggccaccctgctcctcagttacatcatctgcatartagtggtggttgtgaggaattcaggagctgcagcataagggccctgcaggtactatgtgctcagtaaatgccagtggttcttaagggtctgagctcccatggtagaggcaagtaagctgaggttcagagacagaaaatgacttgcccaagatcacccagctgggaagtgacagtgccagggttggagccctggttgagctggttccacaggccagagctcattctgccctctccccggaagacctcccaccctgtccccatgcctctgcttctccctcaccccaattccccgctgccttctaggataagtgtgagccactggagaagcagcacgagaaggagaggaaacaggaggagggggaatcctagcaggacacagccttggatcaggacagagacttgggggccatcctgcccctccaacccgacatgtgtacctcagctttttccctcacttgcatcaataaagcttctgtgtttggaacagctaagctgttagtcatttgttcattcattcattctgaagcctgccctgagtttaaccctggctgggcactggataagacgctgtccctggtggg

SEQ ID NO: 81547 - DNA, 723 bp, Homo sapiens
tccaagaagccaagcacgttgagctgctgacatagatattgatgaatttcatgaagcttttacaggcactggtttcacccttgggtaactcagtacaggtatgtygacagccttccactaattcaaagatggttcataggtgtcccagaatcttttaattcccaagtgaggcagccccaactccttcagccatttactttctaatccttaatccacagcccacaacctcaaacacatgatagggccgagtatgccatcattgatgtcaacccggaactcttcctagacaacactccagttggagtagcttccttataaagcagggtgcccagagtgaaagagaatccacctgtgttgccgaggagcgaaggattgtcactttccttattctagatcagctgttttcaaacctttcggcttccagcccatctaggttttatgtaacacacacacacacacacacacacactgcacaaacaagcacaaactcacaaacacacacacattgcacaaacaagcacacactcacaaccaaaaccaaactgccattaatgcttacctctacttatgctcaccacacactctgatacattctcctctcttttgtggccctcttttctgttcatttccattctatttcctttaagaaaccctttaaggaaaatgctcttactctgcaaattgatttcactaacaattggcaaatgtgtcatgacccgccgc

SEQ ID NO: 81548 - DNA, 1364 bp, Homo sapiens
atcttgtagggtttggccttttgctccacggccaggctgagagcttttgggtcttcctgttcttgtgccgagtgtcttccggacatcaccttcctcacaccattctctgtgctacttgttctgccctccttacttttgaaaagatagtttattactcatagataggagcaggcgtgccactccatgaaaggccacacagggaagcagcagggtctgccaggaggcagaggaagcggaaagaaaacgtggcaggagcatttgctgctgtttctgtgagaaggagcaggtagggcgggaaaccagccttagggctggctggtttgaatgatctcagcagactctgggtgtagaggctgtctctctagttgcctggtacctgatacctggtgcttttacctggggtaattagcacaggctggcccagagtgtaagagccccatgaaggagttggttggaggtttgggctttggattggttggtttgcatatgaaaggtgcgcttgcaggtgagttctttactgtctctaggaatgggctagccctgggacagacagtttctccagggtcagcaaggctccgagacaccaaagcatcagaaatacagaaaatagagccaggtgcagtggctcatgcctgtaatcccagagactcaggaggctgaggtgaagaatcacttgaggcaaggagtttgagaccagtctgggcaacatagtgagacccctgtccctaaaaaaaattaaaaataaaattacccaggcatggtagtgcagcatgcctgtaatctcagctactcaggagactgaggmaggaggatcactgaatccaggagttcaaggaaagaggccgggcacagtggctcacgcctgtaatcccagcactttgggaggctgaggcaggtggcgagtgaatcaccaggtcaggaaagggagaccatcctggccaacatggtgaaaccctgtctctactaaaaatacaaaaattagctgggcatggtggcgggcacctgtaatcccagctactcaggaggctgaggcaggagaatcgcttgaacctgggaggtggaggttgcagtgagcaagcgagactccgtctcaaaaaaaaaaaaaaagacataaaattaatagaccttagactattttatttaattattttatcaaaataggataggcatagttaaaaatgccaatgtgcattggagagctgaggatgaaaagcaatgtcctgtacttgagcttgcatcagaatcatctagagagtgccccaccctcagagtttctgattcagtagacattgaagaatgagaatttgaatttctaacaggtccccagagaatgctggtgtgttcacactccggttaccagaaag

SEQ ID NO: 81549 - DNA, 792 bp, Homo sapiens
gttgcccaggctagtttcaaactcctggcctcaagtgaccctcttgcctcagcctcccaaagtgctgggattacaggtgtgagccactgaacctggctatttaagttatgtatttgcaactccatttcttgctttcccaatggtaggcaatatctcttaactttgtcttttgtagagcatttttatatgcatgatatcatttactccctatgagatgtgactattgtccctattctgtagaggaggcaactgaagctcggaaaggttaaatgacttggccagattcatatagctgataagtgctggtgctggaatttaaacccaggtttgtcttaatatggagatcttagcacctattttatatgaagagacaatcctttagggatactggggaaacctgtggcttttggacaataaattaaaaaccctttcccaagaaggggagctgtgtgtgtatcaatcaaacaaaatgagaactattctgagagggaggaaaargttcttttctgtgggaacgctgaccaagccgttgacagctcatttatgtgatgctggtgcagtttgacattcatagtacaagacttgcatgcaattagcacgaatcgttctaacagtctcttgaaaacatttggaattttccctctgtctggccttgtgcatgatgtaaacatggctttatttagttggtcatccatcccagaatagtgtggtctgcatctgtctgcatcactgtggtctgattgaggtcttgttttcctggagggcagagactgttgtgtaggcttgctttgt

SEQ ID NO: 81550 - DNA, 516 bp, Homo sapiens
aaaaaaagaagccaaagaaaaattaaaattaatacttagttactagaaaatatctctgcacrttaatgttactagaaaaatagcgtatctctgcacatgtcagatattatcgccctttaatttttatttagtattttaagtttcatgtctttttttaaagaaaaaatttttattataatgataacacagatttgagtagaataaaattactcaagcccacaatgcaaaactacattttgtctgtactcataatttccacaagggtgtgtgtgtgtgtgtgtgtgtgtgtgtgtgtgtttgaaatatattcacattgtttgctcattaggttttcagaagatagtgagatagttgatatatttctcatttaagggtttatgaaagaggatggacacagaaaagccaagcaatacaaataattgtacatcagcattttagttaacaagatatcattaaggaagaaaagtagaagttgtagagacaaggtcagaatttaattggtaaaaatttgcagca

SEQ ID NO: 81551 - DNA, 516 bp, Homo sapiens
aaaaaaagaagccaaagaaaaattaaaattaatacttagttactagaaaatatctctgcacattaatgttactagaaaaatagcgtatctctgcacatgtcagatattatcgccctttaatttttatttagtattttaagtttcatgtctttttttaaagaaaaaatttttattataatgataacacrgatttgagtagaataaaattactcaagcccacaatgcaaaactacattttgtctgtactcataatttccacaagggtgtgtgtgtgtgtgtgtgtgtgtgtgtgtgtgtttgaaatatattcacattgtttgctcattaggttttcagaagatagtgagatagttgatatatttctcatttaagggtttatgaaagaggatggacacagaaaagccaagcaatacaaataattgtacatcagcattttagttaacaagatatcattaaggaagaaaagtagaagttgtagagacaaggtcagaatttaattggtaaaaatttgcagca

SEQ ID NO: 81552 - DNA, 516 bp, Homo sapiens
aaaaaaagaagccaaagaaaaattaaaattaatacttagttactagaaaatatctctgcacattaatgttactagaaaaatagcgtatctctgcacatgtcagatattatcgccctttaatttttatttagtattttaagtttcatgtctttttttaaagaaaaaatttttattataatgataacacagatttgagtagaataaaattactcaagcccacaatgcaaaactacattttgtctgtactcataatttccacaagggtgtgtgtgtgtgtgtgtgtgtgtgtgtgtgtgtttgaaatatattcacattgtttgctcattaggttttcagaagatagtgagatagttgatatatttctcatttaagggtttatgaaagaggatggacacagaaaagccaagcaatacaaataattgtacatcagcattttagttaacaagatawcattaaggaagaaaagtagaagttgtagagacaaggtcagaatttaattggtaaaaatttgcagca

SEQ ID NO: 81553 - DNA, 652 bp, Homo sapiens
accaggagagaaggggatggagaactcacttggctggatttcaggtgtctggcccctccaggagccctttatgttgattatttcaagacaggtttgaaagacatatttctagaatatgaatgatatctccatttcacagctagagactaaggcttgagaatttacatgsccacgatccttcggggattaaacaaggaaaatgagcctgattcacccttctccagaatgtgtgttagttggccatgagcaaccatccataatgtattctataaattgaggaaccagctgatgatgttcaaggatgttttttaattaggtggtgtatttatgggagggtcctgtgaatcgcgactgcatagcagtttcacggtgagtgctgatgggctgggtggaggatgctaaggtcaatcaatgtctagaatgagcttttgaccctctggggaagcaactgaaaagcaaacacttctgcagggaaccagatggccaatcaatggcattcatgtggagcagcatctcatttcactgttgtactgaaggtgaggtgtaccgcaaacagcacagaatgaagcaaaagcaaaaaaaaaaaaaaaaaaagccaaactaaaaaaaggaaaacaggaaacatttagaagggcctttctctgcaaagacg

SEQ ID NO: 81554 - DNA, 652 bp, Homo sapiens
accaggagagaaggggatggagaactcacttggctggatttcaggtgtctggcccctccaggagccctttatgttgattatttcaagacaggtttgaaagacatatttctagaatatgaatgatatctccatttcacagctagagactaaggcttgagaatttacatgcccacgatccttcggggattaaacaaggaaaatgagcctgattcacccttctccagaatgtgtgttagttggccatgagcaaccatccataatgtattctataaattgaggaaccagctgatgatrttcaaggatgttttttaattaggtggtgtatttatgggagggtcctgtgaatcgcgactgcatagcagtttcacggtgagtgctgatgggctgggtggaggatgctaaggtcaatcaatgtctagaatgagcttttgaccctctggggaagcaactgaaaagcaaacacttctgcagggaaccagatggccaatcaatggcattcatgtggagcagcatctcatttcactgttgtactgaaggtgaggtgtaccgcaaacagcacagaatgaagcaaaagcaaaaaaaaaaaaaaaaaaagccaaactaaaaaaaggaaaacaggaaacatttagaagggcctttctctgcaaagacg

SEQ ID NO: 81555 - DNA, 540 bp, Homo sapiens
cctgtgcttctgcctgggacataagagagaggtttgctcatggctggagtctgaaatcagaaagcacttgcaccaggacagggcaggatgctgctgtgagcctgcagcttccactttaagccagagaaaggctgtttggctgctgttactaccaccccggggcaactcaggctaggaaggcaggtgttgttggggagatatataacacaacattcccacagagcgttttcagggctagaatatacgtgtaccgggaacaaataaacgaggtatctggacaagactggcaggaagctaggtgytttgagtaggctgcaggaagagacaacagctggaccaagtttccaaggacagatgagaggtcgccagttggggaagaagggagaaggcagaaaaggtaccaaagttgcgaggagtaacttaagcaatgcctgaaagcccctggagagctggggaatccaagtgtcacagtcacagcttgataggtgggttcctgcagcagcagcatcactattcacctccttctcatgctgaagaggg

SEQ ID NO: 81556 - DNA, 1434 bp, Homo sapiens
ctaattttattcctctcaagcacatactttcatactgtgatacaaactaatttagcaaagaattgctaattagatgtctttgggaaatcaagcttcttggatggatgagactgatttacagatactcttctcattgcatacctgctaatgggtacttccaaagtacttgtggggagtccaggagagaaggggcctatggtacaggagcacagtacggctctcacagcgtgctcacaaaaggcagtttctccttttaaacacttgctatctcccattgcaacaattatttccaaagttgcctgaatgaaaggtgaactgcattctgcaaggccccagaggtcccagagctattactacctttttggaggcagtctttgttactggataaagtggtatctgtggctgtagaggctccacctgctgaagaaggtgtgtaacctgggaccagacctgtattcacacattccccaggagggaagatggaatatctagtgttcccttcagagcagagctgataggagaatattcagatgtaataaaaggataaattagagcgtgaagccatatgttaccaaaggatccaatacacttattgggtctcaggaaaaggagaagaaaatacatatttttgagcctctagaaggtatcatgttctctaacaggtgccaaggaatgaaagaaaaattgagcaaaggtgtagccctcaaaatatgtcccagcagcatgtaggggagggtgacaagtaaaacagtggcaaggttcactgttgtatcagtagtttctgcacagtgtttgtgacaatacaagaggagctccactgagcacctgggaggtaggtgtgtgatatggtttgggtctgtgtgcccatccaaatcgcatgttcaattgtaatcctcagtgttggaggtggggcctggtaggaggtgattggattatgggkgtggatttttcattagtggtttaggaccaaacccttgatgctattctcctgatagtgagttctcacaagatctggttgtttaaaagtaaaactccaaaccataaaaaccctagaagaaaacgtaggcaatactattcaggacataggcatgggcaaagacttcatgacaaaaacaccaaaagcaattgcaacaaaagccaaaattgacaaatgggatctaattaaactaaagagcttctgcacagcaaaagaaactatcatcagagtgaacaggcaacctacagaatgggacaaaattttgcaatctacccatctgacaaaggtctaattatccagaatttaaaaggaacataaacatatttacaagaaaaaaaaaccccattaaaagtgggcaaagaatatgaacagacacttctcaaaagaagacatttacatggccaacaaacatgaaaaaaagctcaacatcactcatcatcagagaaatgcaaatcaaa

SEQ ID NO: 81557 - DNA, 708 bp, Homo sapiens
ctaacttgtatgggctccccctctgaagcccttggaaaaccctagcactgatgttgtatattttgataacatttgcaarctattttactggcaatcagtattgtctttttccaccatgacttctcttctgtcataatttcctttgtgtgtgtgtgtattgagtgatttgagaagtcttggcatctggctaaggttgtgttttagatacatttgttttgggttgaataggatatgtttatatggattttggtcacttctgtgcgtagttaaatgattgctgactattctggtgtaggagtggcttccaggaatactcccaccacctagcactgcagttcactgggtgtggtgatgtcaagtccagggcccaggtcatggagttatatgaataagtcctatagcatctagtgcagaatgacgtgggtcatagaggagaaacaaagtgggaaatgtactgagccagaagctctgtatggaaaattcttccaatgatgagacatggaaagttgtataatgaagacatttttcattgatgcctaatcaaaatagaagtttccttttttcagcaacgtataatactaatgtgggcattaatatgtttgtactatacatttattttacttttcaaatggcattttgcaagatagaattcatgaaaattcttgaatttgtaagacctggacacatagcagtataataaaaaatggt

SEQ ID NO: 81558 - DNA, 467 bp, Homo sapiens
  misc_feature (1)...(467): n = A,T,C or G
tccggtgggaggtaattgaatcatgggactggttacccccatgctgctgttctcatgatagtgagctctcacgagatctgacagttttataagaggcttttcccctttttgctcagcactttttcttcctgctgccatatgaagaagaacatgtttgcttccccatctgccatgattgtaagtttcccgaggcctcccagccatgtgaaattgtgagtcaattgaacctctttcctttatagattacccagtttctggcagtcctttatagcagtgtgagaaygcactaatacatagcccttgctgtacccaaactatatatcataatatttgggcccttgagtggcagtgcttcatctgccataaacctactttgctctcctgtctctacttattctagttcattcttcaaggcatatattggacttggctatgactntgaataaccctggctctcctttttgcct

SEQ ID NO: 81559 - DNA, 924 bp, Homo sapiens
agaaggggcgtcccgacaagtgcaagctgccaacctgcctttcagatctcggctgtggcttccagaccagcagctgcatgttcagttcagtaacttctagcgagggcccttactgcaaaatagatgaaaggcatttttcagatttgtttttcccttttttaagaaraaaatgaacgggaaggagccaatgtgtgagtgtgtatgtgtgtgtgtgtgtgtatgtgtaaagggttgagggtattgatgcatgctatttattaatacaaactcaattagtcaaccacctcttgaacatttcattgggtgtttaatgggcatcaaacttacctgttcaaaaccaaattcttgatttctccccactacttcccaaactgctgctcctttggtctttcccatcccagtaattggctgctgcattctgccaagtgcacaggccaaagcccctcccttaggctcctcattcccaattgtcctggcatcccatcttctccacttccagcatttacacagcatccctcctccgctccttcacatctggactcagtcaccttcagctctcccaggtcttccacttacaccctttacccgatctacttggatctcaccaatgtctactcttcacgcagcagacaaaatcattctttccagacgtaagtcggctcagaactttccaatgattctgagcctgcttatgggcttctcatcttttttagaaagaaatctaaaatcctgactctattagtctgttttgatgctgctgataaagacatacccaaggctgggtgattcataaagaaaaagaggtttaatggattcacagttcctcgtggctggggaggcctcgtaatcatggtggaaaatgaaagtcatgtcttatatggcagccggcaagagagagaatgagaaccgagtgaaagggatttc

SEQ ID NO: 81560 - DNA, 882 bp, Homo sapiens
tgcatttctctagcataagttaatggtccagaggtaggttcatgacacgaactgaccaaaatagactttaaaaatgactcttgggctgggtgcaatggctcatacctataattccagcactatggaatgccgatgcaggcagatcactttgtgccaagagttcgagaccagcctggccaatgtggcaaaaccctgtctgtactaaaaatacaaaaattagccagacgtggtggtacgtgtctgtaatctcagctactcgagaggctgagtcaggagaatcgcttgaagccaggagtgggaggttgcagtgagccaagatcacgtcactgctatactccagcttgggcgacagagtgagactgtctcaaaaaaaaaaaaaaaaagaaagaaagaaaaaaacaaaaagaaaaaaaagactcttattccatcatagtagcattctcttctctttctctctctctctctctctctctctcaacaatgaagcatgtaaccttactgcactattagtaatggtatcatctgattaccgcaatgaaattatgcttatgatggcattcaatctatatatggtagactaaaggagcagaaaacaacctgggtttttgatgccatctctgtgctgctgaatcaaccagctttaaagctcaccctacttctgaacttctagctatgtaagatagttgcatcattgcttaagatagattgagaaaatsttctctaacttatgtttaaaagtgtccaaactaatacaagaggggaaagaagctctgacttctgagaatccaggtctggctctaacttacatgatttactcagacaaagtccctaccttctgtctttagaaggcagtataccaatcacctgtgaggctaattgagc

SEQ ID NO: 81561 - DNA, 882 bp, Homo sapiens
tgcatttctctagcataagttaatggtccagaggtaggttcatgacacgaactgaccaaaatagactttaaaaatgactcttgggctgggtgcaatggctcatacctataattccagcactatggaatgccgatgcaggcagatcactttgtgccaagagttcgagaccagcctggccaatgtggcaaaaccctgtctgtactaaaaatacaaaaattagccagacgtggtggtacgtgtctgtaatctcagctactcgagaggctgagtcaggagaatcgcttgaagccaggagtgggaggttgcagtgagccaagatcacgtcactgctatactccagcttgggcgacagagtgagactgtctcaaaaaaaaaaaaaaaaagaaagaaagaaaaaaacaaaaagaaaaaaaagactcttattccatcatagtagcattctcttctctttctctctctctctctctctctctctcaacaatgaagcatgtaaccttactgcactattagtaatggtatcatctgattaccgcaatgaaattatgcttatgatggcattcaatctatatatggtagactaaaggagcagaaaacaacctgggtttttgatgccatctctgtgctgctgaatcaaccagctttaaagctcaccctacttctgaacttctagctatgtaagatagttgcatcattgcttaagatagattgagaaaatgttctctaacttatgtttaaaagtgtccaaactaatacaagaggggaaagaagctctgacttctgagaatccaggtctggctctaacttacatgatttactcagacaaagtccctaccttctgtctttagaaggcagtwtaccaatcacctgtgaggctaattgagc

SEQ ID NO: 81562 - DNA, 972 bp, Homo sapiens
  misc_feature (1)...(972): n = A,T,C or G
cnnnnnnnnnnnnnnnnnnnnnnnnnnnnnnnnnnnnnnnnnnnnnnnnnnnnnnnnnnnnnnnnnnnnnnnnnnnnnnnnnnnnnnnnnnnnnnnnnnnnggaatccattttgaacataaaatattttctaacatgaaaatctatggaagaaagtaagcaaataaatggataaattggtagtactttttctttttttttttttttgtcacttgaacaactaatatgactagtaactgaagagatactagacaaccaaaaaacgatagtttgaaaataaatttcaagtagatgaattttctagtatttagtcctttcatttttatgagaggtactggaaagaaaaaacacatgtacttggcagcagaacccttgttaaaaattacatctgggactgggaagtttggtggggaagattctaatgtatagcttccactggtatttgaggggtcacacacagacagcaaatccccctttgagatagatagttcctttatgaaaaataaaacaagaaggaaaagaaatacttctgaaagccttggttacgatcaggtaaaaacaataatttagttcaaaataatgagtggtaaaaatgtctctgtctgacaataaattatttttaagtgaattgattatttgtgttttaagagattaaggcatttttggtggggggattaaaaggacataagtttggggaccttggaaatgggaaataagattaagaggagataaaacttccggttggagcaggaagcagggagctaggcctatgcctataagagaacattttcaagttgtatttaagaaatatgaaaaataatattggatagcacccgtgtgtgtgtgtgtgtgtatatatatatattwtttttttttttttgagacagagtttcgctcttgttgcccaggctggagtgtgatggcacgatctcagctcactgcaacctctgcctcccgggttcaagcaattctc

SEQ ID NO: 81563 - DNA, 966 bp, Homo sapiens
actctagaggaggattgttacaccaaaataaaggattaaactcagacagaggaagacttggtrtaaaggaaactggaaatccaacacaggagagaaacaaggggctctccaggatgatggtaaagcaagatcccaggacatccactgggcactagaggctgagggccaccagcccaaaatacattagtgtgacctgagacaggcctgttgctcagactgtcacccattccctcctaccctccaaacaagagattaaagcaagagagaagatgtgaaatcaagaacacagagaatacagccatgaaaatggcaaagggaatggcaaggataacaacagagggaagttcgagatgacaattgaacagtggcttagaaatatttgatatttctctgtgtacttattatttttcataagagaaaaagaaatttaaaaaatatggaaggatataagacaaaatattaacagcccatatctcggagtggtagcataattgatcattaacttctttgtatggtatattttctgggtttttaaaaagatataaagtatctgtgcaattaaaaaaaaatggttttttaaaaatttcccaacatttttattttttaagtgtacaattcagtggctttttttagtatatttacaaagttgtgcaactattaccagtacctaattccagaacatttatttctctgcagaaagaaacctgtacccttcagcagtcactccccattcctcagcctaatccctggaaaccattaatctactttctgtctctatagatttgcctcttctgggtttttcatgtcaatagaatcatataacatattgcttttgtgtctgacttctttcatgtgccatgaagttttcaaggttccatccatgtaatagccagtatcagtatgttatttttaaaaaaattaatactattgcactgaatggatataccatattttgtttatacacca

SEQ ID NO: 81564 - DNA, 966 bp, Homo sapiens
actctagaggaggattgttacaccaaaataaaggattaaactcagacagaggaagacttggtataaaggaaactggaaatccaacacaggagagaaacaaggggctctccaggatgatggtaaagcaagatcccaggacatccactgggcactagaggctgagggccaccagcccaaaatacattagtgtgacctgagacaggcmtgttgctcagactgtcacccattccctcctaccctccaaacaagagattaaagcaagagagaagatgtgaaatcaagaacacagagaatacagccatgaaaatggcaaagggaatggcaaggataacaacagagggaagttcgagatgacaattgaacagtggcttagaaatatttgatatttctctgtgtacttattatttttcataagagaaaaagaaatttaaaaaatatggaaggatataagacaaaatattaacagcccatatctcggagtggtagcataattgatcattaacttctttgtatggtatattttctgggtttttaaaaagatataaagtatctgtgcaattaaaaaaaaatggttttttaaaaatttcccaacatttttattttttaagtgtacaattcagtggctttttttagtatatttacaaagttgtgcaactattaccagtacctaattccagaacatttatttctctgcagaaagaaacctgtacccttcagcagtcactccccattcctcagcctaatccctggaaaccattaatctactttctgtctctatagatttgcctcttctgggtttttcatgtcaatagaatcatataacatattgcttttgtgtctgacttctttcatgtgccatgaagttttcaaggttccatccatgtaatagccagtatcagtatgttatttttaaaaaaattaatactattgcactgaatggatataccatattttgtttatacacca

SEQ ID NO: 81565 - DNA, 966 bp, Homo sapiens
actctagaggaggattgttacaccaaaataaaggattaaactcagacagaggaagacttggtataaaggaaactggaaatccaacacaggagagaaacaaggggctctccaggatgatggtaaagcaagatcccaggacatccactgggcactagaggctgagggccaccagcccaaaatacattagtgtgacctgagacaggcctgttgctcagactgtcacccattccctcctaccctccaaacaagagattaaagcaagagagaagatgtgaaatcaagaacacagagaatacagccatgaaaatggcaaagggaatggcaaggataacaacagagggaagttcgagatgacaattgaacagtggcttagaaatatttgatatttctctgtgtacttattatttttcataagagaaaaagaaatttaaaaaatatggaaggatataagacaaaatattaacagcccatatctcggagtggtagcataattgatcattaacttctttgtatggtatattttctgggtttttaaaaagatataaagtatctgtgcaattaaaaaaaaatggttttttaaaaatttcccaacatttttattttttaagtgtacaattcagtggcyttttttagtatatttacaaagttgtgcaactattaccagtacctaattccagaacatttatttctctgcagaaagaaacctgtacccttcagcagtcactccccattcctcagcctaatccctggaaaccattaatctactttctgtctctatagatttgcctcttctgggtttttcatgtcaatagaatcatataacatattgcttttgtgtctgacttctttcatgtgccatgaagttttcaaggttccatccatgtaatagccagtatcagtatgttatttttaaaaaaattaatactattgcactgaatggatataccatattttgtttatacacca

SEQ ID NO: 81566 - DNA, 698 bp, Homo sapiens
cgatccctgcgccctgggacacaacctctgcaacccacggccttcccatgtctccaggaccctcttgggttggtgtccaggctctgctggggggtgtagtgctggctatctcccctgggcctagggtgggcactgccatgctgggccctggaggtaggggagctgtgattcgaagcataggggactctgactccggactccagggtccctccttggactggggctgagtgggtaccgcacccatggctggagtggggctggtaaagacagggcggctgtcctggttggccaggcggggaagggcacttggggtgaagggtgcaggtgggtcaggctgraaggacagtgctggcctcagctcctcatctcccttttccagcccctcgtgtaggaattcctcaagcagcgggtggtggttgagcagcttcaaggtgggggctgttgtgacaaagtggacgcctcgttctggctgctcaggtgtgggggctgctgtcagctcgccatctgtctcctcgatgcctggggcttgtcctttccccacggttggggcctctaaagagagtcctgaaataataagggatggtcagaggttctccccctgctccagagagcagcatcacgcccaactcgagtagtgggggggcccgctctcttttgacagacagccctgaggagcgtgctcactgctgagaatcacg

SEQ ID NO: 81567 - DNA, 1043 bp, Homo sapiens
tttttgatggttatgttcgttttgtttgttttaacaggggtcaaaagacttttagtaacaaaatcatgtttattcctacacaatggtatagaactcatacactgacgagatttaacatgtatatatttattgcacgcagattcctaagtataaataagcacgtgaagaaaaaaacataaaagatctccagtgttcaagcatggaaatcaaagcaaggcatgaaaataatttgagtggcctcaggactcaattgtccttacgacaaaatatttactctcttaactggtcttgtactggttgtcagtttccaaaagcaaccaatttattgtcataagcaggcagaaagcaacaattttcaaagcaatttcaaacatgtagttagtttcctgaataataatgtgtcattatacttctaaacaatccattgaatgtcttagtgatatattttctataaagtatttaatttataaattggaaaaaaaatgccttggtatggagagaaaaataagatcttctcactcttcagttacaacacttagacttttactttaaatgattgaatttaaatgcatattacaatatttagtgctatcaagtactcctatctttcccatacatttttatactctaatacaataatattattttgtttaattttagggaggtaaaaggataattggcatacctccctacccccaagaggaagttaaatgacttttggtaagaaacatggtctttcctcttaatatgaaaccatgcttcatatgaaacagagtgctggcaaatgaggttttagtttagaaagtcagtgtacgtataaaatgtcttgtggttcaaaggctgaaaccacaactagaaaggaggacagtgagaagtaattttaaattgcttaatattgaaataagcatcctggaaatattattggccwttttgatatggtttaaaataagtggctagggtggtacctctgagattacagagtgagaacctccataaatctgttccccattaaaaaatggtaaaattgtcaaaattaatatttt

SEQ ID NO: 81568 - DNA, 1039 bp, Homo sapiens
ctgtaacctggatttatctctccataagtttgtttccagaaagtggctagaattggccaaattaatcaacagtggaatttttttcttcactttcctgtggttgtctttgttgccatacatactgctttcaaagtaaggtggacattagttgaacattttgggcctgcaaagagtcatgaaacttacaaccggtgatacctaagttagctctgcctcttytctactaagttagtgccacataacactaagtttagtgctcatgacaccaagtttagtttttgtcatgagtagcattctgcctccaagtttcaaattctgtatgattaaaagttaaccttacttgtaaatgacatgaaatccaaaatttcagtagattgaagtaggtagaaggttgcttgcctctatgcctaggtgtttctggcctaaacttagtgtccgtctcagggttgaagtcagctgctctggctacagccagttagaatcacgggactgcctatgcaacaatggaaagacatggaaggggcattgttctctttgaagccctttcgagaaataacgcacaaggcgtccaactctcaaccatccattataacttaattgccatatctgctgataagggaagtcaagaaatagtgtttctttcatttggatatgttcccagatgtataatttttattgcttttgggggaaaaaagaaataaagaggacaagatcatggaggtgggaaggattggtagctggcatttttgcttcaatagataatatcttcagcaaaaagagtttttttctgatattgtcaccagctcctaatagatgtcctttgctgcttgttttatgtattcctatgcttctatgttgctacctggaattgcaacatgttttaaaatatcaccaagtttagggcaatgtttatcagatgtaaaggccgctatatatttatgccttgcactcccctgtggcagtggaagtgtgaagagctagatatcaataaatattcatgagtgcctcggcagacaaaatatatgacaaaagtaaagtg

SEQ ID NO: 81569 - DNA, 771 bp, Homo sapiens
ctgcctggctatactggcttagagtgcagcctcagatgcctaaccaagtcacttcagagtggtcactaccatagcttattggcaaactccatgtaataatcagagagcttttgcaaatatgccctggccagcatgaacatgccccagcctccctctaccactttgctggtatgcactcacctgcagtttctacctacygctttgtgagtgcgcagactccaccactccacctccactggagcatgtgacagagaacaaacccaactaccactaccctgatgaagggcttttgccagcattccccaacagagtgttgtttccagtggactgggaacaccttggcccttgcagcacaagaggtcttaacttcgaggagccagagaacaaagctgtgagcctggagccttcccacagggttagagcatgcagcccaggagtgctgagttgagccttggccccctgaaatcatgcagaattgaagccagttgaataaacccaacatatatgacagtcaaactttcaaggttatcaaagaatataaaagcaatagcaccatttataagacagcaatttcaaagattaaaggaacatcagcctaaatagcttaaatataatcatatatttttgtatgtcatttatgtgcatatttatatatgacatacacaaagaactactatgatagataaaaataaacagcagatgcagttaaacagtcaagattttaaatcttaacatacttaatatgttgaagaaaatagaaaaaaggtagag

SEQ ID NO: 81570 - DNA, 1162 bp, Homo sapiens
acctgagcactgagccagagaagaattgcagcccaacagctcaaattgaaaaggcgagactaagtgtaattatcagctgcctcccttatatctggtgtacttctaaatgtaaatcatattgctagagttccagtcgcattatagaagaagagaggagttaaaatgttttgtttttgttttgttttgtctgttttttactatcagtttttgtatcacacttctgcttccccaatgtttgtaacagcttccaccattggtcaacctgctttgctgcataagttggtaaaaccraatagttgctccctatagtctcctttctctctctctcctctctctctctgtctccccaccctctcttgtgcacacacacgcacacacatgcacacatgagcctaaaaacatgtgacattactctggactaaaaaacaaaacaaaaaatcttctcaaaattagaagagttcaaaaagcaaaggaaccaagagtgatgtagggaaactgagttaaaacattatttgaaaaaataataataaagacggcaaacaaccatttgagcaattagataaaaatctgaaaattggaattcttaagatgtttcataaatacaatattttttttaaaaaaactttcaaatagaactttctctcttgatgggaagttttagaataaattagcatattcaaacagacaaaaaacaacttaaagcacaaaaccattagatataatcctgttctgactttcccattttacagaaaagatatctgagacccagagaggttaaacaacatgtctaaggttaaagctttagctagctgttttgaagagatttgggttattaatccactaaaaataatttagtgtaaaaaatattcaggaatcaagaagaacatagataaatcaataaatttcaaatatttgaaacattatgtctttctaacatagactatagaaggtgatataaaaaaactgataaatgatctcactaataagactgtgtttgggggagggagatgaagagaaagttaagaataccagcaggcatcattcttagatatggaatggtctttgcatatcacaagctactgtagcctgagcttcattcgatttaggagattatactagttttctataatattgagttttgttaaatcactttttaatcaca

SEQ ID NO: 81571 - DNA, 1350 bp, Homo sapiens
gattggtcattaattttaatgaactaaaactaagaactcaaatttgaagtcagaggtgcattcggcatctctgcccctccccagtctgttgcctagtcattgctactatatagtatcttcaaagatagaggctaatttcatttcctttagccttttcaccttgaaaaccagttatagaaataatcacttactcatctcctattggggagctgttaacaggattgttaaaattttttttaagtaataagcttaaaatactcataacaatttgcatatagagagttcccaatatacattggctaagatagatttatatcaatttcatcaagcaaataaagtgtgatatttttggtatttcttctcttgtgaaagttggtcaaattttacacaacttgctgagatgtgcctgtctatgtagaggctgggtttgttttaaatgtgtgccttaatgaaatgtgctaattaagtgaggattacattattcacgtgttcatctagacattcctgcctagatttagaccaaattrattattgtatatttaatagaatactattttgctctttttttcttttattctactcaaattaagcatatataaaaactgaggttattaatttgacttggtgttcaattattcattgtcggctttttatgatcataaaaatagtcactggatactcaaggatacttaagatttaaactattgactttaggctacacattctgttcttttaaaaaacacttttaggactatgataaaaaaaagtggtgattttttaatgatacaagagtcttttccattgagtgtttaattttcactttctcatcttactgatgtgactaaaaaaaagttaaagttgatgatttttgccaccaaaagaatgtcacttggtaactagatgtgtatatgtatttattcatccatgcaagacaggcacatactaatatatgcacttgccatgcctacattttcacttaatgaagagcttaataaaaatcagcattcatagccccttcctagtcagataaattagttaatgcacaataagcagctcttatgtataatgcaaaagattagtcttatcatttgcataatgtgctacaaatggcccactgtttcaagcagtagaagctttctcattaaatgtgagttgaaagctgaatgacgtcaataaagtaattatgcttcatttggcatatctcattcattctctggagttcaagaccttctctgagctctgttgacagtgctgctgaaaggcatggtaatggttcaaaagcagagcattggaactctgggaataagcatggtgtgctcaagcctccactatatgagttgttggccagca

SEQ ID NO: 81572 - DNA, 1350 bp, Homo sapiens
gattggtcattaattttaatgaactaaaactaagaactcaaatttgaagtcagaggtgcattcggcatctctgcccctccccagtctgttgcctagtcattgctactatatagtatcttcaaagatagaggctaatttcatttcctttagccttttcaccttgaaaaccagttatagaaataatcacttactcatctcctattggggagctgttaacaggattgttaaaattttttttaagtaataagcttaaaatactcataacaatttgcatatagagagttcccaatatacattggctaagatagatttatatcaatttcatcaagcaaataaagtgtgatatttttggtatttcttctcttgtgaaagttggtcaaattttacacaacttgctgagatgtgcctgtctatgtagaggctgggtttgttttaaatgtgtgccttaatgaaatgtgctaattaagtgaggattacattattcacgtgttcatctagacattcctgcctagatttagaccaaattgattattgtatatttaatagaatactattttgctctttttttcttttattctactcaaattaagcatatataaaaactgaggtkattaatttgacttggtgttcaattattcattgtcggctttttatgatcataaaaatagtcactggatactcaaggatacttaagatttaaactattgactttaggctacacattctgttcttttaaaaaacacttttaggactatgataaaaaaaagtggtgattttttaatgatacaagagtcttttccattgagtgtttaattttcactttctcatcttactgatgtgactaaaaaaaagttaaagttgatgatttttgccaccaaaagaatgtcacttggtaactagatgtgtatatgtatttattcatccatgcaagacaggcacatactaatatatgcacttgccatgcctacattttcacttaatgaagagcttaataaaaatcagcattcatagccccttcctagtcagataaattagttaatgcacaataagcagctcttatgtataatgcaaaagattagtcttatcatttgcataatgtgctacaaatggcccactgtttcaagcagtagaagctttctcattaaatgtgagttgaaagctgaatgacgtcaataaagtaattatgcttcatttggcatatctcattcattctctggagttcaagaccttctctgagctctgttgacagtgctgctgaaaggcatggtaatggttcaaaagcagagcattggaactctgggaataagcatggtgtgctcaagcctccactatatgagttgttggccagca

SEQ ID NO: 81573 - DNA, 743 bp, Homo sapiens
aaaattcatatgctgaagtcctaaccccagtacctcagaatgtgactagttggagatagggcctttaaagaggtattgctttaaaatgagatcattaacatgggccctaatccaatatgattgtgtccttaaaaagaacaggaaagctggtcacagacacagaagaaagactgtgtaaagacatagggtgaagagggccacatgcaagccagagggggtctcagaaatatcaatcctgctgacaccttaacctcagacttctagcctccagaagagtgagaaaataaacgtctgctttgttgcagcagccttaggaaactaatacaacccccaaagctcacttctcacctccttcaagtgtttttgaaaatgttaccttctcaaaaatactaccaggattgtcccacttaaarttacaacctcccccattctcaacatctcgacttcttctcccagttccctttactacattctactttttttcacaacagcatttatcactgtctaacacactctaaaattacttatttattgtttattttttattatctatctttccttgatagaatttgaactccagaagggtagagattgttgtctttttctgttccctggtatattctctgtgccaagcacctggaatagtgtttggcttatagtagctgctcaacaaatattcattggctagtgaatgagtaactgacacagaatacttgcctgtgttcctaagtgaaaatgtattt

SEQ ID NO: 81574 - DNA, 743 bp, Homo sapiens
aaaattcatatgctgaagtcctaaccccagtacctcagaatgtgactagttggagatagggcctttaaagaggtattgctttaaaatgagatcattaacatgggccctaatccaatatgattgtgtccttaaaaagaacaggaaagctggtcacagacacagaagaaagactgtgtaaagacatagggtgaagagggccacatgcaagccagagggggtctcagaaatatcaatcctgctgacaccttaacctcagacttctagcctccagaagagtgagaaaataaacgtctgctttgttgcagcagccttaggaaactaatacaacccccaaagctcacttctcacctccttcaagtgtttttgaaaatgttaccttctcaaaaatactaccaggattgtcccacttaaagttacaacctcccccattctcaacatctcgacttcttctcccagttccctttactacattctactttttttcacaacagcatttatcactgtctaacacactctaaaattacttatttattgtttattttttattatctatctttccttgatagaatttgaactccagaagggtagagattgttgtctttttctgttccctggtatattytctgtgccaagcacctggaatagtgtttggcttatagtagctgctcaacaaatattcattggctagtgaatgagtaactgacacagaatacttgcctgtgttcctaagtgaaaatgtattt

SEQ ID NO: 81575 - DNA, 1030 bp, Homo sapiens
atcttggcttctgctgtatgtggtccagcccttaaaatgagtagatgccctattcagaaaaggttggtagaagtaaagagttgaatacaaatcacattttaaaaattatatcatggcgtatatctaaaaagagactttactgttcaaagtactatgccagcctcaactaatcttgatggagattccttgtgaattgtgaatctcttcctcaattaattattctgaaatgtttaatgtttccaaaaataggctagcatctgcatttgcagaaatattggcaataaaagtgctttactttggaggtttgctccactagagcttgtagyaaactacattgcaatacctgctagcaaaaagaaacctcatggaaggtcatgaagagaacatctgggcttgtcctcaagcacagaattaaaaagctctaaggattttatctagtaggaacactgcttatcaaagccctattcacattctagttaataacaaaaaacaattttgaaaaatctttccaaattgagagtttgtgggaagcagcacaaaaccagataggtccacatgttcctgatgcaaatctgccttgtacatccttggaagcttattcattactggcctcttggcttttattttgtgcaactcccatttcttttgcttcaaaacaaagaaaatattccactgtgcatcttaggaaagcagaggtgaggagctcagtgattccataaaagatcgactgacaagtgggatgtagaccagtaaaggatgtattatataaattcttattttgttggtgacagagagaaatcatggaagtaggaaataacacgcagacaatcaaagataaattttccttcaaatgtgcaggttttagaaaatatcttcttagaaatctggatattaattggtcaatgcttaaaaaataaaacacctatctgctatagtgagctgttcattatgaatacctctgggctaaagaaaaatcacacacacacacacacacacacacacacacacacacatgcacacacaaacctat

SEQ ID NO: 81576 - DNA, 540 bp, Homo sapiens
ataaaaagagcaaaactaatacaattagcatataattttaattatgaagtttgtcagattacagtattctgctattatttataaaaggttgttacagagctaccaaagcaagcagtcataaatttcaggaaaccaacttctatgaaaggcatatcttgcatcttgcacatttcttgtgtttgcataatcacagcatattgtattataattacaaatgtaataggtaggaaagtaactgtgttagtttgtttctctacacattcaatcattcattcaagytagattcttaaagctcaacagtacagctcgcagaacgaaagtagaaattaatgctgaacatataggcattgcagggacataaaatgtcattaaagattaggtgagatatatatctttccactacagaggtctatcatagttatccttaattttgaagacctcaggactctaccagctatgattcattaacttcattttatatcaagtataataaatcacctcaaattcaagtagagtcttgaataatatgttttatcatag

SEQ ID NO: 81577 - DNA, 540 bp, Homo sapiens
ataaaaagagcaaaactaatacaattagcatataattttaattatgaagtttgtcagattacagtattctgctattatttataaaaggttgttacagagctaccaaagcaagcagtcataaatttcaggaaaccaacttctatgaaaggcatatcttgcatcttgcacatttcttgtgtttgcataatcacagcatattgtattataattacaaatgtaataggtaggaaagtaactgtgttagtttgtttctctacacattcaatcattcattcaagttagattcttaaagctcaacagtacagctcgcagaacgaaagtagaaattaatgctgaacatataggcattgcagggacataaaatgtcattaaagattaggtgagatatatatctttccactacagaggtctrtcatagttatccttaattttgaagacctcaggactctaccagctatgattcattaacttcattttatatcaagtataataaatcacctcaaattcaagtagagtcttgaataatatgttttatcatag

SEQ ID NO: 81578 - DNA, 623 bp, Homo sapiens
gctagaagaggtttttcagaatgtatgtaattcatcagtgcaggtaccatcatctcgctccagaaaaccatggaatggtattctcctttcccccctgggatttgccacaactctatatggcatcatttaccatcaccgatctctccaacactacctggtctccaagtagcagtgttgcctgtaccacagcctgaaactttgtcttgtctgagcccaactcaaattcacaggctttcatatcctctagtacataaggcagagtaatacccaaagagatctgctagacgttgtgctctggcttggatggacagaacagtgtgcggaggattgtatcataaattttagctccagaatgactgcaggaataaaccaggaacaggaatacaccaaatactgtragtgcccaaactgtagaagtgggaaaggaagatagagcctctgcccccgaacacacacccccactggggaaactgaagttctggattgcaggagaattttccagtctcacctggagatgagtcaatttggagagccaagcaaaatacaggggtagaggaaccagcgggaaaggccctgggagctcgctggattcccaagcaggccattcctgcctggcaccatag

SEQ ID NO: 81579 - DNA, 623 bp, Homo sapiens
gctagaagaggtttttcagaatgtatgtaattcatcagtgcaggtaccatcatctcgctccagaaaaccatggaatggtattctcctttcccccctgggatttgccacaactctatatggcatcatttaccatcaccgatctctccaacactacctggtctccaagtagcagtgttgcctgtaccacagcctgaaactttgtcttgtctgagcccaactcaaattcacaggctttcatatcctctagtacataaggcagagtaatacccaaagagatctgctagacgttgtgctctggcttggatggacagaacagtgtgcggaggattgtatcataaattttagctccagaatgactgcaggaataaaccaggaacaggaatacaccaaatactgtaagtgcccaaactgtagaagtgggaaaggaagatagagcctctgcccccgaacacacacccccactggggaaactsaagttctggattgcaggagaattttccagtctcacctggagatgagtcaatttggagagccaagcaaaatacaggggtagaggaaccagcgggaaaggccctgggagctcgctggattcccaagcaggccattcctgcctggcaccatag

SEQ ID NO: 81580 - DNA, 623 bp, Homo sapiens
gctagaagaggtttttcagaatgtatgtaattcatcagtgcaggtaccatcatctcgctccagaaaaccatggaatggtattctcctttcccccctgggatttgccacaactctatatggcatcatttaccatcaccgatctctccaacactacctggtctccaagtagcagtgttgcctgtaccacagcctgaaactttgtcttgtctgagcccaactcaaattcacaggctttcatatcctctagtacataaggcagagtaatacccaaagagatctgctagacgttgtgctctggcttggatggacagaacagtgtgcggaggattgtatcataaattttagctccagaatgactgcaggaataaaccaggaacaggaatacaccaaatactgtaagtgcccaaactgtagaagtgggaaaggaagatagagcctctgcccccgaacacacacccccactggggaaactgaagttctggattrcaggagaattttccagtctcacctggagatgagtcaatttggagagccaagcaaaatacaggggtagaggaaccagcgggaaaggccctgggagctcgctggattcccaagcaggccattcctgcctggcaccatag

SEQ ID NO: 81581 - DNA, 977 bp, Homo sapiens
ttaaaaacaaagtagtcacattcaagtttttaaaaaaattttttcacatgttaaaaaatgatagcaagctgtattagtttgttttcatgctgctaataakggcatgcccgagactgggcaatttacaaaataaagaggtttaatggacttacagttccatgtggctggggaggcctcacaatcatggaggaaggtgaaaggcacatctcacatggcagcagacaagagaagagagcttgtgaagggaaactccctttttaaaaccatcagctctcatgagacatattcactattatgagaacagcatgggaaagatctgtatccatgattcagttacctcccactgggctcctcccacaacacgtgggaattaaagatgagatttgggttgggacacagccaaaccatatcacaagctatcttagaaaatagtctctattaaaaccttttatgacaagatctaaatctataaagctcttaaatggaggaattggtggaagatgaaagaaataaatgaataaaatgctatggttaataacaaagtttgaccaaatagagtaattgaagggaaacagaaaacataattttgaaaagccattaaagaaacttaaacctgcacaatggataatatttcccactaaagatactgaataagtcatttggctgcaagtaggatttgagcgagataatggaaatgtgtgtgtgtgtgtgtgtgtgtgtgtgagagagagagagagagagagatacaaagagagagagagagattggaagagaataccttaataaacgtgataacctttggaagaacttttaatatctgttatatcgcaggatctaagagggtagatttcaagtgtggctactcccaatttttataggctactatttggaaaattgagtaacactgaaaggttttacactagtgatattgtatatttcaggacatgggctctattttctaaaatagagctacccaa

SEQ ID NO: 81582 - DNA, 977 bp, Homo sapiens
ttaaaaacaaagtagtcacattcaagtttttaaaaaaattttttcacatgttaaaaaatgatagcaagctgtattagtttgttttcatgctgctaataatggcatgcccgagactgggcaatttacaaaataaagaggtttaatggacttacagttccatgtggctggggaggcctcacaatcatggaggaaggtgaaaggcacatctcacatggcagcagacaagagaagagagcttgtgaagggaaactccctttttaaaaccatcagctctcatgagacatattcactattatgagaacagcatgggaaagatctgtatccatgattcagttacctcccactgggctcctcccacaacacgtgggaattaaagatgagatttgggttgggacacagccaaaccatatcacaagctatcttagaaaatagtctctattaaaaccttttatgacaagatctaaatctataaagctcttaaatggaggaattggtggaagatgaaagaaataaatgaataaaatgctatggttaataacaaagtttgaccaaatagagtaattgaagggaaacagaaaacataattttgaaaagccattaaagaaacttaaacctgcacaatggataatatttcccactaaagatactgaataagtcatttggctgcaagtaggatttgagcgagataatggaaatgtgtgtgtgtgtgtgtgtgtgtgwgtgagagagagagagagagagagatacaaagagagagagagagattggaagagaataccttaataaacgtgataacctttggaagaacttttaatatctgttatatcgcaggatctaagagggtagatttcaagtgtggctactcccaatttttataggctactatttggaaaattgagtaacactgaaaggttttacactagtgatattgtatatttcaggacatgggctctattttctaaaatagagctacccaa

SEQ ID NO: 81583 - DNA, 977 bp, Homo sapiens
ttaaaaacaaagtagtcacattcaagtttttaaaaaaattttttcacatgttaaaaaatgatagcaagctgtattagtttgttttcatgctgctaataatggcatgcccgagactgggcaatttacaaaataaagaggtttaatggacttacagttccatgtggctggggaggcctcacaatcatggaggaaggtgaaaggcacatctcacatggcagcagacaagagaagagagcttgtgaagggaaactccctttttaaaaccatcagctctcatgagacatattcactattatgagaacagcatgggaaagatctgtatccatgattcagttacctcccactgggctcctcccacaacacgtgggaattaaagatgagatttgggttgggacacagccaaaccatatcacaagctatcttagaaaatagtctctattaaaaccttttatgacaagatctaaatctataaagctcttaaatggaggaattggtggaagatgaaagaaataaatgaataaaatgctatggttaataacaaagtttgaccaaatagagtaattgaagggaaacagaaaacataattttgaaaagccattaaagaaacttaaacctgcacaatggataatatttcccactaaagatactgaataagtcatttggctgcaagtaggatttgagcgagataatggaaatgtgtgtgtgtgtgtgtgtgtgtgtgwgagagagagagagagagagagatacaaagagagagagagagattggaagagaataccttaataaacgtgataacctttggaagaacttttaatatctgttatatcgcaggatctaagagggtagatttcaagtgtggctactcccaatttttataggctactatttggaaaattgagtaacactgaaaggttttacactagtgatattgtatatttcaggacatgggctctattttctaaaatagagctacccaa

SEQ ID NO: 81584 - DNA, 613 bp, Homo sapiens
cagggaaggggcaggcacccattgccacaggagagttgcaggcatgttgggatgtaggcctaggggaggtgctgcaggctcaagaaccaggcccacacattatatattaaaaaaaaaaaaacccacatttttttttattggtcagtgttggtaggagtttgttacaaaagtgagtccatgggcctgtggaatgtgaggggagtgggtccgctccaccagatgccagcaccggggccagtgcagctcagagccctgtggcggactacagggcctgcacagacggtcactcaaagaaagatgtccctgtgccctactccttggcgatggcaaagggcttctccacctcgatcttgccgcagtctgcgatgatcacatccttcaggggtttatcccggctgtctgtcttggtgctctccaccttccgcaccacctcctggaaaagaaaggtggaagyaggagggcatggtggatcaggaggtccaccgctcaggagaaaggccccagcgtatggctcaggagggctaagacccacaagtgatcaacagcacacaaaactggaggcaccaaaattctaacagactcctggccagagcagggagaatgcagatttgac

SEQ ID NO: 81585 - DNA, 658 bp, Homo sapiens
tggagggaagagagcaggtcacgctcacctgattctgatgaatcagctggcctgggtcatgcctctcagggagaaaacctttgagtccacagagctgctcacagataccactgcctgtgtgtaactgctgtagaccactgaggcagaccagagagcagataggtgctaagcaccagtgacattctgaggtcatggcacgaatcacagtggggccttgcccgggtcagcagygcccagagtcagggtcctccgctgcctgaggcgtcaacatgcctgcctgcaatgtgtttgtgcacgtgcgtggacatgtgtatgtgggtatacacatctgtgcacgtgtgtgctgcttctctggccaggcccggctgccccactcatgtgtgcacccagttcctaatcactgtcacccccgaggcccagggccagcatcagagcatccatggctgctccctaacctcagccctccccgcccagggtggtcctgggatacacataggggtggagggaagtgactgctgctgttggatctcagaatacaaaagctagtactattacctaatggtctttttagtgtctctaatggtatcgctttttcatttctgatattttaactgggtatttctctccatgacccttggatattctagctagaggatcc

SEQ ID NO: 81586 - DNA, 658 bp, Homo sapiens
tggagggaagagagcaggtcacgctcacctgattctgatgaatcagctggcctgggtcatgcctctcagggagaaaacctttgagtccacagagctgctcacagataccactgcctgtgtgtaactgctgtagaccactgaggcagaccagagagcagataggtgctaagcaccagtgacattctgaggtcatggcacgaatcacagtggggccttgcccgggtcagcagcgcccagagtcagggtcctccgctgcctgaggcgtcaacatgcctgcctgcaatgtgtttgtgcacgtgcgtggacatgtgtatgtgggtatacacatctgtgcacgtgtgtgctgcttctctggccaggcccggctgccccactcatgtgtgcacccagttcctaatcactgtcacccccgaggcccagggccagcatcagagcatccatggctgctccctaacctcagccctccccgcccagkgtggtcctgggatacacataggggtggagggaagtgactgctgctgttggatctcagaatacaaaagctagtactattacctaatggtctttttagtgtctctaatggtatcgctttttcatttctgatattttaactgggtatttctctccatgacccttggatattctagctagaggatcc

SEQ ID NO: 81587 - DNA, 658 bp, Homo sapiens
tggagggaagagagcaggtcacgctcacctgattctgatgaatcagctggcctgggtcatgcctctcagggagaaaacctttgagtccacagagctgctcacagataccactgcctgtgtgtaactgctgtagaccactgaggcagaccagagagcagataggtgctaagcaccagtgacattctgaggtcatggcacgaatcacagtggggccttgcccgggtcagcagcgcccagagtcagggtcctccgctgcctgaggcgtcaacatgcctgcctgcaatgtgtttgtgcacgtgcgtggacatgtgtatgtgggtatacacatctgtgcacgtgtgtgctgcttctctggccaggcccggctgccccactcatgtgtgcacccagttcctaatcactgtcacccccgaggcccagggccagcatcagagcatccatggctgctccctaacctcagccctccccgcccagggtggtcctgggatacacatagsggtggagggaagtgactgctgctgttggatctcagaatacaaaagctagtactattacctaatggtctttttagtgtctctaatggtatcgctttttcatttctgatattttaactgggtatttctctccatgacccttggatattctagctagaggatcc

SEQ ID NO: 81588 - DNA, 708 bp, Homo sapiens
ccacagaggccaacaccgcccgcaccgtagccactgcccccaagtccgcctggagggaagagagcaggtcacgctcacctgattctgatgaatcagctggcctgggtcatgcctctcagggagaaaacctttgagtccacagagctgctcacagataccactgcctgtgtgtaactgctgtagaccactgasgcagaccagagagcagataggtgctaagcaccagtgacattctgaggtcatggcacgaatcacagtggggccttgcccgggtcagcagtgcccagagtcagggtcctccgctgcctgaggcatcaacatgcctgcctgcaatgtgtttgtgcacgtgcgtgcacatgtgtatgtgggtaaacacatctgtgcacgtgtgtgctgcttctctggccaggcccggctgccccactcatgtgtgcacccagttcctcatcactgtcacccccgaggcccagggccagcatcagagcatccatggctgctccctaacctcagccctccccgcccagggtggtcctgggatacacatagcggtggagggaagtgactgctgctgttggatctcagaatacaaaagctagtactattacctaatggtctttttagtgtctctaatggtatcgctttttcatttctgatattttaactgggtatttctctccatgacccttggatattctagctagaggatcc

SEQ ID NO: 81589 - DNA, 708 bp, Homo sapiens
ccacagaggccaacaccgcccgcaccgtagccactgcccccaagtccgcctggagggaagagagcaggtcacgctcacctgattctgatgaatcagctggcctgggtcatgcctctcagggagaaaacctttgagtccacagagctgctcacagataccactgcctgtgtgtaactgctgtagaccactgaggcagrccagagagcagataggtgctaagcaccagtgacattctgaggtcatggcacgaatcacagtggggccttgcccgggtcagcagtgcccagagtcagggtcctccgctgcctgaggcatcaacatgcctgcctgcaatgtgtttgtgcacgtgcgtgcacatgtgtatgtgggtaaacacatctgtgcacgtgtgtgctgcttctctggccaggcccggctgccccactcatgtgtgcacccagttcctcatcactgtcacccccgaggcccagggccagcatcagagcatccatggctgctccctaacctcagccctccccgcccagggtggtcctgggatacacatagcggtggagggaagtgactgctgctgttggatctcagaatacaaaagctagtactattacctaatggtctttttagtgtctctaatggtatcgctttttcatttctgatattttaactgggtatttctctccatgacccttggatattctagctagaggatcc

SEQ ID NO: 81590 - DNA, 708 bp, Homo sapiens
ccacagaggccaacaccgcccgcaccgtagccactgcccccaagtccgcctggagggaagagagcaggtcacgctcacctgattctgatgaatcagctggcctgggtcatgcctctcagggagaaaacctttgagtccacagagctgctcacagataccactgcctgtgtgtaactgctgtagaccactgaggcagaccagagagcagataggtgctaagcaccagtgacattctgaggtcatggcacgaatcacagtggggccttgcccgggtcagcagtgcccagagtcagggtcctccgctgcctgaggcrtcaacatgcctgcctgcaatgtgtttgtgcacgtgcgtgcacatgtgtatgtgggtaaacacatctgtgcacgtgtgtgctgcttctctggccaggcccggctgccccactcatgtgtgcacccagttcctcatcactgtcacccccgaggcccagggccagcatcagagcatccatggctgctccctaacctcagccctccccgcccagggtggtcctgggatacacatagcggtggagggaagtgactgctgctgttggatctcagaatacaaaagctagtactattacctaatggtctttttagtgtctctaatggtatcgctttttcatttctgatattttaactgggtatttctctccatgacccttggatattctagctagaggatcc

SEQ ID NO: 81591 - DNA, 708 bp, Homo sapiens
ccacagaggccaacaccgcccgcaccgtagccactgcccccaagtccgcctggagggaagagagcaggtcacgctcacctgattctgatgaatcagctggcctgggtcatgcctctcagggagaaaacctttgagtccacagagctgctcacagataccactgcctgtgtgtaactgctgtagaccactgaggcagaccagagagcagataggtgctaagcaccagtgacattctgaggtcatggcacgaatcacagtggggccttgcccgggtcagcagtgcccagagtcagggtcctccgctgcctgaggcatcaacatgcctgcctgcaatgtgtttgtgcacgtgcgtgcacatgtgtatgtgggtaaacacatctgtgcacgtgtgtgctgcttctctggccaggcccggctgccccactcatgtgtgcacccagttcctcatcactgtcacccccgaggcccagggccagcatcagagcatccatggctgctccctaacctcagccctcccygcccagggtggtcctgggatacacatagcggtggagggaagtgactgctgctgttggatctcagaatacaaaagctagtactattacctaatggtctttttagtgtctctaatggtatcgctttttcatttctgatattttaactgggtatttctctccatgacccttggatattctagctagaggatcc

SEQ ID NO: 81592 - DNA, 708 bp, Homo sapiens
ccacagaggccaacaccgcccgcaccgtagccactgcccccaagtccgcctggagggaagagagcaggtcacgctcacctgattctgatgaatcagctggcctgggtcatgcctctcagggagaaaacctttgagtccacagagctgctcacagataccactgcctgtgtgtaactgctgtagaccactgaggcagaccagagagcagataggtgctaagcaccagtgacattctgaggtcatggcacgaatcacagtggggccttgcccgggtcagcagtgcccagagtcagggtcctccgctgcctgaggcatcaacatgcctgcctgcaatgtgtttgtgcacgtgcgtgcacatgtgtatgtgggtaaacacatctgtgcacgtgtgtgctgcttctctggccaggcccggctgccccactcatgtgtgcacccagttcctcatcactgtcacccccgaggcccagggccagcatcagagcatccatggctgctccctaacctcagccctccccgcccagggtggtcctgggatacacatagsggtggagggaagtgactgctgctgttggatctcagaatacaaaagctagtactattacctaatggtctttttagtgtctctaatggtatcgctttttcatttctgatattttaactgggtatttctctccatgacccttggatattctagctagaggatcc

SEQ ID NO: 81593 - DNA, 1078 bp, Homo sapiens
agtgcctagggaattgccttccaaaaatcctccagatggtcacttccccaggaagagagcctagaggcaacccaggattacattctctatgaagagtctggaatctataaggagaatttagtctagaggaagggcctgagatccttttcctgagtttgttggttgagggagcatcctacactttgggatttgggaaagcggaaacttactcaatttcatatccttgtttggaaatacagaatcctaaccaagaccctggcctcaaaggagaactgctcagcttctacagagagtgactaaacagataaactgatggaaaaataaaaatttttctcaaacagttgtatttattctcttgtagcaaataagcaaatggctgactcagcctctgaagatcaccactatgatgagttttacctgtgaggcttctaaagcagaagttgccatgagcatctgttcactgtgcctatggagacacagccaggaaacatattaaaggatattaatttagatgattaaatgtatttagttgaataaatattataattttatattgaaattacttttatatgattgtgttttatgcactgatttcatcaagcaatctcactrcttactatgaacaagccgcattttattataatggcagtggacattataagttaatataaaattcttccaattctcttacagcctttgatgatgccctttgttcagcagaaatgtggttgctcctgagggagttaacaacatgataactaatttcttagaaaggtgaaagcaatttacaattattttattatatagttcggtatgtttattataactatgataaaatggtgacaaaaataaaatgtcaaatcacccataatcacaacacccaaagataatattttggtatgcaactttatcctccagtttacaaaaagtatattttgtaaaatatatcaagaaagagaaagagatttccaggagtaacgaagagcaacgcaacccccaaagctggctggctgatactgaccagctaagtgaactggcacacgttgttcaacttctctatgccttcattgtctcatct

SEQ ID NO: 81594 - DNA, 1161 bp, Homo sapiens
gtacatatatgtgtgtgtatgtgcatttacttaaataagggcacttttctgcatgtcctttttatctcaacaaagatgctgtaaataaataactagaaaaatattttggtagttatgggtcaagaagtactaaattgaaactagaattatagttaatttataaattaacataaaaattatggtctatttaaccattgattcattgaaaaacatctattctttccattagtgtttattacggatagagcagtaataaacattamtatacatgttttctgtgaatctgttttttatttctctaagacaaatgcccaagggtggaactgctgtatgatatggtaattatatgtctagttttacaggaaatttccaaaatctttaccagactgtttataccattctacattcgcaccaaaaatgttctacatattttccaccatgtttggtgttctcactattttttatttgcctattctggtagttgcggagtgatatcccattgtggttttaatttgcatttccttgatggttaataatgttatatcctcttctcatgcttttgtcatctgtatacagtttttggtgaaataaatggactactgatagatgcaacaacttgaatgactctccaggaaattatagtaaattaaaaaaaaacgctaacccaaaatatatatacaatataatccaacttataaagcattttagaaatcaagcataaggtagtggttgtcctgaatcagaaatgagtgaggtggagagaagaaaggaaacctacaaatggaaaatatgaaggattctcatgacgactttgtatcctgattgtggaagtttctcatgaatatacgcatggtaaaatgacaaagaactaaatatattcacacactgacaaaagtacaagtaattctgataaaatatctcaatactatttgtggatggtatcaatatcaataccacaatatactggttgtaatatttactatagtttcagtttatactaaagttttgaaagctattaccatggcaagaaattgggtaaagagtaccaaggatatcactgcattattttatacaactgcatgtgaatatacaattatccctaaaataattattcaagtaaaagtattcatgacatgtgaccaacaatacactcagaataaa

SEQ ID NO: 81595 - DNA, 596 bp, Homo sapiens
cttccttgcaccttatacaaaaattaatccaagatggactaaagacttaaatcttccctctgcttagaatgctcctgtacctgttggcagtacatgccagttcatgcaggctgcagacactctcagcaacaacatttgcacggaagggaaaggactctttgaaagttatatgccatcttaaatacattcctggctgttatcatagaacgagttaaagcatatcagtatttgtaactcagcaatacatgcttttgtatactttgaatgagaatttaccatatctttttaaaagaatccaatatacattctgatttatcatctgccattgcccgtttrtcttatctccctttctgaaatatcctttcaagatggaaagtacagctgattacagaaggtgtgtttataacttggtgacagagaaaggaaagtcaggcgagcactattgaatcagatagttgggggttttattgtgttctctgagctacttttaataaactttcttgatactcagtaaaaggatgtggtctccatcaaaagctcttttcggtaaccaaatcaacaagaggagaaaaacacacctacacagtcccaggtgc

SEQ ID NO: 81596 - DNA, 1081 bp, Homo sapiens
ggggagtccaactaatattccctggtcattattccaccaatttcctgagagtgtctaatttgtccctcataaccaacctctcctgaccgcagtatgagacacgtatcatcaccattcctatcttaccacatctatggaaactgaagcacaggtccaggatagtgcagcaaaccatgaccgatgggcagactggggaattgaattcaaaccatccgtctccagagcccatcatctatcaggctgagatgtgtcacaaggccagggtcccagaagagaacaaagcaattamttctggaggactgaggcagtgcccgctgtgcctgaggaattgtgcaggatactgtcacccagaaagagactctgtggaaagagcctggacatgcactctaatcacaggctctcaagagcaccccgagaagtgctgatgcttcacagagcagaagactcacacatgtcccctcaccataggaagccaccagaaaagccatgggacactactagttggccccagagttccatgcctttcttccctagtaagaaaacagtggccaggcccaggtcacaggctggaggttagatatttgttggcgtctcttggatcttagagtggctggcaattaattggcacccaaaattgcaaataaaaatgatgtgtgcttgcttgaaaggaaatcctccctttctatttcaccattcttccgcattgttccatgtgggtggacccatggccaggctccaaccacatggatggcaacaatatcatagaggaatacaggagaaaaaagatggaaggaatcgaggtccctgaatgatctcttatttttgagccacactgacaacctgagctttctgcctgcctctgatctctcacataaaagagaaataaacctctatcttatttaagccaccaacatttttgtctctttgttaaagaaatatggcctgcaccatcaagtcctataacacctcatattaatacttatgagaaatacataagtattaacattgctgaatggctaatcagaccaaataaatgataacatgtccaggattcagaagtcagagctgatttggctgaaag

SEQ ID NO: 81597 - DNA, 1290 bp, Homo sapiens
gcagggaagatcggccatgtcccagcatcacccagctttgcctccaaagctgctctctgaatcactgtgctccccacacagccgctaacatgtcagttgattttcaggcattgtaccaaagagcaggggcttctcaagctttccaaggccctggggaggcactcccaaaccagatttatgcatataacaatgtagtgctcatgggccaataataccatcacttctacagcactcattacatgttggctgtcattctgagtgctgtaatgcattctagcacatgtgttctttttctttttttaattgaaccatgttagtgaatctctagaattatcactttttgtcatcaaaacatgagccatatcacaagtaaacattactttgttctgtattttataatcagctcttatatggccagcatgtgaccaaatggataaayaaggtgatgcccacgatgatctcacagcttggaaagtagcagagtacactggtgagcaaccggacacctcatgtacactgtaccaagtgctctataaatgttccttcagttaggggcaccctgagatggaaggacccactggcctggtcttttcaaaagggatgcatgtaacactgttttgccattgataggtgccctaggtagagaaatttaccagtggggatttcagaataaagcagacaggtgtccaagatgagtgaggagctccaagagactgagcaggtcacagatgttgacaactggcaggactctatgttcgtagaggagatttgagctagatcaaaaaggatccaaatgtcatgctacaatagagctttgaatccaacaaaaacatttacccagtttcttttgagtggataatgtgctctctggaggcgaggggcagcctccaaatcaatttagcagagaagaattgacgcacagagtttcatcatcacagcagggcaggcagcagcaagaaggttggactagaaaggagttttacacatttcttgtagcagccaaaagtaaaacttcctttttcaatgtcttaaaactacattatttgtatcttttttcttggtttataaaacattataaacattttgtaagaacagagagtaaggccaggcgcaatggctcaggcttgtaattccagcactttgggaggctgaggcgggcagatcatgaggtcaggagttcgagaccagcctgactaacatggtgaaacaccgtctctactaaaaatacaaaaattagccagctgtggtggcacgtgcctatagtctcagctacttaggaggctgaggcag

SEQ ID NO: 81598 - DNA, 551 bp, Homo sapiens
ttttttttttaagtggagacagggtctctctatgttgcccaggctggaactcctggccttaagtgatcctctgtcttggcctcccacagtgctaggattacaggcgtgaaccacctcgcatagttctattattattattctttttaaatgaagtgtaacaaacacacagaaaagaccaggcatggtggctcactcctataatcccagcactttgggaagctgaggcaggaggatcacttgagcccaagaaattcaagaccagcctgggcaatacagwgaaacccccgtctcaattaaagaaaaataaaataaaatttaaaaaaatacagaaaagcccacatgtatatgtagcttgatgaaatttcacaaagtaaataaaccagctaattgctcccatttcaagaaacagcatatcaccagccagtctctctgaagacaccctaatgctgcccgtcaatcactagcccaccccatctcactgtgggggttgtggggagttcctcccagatcatctgcttcctaaaactgcggagaggctggtgtttacttta

SEQ ID NO: 81599 - DNA, 715 bp, Homo sapiens
gtaacttgctcaaggtcacacagtaagaagtctaaataaagtggaaggtaactatggaactgtgggaaatgagactgaactggatgaatggaaactggtcatgcagaatccttaaaaatcaggtagaggggtctgcacttgatgtaatgtgcaacagagacctctgtatgttcttaaaccaggagtgtggcgagatgatccaaatgatgacccaagacttcaaaagcatgggccagataggtgacttccgagtcaataaataaagcaaaactaacagtggttcacaaagagayagacctcggccttaggtcatcagcacagtgatgtcagcactataatcaaatcagctctgtgaagcttaccaaatgctaccagtgattcaagctacgatttcacaaaagtgctgctttgcccaaatgaccacaaacacactgaagtcacaaagagtatcatatttgaaaggaatctaacacaggaaggacaatgcataattagtgcatgtgacagagttcatttaaaattgaaaatgacaaatcaaaccacatgtcatctttgcctgcttaatcaggaaatctgcccactggcttcctcctatctttgcttgaaattgagttataactccctgtgctctccaaaatatgaggcattaaaacatcccttcctggaatacttgactcgagaaaaaatatgaatgttttttctcttcagggccaat

SEQ ID NO: 81600 - DNA, 715 bp, Homo sapiens
gtaacttgctcaaggtcacacagtaagaagtctaaataaagtggaaggtaactatggaactgtgggaaatgagactgaactggatgaatggaaactggtcatgcagaatccttaaaaatcaggtagaggggtctgcacttgatgtaatgtgcaacagagacctctgtatgttcttaaaccaggagtgtggcgagatgatccaaatgatgacccaagacttcaaaagcatgggccagataggtgacttccgagtcaataaataaagcaaaactaacagtggttcacaaagagacagacctcggccttaggtcatcagcacagtgatgtcagcactataatcaaatcagctctgtgaagcttaccaaatgctaccagtgattcaagctacgatttcacaaaagtgctgctttgcccaaatgaccacaaacacactgaagtcacaaagagtatcatatttgaaaggaatctaacacaggaaggacaatgcataattagtgcatgtgacagagttcatttaaaattgaaaatgacaaatcaaaccacatgtcatctttgcctgcttaatcaggaaatctgyccactggcttcctcctatctttgcttgaaattgagttataactccctgtgctctccaaaatatgaggcattaaaacatcccttcctggaatacttgactcgagaaaaaatatgaatgttttttctcttcagggccaat

SEQ ID NO: 81601 - DNA, 601 bp, Homo sapiens
ctgaataaaaaagactaagactggtaaattattaaatagcaagcacatagtacatattacgttccaagaaccaatttgtaacttatcctttggcagtgatagaacagaacacttttacaattttttaatttcaaatactgtcattttcaaaatactactgtcatggtctttcagatttcatctgtttttatcagaacctggaagagggagggaagatacataagatgataatgtatgtatctaggactatatcacaggctacttctacacatgattttaagtaaatctccacttaatttataattaaaatgatttcacaataactgtaagctcaraatatctgagacagctctcaagtcagtttagaaagtttattttcccagggttaaggtgtgcccatgacacagcctcaggaggtcctcaccacatgtgcccaaggtggttggggcacagcttggttttacacattttagagagacatgagacatcaatcagtatgtgtaaggtgtacattggtcttgaaaggcaggacaacttgaagaggggcgggggcttcaagcataggcaggtaagagagaaagggttgcatttttttgagttt

SEQ ID NO: 81602 - DNA, 993 bp, Homo sapiens
aacttgtggatccactattcagtatgaaagatggaaactgaaggagactggagcaaaattcagcttgaatgaacagagcactttttactaagtagtagatgaattttcagctatgcaatatgacaaaacatggggaattttgaagattgtcattttttcattcgagtctctatgttaaacattccatattttgaatatttatatcttgtacttgggtttaagagaagtagctggctctcaagattgactggctatttattataaagtactgaagtcacatagccacctataaaacagcatagaaatgtctgcctgtttaaaaagtcattttaaaggtagagtgtccacatcaggcaccatttgtgatatgactccagtggcrtatatttcattttttaatgacaagacactccaaacctttcagataacaaactatcattgcagaccttcacttttggaatgcaatctttatattttctgtgcatcacacacatgcttttctgcacgtggttgccttagtcatcttcctacagcaccatctagacatcaaaaattgtgctatatatcattggtaaaggaaatttgaagagatgacagtgcctaaaagtacagtttacatccttttggaaagtatgtgtaagtgcatgttttttgtgcaccttcttctatagcacttttttacaaatatcttatttttatttaacgacttgggttcatgtccctaatataagtatcttgacaattatgagctttatacctagcaagccacttcaggaaattcttttggagaatattttctgattattgttaaacttaatatacaattagctttattccttataaaatgtctaaaagaataatacgaagtatatataaaaggaattactgtaaactacattgccatagcaatttacataaaagtatattgttttttatctttaactcaaataaagcgtgtaataaataagttatctaaatttccagaagtgaacc

SEQ ID NO: 81603 - DNA, 993 bp, Homo sapiens
aacttgtggatccactattcagtatgaaagatggaaactgaaggagactggagcaaaattcagcttgaatgaacagagcactttttactaagtagtagatgaattttcagctatgcaatatgacaaaacatggggaattttgaagattgtcattttttcattcgagtctctatgttaaacattccatattttgaatatttatatcttgtacttgggtttaagagaagtagctggctctcaagattgactggctatttattataaagtactgaagtcacatagccacctataaaacagcatagaaatgtctgcctgtttaaaaagtcattttaaaggtagagtgtccacatcaggcaccatttgtgatatgactccagtggcgtatatttcattttttaatgacaagacactccaaacctttcagataacaaactatcattgcagaccttcacttttggaatgcaatctttatattttctgtgcatcacacacatgcttttctgcacgtggttgccttagtcatcttcctacagcaccatctagacatcaaaaattgtgctatatatcattggtaaaggaaatttgaagagatgacagtgcctaaaagtacagtttacatccttttggaaagtatgtgtaagtgcatgttttttgtgcaccttcttctatagcacttttttacaaatatcttatttttatttaacgacttgggttcatgtccctaatataagtatcttgacaattatgagctttatacctagcaagccacttcaggaaattcttttggagaatattttctgattattgttaaacttaatatacaattagctttattccttataaaatgtctaaaagaataatacgaagtatatataaaaggaattactgtaaactacattgccatagcaatttacataaaagtatattgttttytatctttaactcaaataaagcgtgtaataaataagttatctaaatttccagaagtgaacc

SEQ ID NO: 81604 - DNA, 559 bp, Homo sapiens
tgtgtgtgcagacattgttctatatacagtaggggatgaatatatggacatggcttaattttattttctctggtgtttttgaaaatctgttaactgatgtgtgtattacttttctagagctgctgtaacaaatttccacaaactggatggcataaaacaagataaatatattctctcacagtttaggaggccagaagtcttcattaaggtctccacagggtaggctctttctggaggctctgaaggagaacctattcttgttcctctcctggctcctkgtcattacgggaaatccttggcatttcttggctcttagctggcttcccttcaatctttgcctctgtcctcacatggcctgcttccctctctgtgtgtctgtcttctccttccagaaagataccagttattggctatagggcccaccctaaaccaatataactttatattaactaattgcatttgcaaacattctattttccaaataaggccacattctgaagttctagatgaacatgaatttttgaaagacacaattcaaaccagttacaatgtccatgtg

SEQ ID NO: 81605 - DNA, 679 bp, Homo sapiens
ggccaagtcaattaaacctatgggccatcttgggtcatgattgaagcttaccagggtctttgattacacttaacatttactaattcactctttaagtcctatgttatctgccctgtacctatttcccaagtttcttcttttattgtatttcttctccaaagtgtgcctctaggatttcctaccagctgcttctttttaggaactgctcttaccccattctaatggttactactggtactcccagcctcatcactcatattgatttttggctattgattttaggaatacacataatccaaagtagaccggtcacaataacmtttgcttcaggccatagtttgttggtccaagtaggtccaggagattatccagtttcttctctggtcaatggtctttatttataactgcaaaaggtacatgacaacccacaccatagagttctagtaatatcacatttgtttattgacaccagtaactgttgagcaaaggaataaaatggaatctcctgagtgttcatagtggtgtctggactatggttggaacaatcagtagtatacatgtagaacaaaaatattcagaagacaacacccacccccataccacattgcatatttataaattaacctaagggagggtagaaaatatctaatatctgcaagtggctatatatatatatata

SEQ ID NO: 81606 - DNA, 2168 bp, Homo sapiens
ttctttgcatggtgagagtacagttaatatttatgcctttttttcttctctttctttgtaaactgatctttcttcttttacaatgagaattcaatactttacaatcataaacagcaataaagtgatttccattctgacaataaaagagagtgcaggctgcatagggaaggtgaggatgggggttgttgttggacacataaagaaaccaagtagagcaggtgtcagataaagaaaagggaaagcagagaagagagggaagaacagctaagcctggtaaactctgccttctcctaagttcttatcaccttggcacattggcccccaggttgcagtcctgcccttctgaggctagtaagaaacttgtgagtcagcccagcagggataattgccgtgctcaagctatattggattgtttaagattgaacacctttccttctgcttagcagcctgcaaactggcctggggccacctgctccaaggcccaatgtattcatttcagatgtgcaacccacgatggcagggttgactagcagcttggtgggaaagcaagggaatggaggctatttatagcagatggcaacaaaggtttcctttctttcctttaccactggttgtatttctctgaaactctgcccatactgtgcagaaatcaaaagggcaagagaccaagttcttcagagctggttggaaagttccagggctctgtttttagagcaaatctgccagcttcagaggaggttgcaaccacccctggattctaaatcagcttgatggtggtgcaaatagatgcaaataagggtcaaatcaatttccataatgaacagcacgagaaaagcagactcccctccacctgactcaaaattattagaaaatccaatgagggggaaaagaaagaaagaaaaaataaaacacaaacacgtgagtaacttgatttttggatcttgggaatagaaactctaaggtccaagaattattctggactttacgttgcaggcttgtgtaggaagggataattccagtgcagcccttctgaggattttgattgtgaccgggccttagctttctttatcatgcttcatccttccctgttcctgagctccacttgttaccacaccctggttggttgagatgtaattcatctaccataaaatttacacttttatagtgtacaattcagtggttcttagaagagtcacagagttatacaaccatcattactatctaaatttggaactttcatcacccctaaaagaaatattgtagttatcagcagtcacttcccattcttccctcccttagactctggcaaccacaattgacttcctttctctatggatgtacctatcctggagattttgtatgaatgtaaccatacaccatgtggccttttgtgactggcttctcttgctatgcctagtattttcaaggtctgtccatgttgcagcatgcatcagtgcttcattgttttttatggtaggttgttctttttaagcaaaaccattgcagaggccatgtaccgctgtgtctcagaggattgcagtgagttccacatgtttcctggaaaaccacgtggattaggagatgatagtaacatggcttaatcttattacttttttactaagtctttggtgactccctttagctgctgatttccctgcattttaaaaattacgtttaagtcattcaactaatactgggctgagtcaacttacgtttataattaacaggtgattttatgagccacagtgcagaagcattcattttcaaaaactattttggtacttctggcacagcctatgtcactacrtatggttgacttgcatctatgaaagagatgagagttactagagctataatacatatgggccactgactgaaccatctgagaaaattttaattggtgtgagtagggaatgcaataatttatatggatccattacttttaaatgcttaagtctatgaagggaactaattgcataggttttattttctgtaaggtcttgaatgcctttggatgacccgatatatcttcgtataaagtgatacttccatgcaaggcattatctttaagagacatttatcaaatgcttccctcgtgcatgcccatactttgaagaaatgcgattcacatcaggaattatgcacagcaaaccttctgctcctgacta

SEQ ID NO: 81607 - DNA, 1144 bp, Homo sapiens
tgcattagttaaaataatccaatgagtattagttctaatatttcaaagacatgctagttctaatgggaatattattcttcttagctactattactctcaataactcttcttgttaactttcattgtttctaaatagcacttaacatgtcaggtgcttttcttggtgcttcctatacattacctgatttgatccttacactttgtcatggtgtttgctggtatctctgttattaaagtgaggagactgaagatcaaacacatgtcgttactataatatgggtggtttagggctagcattttccaaagttacttcagagaatattaagtattatcaaaagcaaagagtggccctagaatattgagaagtgttagattaaataaatatacacatgctttttaacaagacttttcgggtcattaatatgctaatataatgtacctccctaaaagggctttagcatgtggcttttcttagttacttgagcacagaaacaatttctttactggagccacttacacatttaatacaaggaagaacacatcctagaacatgcctatttaagtcagcttagccctggagcatgatatatgtccatacctttgtttttctgtggcattttctttcaaattttccctcttgagtctttctgctgtatcatactgctataggcatttggtgctatcatgtatttctgatttctcactacatcctggacttggatgtacattttgattgacacaytgttgctggtcatgcaaacatgattttactttgaatatgattttagtttgatagatgcctagtgtgtttgtcatatacatagagcctgaccatacaggattttcttttggccaactttagctctagaccattaccccaatgccatggtcattccttaggcactgcaggctttgtgccaggcctggtttctattgacctacctctgctctcttttgctccttccatattagtccaatactcgaaacactttctatatctaatgagacttagtatgaatccgttgccttggatatgaaggcttggtgtcccttcctgagcatgagttctccctgcaggaccatgagtcactgctctttgtccctactggtcctagactttatgtggtcagataacatttctgtt

SEQ ID NO: 81608 - DNA, 680 bp, Homo sapiens
tagtcagaaaggggatatttaacatgcctttatttacatcttcctttttatgcttcttttttgttttgagacggagtcttgctctgtcgttcaggctggagtgcagtggcgcgatctcggctcactgcaagctccgcctcccgggttcacgccatcctcctgcctcagcttcctcctgcctcagcttcctcctgcctcagcttcccaagtagctgggactacaggcacctgccaccgcgcccggctatttttttttttttttttttttttttggatttttagtagagacggggtttcaccgtgttagccaggatggtctcgatctcctgacctcgtgatctgcccacctcggcctcccaaagtgctgggattacaagcatgagccaccacgctcggcctawgcttctttttaagaacttactttatagtttaaccatgacctggtcccatatatcagggacccccacccctgggccagggactggaccacagcttgataggaactgggccacatgcaagaggtgagtggcaggtgagcaagtgaagcttcctctgtatttacagttgctccccatcactggcagtactgcctgagctctgcttcctgtcaaatcagcagtggcattagactctcagagaagcatgaatcctattgtgaactgtgcatgggagggatctag

SEQ ID NO: 81609 - DNA, 680 bp, Homo sapiens
tagtcagaaaggggatatttaacatgcctttatttacatcttcctttttatgcttcttttttgttttgagacggagtcttgctctgtcgttcaggctggagtgcagtggcgcgatctcggctcactgcaagctccgcctcccgggttcacgccatcctcctgcctcagcttcctcctgcctcagcttcctcctgcctcagcttcccaagtagctgggactacaggcacctgccaccgcgcccggctatttttttttttttttttttttttttggatttttagtagagacggggtttcaccgtgttagccaggatggtctcgatctcctgacctcgtgatctgcccacctcggcctcccaaagtgctgggattacaagcatgagccaccacgctcggcctaagcttctttttaagaacttactttatagtttaaccatgacctggtcccatatatcagggacccccacccctgggccagggactggaccacagcttgataggaactgggccacatgcaagaggtgagtggcaggtgagcaagtgaagcttcctctgtatttacagttgctccccatcactggcagtactgcctgagctctgcytcctgtcaaatcagcagtggcattagactctcagagaagcatgaatcctattgtgaactgtgcatgggagggatctag

SEQ ID NO: 81610 - DNA, 609 bp, Homo sapiens
cataattataaaaacatatcagagtcccagatgaggctttgttgaataatattatttgaaatattgaataatcttcaccagttcaacttctcaaagtagatacaatcattttccctgtgacttctcttcattttatttttctctaaccaataccattaatgttctaatcycaaggttgcaccatctgtgctattctttaatagaaatctggctcatattcactgactttattataaagaaagtccccattacttgccattctactttctaaatatgtctttacactgtactttaattagcattcttaatgtcattatctaaatcccttgtaatgtcacaacaacctaagtggtcatcttttctccagttttgtcctccctacatgctaaactgtttgaactttcaacatgctttcctctctgttgtatttcattgcagtctcccaacacctccctttactcattccatataatccaactcaagcttgcctttctttgttatcttcttactcccattatcttggtctatttaagatgtccatttgtgtgtttccttagcatattaataattccaaattagagcactcacctttatttatcaattaatgaa

SEQ ID NO: 81611 - DNA, 1150 bp, Homo sapiens
accctttagcatgactacccttccagcaatggaaatttagtcatgttttcctgaaataaaagcagtgaggtgacaygttccttgcttggctcatggggtgagaaggtctctcttgaggctgtctgttacattgccatgccttcttactaatgaatgcttcccctacttgtacacttctttaggcaaaacaattttctttcaaggtgctttataatgtcattagattttccatttgtgttcaaatgtaccacattcatgaggaggagttgctagcagtgggtttctctgaaatgagggaccaagaaggctgctttctacagaacatttgacttcttgctccttatacctctgtttcttaaatgcaagcattctagttgtttgctattttgtctcacccaactttattttatggatatgaagataagtagaatattggggtaagcacactttaaccatggatgtcagggacactatgacattatgatgttagaaaaaagatgagcaggtctgaacactggtcactgacatcaacattttgatatgacaataatatcttatttcttttatctttttaagagtagtatttaccaggctctaaaagacacacatatttggttcatgaagaataactgtgaggtcattttgtaagtcaagaacacgtatcatctatgatggctgcagtctaccccaaactggggctataagagtgtgctttagaacaaagttctgaatactgcaagaatcctggcatatatgacctgtttctcttagattgatacagctgatcctccagtaacatcctttcattgaaagccttttgtattataacactgatgaggatgtgaaccccaaaaacctgagacaggtctcagtttatttagtaagtttattttgccgaggttgaagatgggcccatgacacagactcagaagatcctgatgacacgtgtccaaggtggtcagggcacagtttggttttatacatttttgggagacatgagacatcaatcaacaaatgtaagatgaacattggttccatttggaaaggtggggcaatgtggaagcagggaggggtcttccaggtcatatgcagataagagacaaatggttgcattcttttgagtttctgattagcctctccaaaggaggta

SEQ ID NO: 81612 - DNA, 1150 bp, Homo sapiens
accctttagcatgactacccttccagcaatggaaatttagtcatgttttcctgaaataaaagcagtgaggtgacatgttccttgcttggctcatggggtgagaaggtctctcttgaggctgtctgttacattgccatgccttcttactaatgaatgcttcccctacttgtacacttctttaggcaaaacaattttctttcaaggtgctttataatgtcattagattttccatttgtgttcaaatgtaccacattcatgaggaggagttgctagcagtgggtttctctgaaatgagggaccaagaaggctgctttctacagaacatttgacttcttgctccttatacctctgtttcttaaatgcaagcattctagttgtttgctattttgtctcacccaactttattttatggatatgaagataagtagaatattggggtaagcacactttaaccatggatgtcagggacactatgacattatgatgttagaaaaaagatgagcaggtctgaacactggtcactgacatcaacattttgatatgacaataatatcttatttcttttatctttttaagagtagtatttaccaggctctaaaagacacacatatttggttcatgaagaataactgtgaggtcattttgtaagtcaagaacacgtatcatctatgatggctgcagtctaccccaaactggggctataagagtgtgctttagaacaaagttctgaatactgcaagaatcctggcatatatgacctgtttctcttagattgatacagctgatcctccagtaacatcctttcattgaaagccttttgtattataacactgatgaggatgtgaaccccaaaaacctgagacaggtctcagtttatttagtaagtttattttgccgaggttgaagatgggcccatgacacagactcagaagatcctgatgacacgtgtccaaggtggtcagggcacagtttggttttatacrtttttgggagacatgagacatcaatcaacaaatgtaagatgaacattggttccatttggaaaggtggggcaatgtggaagcagggaggggtcttccaggtcatatgcagataagagacaaatggttgcattcttttgagtttctgattagcctctccaaaggaggta

SEQ ID NO: 81613 - DNA, 1431 bp, Homo sapiens
tgggcttccctcagaataccagcttgggaagagtgaatctgagtgtgtgagctggggcagagcccagagaggagcagtgtggtcagacataaggagggagacttttcaatctggaagcatgaatggtgcaagctgtgtatctgaagaatttgggagaaaaatgaacctcttgggggaatcctgcaccatcctcaggaccccagtgagaatcctgcagtttcgggggtctttctaccatgttctggttgcctgtgcttctgaaggtgctcctctgctgtccaggtcagagtagctttcagagcccatctgaagggacggcctgacttcaattccactcacagaatttctactgggattccaaagcttctccaggcttttgatgggggtctctaaaatatttctgaatttctgttttcctcccccagcctgagctgtgagagaagctgaatcctctgcttcctggaaatgtcagccgatctctcctgcaccgaggactatggccacaaacaatgctaagagacactctccctggaatcagcagtgactcatacattctccccaaattctactgagctttttgggtgcacatagcaaggcacaaagcagggagctcctcagctgctcttccggacctaaagaggcacccaggaccaatggaggggaagtttgtctgccttccacaggaagagctgactcctctggttttcctagaagtgccaggctgttggcagagcctgggacaggtcccagtgcagggggccatcccttctaggatccccttgcccagtcttagagctgaygaggctgcacctggaatgcagtgagtctgtttctgagtcagggctttctttgcccatggtgtttgccctctccatgtttctaacagtagaaatcactgttcaggccctgctggacttctttagtcctcaacaggatctcattccaggtcgcatttgtgaccgtcttttccaagatcaggggctgcccctccttttttccccaataaagatctgaggagaagctcactctgaaagcagagtagatgcctaagaaggtgcttgtggcagcctggggtgggggaggtctgggaactcgctgcaggctggatggagccaggaggactaaggaaaagaacagggcccagaaagggagtggcccagaggagctgatgtgggccagagtaagtacagaggagagagatggcagcagggtagggggccgggttatttggctttcacagagccgcgtccctgataagctgtggacttgtgtctgagatcctcaaaggacctgtgcctggatgtggagctgtgagtttctaaggccctttgatttcaccctggtctacatgaggttccagtggctgccccatctcaccccaggggcaaagagtcagtctagcagggagacatggggagagagagtcaatgg

SEQ ID NO: 81614 - DNA, 1431 bp, Homo sapiens
tgggcttccctcagaataccagcttgggaagagtgaatctgagtgtgtgagctggggcagagcccagagaggagcagtgtggtcagacataaggagggagacttttcaatctggaagcatgaatggtgcaagctgtgtatctgaagaatttgggagaaaaatgaacctcttgggggaatcctgcaccatcctcaggaccccagtgagaatcctgcagtttcgggggtctttctaccatgttctggttgcctgtgcttctgaaggtgctcctctgctgtccaggtcagagtagctttcagagcccatctgaagggacggcctgacttcaattccactcacagaatttctactgggattccaaagcttctccaggcttttgatgggggtctctaaaatatttctgaatttctgttttcctcccccagcctgagctgtgagagaagctgaatcctctgcttcctggaaatgtcagccgatctctcctgcaccgaggactatggccacaaacaatgctaagagacactctccctggaatcagcagtgactcatacattctccccaaattctactgagctttttgggtgcacatagcaaggcacaaagcagggagctcctcagctgctcttccggacctaaagaggcacccaggaccaatggaggggaagtttgtctgccttccacaggaagagctgactcctctggttttcctagaagtgccaggctgttggcagagcctgggacaggtcccagtgcagggggccatcccttctaggatccccttgcccagtcttagagctgacgaggctgcacctggaatgcagtragtctgtttctgagtcagggctttctttgcccatggtgtttgccctctccatgtttctaacagtagaaatcactgttcaggccctgctggacttctttagtcctcaacaggatctcattccaggtcgcatttgtgaccgtcttttccaagatcaggggctgcccctccttttttccccaataaagatctgaggagaagctcactctgaaagcagagtagatgcctaagaaggtgcttgtggcagcctggggtgggggaggtctgggaactcgctgcaggctggatggagccaggaggactaaggaaaagaacagggcccagaaagggagtggcccagaggagctgatgtgggccagagtaagtacagaggagagagatggcagcagggtagggggccgggttatttggctttcacagagccgcgtccctgataagctgtggacttgtgtctgagatcctcaaaggacctgtgcctggatgtggagctgtgagtttctaaggccctttgatttcaccctggtctacatgaggttccagtggctgccccatctcaccccaggggcaaagagtcagtctagcagggagacatggggagagagagtcaatgg

SEQ ID NO: 81615 - DNA, 1431 bp, Homo sapiens
tgggcttccctcagaataccagcttgggaagagtgaatctgagtgtgtgagctggggcagagcccagagaggagcagtgtggtcagacataaggagggagacttttcaatctggaagcatgaatggtgcaagctgtgtatctgaagaatttgggagaaaaatgaacctcttgggggaatcctgcaccatcctcaggaccccagtgagaatcctgcagtttcgggggtctttctaccatgttctggttgcctgtgcttctgaaggtgctcctctgctgtccaggtcagagtagctttcagagcccatctgaagggacggcctgacttcaattccactcacagaatttctactgggattccaaagcttctccaggcttttgatgggggtctctaaaatatttctgaatttctgttttcctcccccagcctgagctgtgagagaagctgaatcctctgcttcctggaaatgtcagccgatctctcctgcaccgaggactatggccacaaacaatgctaagagacactctccctggaatcagcagtgactcatacattctccccaaattctactgagctttttgggtgcacatagcaaggcacaaagcagggagctcctcagctgctcttccggacctaaagaggcacccaggaccaatggaggggaagtttgtctgccttccacaggaagagctgactcctctggttttcctagaagtgccaggctgttggcagagcctgggacaggtcccagtgcagggggccatcccttctaggatccccttgcccagtcttagagctgacgaggctgcacctggaatgcagtgagtctgtttctgagtcagggctttctttgcccatggtgtttgccctctccatgtttctaacagtagaaatcactgttcaggccctgctggacttctttagtcctcaacaggatctcattccaggtcgcatttgtgaccgtcttttccaagatcaggggctgcccctccttttttccccaataaagatctgaggagaagctcactctgaaagcagagtagatgcctaagaaggtgcttgtggcagcctggggtgggggaggtctgggaactcgctgcaggctggatggagccaggaggactaaggaaaagaacagggcccagaaagggagtggcccagaggagctgatgtgggccagagtaagyacagaggagagagatggcagcagggtagggggccgggttatttggctttcacagagccgcgtccctgataagctgtggacttgtgtctgagatcctcaaaggacctgtgcctggatgtggagctgtgagtttctaaggccctttgatttcaccctggtctacatgaggttccagtggctgccccatctcaccccaggggcaaagagtcagtctagcagggagacatggggagagagagtcaatgg

SEQ ID NO: 81616 - DNA, 623 bp, Homo sapiens
ttcacttgggtgcccattatgcaggcttcctcaacacagggaaggtcactcatcacccacaggcccttgatcgttatccaccctttgatgctgtcagattccagaacacgctgcactagtctcttccttcatagggagagaggggatgtgttatgagaaaatctctcatcaatctgacctagctccccmaaaagatgtaacttttaaaatgtcagatggaaatatttaaaaagtgttacatgcctgtatagttttagtattttacttaaagggaatgtggctgtctttactggctacaaccagtttaattcaagaagggctgctggtcatcaggagaacaagcaagggttgatgctgcccagagtctccagctaatacacaatatggacatccccttccagggcagtgggaagagtgtggctccttgtgcagtgaagctgacatccaccaactaaggcttctggaagcatgtggagactcacagggagtgggcagggtctcagcatctggctagcagtgaaagacgctgagaagaaggtgctttccgtgtggattggctcactgtttttgcccagtaatgttccaggcctttggtgtccacctagtgtgtattaacccactga

SEQ ID NO: 81617 - DNA, 623 bp, Homo sapiens
ttcacttgggtgcccattatgcaggcttcctcaacacagggaaggtcactcatcacccacaggcccttgatcgttatccaccctttgatgctgtcagattccagaacacgctgcactagtctcttccttcatagggagagaggggatgtgttatgagaaaatctctcatcaatctgacctagctccccaaaaagatgtaacytttaaaatgtcagatggaaatatttaaaaagtgttacatgcctgtatagttttagtattttacttaaagggaatgtggctgtctttactggctacaaccagtttaattcaagaagggctgctggtcatcaggagaacaagcaagggttgatgctgcccagagtctccagctaatacacaatatggacatccccttccagggcagtgggaagagtgtggctccttgtgcagtgaagctgacatccaccaactaaggcttctggaagcatgtggagactcacagggagtgggcagggtctcagcatctggctagcagtgaaagacgctgagaagaaggtgctttccgtgtggattggctcactgtttttgcccagtaatgttccaggcctttggtgtccacctagtgtgtattaacccactga

SEQ ID NO: 81618 - DNA, 843 bp, Homo sapiens
tcctgcctcagcttcctaaagtgctgggattactggcatgagtgactgtgtccaggccacatgcaacttaaaggaagcacagggaagtgctcagtgtgagggaaaaaaacataacagcagggggcaaggctggaggaaaatgttgaggtgacatcaatgagaacttcagggacccgtgtcctacagagtcggaaagagaagctaaagttctacagtgatgagaatgttatccctgcaaggatggttaccaaggaatatcagaaataaagagcacctgaatgaaaacttttaacctgttgtagcaatttatccaccagaaatatctagttattgagttactgatggaaaaataatgaaatactactttgtstgtgattgagtttcagctgtagaacatcaaagcaaccaaatagaatttgatcattttaagtatttcccacccgttcttgttctttgttttgttttggagacaaaatctcagtttgtcatttaggctggagtgcagtggtgcaatctgggctcattgtaatcctttccttcagggctcaagtgattcttgtgcctcaaccactcaaatagctgggactgcaggcacgttccaccaagactggctgatttttgtatttttaatagagatggggtttttccatgttgatcagcctggtctcaagatcctggcttcaagtgatccactgaccttggcctcccaaagcgctgggaaaacaggcatacagatgatctccacccattctttacttctcttcagtcatcagtttttttcttacttttttgcccaaggggagcagctcggtcaggcgcgaagggacgggcagagaggggccc

SEQ ID NO: 81619 - DNA, 843 bp, Homo sapiens
tcctgcctcagcttcctaaagtgctgggattactggcatgagtgactgtgtccaggccacatgcaacttaaaggaagcacagggaagtgctcagtgtgagggaaaaaaacataacagcagggggcaaggctggaggaaaatgttgaggtgacatcaatgagaacttcagggacccgtgtcctacagagtcggaaagagaagctaaagttctacagtgatgagaatgttatccctgcaaggatggttaccaaggaatatcagaaataaagagcacctgaatgaaaacttttaacctgttgtagcaatttatccaccagaaatatctagttattgagttactgatggaaaaataatgaaatactactttgtctgtgattgagtttcagctgtagaacatcaaagcaaccaaatagaatttgatcattttaagtatttcccacccrttcttgttctttgttttgttttggagacaaaatctcagtttgtcatttaggctggagtgcagtggtgcaatctgggctcattgtaatcctttccttcagggctcaagtgattcttgtgcctcaaccactcaaatagctgggactgcaggcacgttccaccaagactggctgatttttgtatttttaatagagatggggtttttccatgttgatcagcctggtctcaagatcctggcttcaagtgatccactgaccttggcctcccaaagcgctgggaaaacaggcatacagatgatctccacccattctttacttctcttcagtcatcagtttttttcttacttttttgcccaaggggagcagctcggtcaggcgcgaagggacgggcagagaggggccc

SEQ ID NO: 81620 - DNA, 691 bp, Homo sapiens
agaaaagtcagagagagggaaaagaagcagggaagagagcagctgatatccaggatgtgaagtataagttcagaagtgagtccttttttttttttttttctgagacggagtcttgctctgtcgcccaggctggggctagagtgcagtggcgcgatctcagctcactgcaagctccgcctcccgggttcacattattctcctgcctcagcctcccgagtagctgggactacaggcgcccgccaccacgcccggctaatktgtgtgtgtgtgtgtgtgtgtgtgtgtgtgtgtgtgtgtgtttagtagagacggggtttcaccatgctagccaggatgttctcgatctcctgaccttgtgatccgcccgccttggcctcccaaagtgctgggattacaagcgtgagccactgagcccagcctcagaagtgagtccttaaattctcagcctctcttctatttttcctcaggaggtggaaacttcaagtgctggatttacaggatgtcagtgagaacttctggatggtttggtctgaagccatggcccgtaggtgcttaccaaatgccatgatgaacagaaaaccagtgcacgactgtccaaggatgagaggacagcagcccttgactgtgttcatagacctttgcctcaagaacaggactctggatgaatactccacctgcctctttctatggg

SEQ ID NO: 81621 - DNA, 2277 bp, Homo sapiens
atcaccctcgaataaaacttgtccctacaaacttgaacaggaaaagaaaagccttggctacgggagcgtcttgggttgctgtttcaagccaggtctactgacagaaaagcaaaatgaattgggtctttatagtttgggtcatgaatgccttgatttcttctttttcatggaagcacaattcattgttatggatttcccaacctctagattcttctgctaacttattttggtattggatatgtcaacctaaacctcatctgttctagaccattatgactctctgatgcagacagcttataatgtttcaaatatctgtatctgcacatttgagtacccaaagactccccaaagtgtggagtatcaagtatgcctcatctgactcattcatggagctaccaaacacccttgtttgtatttggcttcttgacagagatgtcccctttcattcttaaagtatgtcatatgaaaattctcattggatgatgatttgcaaagaacttcatttgaccccagttttgcagcatgggaaggatattggataggcccagccttacctgagtgtgacaacagcataacaggtccgtgggtagattaaatggctttaataacagccacaactattgacaccatgacctgtgctcctgtgggatgtttttctgtctgcagtcaggaaacccatccttggacctataggtgctttaagggaggagatcatggacaatgtttattgggatactcatttacgccattatcagaacacagtaatataatactagagaagttccttaaaacttttccagggtctcaaggaattttggaagaagactccatgggggtggtccccgaaaaaaaattttcaggaggattcctgctggcccagggtacttctttggacacactttgctcctatgatgagggtggcttctcatcaacatgtttttagaaacttatctaacactttaaggactatatctgacgaaactgctgctgctattgcagcatagcaaaagtctttggattctctagttgaagttgttttggataattgcatagcattagattacctgctggctgaacaagatggagtaggtgtaataccaaactcttcctgctgcacttagattaacaactcagccaaagttaaaatgcatatagataaaataagaaaacaagcttcatggttaaaacaagtaaatgatgaagcaggattaggtgattggttttctggattattttgttggatcccacagggatctgatttgtattttctggcatctttaaatttggcttacctctcttattaattattattattcagtatttactattattttttgagatggagtttcactcttgttgcttaggctggagtgcagtggtgcaatctcggctcactgcaacctccgcctcccgggttcaagtgattctcctgcttcagcctcccaagtagctgggattacaggtgcctgccactacgcccagctattttgtgtgtgtgtgtgtgctgttgtgttttgttttgagccagagtctcgctctgttgcccaggctgccaggctggtgtgcagtggagtgatctcagctcactgcaaactctgcctcttgggttcaagtgattctcctgcctcagcctcccgagtagctgggattacaggtcataccaccaccacacctggctaatttttgtattttgagtagagatgggatttcaccatgttggccaggctggtcttgaactcctgacctcaggtgatccacccgcttcagcctccaaagtgctgggataacaggtgggagccacctcacctggcctcttattaattattattgaagcttatttctttattaatgtcatcatcamatgtgatttaaggtgcttctctaagactatagataagagtactcagataatggtattgcaatgtgcagggtactggcccagcacctgtgaatattttcaaattcaggtggataggttatgtttatcaatttccctcatctttaccccttatcagcaggaattagccagaaaaaaatgacacccttttttctacattaatgagtaatagataaagacaggccccttgagctttcagcaccccaacattttttgtgacagaaataataaaaattctgatcgggcccttgcctgcttgcacaaaagccaacatctcctgttaccataatataattataaactgctgatgtattgtttctttgtcaaggaggagaaaaaagttcagagttacaaaatgttttttctgaaggaatgaatgc

SEQ ID NO: 81622 - DNA, 2277 bp, Homo sapiens
atcaccctcgaataaaacttgtccctacaaacttgaacaggaaaagaaaagccttggctacgggagcgtcttgggttgctgtttcaagccaggtctactgacagaaaagcaaaatgaattgggtctttatagtttgggtcatgaatgccttgatttcttctttttcatggaagcacaattcattgttatggatttcccaacctctagattcttctgctaacttattttggtattggatatgtcaacctaaacctcatctgttctagaccattatgactctctgatgcagacagcttataatgtttcaaatatctgtatctgcacatttgagtacccaaagactccccaaagtgtggagtatcaagtatgcctcatctgactcattcatggagctaccaaacacccttgtttgtatttggcttcttgacagagatgtcccctttcattcttaaagtatgtcatatgaaaattctcattggatgatgatttgcaaagaacttcatttgaccccagttttgcagcatgggaaggatattggataggcccagccttacctgagtgtgacaacagcataacaggtccgtgggtagattaaatggctttaataacagccacaactattgacaccatgacctgtgctcctgtgggatgtttttctgtctgcagtcaggaaacccatccttggacctataggtgctttaagggaggagatcatggacaatgtttattgggatactcatttacgccattatcagaacacagtaatataatactagagaagttccttaaaacttttccagggtctcaaggaattttggaagaagactccatgggggtggtccccgaaaaaaaattttcaggaggattcctgctggcccagggtacttctttggacacactttgctcctatgatgagggtggcttctcatcaacatgtttttagaaacttatctaacactttaaggactatatctgacgaaactgctgctgctattgcagcatagcaaaagtctttggattctctagttgaagttgttttggataattgcatagcattagattacctgctggctgaacaagatggagtaggtgtaataccaaactcttcctgctgcacttagattaacaactcagccaaagttaaaatgcatatagataaaataagaaaacaagcttcatggttaaaacaagtaaatgatgaagcaggattaggtgattggttttctggattattttgttggatcccacagggatctgatttgtattttctggcatctttaaatttggcttacctctcttattaattattattattcagtatttactattattttttgagatggagtttcactcttgttgcttaggctggagtgcagtggtgcaatctcggctcactgcaacctccgcctcccgggttcaagtgattctcctgcttcagcctcccaagtagctgggattacaggtgcctgccactacgcccagctattttgtgtgtgtgtgtgtgctgttgtgttttgttttgagccagagtctcgctctgttgcccaggctgccaggctggtgtgcagtggagtgatctcagctcactgcaaactctgcctcttgggttcaagtgattctcctgcctcagcctcccgagtagctgggattacaggtcataccaccaccacacctggctaatttttgtattttgagtagagatgggatttcaccatgttggccaggctggtcttgaactcctgacctcaggtgatccacccgcttcagcctccaaagtgctgggataacaggtgggagccacctcacctggcctcttattaattattattgaagcttatttctttattaatgtcatcatcaaatgtgatttaaggtgcttctctaagactatagataagagtactcagataatggtattgcaatgtgcagggtactggcccagcacctgtgaatattttcaaattcaggtggataggttmtgtttatcaatttccctcatctttaccccttatcagcaggaattagccagaaaaaaatgacacccttttttctacattaatgagtaatagataaagacaggccccttgagctttcagcaccccaacattttttgtgacagaaataataaaaattctgatcgggcccttgcctgcttgcacaaaagccaacatctcctgttaccataatataattataaactgctgatgtattgtttctttgtcaaggaggagaaaaaagttcagagttacaaaatgttttttctgaaggaatgaatgc

SEQ ID NO: 81623 - DNA, 2277 bp, Homo sapiens
atcaccctcgaataaaacttgtccctacaaacttgaacaggaaaagaaaagccttggctacgggagcgtcttgggttgctgtttcaagccaggtctactgacagaaaagcaaaatgaattgggtctttatagtttgggtcatgaatgccttgatttcttctttttcatggaagcacaattcattgttatggatttcccaacctctagattcttctgctaacttattttggtattggatatgtcaacctaaacctcatctgttctagaccattatgactctctgatgcagacagcttataatgtttcaaatatctgtatctgcacatttgagtacccaaagactccccaaagtgtggagtatcaagtatgcctcatctgactcattcatggagctaccaaacacccttgtttgtatttggcttcttgacagagatgtcccctttcattcttaaagtatgtcatatgaaaattctcattggatgatgatttgcaaagaacttcatttgaccccagttttgcagcatgggaaggatattggataggcccagccttacctgagtgtgacaacagcataacaggtccgtgggtagattaaatggctttaataacagccacaactattgacaccatgacctgtgctcctgtgggatgtttttctgtctgcagtcaggaaacccatccttggacctataggtgctttaagggaggagatcatggacaatgtttattgggatactcatttacgccattatcagaacacagtaatataatactagagaagttccttaaaacttttccagggtctcaaggaattttggaagaagactccatgggggtggtccccgaaaaaaaattttcaggaggattcctgctggcccagggtacttctttggacacactttgctcctatgatgagggtggcttctcatcaacatgtttttagaaacttatctaacactttaaggactatatctgacgaaactgctgctgctattgcagcatagcaaaagtctttggattctctagttgaagttgttttggataattgcatagcattagattacctgctggctgaacaagatggagtaggtgtaataccaaactcttcctgctgcacttagattaacaactcagccaaagttaaaatgcatatagataaaataagaaaacaagcttcatggttaaaacaagtaaatgatgaagcaggattaggtgattggttttctggattattttgttggatcccacagggatctgatttgtattttctggcatctttaaatttggcttacctctcttattaattattattattcagtatttactattattttttgagatggagtttcactcttgttgcttaggctggagtgcagtggtgcaatctcggctcactgcaacctccgcctcccgggttcaagtgattctcctgcttcagcctcccaagtagctgggattacaggtgcctgccactacgcccagctattttgtgtgtgtgtgtgtgctgttgtgttttgttttgagccagagtctcgctctgttgcccaggctgccaggctggtgtgcagtggagtgatctcagctcactgcaaactctgcctcttgggttcaagtgattctcctgcctcagcctcccgagtagctgggattacaggtcataccaccaccacacctggctaatttttgtattttgagtagagatgggatttcaccatgttggccaggctggtcttgaactcctgacctcaggtgatccacccgcttcagcctccaaagtgctgggataacaggtgggagccacctcacctggcctcttattaattattattgaagcttatttctttattaatgtcatcatcaaatgtgatttaaggtgcttctctaagactatagataagagtactcagataatggtattgcaatgtgcagggtactggcccagcacctgtgaatattttcaaattcaggtggataggttatgtttatcaatttccctcatctttaccccttatcagcaggaattagccagaaaaaaatgacacccytttttctacattaatgagtaatagataaagacaggccccttgagctttcagcaccccaacattttttgtgacagaaataataaaaattctgatcgggcccttgcctgcttgcacaaaagccaacatctcctgttaccataatataattataaactgctgatgtattgtttctttgtcaaggaggagaaaaaagttcagagttacaaaatgttttttctgaaggaatgaatgc

SEQ ID NO: 81624 - DNA, 1061 bp, Homo sapiens
taggctatacatgtagggatacaaatcattaagactgaagaagtattcagtacatggtcaacttcatcagataatactaagttactttcaatgatggaagtatcaatttgcattcttagtagagtatatgcaagttctctttattctatattcttatcaaaacttgaaattggctttctaattttttactaatctaataggtgttcaagtatactatccattctttagtttgcagttccttattaattaattatttgtctagatttccattagtatttggatttcctctatttcaaaatgactattcatatttttttccaatttttcaaataagttttttttctgttttcttaaggattcttaatacattctagattttctctatcttcattacaataatttggtttgctttggttttccaccctacttcttacatcattgtagcccaaggcataaatattttcacataagtttttctctagaagttttgtaattttagcttttatacctaggtttatggtttattttgagataatttttgaaacacgctgtgaggtatggataaaactttattttttaaatgaaactagtcagttgtttcatttatatatgaaaaaccctttcctttattcaatgggtttcctttaaatatttgttaaaattatttaactatatatgagagggtccatttctggaaactattatcttccaataatcaatttgactatctttagtccaatactatactatcttgataatgatagcatgataataaatttgaaaatcagccaartaagccagataaatgtgttttttttccaaagatatttagtctctactagtcctttgcatttgtatgaaaactttaggaccagctcatcaatttctacacaaagaaaagcctgctagggatttgattgtcatttcattgaatctatagattaattttcaaattgatgtctttgtgagtctcttgagccatgaacaaagtgtatctctgcatttatttaggccttctttaataactctcaggaatgttgcgtagattttattctgtgagt

SEQ ID NO: 81625 - DNA, 892 bp, Homo sapiens
tgcatagaaaaagttactgtatttgtttatttagaacactaacataaacttggaaagaggaagaagcagtaatctccttaggcattacactgctataaagagaaaaaaagtacacttcccaaattaaagaaaatgtgaagcaactccatttctacctgtagtgccaaccccatgacatctcagttcttcacaaccttggttttcaatctggaaatagtttattgagggtgaattttatgtcactgtgtttgaaggaaaacataaaaagacactgttrccctgcaatgacttcctacaaaactcaaaataccctcctgtctatgcctgtcttccacagaggcatcccagatgacttcattgtaaaaacagctgcatttgtatgctcagatatatcatttaaaaatcagactgcacccttcagaaaatttccaagaacaagagtttaactggcaaatttttattgattttaagatcctggagtctgtgatccaagtacacatcaagtgatgccaagaaatcaggaggaaaaatgatgagtaagctgtatgtgatgggcatgaacagttaaagagtgaagcctgctccagaacgtgaaaatctgtactagaattacatggatctttggtaacgaggatatgtatagtaaccaccacacagtaaacacaaaggtaatatctttaaaatagtggtgacgtaattttaagatgatgatgaggttagaagacgtacttcctgtccttcctcgagaagttagcctggtttaagataaagggaggattcagacatctaattcccactaaaaggaaaacatacaggaaagctatagctctttattagtataatatttactaatttattaagtatatctattaagtggggcactattccatgc

SEQ ID NO: 81626 - DNA, 662 bp, Homo sapiens
atttcactgaaattttaattttttacatcaataaaattattactaaaattctatagagcagttgggcaaggggcaggagcaaaatttatattatgataaacaatttatcttctaatatatacaatacagagaatcagaatgaggaaatcacagtggaagcctgcttattgaataattattgaattatgaattgaattatgaattggatttaattatgaattgaattataaattgaattcaactatgaattaaatcatgaattaaattatgaattatgagttatgaattcaataacaagaaacaggaaatgagggtggctgccaccagtctgattctgaggtttgaaaagttttacagtggaaaacaggtccatacatactttcagtaaataatggtgtytaattgtgtttaatttctcctttttttttaagtgactgctaattttttaggaaatacgtaagttatttgtacctaagtgcttagtaaacaggatttctttctttcggcttaggagtactatgaaaaaattactgagctactaagggcacggtgaacagagaaagtttgaaaacctcagatctgaagtattaaaaattatattcaggcaaattacaaaagttctacgtacatatttctaaagatataagcatgttaactgtaaa

SEQ ID NO: 81627 - DNA, 567 bp, Homo sapiens
tggggatgtagttccactttgaagaactgtcataccactaactttgttgtacaatatagtacaatgatcctgatttagacattcaacaagcctggcttctagaatagaaatatatgtatgttattacatgattcatttacttcctctgagaaatacttctttcttcagttaaactttttctaattcaaaatacaacacacttttataaaaatacacaaaactaaaatacactgctcattaaaatgtcaaaaaggatttgcttacttaacctatatgcagctcaaaaaagagaacattgacaatcttttttgtgccatctcccccaatcagtactctctatctacctacaatttcatcagtgtcagtcactgctttcttgatttcgaactatttttatacctaagaacacgttaaaaatgagtttgttttttcttattttgatttttatatagatggagtcagacaatatctattattttgkgcctgaactcattcattcaacattgcattgtaagaatcacccatgtatatgtatgtgtgtataaatgcaaatcattctcagtgtat

SEQ ID NO: 81628 - DNA, 1011 bp, Homo sapiens
ccctaattgcaggattgtgttgctcttttatttcaagcttcagaactaatgagagataattatactgtaaaaaagacactcacaaaaaaggagagattctctatgaacaatattaccagattttgaacatacaatatgtttcttattcagacctgtactgtcaagtccttgaatacttaaattaatggaatgttaaagtacttacttgctctttatatgtctttcaatgtacttaagggctcctttagtttaaaacctggtatcttacattggaaataagaagaaacagataagcgcatttgggcgataattcagagttgatgagcttcaactgattgggagacaaataaataaatcacaacagcaacaaaaatgcacagcaactctatatagtcaatcatatttaaggacctggaagcaaagcaacactaaaatggtctattttgaatagatgggctaataagaatatattctctagacttagtgcaccattatgaaccacaaaagacatcttgggtttctgaaaactaattcctgctgtaaatagttcttttaattgtggtttataatatgagtaatgaaaaaaactatttcacgtgaaccataaccactacgtaagatttcagaatgggycaagcttaggtaactaactttgcaaagtgatgaattccatcctcctaggttttcttgtctggaatgccctccatcatcctactcttcatccttccatagctcagggtcttctgaaagtttctgtgaggtttttctcgatgctaatgtttgcccacctattctggaactttcatagcaatttatcacatacaagaagcctggaacgtagctagggttctgtaaatacttttcttaagtaaacataaataaatgtgcttttgggatacagggagaaagtcatattttgcagagtgctttatgtggtcttgcttaataactattgatgcctatcatgtgcttcataaacggttcaccgaaaagaacccaatatcacttttg

SEQ ID NO: 81629 - DNA, 901 bp, Homo sapiens
tgaaaaatccacccatgctcaagacctcccgttggatattctgaaccaccccactccccatccagagccacccatctttctgaaaaccccaaacacacacacacacacacacacacacacacacacacacacacacacacacagtcacttagatcccccagcacacacagaaaaacttaagagctccaacatagaccccaggcatatctgcccctgcccccacccactcaacacttctgcacccctcctcagatcccacctgtccaggccctcccagagtccccgacagctcccccagctcaagcagagattccagagaccatgaggtgcctgccgcaccccaggaagccaacttgcccctccaccaaaccagcgcccacactggagccttggagggtgacaggkccccagaatcccccagcacctacccctgtgggaacctgccccaggcctctgccaagttatccatccttccctgctgtgccctttcaaagggaaggacgctcactttctctcctacactagtgtcccgaaggaaccactgcccgccccctgatttatgccaccccctggcgggaagggagaggattcacagctcctggcttccgtcctgaagtctgcccccagcctcctgaccccatcacgcctactggcctcaaatgccagagccagcagggcggtccaggttgctcctcagagctggcccctgacagcccgagagttctttcacccacaactagtgtgtttggccaaaacaaaacagcttccttctatcttggcatttgagacctgggtcggggcctgccagaagcaggcagctctttgttaaggaatattttcagaagggaaaaatgtgctgaagaggctcgagtggaacatgaatgagttgtctgcttcgttt

SEQ ID NO: 81630 - DNA, 734 bp, Homo sapiens
aaggcttcccaggatgactgtgaactctataggaaaccacgaggaggacttgtcagtgatacgaacgcagttttacccgagactgggctcgtggagctgcatctttgtttgagctttgagggggcagacggatgaggaggaatgtatatttcaatttcctcttgcagaatagagatgccagttgttacagggaagccctgggcctggagtcagatgttggggtgtgaaggaatgtaagatgtgtacaatgtggtccctgctctgcgtctaaagtcctctcactggcatgcggcggcccccgccaygtgctcagcaccatgccaagcaccattgacatattatctcatttaatcctccccaaaactcggaggaaccaggattgcagcacgcgcccttgccatcctggcctgaggcctgctgcggggagcatgagacagaattatgtacagcaggctgcaatgggagcccggaaaaaaagcctgatgcatccctggggtgttggggaaggcacagcagggatgacgtatggaccaggtcacaggcaggcgtggcagggaagggtgttccaggcagcagaagtgcttggacacacgcccaagaggcaggagcaagcgtggtgcgctcagggaggcgtgtccctgtacttcctttgataggcgtcttactacaagcccttgtgtccccagtgccatctgtacacttggcacacatggtggggggctccccagcaaagg

SEQ ID NO: 81631 - DNA, 993 bp, Homo sapiens
caatcactgttaagaataaagacatttaaaaaataattctgggctgggcatggtggctcatgcctgtaatcccagcactttgggaggctgaggcaggcagatcacaaggtcaggagattgagaccatcctggcaaatacagtgaaatcccgtctctactaaaaattacacacacacacacacacacacacacacacacacacacacaaattagccaggtgtggtggcgggcacatgtagtcccagctacttgggaggctgaggcacgagaatggtgtgaacccaggaggttgagcttgcagtaggccgagactgtgccactacactccagcctgggcaacacagcgagactccatctcaaaaaaaaattaaattaattaattmattaattaattaattaattctgggaagcctttactacaagaatagaaggaataaggtatggatgagatctgcagcactaaagaattcaagctacctgtggtctagctgaatgctggagggttgatgacagcaaggaaggaagaaagcaatgagcctttctaacactttcatcaggacttgaacaagtgatttcatggcccctatatctttttttgaaaggagagaatggagagaattgataaaagtcaatgaggcatttcaaaatttccttgactctcacttaaaggtctgctcagtgaccctagaagctctgcagctaagaaggaaattaaggaatagttactctctgtaaaacttcaatgaggtcccattgcaaagctttagccaaatacttatttattcaaattctgcaaacaaaggttaacttgtcccatgttagctcctttgatttaaatcatactgagaaaaaggaaagatttagttttcacttatcaagaaaaagttagtttgttaaaaagtcattaacaacttttactcccattattaacaaatctggggatttataaataccttgcttgtgcataatcactcttccatgagatacaccagg

SEQ ID NO: 81632 - DNA, 993 bp, Homo sapiens
caatcactgttaagaataaagacatttaaaaaataattctgggctgggcatggtggctcatgcctgtaatcccagcactttgggaggctgaggcaggcagatcacaaggtcaggagattgagaccatcctggcaaatacagtgaaatcccgtctctactaaaaattacacacacacacacacacacacacacacacacacacacacaaattagccaggtgtggtggcgggcacatgtagtcccagctacttgggaggctgaggcacgagaatggtgtgaacccaggaggttgagcttgcagtaggccgagactgtgccactacactccagcctgggcaacacagcgagactccatctcaaaaaaaaattaaattaattaattcattaattaattaattaattctgggaagcctttactacaagaatagaaggaataaggtatggatgagatctgcagcactaaagaattcaagctacctgkggtctagctgaatgctggagggttgatgacagcaaggaaggaagaaagcaatgagcctttctaacactttcatcaggacttgaacaagtgatttcatggcccctatatctttttttgaaaggagagaatggagagaattgataaaagtcaatgaggcatttcaaaatttccttgactctcacttaaaggtctgctcagtgaccctagaagctctgcagctaagaaggaaattaaggaatagttactctctgtaaaacttcaatgaggtcccattgcaaagctttagccaaatacttatttattcaaattctgcaaacaaaggttaacttgtcccatgttagctcctttgatttaaatcatactgagaaaaaggaaagatttagttttcacttatcaagaaaaagttagtttgttaaaaagtcattaacaacttttactcccattattaacaaatctggggatttataaataccttgcttgtgcataatcactcttccatgagatacaccagg

SEQ ID NO: 81633 - DNA, 845 bp, Homo sapiens
ctcactaacccaccctgctgattctctggcttcctgttaataacaacagcaactccttgtggggagtctatggttggctcagtactgtgctatccttgcatttgctcagtgttgaagaacttgggatgagtgaggtacccagcgttcaacgtgaattaaaggcagagggagaaggccaagccagagctctggggcatcagatggtcccttccagcccacggccccaaagtgagtttgtcggctactcagctctgatgttcttgggagaaagcccagccccgggatgcctccttccccagccaaccccaaagcctgagatgaagagcaatggtttattgagtcatgtggtaatggcaggttgtctttaaaaaaagaaagaagcatcaaggagagaagccccacagggcaaagagagacatttcactcagaggccaaagtctgggggktagaaagaaggaagcttgacccaaacaaagtttcatttacagtatatacagtcaggccttgggggcaggagctgctggggagcagagagggaccctctatcgctggcttcagggggtgccttgggtcccttcagtagctggtgggcgtgagctgcaggaagcacatttggcttggcaggagctgtcaggaaggggaagcgggtttcctgcgattctgccttgttctgccctgggtgaagccgcacaccacacctcacctcccaggggcccaggccctgtggaatgtctgttttaagctccctggggctggcctggctgacggcagctgccaaggggatgccgcactgcaggaggacctggggtggtgctataccttcacagcagcaggcaaaagaggtc

SEQ ID NO: 81634 - DNA, 845 bp, Homo sapiens
ctcactaacccaccctgctgattctctggcttcctgttaataacaacagcaactccttgtggggagtctatggttggctcagtactgtgctatccttgcatttgctcagtgttgaagaacttgggatgagtgaggtacccagcgttcaacgtgaattaaaggcagagggagaaggccaagccagagctctggggcatcagatggtcccttccagcccacggccccaaagtgagtttgtcggctactcagctctgatgttcttgggagaaagcccagccccgggatgcctccttccccagccaaccccaaagcctgagatgaagagcaatggtttattgagtcatgtggtaatggcaggttgtctttaaaaaaagaaagaagcatcaaggagagaagccccacagggcaaagagagacatttcactcagaggccaaagtctgggggttagaaagaaggaagcttgacccaaacaaagtttcattkacagtatatacagtcaggccttgggggcaggagctgctggggagcagagagggaccctctatcgctggcttcagggggtgccttgggtcccttcagtagctggtgggcgtgagctgcaggaagcacatttggcttggcaggagctgtcaggaaggggaagcgggtttcctgcgattctgccttgttctgccctgggtgaagccgcacaccacacctcacctcccaggggcccaggccctgtggaatgtctgttttaagctccctggggctggcctggctgacggcagctgccaaggggatgccgcactgcaggaggacctggggtggtgctataccttcacagcagcaggcaaaagaggtc

SEQ ID NO: 81635 - DNA, 494 bp, Homo sapiens
caaaaactgaatgctaaaaggccccaactgctagagggataacgcccccattggaacaggctgtcccccgagatgggggaacaacaaattggtgtttggaatgatctgtgtttcttgttattgcctcttctacctagaaaagagggaagaaatcacttttattctggtcatttaccatgctccwcaaatgatttttagcagtgatcctagagtaaatagaatttgcattttgaattttcaacagaaatctaaaccacctaatggttcaagttgtcctttttagccttttgattgtcaagtgaaggccactcctttatgttctcgtttgagactctaatattgatgattgtgataaaagtaaaaattctgtctccgtcaaagaactaccactctgatttcattttctctcatattctaagtttgactacagcattaactaagaaactatattaagtgacgttcaggaagaatagcctgtggagctgcatttaaaa

SEQ ID NO: 81636 - DNA, 1940 bp, Homo sapiens
ggtgaaaatcaatttgtgatgatagtatttgtactgggattaaaatgttgactgtatgctgtacacccaaggagaggcttgattatttttaaccagattttgaagagtatgagctctgatgaggtgacgatgttgctgagctttgcgtaaaggcaaaatcagtgtagtaacatcctatctttctgaagatcgggcttctgacaacatcacctatccaacaacacaggtatgaaatagaaagcctcagccctatgccttagccagtgggttccagaagctgttctcaggtagcaggcaagagttttctgactcaggtttttaaccgtaaccctgacaatgccagcagtccaattcaacacagagcaggacattagtcagtgtgaattagaattgggggatggggatccacaggggcaaggacaaagctgccgatgtggctgccaatgtgagagacaacaacaagatgaggcaatgaaactactgtacagtaattggtggtcattaagatgagcctaagccatcagggaaagctaaattgtgctttaatacttcatttatgaaagaaggatagcataccagaagtcttcaaatctcattgaatatcagaatgaccttgaaatattctgattcagggctctgaaacatgtgcccaagaacatgcattttaacatgagtgaattcagatttagcttatctacagcatgatgtttgggartgactatacatgcatactatctaatgtcatagatgaagaaaccgtggcacgtagaggttagataacttgcccaaggtcatctgataagtagtacgtaaaagagctggtactacgcagatcaactccagccagattcttccagggttcttctgctctttatagcttattggatcctagtttggcttgacactaggtttctatatctactaacccagtggttgtcaatgtgcatcacctgggaacttgtaggaaaagcaaatgctcaggttccaccctaaccttgtgaatcagaatctctgagatgggactcagcaatcttttttcaacatactctccaggaaattctgattcactgtaaagtttgaaaaccactgtactaatccacttcagatgtaatttaaataaagctaaaaaaagaaaaagaggaagcataatgtgtcttatttggggctctcagtggtaccttatcttcttggtttctagaaagggcaggtgtgtcccaaaactgtcttcctgtgcatttcatctttttggtagtaattcttattttcaaacccaaggaccccatttgttcctatgtcctcttcttcaacaacctcttaaaaccctttctcagggaataatctctcaacaatatcttatcagtcaagattcttgattacaaaaatagaagccaactcccaaaaatttgggatgggaaactgatactctatgcttttattttcttttcagtcctttactaagctgctaaccctataatctctctaacgttggaaagacaaactacttcccagctctgaaatctgtgtatgctttagaaataaatcaaaccctatctcaatcatttatgttttaaaaaaccaaggtcatccccatcacaattgataactcgacttaattttaaatactctgtacagaaataatttgaataaaacatcttctgcacattctctatttatttacttattgaagaaatgtttcttgagaacctatttggggccagaaatgataccaagtactaagtatacaacagtgtttaagtatatcttaccctccagaagctttcagtctattgtaagtgttcttaacctgggatccataaatgcatttcaagagttttgtaacctctgaaattacttacaaactattgctattctcacctatctttctttctataaatatacactgggaatgggaagagtgggtagaaattctacactttcca

SEQ ID NO: 81637 - DNA, 1302 bp, Homo sapiens
ttgtgatgatattgggctaagtgcrttaatcaagcaaaatcttcccatctcaagatcctttacataattatacctgaaaagcccctttgccctgtaaagtaacatattcacagttttcaggaatcagcatgtaggcatctttaggggaccatgattctacctaccacagtatcaatttgaatttgtctgacatttcctcatatttgagtacaaggtatacattttttttgggtgtaacaacagaagtgatattgtacccctctcagatcattatgctgctttgcttttttttttaagatacaaacaagaaagatttacaatccttgaacccacaattctaaaattggaaaagctctgaaaatccaattttttctctctgcaaattcagcacaaactcatttggcagcaaaacctgacctgagccaacacaagtccacttatactttttatttattttacttagtgggaatagtcatatgttttccggcagagttacgtgtttgatcatgaggtgttgcccgcaactgtactgagggaggttggggggatacattatgtaatgtacacttcttccactaaagtacttctgtaaatctgaagaatcctgaaacatattagctcaagggtttcatatgcaggactgtggacctatatatttgagcacaatttaaagaagatctttgttgaatagaaagtatatcacataattccattacttaaaatgctaacttgtccacttgaaaaatgcaacaacaaattaatacatatatgatgttcaaatggtatgaactaagtgaattgctaaattaactgttatgggcattctttgacactgaaaaagtgagtattgcctcaagaaaatgtaccaagttctaagagctatcttgtgtcttttacatattttttctaaacgaaaccaccaagtcactaaaatatctttaaaaatattctattttggaaaaaaatatataaatatataagacaactgtgactgatataatatcgcttatagaacatgccataattcagttttgtaaatttttaattataatttttaaattttcatttattttgttttcattactaattggactcagcaaatatgattgacgaaaagtaaatcatgtatttaatcttcttctaagcttacttttaaatttatggaggagtcaataatttcaattttattaatctcaaaatgcacctttgaagatcaaaggcaattttatagaaaacattaaaaaattacaagaccatgtcaggcacattggctcatgcccgaaatgagaggctgaggcagga

SEQ ID NO: 81638 - DNA, 1302 bp, Homo sapiens
ttgtgatgatattgggctaagtgcgttaatcaagcaaaatcttcccatctcaagatcctttacataattatacctgaaaagcccctttgccctgtaaagtaacatattcacagttttcaggaatcagcatgtaggcatctttaggggaccatgattctacctaccacagtatcaatttgaatttgtctgacatttcctcatatttgagtacaaggtatacattttttttgggtgtaacaacagaagtgatattgtacccctctcagatcattatgctgctttgcttttttttttaagatacaaacaagaaagatttacaatccttgaacccacaattctaaaattggaaaagctctgaaaatccaattttttctctctgcaaattcagcacaaactcatttggcagcaaaacctgacctgagccaacacaagtccacttrtactttttatttattttacttagtgggaatagtcatatgttttccggcagagttacgtgtttgatcatgaggtgttgcccgcaactgtactgagggaggttggggggatacattatgtaatgtacacttcttccactaaagtacttctgtaaatctgaagaatcctgaaacatattagctcaagggtttcatatgcaggactgtggacctatatatttgagcacaatttaaagaagatctttgttgaatagaaagtatatcacataattccattacttaaaatgctaacttgtccacttgaaaaatgcaacaacaaattaatacatatatgatgttcaaatggtatgaactaagtgaattgctaaattaactgttatgggcattctttgacactgaaaaagtgagtattgcctcaagaaaatgtaccaagttctaagagctatcttgtgtcttttacatattttttctaaacgaaaccaccaagtcactaaaatatctttaaaaatattctattttggaaaaaaatatataaatatataagacaactgtgactgatataatatcgcttatagaacatgccataattcagttttgtaaatttttaattataatttttaaattttcatttattttgttttcattactaattggactcagcaaatatgattgacgaaaagtaaatcatgtatttaatcttcttctaagcttacttttaaatttatggaggagtcaataatttcaattttattaatctcaaaatgcacctttgaagatcaaaggcaattttatagaaaacattaaaaaattacaagaccatgtcaggcacattggctcatgcccgaaatgagaggctgaggcagga

SEQ ID NO: 81639 - DNA, 608 bp, Homo sapiens
cccctcacccacctcagaaacatgtttcttaaagcctgtgttttagaattactattcaaaattccttcattaataacatctgtctgtgcccagttatatagaataaggagacaaatcaatctctctggtttagattctttcaaagtgacctaaaacctttatcacactaaggttttcccyaggtacacatggggagcagatgtggaataagagatagccaacaggtgcaacgcctaagagaaagcaaagggctcagagatcatttgaactccgccttataacgcagcctgtcagatgaactagccatccttgactttttgtcttcattgcgagctcacagtccagaaaacatcccacctaacaagatgaaagttttaaagtgtttttattctaagtatatgagaggaaaaaatagtaatagaatcacttcacttcatgaatatggcaagccatgttaattcattataatttgaggctaattatgtgtggatgacactgaatagcagtaattattttagatccaaatcacagtgtcttcaagctagaagacagctagggagaacaaagcctatactaagatttctaactggctcatacagacagttcag

SEQ ID NO: 81640 - DNA, 504 bp, Homo sapiens
tcctttaaaaatgatttgcgagtgtacatttgaaaatggttaatgcttatttattacaaatggaataattacagctaatggaacagtgccatttaacatcagtatagtggtgtgggggagcttgataattagcagctccataagtgcctttttttagcttatgaaatgacagccacagaacacctttccatgaaatgtctccatgtactaaattctctcttgcttatcttattggctgtcgaygactgatttggggggaggcatttggacttaattgatttaatcaacacctgagtccctctctgacttagaatataaccgttatttttaaatatacaggatcgagtaagcaacaggatttttatatgcaaaactgaatttctaaaagtttccaactgccagaggtgataacgccccctttggaacaggctgctcttcgagatgggagactacaaattggtgttttgatgactgtgtttcctgtttatgctcttctactagaaa

SEQ ID NO: 81641 - DNA, 680 bp, Homo sapiens
atttatgcatagaatttttttgtttaaagaaatagtaatcattaaagaataacttttgaaattgtggcaaaagtttacaaamaaagacattattggattgatatttaattttagtgattgttttataatagaaataaatgtatgcagcttaataaaatactttataaaccttctgacaaatacatcacaaatatttttataatctaaccagaggcattcaatgcattatccaaacttgggatatcagcgtcacacttacaacaaaaatttagtatggattacagcaaatcttttactttctttacatactgctttcatgtttctcacaaaaactctatgaggcgtaaatggtcaaatattaatcctattttaacatgagaacaaattcagaaaagtcgtgttttaagttacatatatatgaagccaggcgatttatatatatatatatgtatatatatataaatataaaatttatcatttacatacacacacagtcaaattaatgccagtactgtaactttaatgagttctggggtaaccctgtttttatatactgctttcttcttatcttcttattgacttttcccactttcagtattttcactaattcaggttaacatttataacacatgtgatccgaatttccctgtgcctcacccatctatggatgtaatgagacc

SEQ ID NO: 81642 - DNA, 680 bp, Homo sapiens
atttatgcatagaatttttttgtttaaagaaatagtaatcattaaagaataacttttgaaattgtggcaaaagtttacaaacaaagacattattggattgatatttaattttagtgattgttttataatagaaataaatgtatgcagcttaataaaatactttataaaccttctgacaaatacatcacaaatatttttataatctaaccagaggcattcaatgcattatccaaacttgggatatcagcgtcacacttacaacaaaaatttagtatggattacagcaaatcttttactttctttacatactgctttcatgtttctcacaaaaactctatgaggygtaaatggtcaaatattaatcctattttaacatgagaacaaattcagaaaagtcgtgttttaagttacatatatatgaagccaggcgatttatatatatatatatgtatatatatataaatataaaatttatcatttacatacacacacagtcaaattaatgccagtactgtaactttaatgagttctggggtaaccctgtttttatatactgctttcttcttatcttcttattgacttttcccactttcagtattttcactaattcaggttaacatttataacacatgtgatccgaatttccctgtgcctcacccatctatggatgtaatgagacc

SEQ ID NO: 81643 - DNA, 1113 bp, Homo sapiens
tcggtacacagcataattgctttatgtatacttcccatttttccccacaggatgttaagaagatgcatatttaagggtcaaaatttcataaaattgatagtttttactgattcatagccagtgacactggctatttctttttcctgccagtgcctggttgcaaagaatacaatgactactagtacattttggtgccattgtcctgattcatgataaagcaccagcaattttgcccaccattccttttataccatcagtgcaaatgtcagtatggtggacacaaaggcaaatagcatctcagcattactatgaaaacagcttttaccttgcagagcccctgcaagggtctcagggmcaccatctcccaccatacccccagggctctgcagaccactttttgagaaacactattctaattcaatctgactagaattaatttaccagcataaaaaatgtcatctttgaaaatccaaatgttattgggtgggactatccctataaattagagcatatattatattgtacaattttagtcatcaaaaaatcaataaattgcatcaaaaaatgcagaaatactccctacttgattaatgcacaatgaccacaattttattaaatgacatattttgttatatttctaatatatttaagggctcttaatattgttataaataaaaagtgattgcttgctcacaaatagtctatgtcttttttttggtttattatttatatttagttgataaaaacacaggtaatactaacaccttaaatataacatttgtaataatcattaacatttgtaattatcattagccaatcacctagtgattatcctacctgaacactcagagattatctgatgttgaaccaaatccagatcttcatctgatccctcttcagccaattttattttctcagagcagctttcctgcttatcatcattactagttcttctgtcctctgtattactgctttcggagtggtcctctttaccagagttcaagttgcttgcagtatcgacctaaaaataatttcaaaaaaaaaacagtttccgaaaatactgtctttttttaaactttacatttctagaatattttgacactaatggaagca

SEQ ID NO: 81644 - DNA, 1113 bp, Homo sapiens
tcggtacacagcataattgctttatgtatacttcccatttttccccacaggatgttaagaagatgcatatttaagggtcaaaatttcataaaattgatagtttttactgattcatagccagtgacactggctatttctttttcctgccagtgcctggttgcaaagaatacaatgactactagtacattttggtgccattgtcctgattcatgataaagcaccagcaattttgcccaccattccttttataccatcagtgcaaatgtcagtatggtggacacaaaggcaaatagcatctcagcattactatgaaaacagcttttaccttgcagagcccctgcaagggtctcagggacaccatctcccaccatacccccagggctctgcagaccactttttgagaaacactattctaattcaatctgactagaattaatttaccagcataaaaaatgtcatctttgaaaatccaaatgttattgggtgggactatccctataaattagagcatatattatattgtacaattttagtcatcaaaaaatcaataaattgcatcaaaaaatgcagaaatactccctacttgattaatgcacaatgaccacaattttattaaatgacatattttgttatatttctaatatatttaagggctcttaatattgttataaataaaaagtgattgcttgctcacaaatagtctatgtcttttttttggtttattatttatatttagttgataaaaacacaggtaatactaacaccttaaatataacatttgtaataatcattaacatttgtaattatcattagccaatcacctagtgattatcctacctgaacactcagagattatctgatgttgaaccaaatccagatcttcatctgatccctcttcagccaattttattttctcagagcagctttcctgcttatcatcattactagttcttctgtyctctgtattactgctttcggagtggtcctctttaccagagttcaagttgcttgcagtatcgacctaaaaataatttcaaaaaaaaaacagtttccgaaaatactgtctttttttaaactttacatttctagaatattttgacactaatggaagca

SEQ ID NO: 81645 - DNA, 1113 bp, Homo sapiens
tcggtacacagcataattgctttatgtatacttcccatttttccccacaggatgttaagaagatgcatatttaagggtcaaaatttcataaaattgatagtttttactgattcatagccagtgacactggctatttctttttcctgccagtgcctggttgcaaagaatacaatgactactagtacattttggtgccattgtcctgattcatgataaagcaccagcaattttgcccaccattccttttataccatcagtgcaaatgtcagtatggtggacacaaaggcaaatagcatctcagcattactatgaaaacagcttttaccttgcagagcccctgcaagggtctcagggacaccatctcccaccatacccccagggctctgcagaccactttttgagaaacactattctaattcaatctgactagaattaatttaccagcataaaaaatgtcatctttgaaaatccaaatgttattgggtgggactatccctataaattagagcatatattatattgtacaattttagtcatcaaaaaatcaataaattgcatcaaaaaatgcagaaatactccctacttgattaatgcacaatgaccacaattttattaaatgacatattttgttatatttctaatatatttaagggctcttaatattgttataaataaaaagtgattgcttgctcacaaatagtctatgtcttttttttggtttattatttatatttagttgataaaaacacaggtaatactaacaccttaaatataacatttgtaataatcattaacatttgtaattatcattagccaatcacctagtgattatcctacctgaacactcagagattatctgatgttgaaccaaatccagatcttcatctgatccctcttcagccaattttattttctcagagcagctttcctgcttatcatcattactagttcttctgtcctctgtattactgctttcggagtggtcctctttaccagagttcaagttgcttgcagtatcgacctaaaaataatttyaaaaaaaaaacagtttccgaaaatactgtctttttttaaactttacatttctagaatattttgacactaatggaagca

SEQ ID NO: 81646 - DNA, 1113 bp, Homo sapiens
tcggtacacagcataattgctttatgtatacttcccatttttccccacaggatgttaagaagatgcatatttaagggtcaaaatttcataaaattgatagtttttactgattcatagccagtgacactggctatttctttttcctgccagtgcctggttgcaaagaatacaatgactactagtacattttggtgccattgtcctgattcatgataaagcaccagcaattttgcccaccattccttttataccatcagtgcaaatgtcagtatggtggacacaaaggcaaatagcatctcagcattactatgaaaacagcttttaccttgcagagcccctgcaagggtctcagggacaccatctcccaccatacccccagggctctgcagaccactttttgagaaacactattctaattcaatctgactagaattaatttaccagcataaaaaatgtcatctttgaaaatccaaatgttattgggtgggactatccctataaattagagcatatattatattgtacaattttagtcatcaaaaaatcaataaattgcatcaaaaaatgcagaaatactccctacttgattaatgcacaatgaccacaattttattaaatgacatattttgttatatttctaatatatttaagggctcttaatattgttataaataaaaagtgattgcttgctcacaaatagtctatgtcttttttttggtttattatttatatttagttgataaaaacacaggtaatactaacaccttaaatataacatttgtaataatcattaacatttgtaattatcattagccaatcacctagtgattatcctacctgaacactcagagattatctgatgttgaaccaaatccagatcttcatctgatccctcttcagccaattttattttctcagagcagctttcctgcttatcatcattactagttcttctgtcctctgtattactgctttcggagtggtcctctttaccagagttcaagttgcttgcagtatcgacctaaaaataatttcaaaaaaaaaacagtttccgaaaatactgtytttttttaaactttacatttctagaatattttgacactaatggaagca

SEQ ID NO: 81647 - DNA, 753 bp, Homo sapiens
tcagcaggtttataactcagctatggtcattaacagcattcatttcaaacttaacatctacatttgcaaaccacttgaaagtaaaattacttttcaattcaattttcaatttgcttttagagcttcatctttgattgacagtttttttccacaatggcagctccatgagaatttgagtaaatggtagcacccatccaagagtgtagataaactcatttattcagattacctattcacctttcttctgtatgtacaatcatttacaatcatttgcaaatgctcacttcaggttagagtgaacttgtaaaactgatctcagacttctgatgatttgattcatttatagaatcatctgttctttaagccaaaatggtttttatttttcctcatcatgacctaaaaattacaaaattaggatgcacattttcagtgatggtatcaaatagctctaggtacagttacaaggaaatagtgagattgcaaaatagcctgtttaaatatgtaaaacgtttcgatatatattatatggctgtgtactgagtttamcggccaatagaagatggttctgtggcctcccttacacattcattctaatgttgcatgattagtatagggaatttcattccattagttttcccttctgctgaagtttaaattcactgaagattcttctgtctttaaaagagaagagaagcaattctgaacccaagacactttagtgtgcttattaaaatacactgtagctcatttctt

SEQ ID NO: 81648 - DNA, 719 bp, Homo sapiens
cacctctcagagattctgattctattgttctgggggaaggaggacagggaggaccaactatttcatttgcaggtcccctttttcaaaagtttttaagaatttcaagacagtgacaacagaacattaaaccaaatgttgaacaggtcatacacccatggctacggtttgaatrtctctgccaaaactcatgttgaaatttaattgccaatgtaacagtattaagagatggggcctttaagaggggattaagtcatgagagctctgccctcacaaattaattaatgtgattatcctgggagtgggctcctgatgaaagaatgagtttggcccaatttcctctctctgtctcacacactcactatgacgtgatgcctctgccatgggatgaccctcaccagatgctggtgcaatgctcttggacttcttagtctctagaaccatgagccaaataaacttctgttctttataaactacccagtctgcggtattctgttacagaagcagaaaatggactaaaacatacatgaagctggaaacaggcatttaaacctcaccaggtgatttgcagccggggttgagaaccacctccatggtcaatatccccatgagccctgaaggttctgtgcttctgagctcccatgacagtacacagaccagaatactgtacattccgtacatactgtacagtacacagaccagcctctccatctctgtatgcc

SEQ ID NO: 81649 - DNA, 533 bp, Homo sapiens
cgggcaactactagaagcctagaaaaaaacccacagaattggaaaacccaacctgagcagtaacttgggggagccccagttcccactcagccacatctttcctatacccccttgggaaaactttctagggctttagttttctcctctgcaaaatgggcgtttctactgtacatctttaaagtcccttccggctgtagcagtccacagatctctaacagtagagattttgtccaagcagcaacagggaatgttttaggtttgctccaaatcctgccaaatcttatatgtctatacctggtattcgaaaaatccacaacacactctaactggcatgcatagccctttgatgaatgctgtgaaagctactaaaaagaatcagacctaatctctagcttcagcaagctcacaagttagggagccaaagatcatgctcataagataatcagcaaacaaggcacattaggcctttacctgctggctggtataccagggatcayatgctacaggaactccaaggattgagaaattaatgt

SEQ ID NO: 81650 - DNA, 1100 bp, Homo sapiens
ggatcccatcatgttgtctcatgtcccactcaagaaaaagaaccctccccataatgatttccttatcaaatgcaaactcctttcccaggctaatgcatcccatgratttagcccctgcccccctctccgatggtctcctaacatcctccccccatctcctgctacatcacagagtctacaccacgctcagccacactgacctcccttctgctcctagaacatgccaggctcattctggccacagaggctttgcactaaccattccccctgctgggactgctctttctccttcccatctttcagagctcaacttaaaataccatcatcacagagaggccttccctgaccaccggggtgaagtagcccccagtcactttctgttctagcacaccatttgactctctgcctagaactcattcccatccaatatttttcttatttgtttattgcctgtctcctgctcagtggaatgtgatctccatgagagtaaggccatgttctgttttatttgccactggacttcgcgcagggtctggtacacagctggaggtcaataactgtttgttgaacaactatgtgaaggagcaggaggagtcaagtgctctgccaggtgccttgcacatgtggtctctaagccttacattagccattcaaggaaggtttgattatccacattttacagatgaggaaactgagacttagagggattaagtgcacagctgagccagaatgtaaacccaggtctgactccaaagtccaggctgatttttatactatttgatgcaggagtgacagtgaaggaggtggggatgacagagttggggaagagtaaagttgatggaatggtgattaggacttcggacatcttttggtttccattttgctgttggtcactggagtgggctctcaggccctttcagccccgatgttcctgaagctggccctcaggccctgtccataataccagacccacagggaaagcaagctagactcaagctccaaagaggatcacccgcagaggtgggaacgggaggtccctgaaaataggtgtttcattgggtgatttggacccgaaatatagaattgctgaatcatatgca

SEQ ID NO: 81651 - DNA, 786 bp, Homo sapiens
atagaaattccaaaaatcaatgcatcacacattacttcctttgaaagcagcactgaagatctgtcagtcaatagcaactacaacagaaaccgttcacgtcacctgtttctccccaccctctccatctctcatagcctgaagagaagaagccttggttagtggctcctcagtgagctctgcttatctgccaactggctgtaacaatagtcagtaaatacttactgaatattaataatgagcctggcattgtgccagctgttggcttccatctcatgtccttttcatttgtcattgtctatcactacactgtaagtaccacaacagatggaaacttctctgttttgttattagtrtatcctcacaatatttgttaaatgagtgagagactcaggatacaaaggtggaataaaagcagacgtggttcctgctctcataggatgctcgtagtttagtgacggaaatagacgttaatcaaagagtcttacaaatgaatgaaaatttacaactatgataaatgtggagatgagagacttaagaaagagataattgaccacaaaatgaaggtcacactaggattcctgataaggggcaacacggtgagataaactctgaaagaagaggtaaaagaggaatgatatgggtagggagattgtttgagtccaaggaagttgactcaaggccacattgctgaagggaacatgcttattcaagtaaaaaagccagtgtggtggtgtagcagagggaaagtgaaaggatggtcttcagatgaggctgggtaggcaggtg

SEQ ID NO: 81652 - DNA, 1429 bp, Homo sapiens
tttcaaaagaaaagaaaaagaaaaaattggaggaagtggtagagagttaaatcatcagctgtgataaaaggaagtcaatagaaaatgtctaatactttggattcaagtaattacaatatgttgaaattaatattagaacagagggtaaaaagagttaaaagcggtctactctgatgtgggagaagtagggcagaaacggccacttttcattagaatccttgggtgatatttgtaactgtgcatgtattgtattgacaacatttatttaagagtaaaactaagtttatgaaccaagaaaaaccaaaattttaagtaatttttaaaaatgtgtccttggaaacggctggtttagttttatcctttagctcaagagtttgaaaagtatcaaagacactggggaaaatgagccctaatgtctgcctttgacccgggaaaggcagggtctccaacagatcatcattaggcatcaataagttcaggaaagaaagacttccctgagggmtcttagttatcctgtcacacggcggagaataagggtggtcctaaatgaagatgttattccaataaacgaatcccccagcttatagaatagcttagaaatccatggaagtttaatcgatttgaattaggttttacagacatagtgttataatctcaagtatgcctttctgaatcctttcaggattttagtagcaatggatccaaggggtgggagtgtgagcttggtggaatagaaagagcactgaaatagaaaccatgagatctggtttcttactccaactaaatatgcaacactaggatgtgacttaaatgttctgagccatagtttgctcgttttaattcccttcgagtttgaaaatactatgatttggaacttgctacccatgagaaatgccatagtataaaaatacaaagtagaagcttgaaattcttttgttttgtcttccttttgaattttaggcccattgtctcacgtttatttggaaatatgaatattcaggattcataaagagaatatattgaacacgtaataacctcagcatgaacagttgcagacaaaagttagaaagggttcttaaggccaaaagtagcagaataccttgtcctttagcttccaagtgcattttgacatgaaaacactcatagaaaatgtaaaggacaagataaaataatggctcttgagaagctatttggatcatttgagaaagttcaattgaatagataattccaaaacattcacttactctctttaccacagtccatctacttggccttgtgctgcagagactcagaaaaaaaaagttatcctgtttatgtgtgtgaccagatagacgcagagcagtaaaataagtcaacacagtggtgctaaatttggggaccacacttacaatatttccaggctttatttgatttcatggtctgttttaag

SEQ ID NO: 81653 - DNA, 1429 bp, Homo sapiens
tttcaaaagaaaagaaaaagaaaaaattggaggaagtggtagagagttaaatcatcagctgtgataaaaggaagtcaatagaaaatgtctaatactttggattcaagtaattacaatatgttgaaattaatattagaacagagggtaaaaagagttaaaagcggtctactctgatgtgggagaagtagggcagaaacggccacttttcattagaatccttgggtgatatttgtaactgtgcatgtattgtattgacaacatttatttaagagtaaaactaagtttatgaaccaagaaaaaccaaaattttaagtaatttttaaaaatgtgtccttggaaacggctggtttagttttatcctttagctcaagagtttgaaaagtatcaaagacactggggaaaatgagccctaatgtctgcctttgacccgggaaaggcagggtctccaacagatcatcattaggcatcaataagttcaggaaagaaagacttccctgagggatcttagttatcctgtcacacggcggagaataagggtggtcctaaatgaagatgttattccaataaacgaatcccccagcttatagaatagcttagaaatccatggaagtttaatcgatttgaattaggttttacagacatagtgttataatctcaagtatgcctttctgaatcctttcaggattttagtagcaatggatccaaggggtgggagtgtgagcttggtggaatagaaagagcactgaaatagaaaccwtgagatctggtttcttactccaactaaatatgcaacactaggatgtgacttaaatgttctgagccatagtttgctcgttttaattcccttcgagtttgaaaatactatgatttggaacttgctacccatgagaaatgccatagtataaaaatacaaagtagaagcttgaaattcttttgttttgtcttccttttgaattttaggcccattgtctcacgtttatttggaaatatgaatattcaggattcataaagagaatatattgaacacgtaataacctcagcatgaacagttgcagacaaaagttagaaagggttcttaaggccaaaagtagcagaataccttgtcctttagcttccaagtgcattttgacatgaaaacactcatagaaaatgtaaaggacaagataaaataatggctcttgagaagctatttggatcatttgagaaagttcaattgaatagataattccaaaacattcacttactctctttaccacagtccatctacttggccttgtgctgcagagactcagaaaaaaaaagttatcctgtttatgtgtgtgaccagatagacgcagagcagtaaaataagtcaacacagtggtgctaaatttggggaccacacttacaatatttccaggctttatttgatttcatggtctgttttaag

SEQ ID NO: 81654 - DNA, 787 bp, Homo sapiens
ttttgactgtggacgtttgagttaacactgaaatgagctgagaccttgggagactattgggaaggcatgattggttttgaaatgtgaagatatgagatttgggagaggtcggggtggaatgatatgatttggctctgtgtccccatccaaatctcatcttgtagctcccataattcctacatgttgtgggaggtacccaaggagagatgatcaaatcatgcaggcaggtctttaacatgctgttcttgtgaaaatgcaagggtctcacacgatctgaaggttttaaaaacaggagtttctctgcacaagctctctctttacctgccaccatccatgtaagatgtgacttgctccttcttgccttccaccrtgattgtgaggcttccctagccatgtgaaactgtgagttctccattaagcctctttcctttgtaagttgcccggtctttggtatgcctttatcagcaccatgaaaatgaactaatacagttgtatatccaacatatagactctcctcccccatcctcaacagaattcaattcctgttcagatatctaccccatttttaccttcagagactattacacatcagtcaatgtgccaattatcacatgacccagggatgatttttgactaatagatgagcatataatctgtccaatcagatgaaaaggaatgaattatattccctgcttagggaaaaggcttccctctttctcttctactggacataaacaaggaagaaaacagctcctgttgccacctgcatccatcttgctaccacagg

SEQ ID NO: 81655 - DNA, 725 bp, Homo sapiens
ttcacatggtagctcaaagctgggatcttgagtttccatgcttgcaggcctccagcatcctaatcaaaagtaaaggaagtcttcatcaacaaccaaaggttcaactctttgttattatagacwtaggccaagtaagtttcttacagtaacacaacatacacaactcaacccacatacaaactgaccagacttttgtgtttcttacaaatgtgtgtgttggggtactgcagggcaaggggaatagggatagaaatacgttgtgaacttttctcttttgcatgaaagctaattaaggaacaggcatgccactgaatgtttcttttcctttttttttttttttttgacaagacaaagtgtgggctgaatatataatttgaatatatataattatttcttgataactataaggacaagaaacaagtgctgcaggacttatggaattctttggtatgggatgtgcctagagaaatggtatactcatgtgaaagaaaggtaaaggagaaaaatcccaagagaaactctgtagcataaggtttctgttcagtgtgtggggagtccgaatgtgttgttaaggacactgtgctagaataaaaattgtctgggttccaatttaggtctttcatttatcagctgtgtgacctcagatgagtcatttaatgtctctggcgtcctcatctgtaaaatgggtgtaataatatctgacctacctactgcgtgacaatctt

SEQ ID NO: 81656 - DNA, 1097 bp, Homo sapiens
ttccctggagtggaaatgccacatcaagaaccggctgccccctgcgcagcggggtggggttggtaacagggtgggtgcattggccaggtctgtggcttcctgctttaccgactgtgtgtgttcwtttgccctactttctacgctgggagttgctgccggcgagttaatcaggtggatggatggccccgactgggggtggggtgctgcgaatcggtcggaggtcggggtggggggcgggaagtggcaaagggggaaggggtctgaacaatgcgcagggcttgcggtgatttccctgggccggaatctcgaccttgctcctctactggaaagcagtctgatgtgattttaagttgggccgggacttgtcccttatgggctttttcctcgggaaggttttctgagataccaagcacggagcctgcaggcaggggagcaaccggtgagggcccactgggcggacgactgcggttcacacttgggatgtgctttcttgtgatctgtattttgaaaatatatctttgcacaattcactgaaattgctctttgtggcctgggctatcagcttagggctctgcttctgtttttctgcctgctgggaggtgtggaaacagagagggcaacagctagcttggggaccaggaactgctggctagaagacttagatgcagatgtggagacagttatatcctggagggccagggtctttgaccagtcttgtgggtgaggtgtgtctgctggagtgggtccaaaggccacataggtaatctccacaaatcagagggcagatcatctccaccttgccacatttggagaggtggcctcatctagatgagatgtctcatttgttcctaagcccttggtaaagtctgcctgctgagcccctcctggggaatgcctgacccctgaaatgcagccaaggtcagtggcttctgggagaatttgctgcagacttaccagtccctcgctgtttcggtggctctttaatgtacacagtcaatgctctttttgtaaaccctgggctcaaagcattaaaagcagatcctgtctagagaggcctttatccttctcactttgggggcttattgttctcagccagt

SEQ ID NO: 81657 - DNA, 834 bp, Homo sapiens
ttgaaagttgaaagaattgattcataagtttttcaaagtttccctaaattggctgagtagtttagtcactcatttacccaaaacacagatattttaaggtgaaatgtatatattcctgtagagcaggagaaaacaaattgccatgggcatcagcctatctttttcaaactcagaatttaaagcctcaaactatgggaataaaatatctaaaaattactgacattttcacacaacctcatacttgtacttttgctaagactttgatcctcaacttttgttcctaagcaccaagagttaataggagttcctcatggccattagtggatgggcttagttgtatgaataatgcaacagaagaggctttgctgtcttcatctcactcttccactaagccagctactggctttagttgtcatttccaaggaccacaagatcagtgaggattatacactctggacttcctgactactagcagtgaaaatcaataaaaatgattggtcatttagcataatatatcttggaataatgggaaatttcccatttggtaacagcttgattttgaaactctggtttttcatgcagcttgttgagatgtatctcaggagctgtcttcttggatgaccaaatatatcatgggtcagagagacaaggatttattttaatacatcatggacgcttaatgatgctttggcactgtggttcataatgagcagctgtttgcagcggcattgcctgcagtcctaatggggccttcatcgggtttcagagctggttgctaagtaggtgttggtgaatacagattttgaagtaraagacttccatctgcctttaaaa

SEQ ID NO: 81658 - DNA, 674 bp, Homo sapiens
gatcccagttccaccctcctggtgggaataggagacacagacttcgccagacacacagcacacctgtaactcaggcagaggcaaagyccgtggccattgtatgcccgcccccttccccacccacacgccttctcgtctgctcagcctctttggggcacctgggcccagaccctctccagatgaaatccttcccttgagtgtggcgtgctgagatctccacctggaggcatccccagctggtagatcagtcctgggaagcggaggagaccaagaaaggggccttgcctgggacagacgtgggccaagccggggctggaatctgggactccaggcggaggcccctttcctttgtttcagctgagcccagcacctctgagtgtctgcgtctgagttgggtgtctgagcgtctgcctcctgcaaatccctggcgggtgtgcgtctggcgggtggtgtatctgtgactcgtaggacctcagccctggtcttcccagctccaggccaccctgggcctcgctcagctgagcacgcagcctggtggggctctgaatcccacctcggcccatgccatgctagcctgagttccctctgtgcacctgcgggcgtcacctccccaacccttcggctttgccaacacctggtccgcctgggagtccagagctgggttgcaaatctct

SEQ ID NO: 81659 - DNA, 372 bp, Homo sapiens
ctcctggaaccatcagtgccctcatgaaagagccccccaagagctccgcggcggaagaagctgatcccgcctcccaacaccactgtcttaggggtgagaattttaacrtaggaatttggggggatcacagacattcattgctatgggtgggaccacttggtgcgttgcccttggggtggcggtgtggtcagtggtccattcctgcccagcgccgagcagcggtctgtgcgtggggtctttgcacccgtgcacctgctgaagggtctctggagctttggctttttggcttttacgagtaaagctgccgtggtgcttggtgtgcggtgaggagtggacagaaggctctgtcctggcaggtgccctgcagtggcc

SEQ ID NO: 81660 - DNA, 550 bp, Homo sapiens
atcattctcctggtggagtaagcaatctctttgaaaaaacagtgaaaagagcatcaacgttggtcttagacaaagatttgtatgcaagctccaccaataagcttaattatatgccaggtctgtcccacagaccctggctgagcaatggatgaaaggaatagtcagacacaggtatgcagtgtaaaagcagctaggagattggctggcattagtggctgaagaatgagccgtcctgaacagctggaccagctgtaatcaaatgtgtgaacagctggagctgcttgcttttattcaatacagacataatgcygaaagcctggagcaaacacaatctgtgggtaattagcattatttttcccccttttggggagcagtcacgcagtgtgggctaatgggccctgttcccaaagattaacagggatgggcatggttagaggttgtatattaacagacggacccctcccctggagcattgcagcctttatgttttgccagccaattgattctggttggcttgttgtttgcaaaacttatcatattctgccctcca

SEQ ID NO: 81661 - DNA, 550 bp, Homo sapiens
atcattctcctggtggagtaagcaatctctttgaaaaaacagtgaaaagagcatcaacgttggtcttagacaaagatttgtatgcaagctccaccaataagcttaattatatgccaggtctgtcccacagaccctggctgagcaatggatgaaaggaatagtcagacacaggtatgcagtgtaaaagcagctaggagattggctggcattagtggctgaagaatgagccgtcctgaacagctggaccagctgtaatcaaatgtgtgaacagctggagctgcttgcttttattcaatacagacataatgctgaaagcctggagcaaacacaatctgtgggtaattagcattatttttcccccttttggggagcagtcacgcagtgtgggctaatgggccctgttcccaaagattaacagggatgggcatggttagaggttgtatattaacagacggacccctcccctggagcattgmagcctttatgttttgccagccaattgattctggttggcttgttgtttgcaaaacttatcatattctgccctcca

SEQ ID NO: 81662 - DNA, 191 bp, Homo sapiens
gggcactattattttaaaaaccgttattattttttcatctggttgcaatacataacacagcgccctatgtatgccatctccccagggagccgagcagcttgggaggagaaggcttgcttgcggctcccgagtttggggaaacacgggcactggggaccccgctccttcctgacttttttttttkggggggg

SEQ ID NO: 81663 - DNA, 1511 bp, Homo sapiens
  misc_feature (1)...(1511): n = A,T,C or G
tcatcctaagacccagaaatgctaaaatgtactcaatccttcacagagtcatgctggatcttaccatggtctgtttatatccagtttacagtctatatgaaattgcaaataagacaggcactaaacaactggccagtgcggaactcagtttgagtgctcaaagttgcaggcacctgaaatataaatgtcatggtacactacttcttgctctgatggcttccccatcctggaagatgctctcagcaaaataactgtctcacagccagggtggcaaagccaaacaactctacccttaaagtttttccccaccccagctcctatctagagatggtacatttcccatactgcctccctttcctcttctgtcaattacaacctgattaacttcaagccaactaagctctccttccaatgtactcatataattatttatttataatctttctggttccaacaacaacaaaaataaggtgttttatggagatgcttaatatgaaattaattcaaatgaacttaaatttaaacaaatgaagcctgggaaaaagaatggtgggaaattaaaaaccatatgagaaattagttcaccaaatgcattcatccctatcagatggtgttgggccttaaggtggatctcaactccaacaggaaaacaagaaggcataatgatttggtgttgataaattcatagctggcctacagaacaccattcttattatgtagagtagaaataactttctcccatgagtcttaacataaagaaccaatgttgtattgaacacccaaagagtaggcacagtgaaaagggctgaatgcttgaagacaccaactcaaagcttaatccaggcaaagccattttacagaggcaggataagacaacataatggggtccaggcatgtggctcactttaaatattttcatcttactgctgtttcttcataattgttctatggaaacctttctgcctccttctccccagtgtactttattctaattatgaaaatttcataagtgttagacatactagctgtcttttattagcatactggtactgttgtttcttcttatacctggctgactttcctcactgacataacctgtggggctgctgctggcatttgaatttgcagccctccactttagctcccccaactttacagtgagctattcagaaatgtcagcaggcccagcrtttgattagcctcctaatggtttgatcaggccttcttcctggtcttcagccatgccttacacaggtcaatggccaattcctactcttgtctcacccctccctgggttgtacatttcacttcagaaggcagaaaaaaaattgttaaaataaaaacaaaaactgacatatgccttccaaaatgaattagtcagagaggaggccatatccatgactgcctaannnnnnnnnnnnnnnnnnnnnnnnnnnnnnnnnnnnnnnnnnnnnnnnnnnnnnnnnnnnnnnnnnnnnnnnnnnnnnnnnnnnnnnnnnnnnnnnnnnnaa

SEQ ID NO: 81664 - DNA, 897 bp, Homo sapiens
cagtgacatagaacactttgataaagactgtgctcagagggaaggcaaaaggcaacacaatgggagcaaatgcattaaggttctttaccccctgtctctgtggtgctcttcttatttagaattttcaggatatctttggtaatcttcttcagctgatgccttgcttcatcacgctctttgccgactccatagagaaggattgtgcgctggttacattcatgacttgaagattcatcctgaaaaacagaaaatgcattctgaaactcttgtctgcaggggtggggttgcatttcatatccctgaaatgcactgaccacagcacctccatgctggcttgcggtggtggcatcccrccctcccttcaattcacctcaacctccactggcaacacccttgtttttccagtttggaacttgctaacattataaaaaaaaaaaaaaagtgtcaactgacctgaagtcttaatagaagcacttgatgtgggcgtaccctacaaagtaagttctggctattgaaaaacttttcattgtttaaaattgaacatggtattaatttcacatcatgtaacatattgtctagtcatatttttcccttaaggaaaatgttatctcttcataagcctggttttatatatagcaatagtaaatatttacatttagggaaaaatatcttgctaggatcctcaaacacctttataaaaaatattcctggacagggtgcagtggctcctgtctgtaatcccagtgctttgggaggccaaggtgggaggatctcttgaggacaggagctcaagaccagcctggaaaagagcaagacttcatctctacaaaactatatatattccatttatttccaacatgactgtgtgagatacatgtatatttatttccaaaagac

SEQ ID NO: 81665 - DNA, 822 bp, Homo sapiens
ttcccctggggtgtagccttgttcattagtatatactcattccttcatgctttcctcagcagaacacttccacttctgaggtgagcttttgccccrtgcccttcctccacaggtgttgcctttttataaagacctgatagcagaataaattggtgtttccctgttgacccagcaccatttctgtgggcctagaatatggccctcaacccttagagtggggcagtgagggcttgaggagtgacccttcctttctcatggttttagtcattttggctgccagcccttaatggcacagatctgctgcttctaacagatggccaggaggtgacaccgatttcagccattgccaaggttagcaccctctcctttgagcctagggccacactgttcattgtcactttaggcaagtgcctgtttggctttaaaggtaagcctgccagctgtgagaagccttggtaactgatggactcatttcctggtccttaaagatgcagcctcttaagggctccttgatggatgccatctctcctagcccccagccctggtgccactggtgggcaggttcccattctttggggctgggagggacagcttgcctgtttctggtcacaaattacagtcttctctcctgtaccattctgtggcttcagccatgggggcagtacccttcattagtgtagatagtcattccctggtagggtggagggtaagagatagggtctggaactgtttgggacttttggggatgtcctgtgcctcccagattcctcgattctgggaggagaggctgccgcattctgctgctcctcacagcgagcaaag

SEQ ID NO: 81666 - DNA, 1344 bp, Homo sapiens
acagacggggtttcaccatgttggccaggctggtctcgaacttctgaccttgtgatctgcccgccttggcctcccaaagtgctgggattacaggcatgagtcaccgcgcccggccagcactttctgagatttacgcatgttgatacttgttttagtttttttaattgtcctacagagttccatgatattccatgaaagcctattgatatattttccagtacatggacattaggattgtttttaactttccagtgttgcagtgaacatgcgtatgccatctctccatatatgtttgcactttcctgtctgtgtgcctaggagtggaagggcccagctacatggtgagtcttctccagggtgctagggcagctcacagctcccaccaacagccatgtggtcctgttccctcagtggtgtcacattggaacattttggcccatctgattggtgtggaaaggtttttgctgttactttaattttcttttccctgattattggtaaggttgagcatcctttttgtaagtttactgctattcaggttttcttctctgtgaattacttgttggttcgttcttcctatcttcagcccatttttattgttttaggttgcttgatattttttgataaggattcattacctatcacatgcattgaaaaagctttttcccagcctgtggttagccatttttttctttytttaaggtgtcctttagtcattaaaaattattggccaggcctggtggcgcatgcttgtaatcccagaagtttgagaggccaaggtgggtggattgctttagcccaggattttgagaccaggctgggcaacatggtgacactgtctctacaggtacaaaaacatagccaggtgtggtagcacatgcctgtggtcccagctatttcggaagctgaggtgggaggatcgcgtgagcccgggaggtcgaggctgcagtgagctgtgattgtgccattgtactccagcctgggccacagagtgagaccctgtctcaaaaaaaaaaaaagaaaaaagaaatttaaaggtttttttttgagacagagtcttactgtgtcagatttaaaattcaaattcaaatttatcttaagatttaaaagattttttgagataattgtgaattcacagttgttagaagagggatcctatgtacagttacccagttccccccatggtaacatcttgcaaaactatatagtacaatatatatcacaggcaggatattggaaatggtatagtcaaggtacagaacatttccattgccacaggatattttatgttgtccttttatagccacatctacctccttcacagtctgacccccttctgtaact

SEQ ID NO: 81667 - DNA, 662 bp, Homo sapiens
aattatgtgacaaggtctctctgtagtctgtggaaaggaggtctcacagtctggcagtgggagtcagaggacatgctgaaatgatctatttggggtcctttctacaaagctccttaagacagaaaatagagaactgaagcaccatattattcctttcagctaaaaattggaccacttttggtccagctggggtgggggtggtgaaattgcagaatgggagccttcacaagtatctctcaacgtcatgggtgcacagaccatacctggctmccttagtcactgtcccctactctgcaccccttggtctaggccacggtttctcaacagtggcattatcgatactttgagtgggatatttctttgttatgggggctgtcttgtgttttgcaggatatttagctgcatccctggcctctacgcaccagattctaataagaaccctcctcccccatgctatgacagcaaaaatgtctccagccattcccctgggaggcaaaactgcccccatttgaaaaccactgttctaggcaaagatcatagtgaatggcattcagtaaaaactctagaatccataggaccaaaataacagtatgactagatgtctgtggtggcaggtcacaaagaagggaaacaggtcaaggccaggatgagggaagtgggag

SEQ ID NO: 81668 - DNA, 2839 bp, Homo sapiens
ccaagttatgtacaattttggtagttaaccccaccacctcccataagcggttactgctaaaccttccaaataagcacatttatgataaatcacttggagctgtttaagtggatcaggtcttaagctattccttgggatagatcatgtcattttcaatgtgcacgaactacaggagagaaattccactgtaaacctctgccgcggtatcttcgtttcccttgcaggcttcagggagtctcagkcaatatttcttatcttatttttaaatatcttgtggtctcagaaatggttggtgattcagaaattacatcaggagtctaaagatagactacgggctcatgacttcaataaatgcagcggttctataacaggaaaagaaaatgcttgttggttttaagactattgggaatcaaaagagttattcttagtttggccagttagagtctatctctccaaaagcaagttaccttctcttctcaaccatccatctacataactgggtgcatgaatataaatcacaaggcctcctagatatttataaactgctgaattcagagatatggatacctttttatagactctacccccaccactacaaattgttttgtgaaacagtttccatgttggttattttaaaaatggaataactgatttgatttggaaatgacagtagcaaaagcagggcaaaaaatcaggtctcccatgtacatggtagatgctcctttatgtcaccctacctcaatgagttattcaccccacattactataaggcaacctctggcatgaaaattctttgcaggtgacattgcaggagttatgctcctccttttccagtacaggcacagctgcagcttatcttatttcaaacaggattagtccaccaatgcataaatgacaagaaactggctcttcttgccttcttgaccaattcagactctcagacatcttcctcatttccctgaaagtttatcttcttttacaatggaaatgtgtttccctaaaagtgaatgtatttgggttttatccagacaaccctcctttctttagttccaagtgggggcgaggtggaggggtatataagaattctggtacaaatgacagtcaatgaatcatgaatttctagtaagaaaaaaaccagtacctattgttacccttttcttgaatctcccacccatctaattatgggttaatatattttcacttaaaattttaaaattaaattatttgaatacacttttagattcatattacttaaatgtcccatagtaaacatgaaccacttttacagttaaaagtgttcttttaaaataaatttgataaaattctatctatctttttcttcttttaaaatggaaaataccgtaaggaaatctctccgatacctgtgccaagttttgtttgccttggtttttttgtttgtttgtttgttcagttctggttttgcttttaagtttccctgacccttctagatggtcttattattagattagaattctttcaacaattgactactaaaaagtgttttcctgaatatatagactgagaatgaaggggaaaaacatgaagaaaaatgtcctctaagttttcctacacatatcctataattttccagttggcttagccactgaacatatttaaataaccaaccaacatatttatttaacattcggcagatggacatgataggaacatcatgattttcagatgtacttttataactgcaaggttttcttcgtgccaggatcacaacaggttcttaaggtaaagccgcccctacctgctgtttcttcaatgttggagcaactctcaacctaaacatgtccactcagattaatttaaatccctgacattaaagtggaaatcaaatcattctcttcaatctattttttaccagcagcataaaagagactattttacatgttaatagtaatctgatgtggttgtataaatctgatataaatatgatactctgtttggaaatgatgctaatttagtttaaaatggagattacatttcaacttgtaaaagagcaggatggaatattagcattcatggctgttatataatttccctttacactacacaagtgttactcaaaatcttttctgagactctttgtccaaagatttcccattcttcctataagaaaaaggacttctctatttaactataagttaaacaggtggtacagacccttgaaaaaagattaacaacaacattataaatgcatttttgaagaaacatttgaagttacaatgtaataaactgaacagaatgtcataagaatgtcaaactgggcactgtaaaaataaatgttattcccaaggaaaataaaaagtctgcatatttatgtaacattcagcagatggacgtgatattaatatagggttttcagttgtacttttatagctactagattttcttgcctaacttggcaacccgaggcaccatttgagttttggatttggacaatactgcaacagatgtccagaccaataaaataaattccttaagggctatgcttaatttgtgtaattgatcaattttggttacataggcctcagctcaccagcatgtaactgccttccacaaaagctttgcagttgggatttcgttccatatgttacaagagtttatggactctctttgataatgctgcagatagaaatgggcctgcggtgacacctgttggcaaccagcggtgaaaaataacaagggatggagtgggcagttctggggcagggtttctgcaccttggcgctattaacatttggggccaattttttattgtgtgtgtgttgtgggggtggctgtgctgtgcattgtaggaggtttagca

SEQ ID NO: 81669 - DNA, 2839 bp, Homo sapiens
ccaagttatgtacaattttggtagttaaccccaccacctcccataagcggttactgctaaaccttccaaataagcacatttatgataaatcacttggagctgtttaagtggatcaggtcttaagctattccttgggatagatcatgtcattttcaatgtgcacgaactacaggagagaaattccactgtaaacctctgccgcggtatcttcgtttcccttgcaggcttcagggagtctcagtcaatatttcttatcttatttttaaatatcttgtggtctcagaaatggttggtgattcagaaattacatcaggagtctaaagatagactacgggctcatgacttcaataaatgcagcggttctataacaggaaaagaaaatgcttgttggttttaagactattgggaatcaaaagagttattcttagtttggccagttagagtctatctctccaaaagcaagttaccttctcttctcaaccatccatctacataactgggtgcatgaatataaatcacaaggcctcctagatatttataaactgctgaattcagagatatggatacctttttatagactctacccccaccactacaaattgttttgtgaaacagtttccatgttggttattttaaaaatggaataactgatttgatttggaaatgacagtagcaaaagcagggcaaaaaatcaggtctcccatgtacatggtagatgctcctttatgtcaccctacctcaatgagttattcaccccacattactataaggcaacctctggcatgaaaattctttgcaggtgacattgcaggagttatgctcctccttttccagtacaggcacagctgcagcttatcttatttcaaacaggattagtccaccaatgcataaatgacaagaaactggctcttcttgccttcttgaccaattcagactctcagacatcttcctcatttccctgaaagtttatcttcttttacaatggaaatgtgtttccctaaaagtgaatgtatttgggttttatccagacaaccctcctttctttagttccaagtgggggcgaggtggaggggtatataagaattctggtacaaatgacagtcaatgaatcatgaatttctagtaagaaaaaaaccagtacctattgttacccttttcttgaatctcccacccatctaattatgggttaatatattttcacttaaaattttaaaattaaattatttgaatacacttttagattcatattacttaaatgtcccatagtaaacatgaaccacttttacagttaaaagtgttcttttaaaataaatttgataaaattctatctatctttttcttcttttaaaatggaaaataccgtaaggaaatctctccgatacctgtgccaagttttgtttgccttggtttttttgtttgtttgtttgttcagttctggttttgcttttaagtttccctgacccttctagatggtcttattattagattagaattctttcaacaattgactactaaaaagtgttttcctgaatatatagactgagaatgaaggggaaaaacatgaagaaaaatgtcctctaagttttcctacacatatcctataattttccagttggcttagccactgaacatatttaaataaccaaccaacatatttatttaacattcggcagatggacatgataggaacatcatgattttcagatgtacttttataactgcaaggttttcttcgtgccaggatcacaacaggttcttaaggtaaagccgcccctacctgctgtttcttcaatgttggagcaactctcaacctaaacatgtccactcagattaatttaaatccctgacattaaagtggaaatcaaatcattctcttcaatctattttttaccagcagcataaaagagactattttacatgttaatagtaatctgatgtggttgtataaatctgatataaatatgatactctgtttggaaatgatgctaatttagtttaaaatggagattacatttcaacttgtaaaagagcaggatggaatattagcattcatggctgttatataatttccctttacactacacaagtgttactcaaaatcttttctgagactctttgtccaaagatttcccattcttcctataagaaaaaggacttctctatttaactataagttaaacaggtggtacagacccttgaaaaaagattaacamcaacattataaatgcatttttgaagaaacatttgaagttacaatgtaataaactgaacagaatgtcataagaatgtcaaactgggcactgtaaaaataaatgttattcccaaggaaaataaaaagtctgcatatttatgtaacattcagcagatggacgtgatattaatatagggttttcagttgtacttttatagctactagattttcttgcctaacttggcaacccgaggcaccatttgagttttggatttggacaatactgcaacagatgtccagaccaataaaataaattccttaagggctatgcttaatttgtgtaattgatcaattttggttacataggcctcagctcaccagcatgtaactgccttccacaaaagctttgcagttgggatttcgttccatatgttacaagagtttatggactctctttgataatgctgcagatagaaatgggcctgcggtgacacctgttggcaaccagcggtgaaaaataacaagggatggagtgggcagttctggggcagggtttctgcaccttggcgctattaacatttggggccaattttttattgtgtgtgtgttgtgggggtggctgtgctgtgcattgtaggaggtttagca

SEQ ID NO: 81670 - DNA, 1089 bp, Homo sapiens
tgtatatgtttgctggtattattgagaaaaattaaattacaggtaaaactctaaatttctgaaagatcaaaactatggaaccatggaaacagtttactggaatagctccttcaaagaggacttgctgccttacagtcaccacacacgatatgcaccattcctcagtcatgctccaagtcatgtcaaacatttacaccattcatttggtccctgcaggcgtttgagctttcagaaccctggtcaagcactcaagttcagagtctattactaacagaacatgtgcttatatgtaatgctgaggagtttaaacattttcataaggacaatagagagctataaaaatgattgtagttcagggaataacaccattttatctatgttacgttaatacgaggtttaaccatatgaacttgtctctttttttactagtcaaaaacagccaaatatcagcaattttctttggttgtaactaatgcaagcatcattttagttacatgtagtaaatgtactagaaaagagaaatgaggaaaaattgaaggtagaaaaactagataagaataaattataatgactgatacaaaataacgacagcccagatttggctaacgtgagataatggcagtggaaatgaagcaacaccataattcccttagacagctttcctactacctagaatttcrtacatcatattacataaaattatctgaagaacagtcaaagtctagaggagaagataagttttgccttcatccttgtagctactgaaaagtacaaataacagcaataaatcacattattttaaaaactgaattcaaatgacacttttcccaaggatgtccagatatttataagccattagctcataaatcagagggcatcttacatacattagctatttgcctactctctgcctcatttttcttatctggaagagaaataatagcagctacttaaaaatatattgtaaggaatgaatgaattaataaataaaaagtggttcaaacattgcttagcatatagcaaacacccaataaaagttgaccttatgattattaccattatttttagcaattttgttaatttacatat

SEQ ID NO: 81671 - DNA, 1089 bp, Homo sapiens
tgtatatgtttgctggtattattgagaaaaattaaattacaggtaaaactctaaatttctgaaagatcaaaactatggaaccatggaaacagtttactggaatagctccttcaaagaggacttgctgccttacagtcaccacacacgatatgcaccattcctcagtcatgctccaagtcatgtcaaacatttacaccattcatttggtccctgcaggcgtttgagctttcagaaccctggtcaagcactcaagttcagagtctattactaacagaacatgtgcttatatgtaatgctgaggagtttaaacattttcataaggacaatagagagctataaaaatgattgtagttcagggaataacaccattttatctatgttacgttaatacgaggtttaaccatatgaacttgtctctttttttactagtcaaaaacagccaaatatcagcaattttctttggttgtaactaatgcaagcatcattttagttacatgtagtaaatgtactagaaaagagaaatgaggaaaaattgaaggtagaaaaactagataagaataaattataatgactgatacaaaataacgacagcccagatttggctaacgtgagataatggcagtggaaatgaagcaacaccataattcccttagacagctttcctactacctagaatttcatacatcatattacataaaattatctgaagaacagtcaaagtctagaggagaagataagttttgccttcatccttgtagctactgaaaagtacaaataacagcaataaatcacattattttaaaaactgaattcaaatgacacttttcccaaggatgtccagatatttataagccattagctcataaatsagagggcatcttacatacattagctatttgcctactctctgcctcatttttcttatctggaagagaaataatagcagctacttaaaaatatattgtaaggaatgaatgaattaataaataaaaagtggttcaaacattgcttagcatatagcaaacacccaataaaagttgaccttatgattattaccattatttttagcaattttgttaatttacatat

SEQ ID NO: 81672 - DNA, 1089 bp, Homo sapiens
tgtatatgtttgctggtattattgagaaaaattaaattacaggtaaaactctaaatttctgaaagatcaaaactatggaaccatggaaacagtttactggaatagctccttcaaagaggacttgctgccttacagtcaccacacacgatatgcaccattcctcagtcatgctccaagtcatgtcaaacatttacaccattcatttggtccctgcaggcgtttgagctttcagaaccctggtcaagcactcaagttcagagtctattactaacagaacatgtgcttatatgtaatgctgaggagtttaaacattttcataaggacaatagagagctataaaaatgattgtagttcagggaataacaccattttatctatgttacgttaatacgaggtttaaccatatgaacttgtctctttttttactagtcaaaaacagccaaatatcagcaattttctttggttgtaactaatgcaagcatcattttagttacatgtagtaaatgtactagaaaagagaaatgaggaaaaattgaaggtagaaaaactagataagaataaattataatgactgatacaaaataacgacagcccagatttggctaacgtgagataatggcagtggaaatgaagcaacaccataattcccttagacagctttcctactacctagaatttcatacatcatattacataaaattatctgaagaacagtcaaagtctagaggagaagataagttttgccttcatccttgtagctactgaaaagtacaaataacagcaataaatcacattattttaaaaactgaattcaaatgacacttttcccaaggatgtccagatatttataagccattagctcataaatcagagggcatcttacatacattagctatttgccyactctctgcctcatttttcttatctggaagagaaataatagcagctacttaaaaatatattgtaaggaatgaatgaattaataaataaaaagtggttcaaacattgcttagcatatagcaaacacccaataaaagttgaccttatgattattaccattatttttagcaattttgttaatttacatat

SEQ ID NO: 81673 - DNA, 973 bp, Homo sapiens
ggggtaagaaacaactatattaagtgatggttcagaaagtgaaattctgttctctgactctggttctttattcagtacttgattaaattcctgaattcccctktctcatccaaagtctcaacctccaaatagaatatattattaaaataacatacccccatcactggcctcatcattcattctctatgaatggcataatataatagcaatgaggataatactatttttaatattatatatatgatcaaaagttttaataaggggtactttaacagaaaacaattctagtccagtgtgttctggaatagtagccccaaaataactagtccaaataacatgttcaaatatttgaagacaattttaaattcttttctaaaatccttggaagacatgcctctccaaataggcatctcaaatgagttaatatatattacagaataaaatatatactctaaacagtgactctcaaacaggggtgacttcatcacccataggaaatatagcactgtctggaaacaaaccaagggtgccactggtatctagtgggaagaggtcagggatactacagaatatccaacaatgtatgagacagaattatgtggcccaaaatgtccttcacgccattgtcaaaataccatgcttgaaaggaatactgaatgctatcatttatctattttatttttatttgctgttagattcactatgttgcagtctgttactagaatctgtcaagatgataagaatgacattatttaataaaatcctagaggaaatatatttgtaggaaaaacagaaagataaagttcactgagaatgcttagtggttatgtttaatgtaatccactacagctgatggctcagaaagaaataagttgcttcaaaaacgaaactggaaattacactcaaaaagatcaattttatttataatctggaattaacagggtttttcctcttaaagcagatggatttcctt

SEQ ID NO: 81674 - DNA, 853 bp, Homo sapiens
ttggtggtattttgtgtaactttcacatatacacattgttatatattttttctttttttcaattatttaaaattgtaaaaccattgtttgtaagccatataaaacagtgagtagaactttgacttttacttaaaattgtctgtgctatttttttatgccccttttcttatatacactttttgtgaagttaagcttcttattttccctacatgagcaaaaggttatttaaaattcttcagtcaccagtgaaataatgaggcaggagaaaaagttctttaggtggtagtcttgtcatcaaaaataaatacagttgcatggaactgctcaagatctgaatcaaactgaaaaccggaaggcaaggggctgaaaattaagaacccctccaaccatgagttattcttcaggtcaagggaggcgagggcagggagaagtgtctagccatgccatcttagagcagaaggccatagctggatcagatccaattctcatgacacacacaaggaactacacttgtggcacctgagctggattcagatagcagagtgggcaggcaggtgggcaggcagagcagtggttggatgagcttagagctcagtactatagctccatcattctgttcagagcactgccaacatggaaccattgaatcagggtcttgtagaagttcgtggttcaggaggatggtttcctgaatcctcttggaattcttgatgatacatttgaggggcttgacagggcaaagcctttccagccttggatgatgagattacacgcagggtagatcttatagtttgtcatgtcagtaaaggtaagggacagcaggttgsatttcttgaagctagtttcctggatc

SEQ ID NO: 81675 - DNA, 853 bp, Homo sapiens
ttggtggtattttgtgtaactttcacatatacacattgttatatattttttctttttttcaattatttaaaattgtaaaaccattgtttgtaagccatataaaacagtgagtagaactttgacttttacttaaaattgtctgtgctatttttttatgccccttttcttatatacactttttgtgaagttaagcttcttattttccctacatgagcaaaaggttatttaaaattcttcagtcaccagtgaaataatgaggcaggagaaaaagttctttaggtggtagtcttgtcatcaaaaataaatacagttgcatggaactgctcaagatctgaatcaaactgaaaaccggaaggcaaggggctgaaaattaagaacccctccaaccatgagttattcttcaggtcaagggaggcgagggcagggagaagtgtctagccatgccatcttagagcagaaggccatagctggatcagatccaattctcatgacacacacaaggaactacacttgtggcacctgagctggattcagatagcagagtgggcaggcaggtgggcaggcagagcagtggttggatgagcttagagctcagtactatagctccatcattctgttcagagcactgccaacatggaaccattgaatcagggtcttgtagaagttcgtggttcaggaggatggtttcctgaatcctcttggaattcttgatgatacatttgaggggcttgacagggcaaagcctttccagccttggatgatgagattacacgcagggtagatcttatagtttgtcatgtcagtaaaggtaagggacagcaggttgcrtttcttgaagctagtttcctggatc

SEQ ID NO: 81676 - DNA, 578 bp, Homo sapiens
caaagaaacgcatctactatggatttatcctttgcgcctttttctctgtatcctttttgcagtctttgtcactttgattattatgtggggattggggcttcctatctcctgaccgtcttttgtgaactaaacattattttagggaattcgtactaaaattctgaaagcactgcttggggatggcagtcttatttgggattgtgtcacatgttgtttgttttgtgcttaattggttcatgataacttggacaatatataaatgrtcttggtttcatcatgtaactcacaaaatgttttcttttacattttttttctttagtgctttctccttttcctaccaaatatctaggctcacttttaccatcagatagagatttagttgggcttttagaactctctcatcaagcagatgctttttgtgtgtgtgtgtgtgtgtgtgtgtgtgtgtgtgtgtgtgtctgtagtttgtgggctgttagaagccatttgctcatcttgtcaaagccatagcagtcttttcattctcagttgcttcgctttctcctcacctcttaggaaattggcagccaatgactttg

SEQ ID NO: 81677 - DNA, 647 bp, Homo sapiens
atccttaaaaactcttattagtccgtaagagagtgtgcctctaacctaactggccagaagcccctttcaggtttgttttctctaaaataaacttgtccttgacttctaagccacctttcctgtttctttcttctttaattcttacatctgggagtttaaggccagcctgggtaacatagtgagatcttgtctcttaaaaaaaaattacaggccgggtgtggtggctcacgcctgtaatcccagcacttcaggaggccgaggtgggcagatcacaaggtcaggatttccaaaccagcctggccaacgtggtgaaaccccatctctactaaaaaaaaatacaaaaattagccgggcatggtggtgtgtgcctgtaatcccagctacttgggaggcggaggcaggagaattgcttgaacccgggaggcagaggttgcagtgagccaagattgcaccactgcactctagcctgggggacagaacaagactccatttaaaaaaacaaacaaacaacaaaagtatccattcctctgagtcaataaaagatgtatgttaaaaaaaaaaaaaagccaygtactatatatacttattgcatcataacttgccttttcataaagacttcaatcagaatataaatgaagggctgcaca

SEQ ID NO: 81678 - DNA, 1096 bp, Homo sapiens
cagtaatccagagcagtctgtcccacctttctctcccagctacccaatgactgtagaagatgtgaagtcagtattctcataaagtattccacaattttgtgtctaacttattcttttatcccccatatttcctgtaaatagggaatccaatggactaaattcaggttagacattttttgctagaatataccacaggtgatggtgataatgtcagactgcactacatragcacgtaatacaggctgatccattttcagtgaaactagctttgcccacctggaataggtggagactataaggtcactccatgttaaagtggttctccttttacaatgagaattaatctaaggatgctacttagacaccctagaaatatcctgttccccaaaaacctttcacctgctgatccttgctggaattatttcattgagggtcacaaaatggtgatcatctaattctattatttcttctacatatattagccagcactcttctgcaaagagctttctctcaccaactggggaagaattagttcctcctttaaaaaggcaagctaaatttctttatcaatttttagagtaatttgctgtaagagtctcctccagtggtggcaactgaggaaggtttcatttgtatttattcaaggctgacaaccacagtctttttcttgattcttgaactgccccaaatttggcagtgcaagccccttcaaacaggctcctgaatctctttgacataccctcattagtctttgagggtttccccacattctggtacaaaatattcttttaactaaaagtttaaaagtaacctacaaaaagcctattatacaagttcttatattcttcataaaaataataatagtattaaaatgtcatatctaataaagcaactaataaactttactaacagagcttcttattttgtgaataagcacaatgacgctgtctagaaaaactccacccatcaaccattagactgaaggatgacctcatatattatattgctgttaggcacttttcaagacataaagataaaatcctgccctccacaaaaatgatctattgcagtgagtctcaaaatttaatatgcataa

SEQ ID NO: 81679 - DNA, 653 bp, Homo sapiens
tggtattcggccaagacagcatgtaggagaaaatgcaagtattacctttcttgcttgtattaggataaaaagttgaaaattaacaagctaagtatctaactgaaagagaaagaaagaaataataaaggtaacagcagaaattaagaaaacaaccatactgtagaaaaaacaaagcccaaagttgagattcaaaaagagtatggctgaaaaaagagttttgactattgattgaatgtatttaaaatttaaatggtcctttaaatccttcaaacttaatcctttaaacttcaaaaaaagtttaaatttggctaacgcagtgactcacacctgtagtcccagcactttgggaggcaaaggtgggtggatcacctgaggtcaggtgttcaagaccagcctggccaacatggagaaaccccgtctctactaaaaatacaaaaaattagccaggcrtggtggtgggcgcctgtaatccaatcccagctactcgggaggctaaggcaggagaatcggtacagcctgggaggcggaggttgcagtgagccgagatcacgccattgcactccagcctgggcaacaagggcaaaactccgtctcaaaaaaaaagtttaatacataatttaataaatttaaatagataaacaaggtctcactct

SEQ ID NO: 81680 - DNA, 1696 bp, Homo sapiens
gatttcatgtttcaggacttagtgatggcttccatttccagtcggtcttcttttaaatgctgtttggcattttatgtgggctttggttgtcaataaaataaaataaataagaaggtaaattctactaacagcttaattgtctgcaaggtaagatgagcaaaatctaagcagacattctgactgagagagggcataagacaacttggagattctgccaaatccataggagaggacyttttgtttggttagttggtgggctgattttcagctttttaatttttttcatagagtggagatgttgtaaccctgtcttataaactaatagaattaggaaagctgcctccatccacagcagtttgtttttcatcccaatggtttgtcaacataatgaactagataaacaatctgcacaagaaataaaactgtccttatagataggctagggaaatgtcaggcctcacttgttactgaaaactcagcagaaacttacaaagacacaagaacaattgggaggatgccaaacacacaagccaaataaactgaagattctccttcaggcttcagtttctttgcttttcctacatacatctcacccagcatttggctaggcactcctaactaagaatgttgaggttatcagaaaaattggcctaaaagaaatcaagatttatgatttttaaaagcagtcctttttttaacacctttaaagtgatgttcaccacactcaaagctggttgtcagactgaaaaccagaatattttacgtcttcagcttttttaaaaaaaacaaaatgctccatttcatttggcattttagaattatttttaaaaagaataaatcctacctcaaagcaaattgggaagatgatagtgccaactcttcctttgagcccttcttggttcatgcatgagccattcattttcaaagggagatgctaatgagcagacagacaccaactaaggtgtcctggtccatacaaatgcatgtgtgcaaatgctaagaaggactctacactgcccaccccacatctcccgcaccagcttgaagtgaagtagtcaagggggtaaaatattcacataaatgagccagtcttggtaataacattacgtactaagtgaatcagtgctttcattttgcatgagatcgtattccaacatacaaaatcttgataggttcagtacacagttattatgttagacattttgttgacctaaatgataataataattattattctcatgtgttctctgcactgctggattctgatttttcatgttaatttgatatcgcagttaaatgaaatgtaccttcaagaggtcagatgtgctggttgaatgtgctgggtgaccgatgtacacaaggctaaaagctgatgaaaagaagagtccaacagacatgcacttaatcattcattcaacaaatatttttgagcacttggcactgttaaaattgttacgtatatacagcacttaggaaatattaaaaaacaaaaaacaaaaaactttgccatcgtggaaattacattctagaaggaagaaaaagaaaatgaacaggatggataagtaaaataagtagaatataagtaaacatataaaatacatagaataaaatctctcagcatttgcttgtctataaaggattttatttctccttcacttatgaagcttagtttggctggatatgaaattctgggttg

SEQ ID NO: 81681 - DNA, 1696 bp, Homo sapiens
gatttcatgtttcaggacttagtgatggcttccatttccagtcggtcttcttttaaatgctgtttggcattttatgtgggctttggttgtcaataaaataaaataaataagaaggtaaattctactaacagcttaattgtctgcaaggtaagatgagcaaaatctaagcagacattctgactgagagagggcataagacaacttggagattctgccaaatccataggagaggactttttgtttggttagttggtgggctgattttcagctttttaatttttttcatagagtggagatgttgtaaccctgtcttataarctaatagaattaggaaagctgcctccatccacagcagtttgtttttcatcccaatggtttgtcaacataatgaactagataaacaatctgcacaagaaataaaactgtccttatagataggctagggaaatgtcaggcctcacttgttactgaaaactcagcagaaacttacaaagacacaagaacaattgggaggatgccaaacacacaagccaaataaactgaagattctccttcaggcttcagtttctttgcttttcctacatacatctcacccagcatttggctaggcactcctaactaagaatgttgaggttatcagaaaaattggcctaaaagaaatcaagatttatgatttttaaaagcagtcctttttttaacacctttaaagtgatgttcaccacactcaaagctggttgtcagactgaaaaccagaatattttacgtcttcagcttttttaaaaaaaacaaaatgctccatttcatttggcattttagaattatttttaaaaagaataaatcctacctcaaagcaaattgggaagatgatagtgccaactcttcctttgagcccttcttggttcatgcatgagccattcattttcaaagggagatgctaatgagcagacagacaccaactaaggtgtcctggtccatacaaatgcatgtgtgcaaatgctaagaaggactctacactgcccaccccacatctcccgcaccagcttgaagtgaagtagtcaagggggtaaaatattcacataaatgagccagtcttggtaataacattacgtactaagtgaatcagtgctttcattttgcatgagatcgtattccaacatacaaaatcttgataggttcagtacacagttattatgttagacattttgttgacctaaatgataataataattattattctcatgtgttctctgcactgctggattctgatttttcatgttaatttgatatcgcagttaaatgaaatgtaccttcaagaggtcagatgtgctggttgaatgtgctgggtgaccgatgtacacaaggctaaaagctgatgaaaagaagagtccaacagacatgcacttaatcattcattcaacaaatatttttgagcacttggcactgttaaaattgttacgtatatacagcacttaggaaatattaaaaaacaaaaaacaaaaaactttgccatcgtggaaattacattctagaaggaagaaaaagaaaatgaacaggatggataagtaaaataagtagaatataagtaaacatataaaatacatagaataaaatctctcagcatttgcttgtctataaaggattttatttctccttcacttatgaagcttagtttggctggatatgaaattctgggttg

SEQ ID NO: 81682 - DNA, 1226 bp, Homo sapiens
aagctttacagggtagaaatatgacaaatgtgtatgttgtaaggttgacatatttataaaccgagaatcctaaaatattgtgacatatgcaaaagtggaattatgtacagactaggaaagtacatggcaggaatggagcctgttggcagagtaatgcttcacagaagcctaggagctgagtttttaaggattagtaagagtcagtgaaggaaaaagtgccagaaaggagagaaaataggtagagaaaattaagaattatgaaggatcagcatgtgcaaacacatgaaggcatgaaactgcctggtggagccgggaaattgcacgtaggttgttattactggagcatcaagtaaataggtggagaaatgtactcattagtrtaattgttgctactatcataaatacatcctcaaatttcagtgacttaacagaacacaaatttatttcttattcatgtaaaagaccagtggtagtgttcctgactggtgagtgccagtcttctacaccatgtagtgactcaaggatccagatttcttccactttgtggttccgttattctctaagactttgtctccctggtattcagctggcaaaagaggagagcgggggtgaggagaaggctcttctgtttaaactctattagcacaggagcaacacatctcacttctgttgatagtccaccggcaagaactagtcacatcgaccattcttaaatgcaagaaaagtcaggaaacgtagaccctaactgacagtaacttttcaataaccacttatattatggaagggaggagcaccaagtttaaggatcagctagctgtctcagccatggggaactacttattcctttactcatgctgacttctcactaatcagtttaactaaagtctgaaattagggctgaggaagtgaatggaactcttggctgatagagggagcatggatagtagaaagatcgttatcctttccacccttcctgaagctcctgatttttccagagcaagtatgggtccatcaaagaaatgatggcttgagaaggtacacaaatgcggcctcttggagaggggagatatggctattgggggaacaaggttaggatgtctgaataaattgagtcctcatttagttaagccttcgaatagttaatgttcattttactatttcactgatagagatctcatgttattttgtttaggatcagtgtttattgtgaaatcatctgttccaca

SEQ ID NO: 81683 - DNA, 1300 bp, Homo sapiens
aagccagagatttcagtagatagaatacaggggctctagaaaggagaaaatgcaataggatatattcagagtgttgtaagagagacagccatatctcattaaaaaattgttttaaaaatatcatatactgattctagctaaaccatccaactgtgtagtagctacctaattactaacggtagatttttgacaggtatatctatgtggacatttttgtacctgaaatcaaraagaaaaaaaagataatcatatgtgaattcaagataaaaaaatacaaggagaaagtttcggaacttaatgtttttatgcagtttgacaatgttaacgtgcttgagctactgttgaataaaaaggctgaattacaataggtgttgaaagtgttcaatgaaataaatcctgttgagtctcaggtcctttgaagtgtgtattatgcaatcactaagaaccgtttgcttgaaatcaagtacttgccctgcttgtactttgctatatacaatttcacattagttagacgaattaataaccattacaatttccaacttcattagaggtggggattctgtcttgaatttctgtagaaggaaataatttgctgctattgtggataggtatcaattgtcaactctagttccatagacctggtatagttgttttttttttttgtaccttctgtcagtttgaggtcagtttcttcttatgaatgagaagccgcctttgcccttcaagaaaatgaaataaagccagaataaccttcctgcttcccctgcctgccttcccagtctagtatttcagcatctgaagagtttatttttggatgtcattaaatatagctagtgatcctttaaatgaaatggattaaatggcaaatggcttagcatcttctacccttcagtctagtcacctgaaaaaattcacaattcaaaatatgatttataacataacccttcttcatctctatttctattatttcttgggaaaaaagtttccttgctgataatgttgaagtgtatgctgacgttactacctttcatcaatatcttcttatggtagtaaagtggctactttttagttttctcacctgttgtttggaattttccatggcttcaaagattttacaggggaagaaaaaaaccataatttccccaagacatattttgccaatggagagttttctccctttaggaattttcatatgtgtatgatattttgagccatttgtttgttaattctcacaatttcttacaagtagtcctgtcttccaaagctaaaaatatactgcagctacatatcctaagtgata

SEQ ID NO: 81684 - DNA, 652 bp, Homo sapiens
agctaccaacttgcaggaaatacagaggacagagagaacagatgaactgcaccatgacagggcattcagcaaaatccagactgcaggaaagtctccaggctaaatgtcctagattcttcaatagataaatcattgtaggaaaaactagggggtaaggggaagcaacacaatgaaagggaaacctgtagaagagtcttaaaagacacaaatttcctttaaattagcaagattaaactttgcatgtacacctgggtaataatattataaagaaatgcaaagaagtgtctactttgagaagcagggtactggctactttagggacagagaggggtgatgattaggatgtggcacctggatggggctgctggggtaggcagaaaaattctaattctggacctgggtaatgcttacaggtacgttcaccttaggataactcagtaagctgtacatttgtgttgtgtgattttctgtatttgtctyattttaccaaaaaaagatttttttaaaaaaaaaggagaatttatctcgcttttataacctgtcataaatagaatgcaacacttaaaataattacatgaaaataaaccatattattaactagctgtggtagcctgaggacacttccaaggcctcttctatgttaaaaggagag

SEQ ID NO: 81685 - DNA, 652 bp, Homo sapiens
agctaccaacttgcaggaaatacagaggacagagagaacagatgaactgcaccatgacagggcattcagcaaaatccagactgcaggaaagtctccaggctaaatgtcctagattcttcaatagataaatcattgtaggaaaaactagggggtaaggggaagcaacacaatgaaagggaaacctgtagaagagtcttaaaagacacaaatttcctttaaattagcaagattaaactttgcatgtacacctgggtaataatattataaagaaatgcaaagaagtgtctactttgagaagcagggtactggctactttagggacagagaggggtgatgattaggatgtggcacctggatggggctgctggggtaggcagaaaaattctaattctggacctgggtaatgcttacaggtacgttcaccttaggataactcagtaagctgtacatttgtgttgtgtgattttctgtatttgtcttattttaccaaaaaaagattttttwaaaaaaaaaggagaatttatctcgcttttataacctgtcataaatagaatgcaacacttaaaataattacatgaaaataaaccatattattaactagctgtggtagcctgaggacacttccaaggcctcttctatgttaaaaggagag

SEQ ID NO: 81686 - DNA, 650 bp, Homo sapiens
agtgataataaatgtcataataattttattaagatttgttaagtatccctcagaattcatgctactagatactaatatagattagatgataaattatgggtggaatgtgatcttagcttgcttatttaattgaggtataataaaacatgcaaccaaggtagatctgtgcattattataagcttgcctcaaatatttccacgagtttttaataatcaacctatccatataaatacctgtacctgtaggcttgtctatgacgcaatatcttatcatttagggaagttttatctggcaatgtagaccatgaatacataatttttaaagatgacgtgtccatcaacacaataaatgctaagcaccccagggtccagtttctacttttggacaaattctcgcatggctcagactgtcccatctcaccctgccataattttaactctgctagacactacttttgccatctaatttcttattttgttatggatttgttctgtagatttgacatatatttttgactttctgattaaaaktttccctttaccttcgcctctgttttgatttattaagattcattaaggatttctacctctttatctcctctttcactcctccctcacaccaaatcggaaactgtttgttttaattcaca

SEQ ID NO: 81687 - DNA, 639 bp, Homo sapiens
tgctgtacacccttaggctgtctcagtggaacctcaacatccaaaagcaggcttggataagaggcagtgtattgctttacagtaatggaattattgtaaccaaaggattttgttgttgtttgttcttgttgttgttatgctcaagtttaatttttatacttattttttaaagaaagaattcttcaagcccagaaagcacgttaacttttcattatgaaattactcactgactcagtcaagagagcattgttatcagttatccttttgtattcatcaaggttctccacagaaacagaaccaatattatatatatagatatatcaaaagagaggtattatgaggagttggctcatgaaattacagaggctgagaagtcctacaaactgctatctgcaagccagaggcccaggaaagycaatggcgtagttctggtccaaactcaaaggcctaagaaccagaggagccaatgttccatgtcctagcttgagtccaaaggctcaagaaccaggagtaccaatgtccaaggccaggagaagatggatgtcccagctcagagtaaattcactcttcctctgcctttttatctaacctggctcttagcagatgagatgatcaccacaaacattggtgagagggatc

SEQ ID NO: 81688 - DNA, 639 bp, Homo sapiens
tgctgtacacccttaggctgtctcagtggaacctcaacatccaaaagcaggcttggataagaggcagtgtattgctttacagtaatggaattattgtaaccaaaggattttgttgttgtttgttcttgttgttgttatgctcaagtttaatttttatacttattttttaaagaaagaattcttcaagcccagaaagcacgttaacttttcattatgaaattactcactgactcagtcaagagagcattgttatcagttatccttttgtattcatcaaggttctccacagaaacagaaccaatattatatatatagatatatcaaaagagaggtattatgaggagttggctcatgaaattacagaggctgagaagtcctacaaactgctatctgcaagccagaggcccaggaaagtcaatggcgtagttctggtccaaactcaaaggcctaagaaccagaggagccaatgttccatgtcctagcttgagtccaaaggctcaagaaccaggagtaccaatgtccaaggccaggagaagatggatgtcccagctcagagtaaattcactcttcctctgcctttttatctaacctggctcttagcagatgagatgatcaccacmaacattggtgagagggatc

SEQ ID NO: 81689 - DNA, 929 bp, Homo sapiens
tgcatttgaaaacttctatgaccttcttcctacgtttctcaagatttgctagaggtaatagccacaaacttatactatagttaagagagaatatttagttttctaaaaatagtgttytataaatgtgctttcaatgatttaagcacagatacttagattatatctgtagatctaggacttccagtataaagggagagaagttgcatataatttattgatattttaggatacatgttttttccaaatgacttaagcctcttaaatgaatggagggaaaaagcttttttagatgttccagcttacatggctcttccaggcctcagctgcatttttaggttaagatggcccagtgaggcctggcttgatggaaccctgttttgtccagccactctctgtctcacttctaccccctctgtccctagtacttgtactgatgcttcttaggtaaagacctttgcaccattatgttctttgtcccaggaatgatccttcttttactattaccctgcctaaagtcttctcaagcctcagcttctcagcctttatcttacttcttgggtaagctttgtctgatcctccactccatcctctagttgttcctccttggctcactctcatgataacctgtagatttaaggaaaagtacttacttgtctattttctgaaaagcacacgccaaactataattaaatacttatttttctttttatattagtctgtaagctctggagggcttttctctccccagtatcctataggctggtagaggtttttgtttgtttgtttttcttttcttttcttttttaaattttactttaacttctgggatacatgtgcagaacatgcaggattgttgcattggtatacatgtgccatggtggtttgctgcccctatcaatccgtcatctaggttttaagtcccacatgca

SEQ ID NO: 81690 - DNA, 609 bp, Homo sapiens
cgatgaccagcacaccaattcctttctccttccaggaccattgtatctgctagtccttctgctgaaaaggcccattgcccagcctcttctcaggtctcagttcaaagaaggaaagcctcaaagaagccttccttgatcatcctgctctctatctcagccacctccacagctcttaccaaactccatatctactgtgtcttgttatttgttatccctctgtcccactggttataaactctattatagctgtctgcattgtttatcactgtgtccccactacttaggaacagtccttggaacaaaactgatgataaaaaataaagtgttcaatgaatgaataaatatttgattttctatgcttttggagagtaatttgtgsctccagttctgagattattttttatctttatctaacttaaggcattttttctcattagagtttttctagggggaataaattgcctagctgctctaaatggtttttgtctcagtgtaagtagagttggcctcaccaggcttattctaggtctaatggctttgaaataaattagcgacctacggactagttaagaaatttgttgttttgccccaaacctactttttcacctg

SEQ ID NO: 81691 - DNA, 693 bp, Homo sapiens
cattttgggaaccactaagtatttgtttcttcacaagcaaacttgatagggaagggagggacattcacaaaaggcccactcagtatgcaggaatatgacgttggtaacctyattgactctccaaaactagaagaggcaaaggaagagacacaaatggcctctttattaatcagaaaaccttgtatattttagaatgtcacagtgtataaaaatgattttatgagttctcccaacaatcctctgaaacaaatagaaaagatattgcacaaatatgcttccgtacccatttctacctcattaggatttgtatttctagtttctgtgatcatgaataacagctcaacaaaagctaatcaactctttcaacttagggcatccctagaagaaacagacgcaggggttgccttacttaaaattacacacttgaaatcagtcagaattcaaagtttaaaaacttttcatatctaaatagtatttgtttttttgtgtgtgctctttttcagcaggtatgagtgaaccaaacaggtcagtttactatagattgggcattgaggggtttcatattcttaactaaacatatcactaaaattatatgtgaatatgtttaactttcaagttttcctaaaattaattttaaccttttgtccatcaaatcatttaagaatatagtactcgtttcagttaatgtacctg

SEQ ID NO: 81692 - DNA, 693 bp, Homo sapiens
cattttgggaaccactaagtatttgtttcttcacaagcaaacttgatagggaagggagggacattcacaaaaggcccactcagtatgcaggaatatgacgttggtaacctcattgactctccaaaactagaagaggcaaaggaagagacacaaatggcctctttattaatcagaaaaccttgtatattttrgaatgtcacagtgtataaaaatgattttatgagttctcccaacaatcctctgaaacaaatagaaaagatattgcacaaatatgcttccgtacccatttctacctcattaggatttgtatttctagtttctgtgatcatgaataacagctcaacaaaagctaatcaactctttcaacttagggcatccctagaagaaacagacgcaggggttgccttacttaaaattacacacttgaaatcagtcagaattcaaagtttaaaaacttttcatatctaaatagtatttgtttttttgtgtgtgctctttttcagcaggtatgagtgaaccaaacaggtcagtttactatagattgggcattgaggggtttcatattcttaactaaacatatcactaaaattatatgtgaatatgtttaactttcaagttttcctaaaattaattttaaccttttgtccatcaaatcatttaagaatatagtactcgtttcagttaatgtacctg

SEQ ID NO: 81693 - DNA, 732 bp, Homo sapiens
aaggcctgggtcaggggcaccactgatgcttgcatgctaaggcccaatttacgtgggcctggccataaaactgtccttcaaggagaaatctctgaatcagcgacaggaggcttagtaagcttaaagaggttggtggatgtcctctaggccagggccgagagaacagctgctgtactttagccttctgtccccacttgccatcaaaggagtaagcctctctctcaagggggtaccagtatcctgtgtcccaactgactatattttcttccatccaataccaattattgaatggttgaaacaacaattcaacagctctaagacccatgcctrtgcaccacagattgtacttgagaggccccaaggaaggggaaagtctatccggggagcaatggaggaaatgctctaaggcttctcctatccacatgaaaattacagacctgtttaaattgtcctgatgtgggggaccatacactatgctggggaactggcccttcaaaatagccatcaaatggcgacaactgcctaaaccctggagggcaccatgaacagggatcttctgggcaccaccccaagaatttaaggcttctaaatagggaatctcgatcctgcctagtgggaataatcctgcttatgagttgagggacaaagtctaactggtgggcattaggacccaggaggcaggagtcagaagatgtggctgtctcatgctcagtaacccatgcagggggagcc

SEQ ID NO: 81694 - DNA, 1352 bp, Homo sapiens
tttaattagaaattttcaaaactttgtgtgatagttcactcttaagaccttcagagtcaaagccacatagggctgtcccctcatatagatagcgcaatgcattattttatggcagttggctaatgatatcttcatcatataaaaaagaaatgtcaagatatcattttaactttttatatacatgtgcccattccttgctcttggttattgatcaaatttatttttaaactgagacttaaaggaaaatatgctgacatttgggcttggtgtctgccaccatggctttgtagtacctgataattacttaagctttcttaccatcaaattctccaaaagctggacaatttgtttatggacaatccctgatctcacacctattgtataatctacctctgtattcacatcgccgctttttccataattgtatgtatccatataattgcatgataaactcatagttgtctgccattgagatgaaaagaaaagatcatcagagcaattgggtcagagtaatttgatgaagaatgtactatttctgaaatgtttggaggcttaaagaagaattttttataagtcgttagctatatttttaaggcaatttctctgagaaacagggaagcctgagaaaaggaaatgccagtaagggacaaattatttaacagggatcctttgtaggtgaccacgttcttattcagaatcagtgatttgttgtatttcaagacccaggctttggggtattaaagaggacagttgatttcgttattattattttttcagtcttgctacagggaaggaccttgtattaagatgtgagggatcttgatatcttaataacttagaagatttgttttgaacttcctttccccagtacattcaagtgatgtagcaggtacatggtttaggaaattggaattgaaatgggcatgtgtgtgcacatgcatataygtgcacatagttaaaaagactttgaaagattataagttaaagatttgttgtagggagaaaaaagtcaataagaattttatcaggaaaaatggaaacactagaaatctgtatgatgtacatattagtcattattggttaattatattaaattaaaagttatgtttaccataaagaaaacaataaaaatatagtttggagtagattattcaattattgttcacatacattggtatcagtcaaaggagaaagacattttgttgttttactcagctgtgaatgagaattttgaaaactgtatggatcattttaatttcaggcaatgcaaatgatacacatggataatggcctaaatcagatctggaaatgttaggatatgcttacttattcaaaatttggttttggttaac

SEQ ID NO: 81695 - DNA, 559 bp, Homo sapiens
acacagttgtagagttgtgcttttcctttttttttcattgtttattttttaactaatgtgagctatcttaaaacagagagctatggtgaaagggcaatggttaagcaaccagagagatcaggctttgaacccaggctckacctggatgatctgagtaattgatttactgagagcgttatctacttaaaggaagcaaaactatcattgcttgattcccaccagagtatggaggcaagcctggaaaataagacatttaagaagaaagaaacagtattcttaattaaggaggggtgcaaaatagtgaagaccactggaattcagcagttctaattcactaaagtcatttcaatctttcaggtagccttttgaaataatcaaaatgctatggaagaatgttgtactttaaatgctatgaaagatgctatgttccataacatttaaagtacaacataatgttgtactttaatgccagtcattgcctgtggcccacaattcattttcagaaagtccatcctgcttgtaccaagtgacacttagcacccaatctgatggaaaaaca

SEQ ID NO: 81696 - DNA, 559 bp, Homo sapiens
acacagttgtagagttgtgcttttcctttttttttcattgtttattttttaactaatgtgagctatcttaaaacagagagctatggtgaaagggcaatggttaagcaaccagagagatcaggctttgaacccaggctctacctggatgatctgagtaattgatttactgagagcgttatctacttaaaggaagcaraactatcattgcttgattcccaccagagtatggaggcaagcctggaaaataagacatttaagaagaaagaaacagtattcttaattaaggaggggtgcaaaatagtgaagaccactggaattcagcagttctaattcactaaagtcatttcaatctttcaggtagccttttgaaataatcaaaatgctatggaagaatgttgtactttaaatgctatgaaagatgctatgttccataacatttaaagtacaacataatgttgtactttaatgccagtcattgcctgtggcccacaattcattttcagaaagtccatcctgcttgtaccaagtgacacttagcacccaatctgatggaaaaaca

SEQ ID NO: 81697 - DNA, 912 bp, Homo sapiens
tcttcctttcattggatttgatagtttccatatttcactctccaacttctttgacatatcaatttcatttctcttcctgaattatacaagactcttgtttagttgaagattttatctttccactgtgcaaattcccttccttagctttcaaaaacacactttctgactgctatgcctttgagaattcaaatgacatcttttagaattttgtaggtttcaattgtacttcaagttattttgtctgtttgtattgtggatgtagcccttaaaatgtttttatagtcactgaatgcttatagttgatatagtgtcactgatttctagaaaatagcttagtactcacatttcttctttttacatagaacatattttgctgcccactttctgttaactttgttgtcagaaagagatcccatggtatttaggtagtattgaagtaatacacaatataaagatgtgttataggctgaaagtgtttgtctgtctatcacctcactcagccaagagctaagtgctgtttgtgctgcatcatgttactgctcacagtgtatctcagaggatggaacagcatatctaattgttactcttcacagtcttgttctataatctgtctgcctagaartctgtctatatctatggcattacgatcccagcacaaagcagatgggaataaaatactttattttaaaaagagttcaaatagggaaaattacaagaataatgtagcaaaaatctgtattttccacacctacaatcagaatgaatacctgtgaatattttacttgttttgttatattttcttccacttttgttaaagaaataaattattaggatgaaagtccttttaaaacattatttgcagttctatttccctcctgctcccgttaaaagcagctaccatcatgatttttg

SEQ ID NO: 81698 - DNA, 836 bp, Homo sapiens
gcatacagatatttaaatattataaaccaatgtttaaaaagaatgaataacatgttaatttatatagactatctgattacaaagcagaaggcatcactgcacaccgwttaaaataaatataaaccagagtgtttcaaggtaaaccatatggtaattctcttgatggaatttccagtttccctccaggggtttttggttgtgtaatgatggaagaatgtctcacttttgacccccaaaagagagacttttaaaattaattaattgacgcttgcaactttgtcaatgatttcttttgctctgaattgaaacttctgggctatcatttaaaaatgaatcttaggtttggcacaaaatttgggattttgaagcctacttcatgagtgggggatgaatgtctctatgctgcataggagctgaaggcaaagacagacacacacctactgctctggctcaaacaactgaacatggtttcagttaaattctgaaagttggctgaagcagggtgattatttttatttttttatctccaaaaatagaaataaactacccctattatttcgtctcatgatttctgacttcagccccaccagctattaataaaaaatacaatagacttatctttcataaaattctttaggattaaatttctaagtgtactagttacaatgaggagaaggagcagaaggagaaggaagaggtaggtgttaaaggggagaaggaaaaccaggagaacaattagccatttcagcagctagtttttgtgctgctctctactatgacaccaatgttcattaagaacaagttttcatcaaacctctgatcaaagataatagtgt

SEQ ID NO: 81699 - DNA, 836 bp, Homo sapiens
gcatacagatatttaaatattataaaccaatgtttaaaaagaatgaataacatgttaatttatatagactatctgattacaaagcagaaggcatcactgcacaccgattaaaataaatataaaccagagtgtttcaaggtaaaccatatggtaattctcttgatggaatttccagtttccctccaggggtttttggttgtgtaatgatggaagaatgtctcacttttgacccccaaaagagagacttttaaaattaattaattgacgcttgcarctttgtcaatgatttcttttgctctgaattgaaacttctgggctatcatttaaaaatgaatcttaggtttggcacaaaatttgggattttgaagcctacttcatgagtgggggatgaatgtctctatgctgcataggagctgaaggcaaagacagacacacacctactgctctggctcaaacaactgaacatggtttcagttaaattctgaaagttggctgaagcagggtgattatttttatttttttatctccaaaaatagaaataaactacccctattatttcgtctcatgatttctgacttcagccccaccagctattaataaaaaatacaatagacttatctttcataaaattctttaggattaaatttctaagtgtactagttacaatgaggagaaggagcagaaggagaaggaagaggtaggtgttaaaggggagaaggaaaaccaggagaacaattagccatttcagcagctagtttttgtgctgctctctactatgacaccaatgttcattaagaacaagttttcatcaaacctctgatcaaagataatagtgt

SEQ ID NO: 81700 - DNA, 836 bp, Homo sapiens
gcatacagatatttaaatattataaaccaatgtttaaaaagaatgaataacatgttaatttatatagactatctgattacaaagcagaaggcatcactgcacaccgattaaaataaatataaaccagagtgtttcaaggtaaaccatatggtaattctcttgatggaatttccagtttccctccaggggtttttggttgtgtaatgatggaagaatgtctcacttttgacccccaaaagagagacttttaaaattaattaattgacgcttgcaactttgtcaatgatytcttttgctctgaattgaaacttctgggctatcatttaaaaatgaatcttaggtttggcacaaaatttgggattttgaagcctacttcatgagtgggggatgaatgtctctatgctgcataggagctgaaggcaaagacagacacacacctactgctctggctcaaacaactgaacatggtttcagttaaattctgaaagttggctgaagcagggtgattatttttatttttttatctccaaaaatagaaataaactacccctattatttcgtctcatgatttctgacttcagccccaccagctattaataaaaaatacaatagacttatctttcataaaattctttaggattaaatttctaagtgtactagttacaatgaggagaaggagcagaaggagaaggaagaggtaggtgttaaaggggagaaggaaaaccaggagaacaattagccatttcagcagctagtttttgtgctgctctctactatgacaccaatgttcattaagaacaagttttcatcaaacctctgatcaaagataatagtgt

SEQ ID NO: 81701 - DNA, 636 bp, Homo sapiens
tggtgtgttttgttatgtataacaatgttttttttgttcagtagtctattttcttttatgacaattgttataacatttgacattaatatttttctattacttatttttatattgtgagtttctattacttattttatatagtgagtatttattgcctgttttgagattccactcttctctggtgcattagatgtcctattgcagccccgtgctctcttaaaaacagagatggttactatgcacataaaatggctgttggttgtctttaccacttgtgctttggagctcaggaggttgacttgtcacttaaattttttttttaataagttgtcagtaggtttttagtatttctatttagttgtcctctttgtttttatattgatagttaaaggtatccaaagctatgctgccaccacctaccatttctaaaatctctttagtgatttcaatcttaatgtgaatgctgctgccattaataatttctcaaatgtgcctgaatatttattttacttttttagggttgataatcctatgtttgtgcatctgattacctggcctgtggactatgcttctatcaatgggcagwgagatgaaatatatgaaatatatggccctaagtgttcatctatactcagg

SEQ ID NO: 81702 - DNA, 636 bp, Homo sapiens
tggtgtgttttgttatgtataacaatgttttttttgttcagtagtctattttcttttatgacaattgttataacatttgacattaatatttttctattacttatttttatattgtgagtttctattacttattttatatagtgagtatttattgcctgttttgagattccactcttctctggtgcattagatgtcctattgcagccccgtgctctcttaaaaacagagatggttactatgcacataaaatggctgttggttgtctttaccacttgtgctttggagctcaggaggttgacttgtcacttaaattttttttttaataagttgtcagtaggtttttagtatttctatttagttgtcctctttgtttttatattgatagttaaaggtatccaaagctatgctgccaccacctaccatttctaaaatctctttagtgatttcaatcttaatgtgaatgctgctgccattaataatttctcaaatgtgcctgaatatttattttacttttttagggttgataatcctatgtttgtgcatctgattacctggcctgtggactatgcttctatcaatgggcagtgagatgaaatatatgaaatatatggccctaagtgttcatmtatactcagg

SEQ ID NO: 81703 - DNA, 765 bp, Homo sapiens
gatctcccttttctcatgacaccgtgactcacacacacacacaaaaatacttacatcaaaacaatcaaaacattaagaaaatttctatacttaacatgcttaacaaaacctatatactacactcaaaataccaaattaaagtcctgagtaaaatttagggttgacagacccttgttactcctttagaaattaccacactaagtcaaggattataattccctaattccaataattaactgttcatctctgtgttaaagaaactatttccttaagctttttcttaaagcattaaaaaatataatcactacctggccaatctttgagagcatcttaggcagcaaaaagattttagagaatagtctcaatttatttttgtgacagcatcaagcctaattacaataatctgagtgattaaatacttttcaacctttcaaccttcaatcaagaattatttgaagagatgaatatttgggtggggctatagaataattagtcttatgtaagacagaagtaaactagcctatgattttaatctatcttggaaatataaatattctaatctttgttaaaaatagcaacaaaagttatccatttaggttacattaactcatatttaatccataggaactgatatgaccaaaacattcacagaacttcaactccttttcagctcttagtagctaaacttgctatttttaatgcttyatcgaaatctatcaatttgaaaagtttttagctaggcatttttgcaaataatcttgaaga

SEQ ID NO: 81704 - DNA, 585 bp, Homo sapiens
ttgtggactgtttaataatatattagcytcaatactttttcccatttataaaaccaagccttttcattcctaaaagcacacgcatattatttttgtgccttaatctttttttttttttttttggtgagttttgagctctgtgtgatccctgcatagttcatttgctccactcccctaaacgaggtctgtttttcctgtttcaccttctccctctctggaatggccttaggaaaaacactttccagtcctgttttaactcttttccatttcttaatctggattgctttatatttacttaatctgtctgcacatgtgatatcccaaatattataaagaaaatgatgtgtttttacttggcttttggcagttcctcaacatttgggttagactaattaatgatgtgatacacttctgtaataccaggaaaaaatttttataaagagagccattttgtttatatatagcatagaattcatacttccggaaataccttttcactgataaagaatgctgtataaaagatgatcagtgtttttagacagtgaacaggggcaagttgaataggtgctcgtttttgctttacca

SEQ ID NO: 81705 - DNA, 585 bp, Homo sapiens
ttgtggactgtttaataatatattagcctcaatactttttcccatttataaawccaagccttttcattcctaaaagcacacgcatattatttttgtgccttaatctttttttttttttttttggtgagttttgagctctgtgtgatccctgcatagttcatttgctccactcccctaaacgaggtctgtttttcctgtttcaccttctccctctctggaatggccttaggaaaaacactttccagtcctgttttaactcttttccatttcttaatctggattgctttatatttacttaatctgtctgcacatgtgatatcccaaatattataaagaaaatgatgtgtttttacttggcttttggcagttcctcaacatttgggttagactaattaatgatgtgatacacttctgtaataccaggaaaaaatttttataaagagagccattttgtttatatatagcatagaattcatacttccggaaataccttttcactgataaagaatgctgtataaaagatgatcagtgtttttagacagtgaacaggggcaagttgaataggtgctcgtttttgctttacca

SEQ ID NO: 81706 - DNA, 585 bp, Homo sapiens
ttgtggactgtttaataatatattagcctcaatactttttcccatttataaaaccaagccttttcattcctaaaagcacacgcatattatttttgtgccttaatctttttttttttttttttggtgagttttgagctctgtgtgatccctgcatagttcatttgctccactcccctaaaygaggtctgtttttcctgtttcaccttctccctctctggaatggccttaggaaaaacactttccagtcctgttttaactcttttccatttcttaatctggattgctttatatttacttaatctgtctgcacatgtgatatcccaaatattataaagaaaatgatgtgtttttacttggcttttggcagttcctcaacatttgggttagactaattaatgatgtgatacacttctgtaataccaggaaaaaatttttataaagagagccattttgtttatatatagcatagaattcatacttccggaaataccttttcactgataaagaatgctgtataaaagatgatcagtgtttttagacagtgaacaggggcaagttgaataggtgctcgtttttgctttacca

SEQ ID NO: 81707 - DNA, 705 bp, Homo sapiens
tgcatgattaaaccacaaataccacagtatatacatctagaaatatcccaaatctaaaaataaaaatggatttccattattatgcaaattgaaagcatcatgaattctgtgtcaggcatacctgggaatgaatcaatctcatcacttcattattcatttaaccctgcctaagtcacctaactgtgcataagtttccttggctaaaatgtaacaaaacaacataaacctcacagagctgttggaaacattatccaggacaatgaataaaaagcacctactacagtgattaatatccagtaaaggactgacaagkgcagtcattgtttttagatttaaattaaaagtacaaaatgagagagacattaaaatctagttatttctatgtatctataacaaaagtttcccaaactttactcatgtttattatttaatgattaaacatgtttattatttaatgatcaaagcaagcctcacattaaatgcttgttataaatcatggaatattaaggccctaattttttttttaattctgtaattaagtatgccctacaaataagcatggctaagttttggcatattactagtattaattatattgttaatggcagtaacttcattaaactaagctcacaaattagccatcaaatccatttatcttgtatttcttatcttggtgaattcttgatccaccttgactcctgacat

SEQ ID NO: 81708 - DNA, 669 bp, Homo sapiens
cttcttacctaatgttgattggctttctctatagatgttcacagagcattatctgctttctggcaataaaggactatgatgtcatgtaagactttctaagacaaacccatgcaatactagatcaatgttctaacagtgtgtattaactrtgtatactcttacaattagcagttagcagtatgggttcgtcccaggttctttttacccgtaggagggaagtgcttcagaagcaataccccctggcctgatgagccaaaaatgaaatttctcctaacagcagatatgaatcctgacctgatagatgacactgaaaataaagctgcagtatctcatgaaaaaactctctgtttgctagccccccactgagttaagctactgtgcaagcaaagtgatctctaacttgattagaaattttttcattatgtggactaatgagccattggtccacacctggaatcttttttaaatgtataaaaacattcaaacctaacagcaggaattcagttaggttttcttccccaaaaacgagatgtaaaatcatcagactacacacaagattttcacaacaatccaagccagaaatttatattattaaacacaattcctgttcactgtttatgatagtattattcattcacacagattacatatgatgttagatatgatgca

SEQ ID NO: 81709 - DNA, 669 bp, Homo sapiens
cttcttacctaatgttgattggctttctctatagatgttcacagagcattatctgctttctggcaataaaggactatgatgtcatgtaagactttctaagacaaacccatgcaatactagatcaatgttctaacagtgtgtattaactatgtatactcttacaattagcagttagcagtatgggttcgtcccaggttctttttacccgtaggagggaagtgcttcagaagcaataccccctggcctgatgagccaaaaatgaaatttctcctaacagcagatatgaatcctgacctgatagatgacactgaaaataaagctgcagtatctcatgaaaaaactctctgtttgctagccccccactgagttaagctactgtgcaagcaaagtgatctctaacttgattagaaattttttcattatgtggactaatgagccattggtccacacctggaatcttttttaaatgtataaaaacattcaaacctaacagcaggaattcagttagsttttcttccccaaaaacgagatgtaaaatcatcagactacacacaagattttcacaacaatccaagccagaaatttatattattaaacacaattcctgttcactgtttatgatagtattattcattcacacagattacatatgatgttagatatgatgca

SEQ ID NO: 81710 - DNA, 599 bp, Homo sapiens
gattaaacatttgaaggcagaggtcatgtcctataccatctcccatttcattctatattttccccagtagactaatgtttcttagtgtggtagtctagaccactgagattcttcagcttatccaaaaagagaacccctttgccctgcctagattctgaacaatgtcaaaaataaaacaataaaattgaaggccaaaatattaccartgctactgataaagctaagtacaaaaatgaccttgcggaagagccaaagtcaccttcaaagacaactcctgaactggaaaagtttacctacccaatgtcaggcagcactggactagggctgtggggaggcctgaccaagtcagataagagcacaaggccagttcaggctgccctcgggcagtctcatttccaaccccggccaagaaagctgtgctagaggtggcctagatttccagagtttgggggcacaatgtgaggccagatatagatcctgtagaagacaactgaacttgattgttttaaaggatttcctatcaagagcaccatctgaagtggtgagtaaactctccagagaaagtcctgggatgcctctcagaacccaagaaccaaaca

SEQ ID NO: 81711 - DNA, 599 bp, Homo sapiens
gattaaacatttgaaggcagaggtcatgtcctataccatctcccatttcattctatattttccccagtagactaatgtttcttagtgtggtagtctagaccactgagattcttcagcttatccaaaaagagaacccctttgccctgcctagattctgaacaatgtcaaaaataaaacaataaaattgaaggccaaaatattaccagtgctactgataaagctaagtacaaaaatgaccttgcggaagagccaaagtcaccttcaaagacaactcctgaactggaaaagtttacctacccaatgtcaggcagcactggactagggctgtggggaggcctgaccaagtcagataagagcacaaggccagttcaggctgccctcgggcagtctcatttccaaccccrgccaagaaagctgtgctagaggtggcctagatttccagagtttgggggcacaatgtgaggccagatatagatcctgtagaagacaactgaacttgattgttttaaaggatttcctatcaagagcaccatctgaagtggtgagtaaactctccagagaaagtcctgggatgcctctcagaacccaagaaccaaaca

SEQ ID NO: 81712 - DNA, 634 bp, Homo sapiens
aaaccaagtatgcacatttcatctttcaaaaaacgattttccatctagctaatatcttcatttatattactcctgtggttacaagacgtatatatatatattcttcctctttcaatttttttgtcttgttcatgaggaaattttccacagagcatttgcattcaagtttgtatgtctataaatatgatttaacctacatttttataactaaagtatgtctatgtaattaaaatttcctaattttgacttttacagagcttatagtcttgcagggaccaattagaatggcagatcatccccttaggccttcatcaaaatcccttttgatactgttctctaaagcctataaaatgggtcagtacaggaattaattgagtgaccccaagggcatactatacatcaggataattatcyatgcttctgtttccccttctcctacctactcactagacaagtttataggagatgtggcagctcaaggtagagcccagataatataagaccagcatttcaaatgccccaaatttgccaccaaacctatacattttaacaatattaacccttcatgttatcgtataaacctgtttctaccgctgggaaatttaacaactgaaatgagataaattaaggatcc

SEQ ID NO: 81713 - DNA, 634 bp, Homo sapiens
aaaccaagtatgcacatttcatctttcaaaaaacgattttccatctagctaatatcttcatttatattactcctgtggttacaagacgtatatatatatattcttcctctttcaatttttttgtcttgttcatgaggaaattttccacagagcatttgcattcaagtttgtatgtctataaatatgatttaacctacatttttataactaaagtatgtctatgtaattaaaatttcctaattttgacttttacagagcttatagtcttgcagggaccaattagaatggcagatcatccccttaggccttcatcaaaatcccttttgatactgttctctaaagcctataaaatgggtcagtacaggaattaattgagtgaccccaagggcatactatacatcaggataattatccatgcttctgtttccccttctcctacctactcactagacaagtttataggagatgtggcagctcaaggtagagcccagataatataagaccagcatttcaaatgccccaaatttgccaccaaacctatacattttaacaatattaacccttcatgttatcrtataaacctgtttctaccgctgggaaatttaacaactgaaatgagataaattaaggatcc

SEQ ID NO: 81714 - DNA, 702 bp, Homo sapiens
tgtttttactggattaagatgataaaaataaaaatctaataatagattcatgtggagtgatattattgctaacgatgggctggcaaatcttgtgtcaaataacaaagaagttaaagcaagctttcttgccctatccctgttaagatcagacagacttcattaggacaaacagaagaaaactttcatcggtataccgatctgaaacctataaaaataatgaggtgaggatggagaattgggcaggggatatttcagctcaacaggcagatctaataaagtctcagttgacccagtagggaacttggagaaaaaagattatgcagtatctgttcaatgctacacattggacaaaaaagaccaaaactwaatacctctctggagcttagtcaaatgtttcttgggagctggccttgctgagttctagtgtacatctcttcctgaggaaaagcttagaagaggaagcctattgggatgagtatagcccttgtcactgcaggtggtctctggattacaattggtctcatagtctttctcctctatgcattctaaatctccctacccttcagctattaccccagctggtcttggtagtttactatgtggtacagcccaaactcttattgaagaggtctctgagcccctgataaccatatccttcttaggttggtgttgtagtatttgtacactcagagttgctattag

SEQ ID NO: 81715 - DNA, 544 bp, Homo sapiens
gggagcccctgcccactcagccaccctcgccagaaatgtagcttcttcatctcagagttggggatgagaaatgctcatggctgtctcctcccagggggataccacagcccttgtctgagggctgagggatgaggaatggatgaggaagctcatcttcatggccacaccttcctggaggggaggttccatcaagctttgctrgggagagtaagtggtggctcaaatgcacagatcttacttttctcaccaaaatctagcagtctcctgactgaatttttcttcacctgttttacatcctgaggacaatttcctgactttaaatgatcattattgtgttgttctttaatgattttcagcagttacggtgtgtccctggggagagggtccatggtctccttttgctgccactctggaccatgacttttagtcttaattgcactccagagcatgatccttattgacctgagcaagctttgagaaggttgtggaaagcactggtgaattctggaagaaagtggccctggggtgggtgtgctggtgctgg

SEQ ID NO: 81716 - DNA, 1007 bp, Homo sapiens
tgcaaggatgataaacattttaaaatccattattgagactgaaaaatgtagatcaaaaacaattaacttaagacatacagtaaatgtatttaattaaatacaataaacattcaaaataaagcttttttttaactataaagagcaaaactttttcttattgtaataaaaagtaaaaacttatgacaaactcaatatttaattatagaaagataaagtaatttttttaaagtaagtggcaagaacaaaatgttttctctcactatatgtttttagttcttttctgggtgtctaagacagcactgtgaagtaagaataaagaagaaaatattaaggacctgaacagtcgatatgtttgtatgcatggaaagccctagagaaactagagctaaatttctgaagttaataaaaatattagaatgttgatagttgtaaaatcaatatataaaaatggattgcattctaataaaccatcaacaaacagaaaacctaattrtagaaagtgccatttaaggccgggtgtggcggatcatgcctataatcccagcactttgggaggccgtggcgggcagatcatgaggtcaggagttcgagaccagcctggccaacaaggagaaaccccatctctactaaaaatacaaaaactagctgggcatggtggtgggagcctgtaatcccagctactcagggggctgaggcaggagaattgcttaaagctgggaggcggaggttgcagtgagctgagactgagccactgcactccagcctggactacacagcgagactccgtctcaaaaaaaaaaaaaaaattagaaaaaacagcaaagcgcacaccgttaaggattaaatttaacaatagtagtgcagtaactttatgggtaaatatatgaagcattattaatagtcatagaaaacaagctaactaaataaagagagacagcaggccataggtggaaagataggcaagtctgcaaatcagtagggaaatgctgacatacttaataaagagc

SEQ ID NO: 81717 - DNA, 1007 bp, Homo sapiens
tgcaaggatgataaacattttaaaatccattattgagactgaaaaatgtagatcaaaaacaattaacttaagacatacagtaaatgtatttaattaaatacaataaacattcaaaataaagcttttttttaactataaagagcaaaactttttcttattgtaataaaaagtaaaaacttatgacaaactcaatatttaattatagaaagataaagtaatttttttaaagtaagtggcaagaacaaaatgttttctctcactatatgtttttagttcttttctgggtgtctaagacagcactgtgaagtaagaataaagaagaaaatattaaggacctgaacagtcgatatgtttgtatgcatggaaagccctagagaaactagagctaaatttctgaagttaataaaaatattagaatgttgatagttgtaaaatcaatatataaaaatggattgcattctaataaaccatcaacaaacagaaaacctaattatagaaagtgycatttaaggccgggtgtggcggatcatgcctataatcccagcactttgggaggccgtggcgggcagatcatgaggtcaggagttcgagaccagcctggccaacaaggagaaaccccatctctactaaaaatacaaaaactagctgggcatggtggtgggagcctgtaatcccagctactcagggggctgaggcaggagaattgcttaaagctgggaggcggaggttgcagtgagctgagactgagccactgcactccagcctggactacacagcgagactccgtctcaaaaaaaaaaaaaaaattagaaaaaacagcaaagcgcacaccgttaaggattaaatttaacaatagtagtgcagtaactttatgggtaaatatatgaagcattattaatagtcatagaaaacaagctaactaaataaagagagacagcaggccataggtggaaagataggcaagtctgcaaatcagtagggaaatgctgacatacttaataaagagc

SEQ ID NO: 81718 - DNA, 1007 bp, Homo sapiens
tgcaaggatgataaacattttaaaatccattattgagactgaaaaatgtagatcaaaaacaattaacttaagacatacagtaaatgtatttaattaaatacaataaacattcaaaataaagcttttttttaactataaagagcaaaactttttcttattgtaataaaaagtaaaaacttatgacaaactcaatatttaattatagaaagataaagtaatttttttaaagtaagtggcaagaacaaaatgttttctctcactatatgtttttagttcttttctgggtgtctaagacagcactgtgaagtaagaataaagaagaaaatattaaggacctgaacagtcgatatgtttgtatgcatggaaagccctagagaaactagagctaaatttctgaagttaataaaaatattagaatgttgatagttgtaaaatcaatatataaaaatggattgcattctaataaaccatcaacaaacagaaaacctaattatagaaagtgccatttaaggccgggtgtggcggatcatgcctataatcccagcactttgggaggccgtggygggcagatcatgaggtcaggagttcgagaccagcctggccaacaaggagaaaccccatctctactaaaaatacaaaaactagctgggcatggtggtgggagcctgtaatcccagctactcagggggctgaggcaggagaattgcttaaagctgggaggcggaggttgcagtgagctgagactgagccactgcactccagcctggactacacagcgagactccgtctcaaaaaaaaaaaaaaaattagaaaaaacagcaaagcgcacaccgttaaggattaaatttaacaatagtagtgcagtaactttatgggtaaatatatgaagcattattaatagtcatagaaaacaagctaactaaataaagagagacagcaggccataggtggaaagataggcaagtctgcaaatcagtagggaaatgctgacatacttaataaagagc

SEQ ID NO: 81719 - DNA, 650 bp, Homo sapiens
aaatattgtagcaacaacattaagaagatataccttctaataataaaggaatttcttgtattgaaataactctccagccaatagtagttatagactgtaaaaaatataataagcaatattttgaatgcacttgactgttactaaaaattagcataaactagaggagcttgaccctcgaaagaagaaaaccacagtgaaatctacatgcgtgcaacatttcctccagggacagtccgcgttcctttgtcacagtcagagagacccaygcaaaatccacactggtaccagctgagaagtcagcaggtggagtttgggcagccactgtgggtgggaatggggagggcatgaggaaaaggaagaaacaggaggaagaccaacatctctgcttatctctcgtcagatcttgattgacccttcagctgtgcatgcaagagtcagaaggaaaaactcgctgagcagagagcttaacagcgtctaccatggaagacagtgtttggaggctgaacaccaaccacgttgaaggcctgttcaacttcacttcacatgggaggagaaggacaaacagcactagaaggaaattgaaagtagatgaaaatatactaagacagcacgtagctgtctagggaagttaccgcatggtccatggaaag

SEQ ID NO: 81720 - DNA, 650 bp, Homo sapiens
aaatattgtagcaacaacattaagaagatataccttctaataataaaggaatttcttgtattgaaataactctccagccaatagtagttatagactgtaaaaaatataataagcaatattttgaatgcacttgactgttactaaaaattagcataaactagaggagcttgaccctcgaaagaagaaaaccacagtgaaatctacatgcgtgcaacatttcctccagggacagtccgcgttcctttgtcacagtcagagagacccatgcaaaatccacactggtaccagctgagaagtcagcaggtggagtttgggcagccactgtgggtgggaatggggagggcatgaggaaaaggaagaaacaggaggaagaccaacatctctgcttatctctcgtcagatcttgattgacccttcagctgtgcatgcragagtcagaaggaaaaactcgctgagcagagagcttaacagcgtctaccatggaagacagtgtttggaggctgaacaccaaccacgttgaaggcctgttcaacttcacttcacatgggaggagaaggacaaacagcactagaaggaaattgaaagtagatgaaaatatactaagacagcacgtagctgtctagggaagttaccgcatggtccatggaaag

SEQ ID NO: 81721 - DNA, 826 bp, Homo sapiens
tgaaactctggggcaatggtggatttgtcactgctgctgtgataccctgaacttatctacttcagcatataccatttatgcacaagcagtttgtcattttgatcatttctgcgggttaggctgaaatttgtctttctgttacctatgtttacagtgcttactgttggaaaaaattgaaagctttggaagttcatcacaaaagataaattccaaaagccaaaagtttctggatagtgtgacagtccctcagcaaatttattttattttatggtctgagagaaagcaamtgtgttgtgacggccgttaccttgaacctactaaactctcacctgtgcgggaagagtcccgtggtggagctgactttgacagaggcctggaggaagcacccgcaggaacaggtgtgaagggtcaaaggccgtgtgccctgtggtgttggcctatgtctttctcccaactaattttgggtaggaaaggaaagcatattatattggacaaagttaaattgtattatatttctgagtctttagcctataacacacagaaagtcacacctattatatttccatcatcaccataataaattaccccagacgtagcatttaaaatagcataaatttgtcatcttaccattttgtaggtcaaggttcaacacggggatggctggactaagatcaaggtgttgcagactgtgtttgctcctttctggatgatctgggggagaatccatcccctcgacttttccagcatctaggggctcgttcactgggattgctggtggaattcagttcgctgagctcctgggacccaggtccctgttttggtgctg

SEQ ID NO: 81722 - DNA, 826 bp, Homo sapiens
tgaaactctggggcaatggtggatttgtcactgctgctgtgataccctgaacttatctacttcagcatataccatttatgcacaagcagtttgtcattttgatcatttctgcgggttaggctgaaatttgtctttctgttacctatgtttacagtgcttactgttggaaaaaattgaaagctttggaagttcatcacaaaagataaattccaaaagccaaaagtttctggatagtgtgacagtccctcagcaaatttattttattttatggtctgagagaaagcaactgtgttgtgacggccgtkaccttgaacctactaaactctcacctgtgcgggaagagtcccgtggtggagctgactttgacagaggcctggaggaagcacccgcaggaacaggtgtgaagggtcaaaggccgtgtgccctgtggtgttggcctatgtctttctcccaactaattttgggtaggaaaggaaagcatattatattggacaaagttaaattgtattatatttctgagtctttagcctataacacacagaaagtcacacctattatatttccatcatcaccataataaattaccccagacgtagcatttaaaatagcataaatttgtcatcttaccattttgtaggtcaaggttcaacacggggatggctggactaagatcaaggtgttgcagactgtgtttgctcctttctggatgatctgggggagaatccatcccctcgacttttccagcatctaggggctcgttcactgggattgctggtggaattcagttcgctgagctcctgggacccaggtccctgttttggtgctg

SEQ ID NO: 81723 - DNA, 826 bp, Homo sapiens
tgaaactctggggcaatggtggatttgtcactgctgctgtgataccctgaacttatctacttcagcatataccatttatgcacaagcagtttgtcattttgatcatttctgcgggttaggctgaaatttgtctttctgttacctatgtttacagtgcttactgttggaaaaaattgaaagctttggaagttcatcacaaaagataaattccaaaagccaaaagtttctggatagtgtgacagtccctcagcaaatttattttattttatggtctgagagaaagcaactgtgttgtgacggccgttrccttgaacctactaaactctcacctgtgcgggaagagtcccgtggtggagctgactttgacagaggcctggaggaagcacccgcaggaacaggtgtgaagggtcaaaggccgtgtgccctgtggtgttggcctatgtctttctcccaactaattttgggtaggaaaggaaagcatattatattggacaaagttaaattgtattatatttctgagtctttagcctataacacacagaaagtcacacctattatatttccatcatcaccataataaattaccccagacgtagcatttaaaatagcataaatttgtcatcttaccattttgtaggtcaaggttcaacacggggatggctggactaagatcaaggtgttgcagactgtgtttgctcctttctggatgatctgggggagaatccatcccctcgacttttccagcatctaggggctcgttcactgggattgctggtggaattcagttcgctgagctcctgggacccaggtccctgttttggtgctg

SEQ ID NO: 81724 - DNA, 1666 bp, Homo sapiens
actttctcttgttgccgtaacatttgcctccattctcacagtggcagcatccccaccaatgtactggtgcctctgcaacttctcagttgctcttatttcaaatatctgacatttaaaaagagcacttaaaaatatcaacgcaaaatgtgatttatatctctgcagcgaatcagaacaacctcatatgtctcttgctcaggcaaatggtcttggttcactggtcttctaaaatgatataaatgatacctgtcttttctctgctttggggagggtggttgaaattccatgccaatttatacactgctgtcaacgcttctgccttttaatgatatctcttaactcttctgttgagacttcaaaaaaatatttcattaagctacttcttattttaaatatcttgcctatcctccaggttcctgtgattctgatcattccccaggctgcctccacaggcatgaggcagaagtaaatgagcaaaagtattcattatttctgctgccatggaaagtgccagtgtttcctacacctgtttggaaataattactgtgcaattcacaactaaaggatgcaagttgcaaagcctctctgaacacacctcaaatcttgtatttctggccttgtataactggtccaacttttaaacacctgctattatgacttgcatgagtgagttctaaaacttgtcaatatttatatttatttttgaaacttggacaacttaaatgacagattctattgcagctgcatcttttctattacagaccgttcatattttttctacatggattttgcatgtaataatgatgaagtgtttatcttttacttagtgagtgattattgctaaaaagaaaaggcaaatcatatacaccaaaaaagggctattttcttttgccatttaaatgttagaggtctcattgtaatctttttgtttgtatcctaaatatgtgtcttatcactatagaatatgggttattgtagaacttactattatggaggtaattcttttaaagggaatatatatatatatattttaagggaatatatatatatattttaagggaatatatatatattttaagggtatatatatatattttaagggaatatatatatgtatattttaagggaatatatatatatatatatatatatatatatatatttgcttgggggagacacctttaatcacctaagtaaagataaatggggaaaagttcaacaactcaatgattcctgcatatttcagaaaaactcctggcacaaccctgagacacattgagttacaaaaggcaaggcactaggacagtgacccatccccgacacactggaaattgtgctcttttctgtaggtagcaggcacctatacatggctctggtgggcattgctggatgctccgaaggtctgagagctgcctgagggagggtctgcatgaagaactgcagggccttctggcagtcaacgtatctgggagacaagggctccrtgccatgtgttggaacgaagtgccagcctgaaaggagggtgattctgagtatgcctagcgtctgccgtgatgatccttccctgagcccagccagccagaaacccactcagaggtgctctgcagaggtagggctgcaagtaaaaactaaaagagccatttccctgtcaatgaacgatgacagg

SEQ ID NO: 81725 - DNA, 805 bp, Homo sapiens
tcaaagcaaccctaggaagtaggtgctactgtgttccctatgttcccatgaggarctgaggcaaagtgaggtggagtaaattgcctccgttcacacaacttggaagtggcccagcagggacttgcatctgggcagactggccccagaggtcatgcttttaaccactaataacatctcttactccatctcatgtcttgtgagcccacacggaaaacataaaaaagtccaaggatgtttaggtaatgttttgaatgatggctctataacactgcccatatgactcacacctagggactctggacatgcccgtccatcaaggtggccctcagagggtccatgacaaccggtcaaggttgatttgttacaaacaacaccttgttgttgttgttcttgatggatgatgtccccaatcccaatctgtaacagcagggccagcacagaaacgagacagcaaatgctgctgtgagaggatcttgccttcataagagagggtttttttcccaccctccacccaacactgggatggatgccttggagctggtctgctagaccccatccctcagtgatattcccaaacatgttgaaacctaacaaccgaacagggggagcttttactttgtgtcaaaatgctctaggcaccaaccatttctttgaaccacatgatggacaaattgcttttgagcttccttcatgatactgagtatatttcttctgaatgttgaactcttaagcccattactaagaagccagctttcacccaagtcactcctgtacaatagagttttaaaagcacatggtaaatgat

SEQ ID NO: 81726 - DNA, 791 bp, Homo sapiens
cataaaacaaaacaatatgaataagaaataatcagagaagaaaaagttcttagaactcatgcttcatcttgggagttggtctccaatgagccatacctcctgtcatcatgtccttagacaggcccatcccatagtcaatctgggttggccccaacactcactttaacctatagcatgtggtagaaatgacactggacctgttccaggtctaagccttaagaactcctggcagctccatttctgtgcttctggaagccaaaaataagaattgactaccttcttggagaaagaaaagccacatgaagagatccgagaggatgagatgctatgcagagagaaaggccacatcaagaattaccaaggcagcagacctgtgggtgaagaagccgtctcggacattscactgcagctgagcatccagatgaccagtccctgacactgtttaaccacacagtgaaagctgcaaaatgagaccagcagaaaaactgtccagctagccccaggtaatccatacagtagtgacagatagacagatgtgtagttttatgccattaagttttgggataattggttaaacaacaataaataaccaaaacaaaacttaaagttatgacagtccaaataaaatttcctgaaagtcgaaagataaggaaatattccagaacttaaaattttaaaaaaatttagaaataacaggagatacaagactcaagacaagaggtctaaaatccaattaacagacacttcaaaatgaacaaataaaatggaaaagagaaagttaacaacaaaaa

SEQ ID NO: 81727 - DNA, 1924 bp, Homo sapiens
aaccactacattccattgcacgtttaccaaagacatttaccacgttggcattatttgtgcatccatcaagaagtgctgaaaagcattcccctcacacgctgcatgtgtcctgtgagtggatcttccattttacttgccagctctggaaaactttgaatttgtgtgtcgatggaaaattaaagtttagtggcatctttgccccacattcacccaacttttctacggaactatttcaatgctatttttcactagtgtcacttttcagtcttagcctcctggagtacaactttattagaagcccgcaaagcactagtgttaaaatgagaaatagtaaacatctgattctgttgtgttttaactccatgcttttctctaatgtttcattgttttgaatttaattctttgtgcttcccacgtgaatgcaacttacagtttgaatgtcttctttcttcactagccgatgcacctgtgccagtaacacacggtgattctgtcctttcaccttcagttatgcctgtaaaaccaaattcaagacagatgatcctcaactcacaaaggagttatagctcatcatcagttgaaaatacaagccaaaaatgcatttaaggccggatgcagtggctcagcctgtaatcccaactctttgggaggctgaggcgggtggatcacctgaggtcgggagttcgagaccagcctggccaacatggtgaaaccctgtctctactaaaaatacaaaaattagccaggcatgttggtgcgcacctgtaatcccagctactgggaaggctgaggcaagaaaatcgcttgaacccaagaggcagaggttgcagtgagccgagatcatgccattgcactccagcctgggtgacaagaacaaaacacactgtctcaaaacataaaattaaattaaattaaattaaaatgcatttaatacacctaagctaacatcatagcttagcctagcttaccttaaacattctcagaaaatttacattcaccttccattgggcaaaaattatctctcacaaacccactttaaagtgttgaatatctcatgtaatttattgaatactgaagtatggtttctgctgaatgcatatcactttcacaccatcataaagtcaaaaaattataagtcaaaccattgtatgtcagggatcatctgtccattagaaatagtacttctgagtaaaacgaggacaaactcctttggtcttcatgtcctcagaatcactttcataatcatctcttggtttacaaggtgcatcttttattggttaaaaaaattaatacaatttatttcactctcaaattaggtttaataataaataatacaactttcttttgttttcactaataatgctaacattggcttgatttaaaattaaaattattgcaaatataagactttatagaatagatgttcctatttttcagatgtgtgagattatactatagttgataaactaaccttaaagaacgcagcttgcaatgtggtccttgtgcatgtgactcgtttgcagctcacagcctctgcatctttccattgagtctgacaaaacctcagttggtctgtaactgctcattgagacaagtcccctgatgtcacatacagatgctgggagaatgtcaagtttctatagaaatttctaaacatttaccctgaatttctatgtttctatcattacrtagagatgacagagtgttgacagactttgagtggtctttagtaaccaattgttgaaagtctggtttagctaaactagtttgtaaatacctcggcaggtgcctttgctgtaggaattctcagagtctctataaactaatgagcattggaaatctgcaggggggaaacagagtatgcagtatcccccatgatgattcaaccccagattttatttttcactgaggatctcacacttag

SEQ ID NO: 81728 - DNA, 2175 bp, Homo sapiens
catgaaaaatatatttcttctgaatatttgatttcatgatcccaagtagacacatctctgtattgggtttcaacaagtccacaaaagttaaatacctacttttagccagctttgattttcagaagtttaattctgacatttagtgatatacaatatgtaaaacaacctggcactatatttgttatatcataagtacttggcaaatatttcagtttactctttctcataattgaataatggctcaatagtaaaactctgtagggaaaaatttaacctcttatttatcaattacaaatagtttaagacagataatacccctttccttgttagctttaatgctgaatcattaaaattgtgagcaatgtatttattttgaggaaactattttttactaaggattttgttttttttttagaattttatgagtcttcaaaataactagaaaatcttaaagtgttaccaaacagaagtggacatttaataaacacctcaactttaatacttacagaaaatcatttgaaggctgtcactcctctgggtattataaattttagccttggtcaaatcaaatcaccaggaggctacaaacttgaactacactgccttagtctccaacagtttctttccttgaattaagttttcgggccatgctctactccttttaataaaagaacaatacaacaaatagtcatatgaaatccattttgttgcctaatacaaaaatattgttgaagagtatcataattcaatggcccatatatataaaatgtctcagcaaatgcacttatgtcataattcagtactaggaaatgatttccttcaggcaagctcccccttaattttttttttttttttttgagacggagtcttgctctattgcccaggctggagtgcagtggcaccatcctggctcactgcaagctccaccacctgggttcacgccattgtcctgcctcagtctcctgagtagctgggactacaggcgcccgccaccacgcccggctaattttttgtatttttagtagagacagggtttcaccgtgtaagccaggatggtctcgatctcctgacctcgtgatccgcccgccttggcctcccagagtgctgggattacaggcgtgagccaccgtgcccggcccctccccattaattaaggtgagaaatgcataaatgatgatggtagtcattggtgcaccagttacgaaagagtgaggccgggtaactggatgacamctgcacagggctctgaggtctcaaggaaaatgacaggtgtttgtgtattccaaaaatgtggacatgatggcatgaggcccaatgaagaaggggtagattatgaatggtgttatcctgaacataaggagactaagatagtgtagttttaaaaatggcagcatgaaaaaaggtgaatgctaaccccaccccaccttatggtaagtgtctgaagaataatctttctagggactactagtgggtattcttaaaggacagaggcagctttctgtttgagtaggaaggtattggaagcagtatatgaaggaataaaaatataaaagagagaaatattggagcaagagtgggaagtatggttaaagataaagaaacggcagggcactttagggaaatatggtatgagacggaaaagacgcatttttgagtgatgaaaatactaatcatggctaacacttacatagcatttatcttatgtcaagcatttacgtgtgttaactgttatgatgctcacattaaccccaggaggtcaggcctatcactttacaggaagtttaagcaacttctgaaatattaacaattcttctgaattgcttctctggtgacaggaataagagtcgcagtagcatcaacttgctaaaaagtttaaaatggtgctcagaataaaggtattttactgctttttgagactcattgtaaaatggcttgaaatgtctttgccctgaatctctgccagtgggaaattggatgagttgctaaagaatatggaattaattatccaaaaacactttagatatttctctttgtatagggtattgtaaatggtctttagctaattataatttaatatctcatttgtctctctcatacataggtatatatgatatatacacgtgtatgtgtacaattcaatacatctatgtgtctatgtagctacctatgtatgca

SEQ ID NO: 81729 - DNA, 175 bp, Homo sapiens
tggaacatataaaaataaaacaatttgtgatcaaatagattaccaggtattcaaagggtaaacaaatgggaccataaaataatcaggcaacagagaaaaaaatgttttttgtttattttagcatgtttatttttggyccaagcctttatcaggttggagttggaggctggggagg

SEQ ID NO: 81730 - DNA, 664 bp, Homo sapiens
tctggtttgtgatccccaaacaggcccctggctccagggtgtggccagccaagatcaacagagaaaatggccttagctcatcagctcggcccctccttctgaggcattagagagcaggccgcctgctcatcctgacgctgtctccactgcccacgccaggagccagtgatggtcctgctctggaagccacccacagagaggcagctcgagggtacgggaggctgacaggtgcccaggtgtcggacgtgacggcccagacacctgcctggctattactgagcctcggtttccatgaactagggacaccagcttggtgttttccggacatgatgaccaccgggagaggaatcccactcaatctgctcaaacaggggacagagggtgaggggatgaggcaggggaggggcaactgaaatctcggggcaggaggacaacaaagtggggctgacacttggggccaaccgtggagaacagaagtttgtgtttttctctggctttatcccccrtatctgacacacacatacacgcacacacacatcaacaggcacacatgcacacacacattcatgtccacgcatttatgcacacatacacacattcacaccattgcatgtgcgtgcacacacacattcacacccacacaaattcacccacgcacacacac

SEQ ID NO: 81731 - DNA, 664 bp, Homo sapiens
tctggtttgtgatccccaaacaggcccctggctccagggtgtggccagccaagatcaacagagaaaatggccttagctcatcagctcggcccctccttctgaggcattagagagcaggccgcctgctcatcctgacgctgtctccactgcccacgccaggagccagtgatggtcctgctctggaagccacccacagagaggcagctcgagggtacgggaggctgacaggtgcccaggtgtcggacgtgacggcccagacacctgcctggctattactgagcctcggtttccatgaactagggacaccagcttggtgttttccggacatgatgaccaccgggagaggaatcccactcaatctgctcaaacaggggacagagggtgaggggatgaggcaggggaggggcaactgaaatctcggggcaggaggacaacaaagtggggctgacacttggggccaaccgtggagaacagaagtttgtgtttttctctggctttatcccccatatctgacacacacatacacgcacacacacatcaacaggcacacatgcacacacacattcatrtccacgcatttatgcacacatacacacattcacaccattgcatgtgcgtgcacacacacattcacacccacacaaattcacccacgcacacacac

SEQ ID NO: 81732 - DNA, 603 bp, Homo sapiens
tctttcctttgcacgttcaggagactcccatggggagtgaggtcagcctgttcccctttcgttcacttcgacttgatggttttctcaaaaacacaatggaactgctgggctggagatgttcagttggtcagaaggctgtaggctgctcaggacccacagtataatggtggtcttgaaggtttatattttcttagatcattaagatgttagatggcctcatttctcaggtgtgtttctagctcaggtgtgttttgctctgggcaaacacacttccattccarcctgcatttattaaccaccagttgtatgcaagggccattgctaggggaccaggaggccaaaggagcacatatattttggtggttgtgcattggcagtctgtctcctcattgggaacattggtacgccatgggggtggggtcaccagatgtgtttgcaccctgtccccaggacacggggaacatgcagtcaccagggctcaagatgctgctatggagcagatgaggctaaacagaaaacagtacacatttcctgggtttcagtgagaaactaaaatgctcattcacaaaatctccttccacaataaaaagccaaagctcaaag

SEQ ID NO: 81733 - DNA, 603 bp, Homo sapiens
tctttcctttgcacgttcaggagactcccatggggagtgaggtcagcctgttcccctttcgttcacttcgacttgatggttttctcaaaaacacaatggaactgctgggctggagatgttcagttggtcagaaggctgtaggctgctcaggacccacagtataatggtggtcttgaaggtttatattttcttagatcattaagatgttagatggcctcatttctcaggtgtgtttctagctcaggtgtgttttgctctgggcaaacacacttccattccagcctgcatttattaaccaccagttgtatgcaagggccattgctaggggaccaggaggccaaaggagcacatatattttggtggttgtgcattggcagtctgtctcctcattgggaacattggtacsccatgggggtggggtcaccagatgtgtttgcaccctgtccccaggacacggggaacatgcagtcaccagggctcaagatgctgctatggagcagatgaggctaaacagaaaacagtacacatttcctgggtttcagtgagaaactaaaatgctcattcacaaaatctccttccacaataaaaagccaaagctcaaag

SEQ ID NO: 81734 - DNA, 829 bp, Homo sapiens
ggatgggaatccaaccctgacaccactgatgtggcctctctgcaggacagaaaaacacattcaataaaggagactcctccgcccctcccagagactgcaccggatgtgatgcagctggaagaaaggaagttccttccgtaagatctgacaatgaaagtttgtctatctgttccccaagccacacacacacacacgggacagggacaggacaggggacagggacaggacaggggacagggatgagggccacattctccttgaccaggtcccttacttaaccaccctaatggccccccacaaatgcagagcatgatgggaaagcacaataatgggccaggcatggtgggtgatggatgtgttttcgtctgaccagccaccctccccttaactatgcctgggccacgtgggttggccaaggctgccccatccccagctccaaggtgggcacatgacccaggcctggccaacgagagcctgaccaccaaatgaccrtagatggcctcagagacagacatgaagccgaagtgagtcagtcacaggaagtatactccagacccttagctggaatgactgagaaatgtgctgcctccttcctcaaggctgaatgagctgctaagtttggagctgcttgtgccatctctgccaccttgtagcaaatgaagccaacacagagaaaagcagaagtgtggggatatgtcagggagagagagaaagagggagagagagagagggagaaggagagggagagggagagggagagtcaggtgggggtgattgtcactgtgtctgaacatctggatccagccatgcctgaagctagacttatctc

SEQ ID NO: 81735 - DNA, 1716 bp, Homo sapiens
tctctggcacaacaggttgggaggggtggagggagcattgaggaaagcaggattgggcagaggagaaagttgtactgtggttcagttgcaaggggtgctgcagctgatctcacaggaaattctggagttaggagagaccttcagggatgccccaaatcaaagcaaaggggttgggcatttgtaccccagcattaactggacattggatgcaggttgcctatagagaaggcatgttttggccaagcgcaatgtccagagagcaatgacacagccaacactccaggcacctgaggcaaactgggatcagggctgctccccacagtatccaccattgtctaccccttgtggtgcctacacccatttatttcacatactgagtttactctatctgggaatagctgctctaggattctggttggtcattttccctgggaggacttacaagagaaaggttaatgggacaaactgcagccaccactaccgttgtcatagctgcatctgacactcgtggtccctcctatagcacattttacaccccttcttattgttgtcagcatctctactgcatggcggggaacaggggctcaccagagggaatgaaccaccccatctcaccactgtaaaactctcacttgaaggatgagggcagcaggactggacaaagggagaaactgaacttcggtgggtcccatgccttcctaattagggatccgaccttggcatagcagacctgcagggtttgaggatctgacttcctctggaacactctgccacttttataattatgacctgggcctgatcctcaactctccatcctccaggagggcgaatctctttatctgctgccctctggctttcacacttagcccttaattggtgattaatcactctcagcctagcattgactctgtaatgcattcgttgcccccagcgacaattccataatayttttaattactatcccctccctcctcacctgagaaattgcacctgccagtgcatcccttcccccagtatcccatctcatttcaccaccagcaaaaaggtcgaataattgcattgccactgcatgctggggtctgtccatgcagcaccttctccggttatggagtcttcaccgccagttagccagcaggtgatccagtgccaaaatcaaattctggagtcagcatcatagggccactgcaggagcattgattgtttagtgggctcctaggtaatagaccatgagatggaatttacatcctggaggtttgttgacgagatctctgatatggtttgcctgtgtccccacccaaatctcatcttgaattgttagctctcgtaattcccacgtgttgtgggagggatctgctggaagataattttatcacaggggtgttttcccccatactgtcctcatgatagtgaataagtcaaacaagatctgatggttttataaggggaaacccctttcacttgtttttcattctttcttgtctcccatcatgtaagatgtgcctttgaccttctgccatgattgtgaggcctccccagccacatgaaactgtgagtccgttaaacctctttttctttataaattacccagtcttgagtatgtctttatcagcagcatgaaaacggactaacacaagctctcaagaaccacgcctgtgatggagcaaggggaggacggggcagagggagaaactggactgggatcccgttgcaataaag

SEQ ID NO: 81736 - DNA, 1972 bp, Homo sapiens
ctgtaaaaactctgggatcatagcagtatctgccttatagaactgtcatgagccttaactgagaggatatatacaatacaacagtgtctgacattagtaatagcctcrtaagaattagttatctttagaaaccacaggaccctcagtcccaaccacagcccggctgaatcagatctcccagggagatcaggaaccaagtatatatggctactgaaggacggatttggttttgccaggtggagatacagtgcagaagaaatggagggagcattctctggctgatttttttaaatcctccacaaatgattctgaagcagtgagttgctggcctggcacttaggaaccactgtaagttatatgaagctctctgacgttaggaatattccaataatgttttgagtgccactctgtatgaaggcctgagtggtgcaaagatggaaaaggtactctctgtcctcagagagccactgcctaaaccagcaaaaacaactcctaagccacatatatagtccaagtgggcctctgtgtttcaggagcacaaggaagcctgaaacatgtgctcagcgatgacagaggagacagtgatctgcaggattatcagtagggctgtgcaggttattgactgcacagaggcacccagagaaaggtcactcttctttctaattcgcataaaagctccatcgggccagtggcaggtctggaggtcattattcaagcaggctgttctggaagctcctactcatccatcagtgagagtttagctgcccctttctctagggaaccttcccgaagacccagaaaacagagtcgaccacacccttttctgtgtcatgccctattaaagtcttccttaccccagattgtaaatgcatgtttggattaacgtctccccaacttgtctttgagccttttgagagtagttactgagtttgtttggtttttctggtgttctcatgttagcaccccaacacaaggtctggtacagagtaggtgctgagaagatgcttgtattttgttttgtggggtttttcggtgggcgggggttgcctactacaactgctagcagcagatgcttgttgaatgaataaatggatggatggatgggtggatgggtggatggatggatggatgaatgatggatgatgaatgaatgaatgattaaataaataaataaatcccaactaactaagaggattttaatgaacctgggtagaaaggacactccgttaccaatcaagcgagctggatgtcagccaaagtgacttcctggaggaggagcaaatgtcccctgaatgatggatgcgtttttgccaagtggagacacagtgcagaggaaatgttgggaacattctctagccaatctcatgcccagaaaattagattttaaaaagtgaaagataccaggagtcgttagcgaagtgttcatggtttgatggttgctgtggcaacatgctcttcatttgggatggaatcgcaaagtaaatattttcatagcatcagcaggataataagacacatgttgccatatctgggagagagccagtcctctgcactcttgtgtgggtgtcctccgtaacttggttattttgcccacagcttcccctaaacatggaacaactgaaggactagacacttggctcccatgtgcccaagagacagaggagctctgaataggggcctaaaatgcactgtttagcaggtatgttcatgtcaaaaatgttcctccctggcctggggtcagaaatgaccctgttttagtgcctcacacatctggagtatgacctcatcttgccatgtgaccctggacaagctgaattctcctctgagcttcagtttctgtatccatatattcccaatacaaatacccacctctcaagactcatagttgaattaaatataatacaacattgacttcatgggcacttaatccatgttggttttctttctctagaatgttccatgaatgtccact

SEQ ID NO: 81737 - DNA, 1972 bp, Homo sapiens
ctgtaaaaactctgggatcatagcagtatctgccttatagaactgtcatgagccttaactgagaggatatatacaatacaacagtgtctgacattagtaatagcctcgtaagaattagttatctttagaaaccacaggaccctcagtcccaaccacagcccggctgaatcagatctcccagggagatcaggaaccaagtatatatggctactgaaggayggatttggttttgccaggtggagatacagtgcagaagaaatggagggagcattctctggctgatttttttaaatcctccacaaatgattctgaagcagtgagttgctggcctggcacttaggaaccactgtaagttatatgaagctctctgacgttaggaatattccaataatgttttgagtgccactctgtatgaaggcctgagtggtgcaaagatggaaaaggtactctctgtcctcagagagccactgcctaaaccagcaaaaacaactcctaagccacatatatagtccaagtgggcctctgtgtttcaggagcacaaggaagcctgaaacatgtgctcagcgatgacagaggagacagtgatctgcaggattatcagtagggctgtgcaggttattgactgcacagaggcacccagagaaaggtcactcttctttctaattcgcataaaagctccatcgggccagtggcaggtctggaggtcattattcaagcaggctgttctggaagctcctactcatccatcagtgagagtttagctgcccctttctctagggaaccttcccgaagacccagaaaacagagtcgaccacacccttttctgtgtcatgccctattaaagtcttccttaccccagattgtaaatgcatgtttggattaacgtctccccaacttgtctttgagccttttgagagtagttactgagtttgtttggtttttctggtgttctcatgttagcaccccaacacaaggtctggtacagagtaggtgctgagaagatgcttgtattttgttttgtggggtttttcggtgggcgggggttgcctactacaactgctagcagcagatgcttgttgaatgaataaatggatggatggatgggtggatgggtggatggatggatggatgaatgatggatgatgaatgaatgaatgattaaataaataaataaatcccaactaactaagaggattttaatgaacctgggtagaaaggacactccgttaccaatcaagcgagctggatgtcagccaaagtgacttcctggaggaggagcaaatgtcccctgaatgatggatgcgtttttgccaagtggagacacagtgcagaggaaatgttgggaacattctctagccaatctcatgcccagaaaattagattttaaaaagtgaaagataccaggagtcgttagcgaagtgttcatggtttgatggttgctgtggcaacatgctcttcatttgggatggaatcgcaaagtaaatattttcatagcatcagcaggataataagacacatgttgccatatctgggagagagccagtcctctgcactcttgtgtgggtgtcctccgtaacttggttattttgcccacagcttcccctaaacatggaacaactgaaggactagacacttggctcccatgtgcccaagagacagaggagctctgaataggggcctaaaatgcactgtttagcaggtatgttcatgtcaaaaatgttcctccctggcctggggtcagaaatgaccctgttttagtgcctcacacatctggagtatgacctcatcttgccatgtgaccctggacaagctgaattctcctctgagcttcagtttctgtatccatatattcccaatacaaatacccacctctcaagactcatagttgaattaaatataatacaacattgacttcatgggcacttaatccatgttggttttctttctctagaatgttccatgaatgtccact

SEQ ID NO: 81738 - DNA, 1972 bp, Homo sapiens
ctgtaaaaactctgggatcatagcagtatctgccttatagaactgtcatgagccttaactgagaggatatatacaatacaacagtgtctgacattagtaatagcctcgtaagaattagttatctttagaaaccacaggaccctcagtcccaaccacagcccggctgaatcagatctcccagggagatcaggaaccaagtatatatggctactgaaggacggatttggttttgccaggtggagatacagtgcagaagaaatggagggagcattctctggctgatttttttaaatcctccacaaatgattctgaagcagtgagttgctggcctggcacttaggarccactgtaagttatatgaagctctctgacgttaggaatattccaataatgttttgagtgccactctgtatgaaggcctgagtggtgcaaagatggaaaaggtactctctgtcctcagagagccactgcctaaaccagcaaaaacaactcctaagccacatatatagtccaagtgggcctctgtgtttcaggagcacaaggaagcctgaaacatgtgctcagcgatgacagaggagacagtgatctgcaggattatcagtagggctgtgcaggttattgactgcacagaggcacccagagaaaggtcactcttctttctaattcgcataaaagctccatcgggccagtggcaggtctggaggtcattattcaagcaggctgttctggaagctcctactcatccatcagtgagagtttagctgcccctttctctagggaaccttcccgaagacccagaaaacagagtcgaccacacccttttctgtgtcatgccctattaaagtcttccttaccccagattgtaaatgcatgtttggattaacgtctccccaacttgtctttgagccttttgagagtagttactgagtttgtttggtttttctggtgttctcatgttagcaccccaacacaaggtctggtacagagtaggtgctgagaagatgcttgtattttgttttgtggggtttttcggtgggcgggggttgcctactacaactgctagcagcagatgcttgttgaatgaataaatggatggatggatgggtggatgggtggatggatggatggatgaatgatggatgatgaatgaatgaatgattaaataaataaataaatcccaactaactaagaggattttaatgaacctgggtagaaaggacactccgttaccaatcaagcgagctggatgtcagccaaagtgacttcctggaggaggagcaaatgtcccctgaatgatggatgcgtttttgccaagtggagacacagtgcagaggaaatgttgggaacattctctagccaatctcatgcccagaaaattagattttaaaaagtgaaagataccaggagtcgttagcgaagtgttcatggtttgatggttgctgtggcaacatgctcttcatttgggatggaatcgcaaagtaaatattttcatagcatcagcaggataataagacacatgttgccatatctgggagagagccagtcctctgcactcttgtgtgggtgtcctccgtaacttggttattttgcccacagcttcccctaaacatggaacaactgaaggactagacacttggctcccatgtgcccaagagacagaggagctctgaataggggcctaaaatgcactgtttagcaggtatgttcatgtcaaaaatgttcctccctggcctggggtcagaaatgaccctgttttagtgcctcacacatctggagtatgacctcatcttgccatgtgaccctggacaagctgaattctcctctgagcttcagtttctgtatccatatattcccaatacaaatacccacctctcaagactcatagttgaattaaatataatacaacattgacttcatgggcacttaatccatgttggttttctttctctagaatgttccatgaatgtccact

SEQ ID NO: 81739 - DNA, 1972 bp, Homo sapiens
ctgtaaaaactctgggatcatagcagtatctgccttatagaactgtcatgagccttaactgagaggatatatacaatacaacagtgtctgacattagtaatagcctcgtaagaattagttatctttagaaaccacaggaccctcagtcccaaccacagcccggctgaatcagatctcccagggagatcaggaaccaagtatatatggctactgaaggacggatttggttttgccaggtggagatacagtgcagaagaaatggagggagcattctctggctgatttttttaaatcctccacaaatgattctgaagcagtgagttgctggcctggcacttaggaaccactgtaagttatatgaagctctctgacrttaggaatattccaataatgttttgagtgccactctgtatgaaggcctgagtggtgcaaagatggaaaaggtactctctgtcctcagagagccactgcctaaaccagcaaaaacaactcctaagccacatatatagtccaagtgggcctctgtgtttcaggagcacaaggaagcctgaaacatgtgctcagcgatgacagaggagacagtgatctgcaggattatcagtagggctgtgcaggttattgactgcacagaggcacccagagaaaggtcactcttctttctaattcgcataaaagctccatcgggccagtggcaggtctggaggtcattattcaagcaggctgttctggaagctcctactcatccatcagtgagagtttagctgcccctttctctagggaaccttcccgaagacccagaaaacagagtcgaccacacccttttctgtgtcatgccctattaaagtcttccttaccccagattgtaaatgcatgtttggattaacgtctccccaacttgtctttgagccttttgagagtagttactgagtttgtttggtttttctggtgttctcatgttagcaccccaacacaaggtctggtacagagtaggtgctgagaagatgcttgtattttgttttgtggggtttttcggtgggcgggggttgcctactacaactgctagcagcagatgcttgttgaatgaataaatggatggatggatgggtggatgggtggatggatggatggatgaatgatggatgatgaatgaatgaatgattaaataaataaataaatcccaactaactaagaggattttaatgaacctgggtagaaaggacactccgttaccaatcaagcgagctggatgtcagccaaagtgacttcctggaggaggagcaaatgtcccctgaatgatggatgcgtttttgccaagtggagacacagtgcagaggaaatgttgggaacattctctagccaatctcatgcccagaaaattagattttaaaaagtgaaagataccaggagtcgttagcgaagtgttcatggtttgatggttgctgtggcaacatgctcttcatttgggatggaatcgcaaagtaaatattttcatagcatcagcaggataataagacacatgttgccatatctgggagagagccagtcctctgcactcttgtgtgggtgtcctccgtaacttggttattttgcccacagcttcccctaaacatggaacaactgaaggactagacacttggctcccatgtgcccaagagacagaggagctctgaataggggcctaaaatgcactgtttagcaggtatgttcatgtcaaaaatgttcctccctggcctggggtcagaaatgaccctgttttagtgcctcacacatctggagtatgacctcatcttgccatgtgaccctggacaagctgaattctcctctgagcttcagtttctgtatccatatattcccaatacaaatacccacctctcaagactcatagttgaattaaatataatacaacattgacttcatgggcacttaatccatgttggttttctttctctagaatgttccatgaatgtccact

SEQ ID NO: 81740 - DNA, 1972 bp, Homo sapiens
ctgtaaaaactctgggatcatagcagtatctgccttatagaactgtcatgagccttaactgagaggatatatacaatacaacagtgtctgacattagtaatagcctcgtaagaattagttatctttagaaaccacaggaccctcagtcccaaccacagcccggctgaatcagatctcccagggagatcaggaaccaagtatatatggctactgaaggacggatttggttttgccaggtggagatacagtgcagaagaaatggagggagcattctctggctgatttttttaaatcctccacaaatgattctgaagcagtgagttgctggcctggcacttaggaaccactgtaagttatatgaagctctctgacgttaggaatattccaataatgttttgagtgccactctgtatgaaggcctgagtggtgcaaagatggaaaaggtactctctgtcctcagagagccactgcctaaaccagcaaaaacaactcctaagccacatatatagtccaagtgggcctctgtgtttcaggagcacaaggaagcctgaaacatgtgctcagcratgacagaggagacagtgatctgcaggattatcagtagggctgtgcaggttattgactgcacagaggcacccagagaaaggtcactcttctttctaattcgcataaaagctccatcgggccagtggcaggtctggaggtcattattcaagcaggctgttctggaagctcctactcatccatcagtgagagtttagctgcccctttctctagggaaccttcccgaagacccagaaaacagagtcgaccacacccttttctgtgtcatgccctattaaagtcttccttaccccagattgtaaatgcatgtttggattaacgtctccccaacttgtctttgagccttttgagagtagttactgagtttgtttggtttttctggtgttctcatgttagcaccccaacacaaggtctggtacagagtaggtgctgagaagatgcttgtattttgttttgtggggtttttcggtgggcgggggttgcctactacaactgctagcagcagatgcttgttgaatgaataaatggatggatggatgggtggatgggtggatggatggatggatgaatgatggatgatgaatgaatgaatgattaaataaataaataaatcccaactaactaagaggattttaatgaacctgggtagaaaggacactccgttaccaatcaagcgagctggatgtcagccaaagtgacttcctggaggaggagcaaatgtcccctgaatgatggatgcgtttttgccaagtggagacacagtgcagaggaaatgttgggaacattctctagccaatctcatgcccagaaaattagattttaaaaagtgaaagataccaggagtcgttagcgaagtgttcatggtttgatggttgctgtggcaacatgctcttcatttgggatggaatcgcaaagtaaatattttcatagcatcagcaggataataagacacatgttgccatatctgggagagagccagtcctctgcactcttgtgtgggtgtcctccgtaacttggttattttgcccacagcttcccctaaacatggaacaactgaaggactagacacttggctcccatgtgcccaagagacagaggagctctgaataggggcctaaaatgcactgtttagcaggtatgttcatgtcaaaaatgttcctccctggcctggggtcagaaatgaccctgttttagtgcctcacacatctggagtatgacctcatcttgccatgtgaccctggacaagctgaattctcctctgagcttcagtttctgtatccatatattcccaatacaaatacccacctctcaagactcatagttgaattaaatataatacaacattgacttcatgggcacttaatccatgttggttttctttctctagaatgttccatgaatgtccact

SEQ ID NO: 81741 - DNA, 608 bp, Homo sapiens
atagtctctctggaaaagaggtgtttaagtataaacttgcagatgatgtttgtgcagatgaagggaaggaagcaagtacactcccagtagaggcagcaacccatgtgaagattcagaggcaaggaagagtgagaagcatttgagggcttcacagacaaatagwgtagtatgtacttaggtgtggatatccatgtgtatgcatgctggaagtatgtgtgggtctgtgtgtgtatgtgcatgtgagtgcatatatgtagttgtgcatgtgtgtttttgtgtgttgttagagcaataccaagagcttcctctctgcacctggctttagcttatggagtgtccctactctgcaatctagaggtctgggaaatagtacaccccgtcactgctgccacacatcccatgtgcacccatgacccatcccattccacaccttagcttgcacacaggaatatgttgatgtggcctgtgattggcatacagcactgagcactcagaagaggcggctgctccagttccagccttaaggcaacctgcctacctcctcctcagcctgtcaggtctgccgatgacccaagcccagggtgatataggagcaatggcgctagaag

SEQ ID NO: 81742 - DNA, 550 bp, Homo sapiens
tgactcaggcacagttggaagaggtacgtgaatgcaggaatattgttagaatacctttctttaagggtttaaacaacatttctagaggcccctccagatgcttatagctattcttccataggcaytagtgaaaggtaataccaggcatagaactgagaaaagaaatgtgagtaggctgccagagaggggcagggagcatggctggaattgagcagactagggcatatggatcaggtctgggtgttcagagagtatcctctctcctctcaaggcagcctgagcacccctccttttttctgcctgctccagcttccttcctggagaaacatctactgtgatctgccttggggctgaagctttggggagattgtgagatcctgcatggaaacagcatgttttccaggcaccagtgtcctcagtaccatgggtactgagtgctgcgtggaaaacactttgatgtatgaatacgtaaagcattaatactcgtctttctgattcaaaagtaatttatagtcagcaaaatatatatatctctctccagtagtagatt

SEQ ID NO: 81743 - DNA, 2002 bp, Homo sapiens
ggaaccacattataagggtaactttaatgtagccctctaccccactttgctgaatgttagctaggtatktttatctgtacacgagtgggattcttcatctcatctctgctgctcaccatatgaactcattctccctttcttgtctatcagaacaatttaagttcagcactttttagaaagccctcaacacaactgctttacatggatttttaccaaataaaatttgtgatttggtggagttttgattttgccaaataaaaaatataatcctataatcatactcacaattccctatgaactactgattgtttttaagaaatatgtaatgagctctaaatatgtcccagaaactgtactaggtactaaggatatgtaatgtactaggcagtaaggtatgaccaaagcctccatttcagggagtttacagtttaccattattccttttttttttctttttatttgagacagagtctcgctctgtagcccaggctggagtgcagtggtgtgatctcggctcactgcaacctccgcctcttgggttcaagcaattcttctgcctcagcctcccaattctcctcctcagctgggattacaggtgcccatcacaactcccggcaaatttttgtatttttagtagaaacagggtttcaccatcttggccagctggtcttgaatgcctcaagtgatctgcccgcctcagcctcccaaagtgctgggattacaggcgtgagccaccatgcccagccagtttactattattcttacatattaattttatctttattttatcagattgtattactaaaattaaactaaaagggctattgtatttttattttatgtatgcaaggcataccacataatattttgatatgcagtgaaatggttactatagtcaagcaaataaaacctatcatcacacatagttacccccccttttttgtatgtggtaagagcacctaaaatctactcctagcaattatcacaaacacaatacaatattattaattatagtctgctgtacatcatagctttagacttattcatcctatacatatacaactttatataacctttgacctacatctctccattatagggctatgttattgaacgctaaattatgcatacaattcctagtgttcaaaaccaaggatagaaacaaaaatttatcatatcacattggtaatcataccattcaggagagaaagcttttttctttaaaaaaaacagatttttaaaaaattaatcacgagtcattatactaatgacactgcaaaacatttcatagaagtcttgactaacaaagctaacagatggacaaagcacacacacacactccttcaaagagccacctgataaaatatcctttcaatctgaataactttagcaccagttagtggcagaatcaaagattcgattttggtctaaattgcaatccctaaactttattgaagtaataaattagtatgagcttccaaacccttttccaattaaaaacaaaatacatatatacatattgcaaatagctgaagtttaaatgaacttaaacagcaatatttaagcggaaacttttaaactttttaaaaaacaaaatagaaataatgtcaactgattcacaccgttcttagggcttttaaggagaaagcatctcctccctgacttgcttaatttaggtttgattcctgaagtctgtcatcatctctctttttagggaatcatctctttctctgtggttgtcttttttgatcctgccagatgtaggtctctctccagaattggttctcagtaatcccttcaaggagaccccccaggaggcccataaattcacctagcataaaaacatgtttagaatctccctaatactggaagaggtttttgctctaagaaattattttaaatttccctcctggcttctgattaatgccatatctgaaaggaacaagcctattaatttacagctccttcgctggttgcccctggcaaccacctttagccactt

SEQ ID NO: 81744 - DNA, 2002 bp, Homo sapiens
ggaaccacattataagggtaactttaatgtagccctctaccccactttgctgaatgttagctaggtatttttatctgtacacgagtgggattcttcatctcatctctgctgctcaccatatgaactcattctccctttcttgtctatcagaacaatttaagttcagcactttttagaaagccctcaacacaactgctttacatggatttttaccaaataaaatttgtgatttggtggagttttgattttgccaaataaaaaatataatcctataatcatactcacaattccctatgaactactgattgtttttaagaaatatgtaatgagctctaaatatgtcccagaaactgtactaggtactaaggatatgtaatgtactaggcagtaaggtatgaccaaagcctccatttcagggagtttacagtttacyattattccttttttttttctttttatttgagacagagtctcgctctgtagcccaggctggagtgcagtggtgtgatctcggctcactgcaacctccgcctcttgggttcaagcaattcttctgcctcagcctcccaattctcctcctcagctgggattacaggtgcccatcacaactcccggcaaatttttgtatttttagtagaaacagggtttcaccatcttggccagctggtcttgaatgcctcaagtgatctgcccgcctcagcctcccaaagtgctgggattacaggcgtgagccaccatgcccagccagtttactattattcttacatattaattttatctttattttatcagattgtattactaaaattaaactaaaagggctattgtatttttattttatgtatgcaaggcataccacataatattttgatatgcagtgaaatggttactatagtcaagcaaataaaacctatcatcacacatagttacccccccttttttgtatgtggtaagagcacctaaaatctactcctagcaattatcacaaacacaatacaatattattaattatagtctgctgtacatcatagctttagacttattcatcctatacatatacaactttatataacctttgacctacatctctccattatagggctatgttattgaacgctaaattatgcatacaattcctagtgttcaaaaccaaggatagaaacaaaaatttatcatatcacattggtaatcataccattcaggagagaaagcttttttctttaaaaaaaacagatttttaaaaaattaatcacgagtcattatactaatgacactgcaaaacatttcatagaagtcttgactaacaaagctaacagatggacaaagcacacacacacactccttcaaagagccacctgataaaatatcctttcaatctgaataactttagcaccagttagtggcagaatcaaagattcgattttggtctaaattgcaatccctaaactttattgaagtaataaattagtatgagcttccaaacccttttccaattaaaaacaaaatacatatatacatattgcaaatagctgaagtttaaatgaacttaaacagcaatatttaagcggaaacttttaaactttttaaaaaacaaaatagaaataatgtcaactgattcacaccgttcttagggcttttaaggagaaagcatctcctccctgacttgcttaatttaggtttgattcctgaagtctgtcatcatctctctttttagggaatcatctctttctctgtggttgtcttttttgatcctgccagatgtaggtctctctccagaattggttctcagtaatcccttcaaggagaccccccaggaggcccataaattcacctagcataaaaacatgtttagaatctccctaatactggaagaggtttttgctctaagaaattattttaaatttccctcctggcttctgattaatgccatatctgaaaggaacaagcctattaatttacagctccttcgctggttgcccctggcaaccacctttagccactt

SEQ ID NO: 81745 - DNA, 2002 bp, Homo sapiens
ggaaccacattataagggtaactttaatgtagccctctaccccactttgctgaatgttagctaggtatttttatctgtacacgagtgggattcttcatctcatctctgctgctcaccatatgaactcattctccctttcttgtctatcagaacaatttaagttcagcactttttagaaagccctcaacacaactgctttacatggatttttaccaaataaaatttgtgatttggtggagttttgattttgccaaataaaaaatataatcctataatcatactcacaattccctatgaactactgattgtttttaagaaatatgtaatgagctctaaatatgtcccagaaactgtactaggtactaaggatatgtaatgtactaggcagtaaggtatgaccaaagcctccatttcagggagtttacagtttaccattattccttttttttttctttttatttgagacagagtctcgctctgtagcccaggctggagtgcagtggtgtgatctcggctcactgcaacctccgcctcttgggttcaagcaattcttctgcctcagcctcccaattytcctcctcagctgggattacaggtgcccatcacaactcccggcaaatttttgtatttttagtagaaacagggtttcaccatcttggccagctggtcttgaatgcctcaagtgatctgcccgcctcagcctcccaaagtgctgggattacaggcgtgagccaccatgcccagccagtttactattattcttacatattaattttatctttattttatcagattgtattactaaaattaaactaaaagggctattgtatttttattttatgtatgcaaggcataccacataatattttgatatgcagtgaaatggttactatagtcaagcaaataaaacctatcatcacacatagttacccccccttttttgtatgtggtaagagcacctaaaatctactcctagcaattatcacaaacacaatacaatattattaattatagtctgctgtacatcatagctttagacttattcatcctatacatatacaactttatataacctttgacctacatctctccattatagggctatgttattgaacgctaaattatgcatacaattcctagtgttcaaaaccaaggatagaaacaaaaatttatcatatcacattggtaatcataccattcaggagagaaagcttttttctttaaaaaaaacagatttttaaaaaattaatcacgagtcattatactaatgacactgcaaaacatttcatagaagtcttgactaacaaagctaacagatggacaaagcacacacacacactccttcaaagagccacctgataaaatatcctttcaatctgaataactttagcaccagttagtggcagaatcaaagattcgattttggtctaaattgcaatccctaaactttattgaagtaataaattagtatgagcttccaaacccttttccaattaaaaacaaaatacatatatacatattgcaaatagctgaagtttaaatgaacttaaacagcaatatttaagcggaaacttttaaactttttaaaaaacaaaatagaaataatgtcaactgattcacaccgttcttagggcttttaaggagaaagcatctcctccctgacttgcttaatttaggtttgattcctgaagtctgtcatcatctctctttttagggaatcatctctttctctgtggttgtcttttttgatcctgccagatgtaggtctctctccagaattggttctcagtaatcccttcaaggagaccccccaggaggcccataaattcacctagcataaaaacatgtttagaatctccctaatactggaagaggtttttgctctaagaaattattttaaatttccctcctggcttctgattaatgccatatctgaaaggaacaagcctattaatttacagctccttcgctggttgcccctggcaaccacctttagccactt

SEQ ID NO: 81746 - DNA, 2002 bp, Homo sapiens
ggaaccacattataagggtaactttaatgtagccctctaccccactttgctgaatgttagctaggtatttttatctgtacacgagtgggattcttcatctcatctctgctgctcaccatatgaactcattctccctttcttgtctatcagaacaatttaagttcagcactttttagaaagccctcaacacaactgctttacatggatttttaccaaataaaatttgtgatttggtggagttttgattttgccaaataaaaaatataatcctataatcatactcacaattccctatgaactactgattgtttttaagaaatatgtaatgagctctaaatatgtcccagaaactgtactaggtactaaggatatgtaatgtactaggcagtaaggtatgaccaaagcctccatttcagggagtttacagtttaccattattccttttttttttctttttatttgagacagagtctcgctctgtagcccaggctggagtgcagtggtgtgatctcggctcactgcaacctccgcctcttgggttcaagcaattcttctgcctcagcctcccaattctcctcctcagctgggattacaggtgcccatcacaactcccggcaaatttttgtatttttagtagaaacagggtttcaccatcttggccagctggtcttgaatgcctcaagtgatctgcccgcctcagcctcccaaagtgctgggattacaggcgtgagccaccatgcccagccagtttactattattcttacatattaattttatctttattttatcagattgtattactaaaattaaactaaaagggctattgtatttttattttatgtatgcaaggcataccacataatattttgatatgcagtgaaatggttactatagtcaagcaaataaaacctatcatcacacatagttacccccccttttttgtatgtggtaagagcacctaaaatctactcytagcaattatcacaaacacaatacaatattattaattatagtctgctgtacatcatagctttagacttattcatcctatacatatacaactttatataacctttgacctacatctctccattatagggctatgttattgaacgctaaattatgcatacaattcctagtgttcaaaaccaaggatagaaacaaaaatttatcatatcacattggtaatcataccattcaggagagaaagcttttttctttaaaaaaaacagatttttaaaaaattaatcacgagtcattatactaatgacactgcaaaacatttcatagaagtcttgactaacaaagctaacagatggacaaagcacacacacacactccttcaaagagccacctgataaaatatcctttcaatctgaataactttagcaccagttagtggcagaatcaaagattcgattttggtctaaattgcaatccctaaactttattgaagtaataaattagtatgagcttccaaacccttttccaattaaaaacaaaatacatatatacatattgcaaatagctgaagtttaaatgaacttaaacagcaatatttaagcggaaacttttaaactttttaaaaaacaaaatagaaataatgtcaactgattcacaccgttcttagggcttttaaggagaaagcatctcctccctgacttgcttaatttaggtttgattcctgaagtctgtcatcatctctctttttagggaatcatctctttctctgtggttgtcttttttgatcctgccagatgtaggtctctctccagaattggttctcagtaatcccttcaaggagaccccccaggaggcccataaattcacctagcataaaaacatgtttagaatctccctaatactggaagaggtttttgctctaagaaattattttaaatttccctcctggcttctgattaatgccatatctgaaaggaacaagcctattaatttacagctccttcgctggttgcccctggcaaccacctttagccactt

SEQ ID NO: 81747 - DNA, 2002 bp, Homo sapiens
ggaaccacattataagggtaactttaatgtagccctctaccccactttgctgaatgttagctaggtatttttatctgtacacgagtgggattcttcatctcatctctgctgctcaccatatgaactcattctccctttcttgtctatcagaacaatttaagttcagcactttttagaaagccctcaacacaactgctttacatggatttttaccaaataaaatttgtgatttggtggagttttgattttgccaaataaaaaatataatcctataatcatactcacaattccctatgaactactgattgtttttaagaaatatgtaatgagctctaaatatgtcccagaaactgtactaggtactaaggatatgtaatgtactaggcagtaaggtatgaccaaagcctccatttcagggagtttacagtttaccattattccttttttttttctttttatttgagacagagtctcgctctgtagcccaggctggagtgcagtggtgtgatctcggctcactgcaacctccgcctcttgggttcaagcaattcttctgcctcagcctcccaattctcctcctcagctgggattacaggtgcccatcacaactcccggcaaatttttgtatttttagtagaaacagggtttcaccatcttggccagctggtcttgaatgcctcaagtgatctgcccgcctcagcctcccaaagtgctgggattacaggcgtgagccaccatgcccagccagtttactattattcttacatattaattttatctttattttatcagattgtattactaaaattaaactaaaagggctattgtatttttattttatgtatgcaaggcataccacataatattttgatatgcagtgaaatggttactatagtcaagcaaataaaacctatcatcacacatagttacccccccttttttgtatgtggtaagagcacctaaaatctactcctagcaattatcacaaacacaatacaatattattaattatagtctkctgtacatcatagctttagacttattcatcctatacatatacaactttatataacctttgacctacatctctccattatagggctatgttattgaacgctaaattatgcatacaattcctagtgttcaaaaccaaggatagaaacaaaaatttatcatatcacattggtaatcataccattcaggagagaaagcttttttctttaaaaaaaacagatttttaaaaaattaatcacgagtcattatactaatgacactgcaaaacatttcatagaagtcttgactaacaaagctaacagatggacaaagcacacacacacactccttcaaagagccacctgataaaatatcctttcaatctgaataactttagcaccagttagtggcagaatcaaagattcgattttggtctaaattgcaatccctaaactttattgaagtaataaattagtatgagcttccaaacccttttccaattaaaaacaaaatacatatatacatattgcaaatagctgaagtttaaatgaacttaaacagcaatatttaagcggaaacttttaaactttttaaaaaacaaaatagaaataatgtcaactgattcacaccgttcttagggcttttaaggagaaagcatctcctccctgacttgcttaatttaggtttgattcctgaagtctgtcatcatctctctttttagggaatcatctctttctctgtggttgtcttttttgatcctgccagatgtaggtctctctccagaattggttctcagtaatcccttcaaggagaccccccaggaggcccataaattcacctagcataaaaacatgtttagaatctccctaatactggaagaggtttttgctctaagaaattattttaaatttccctcctggcttctgattaatgccatatctgaaaggaacaagcctattaatttacagctccttcgctggttgcccctggcaaccacctttagccactt

SEQ ID NO: 81748 - DNA, 939 bp, Homo sapiens
tgcatgttaataaacttctgcttttctcttattaatttgtctttagttacacagggtcatgccaactaagaatttatgagggttgaggaaaaaattaattttcctcccggaccccagtgccacctatactttctcagccttcctgtgcatcaatttcaagggaacatggacataatttagatgctcatccacactgctcttggtccatgagagcaggaggacatgttacagtttattagataggcataagtggrgcagaagagggctctcccacctattaggaatgccagatgatggttcagtagttatcaccttgcatctctaaaagtgataaattagcagctggtgctagggagaggctgttccctgatgatccacacctattgcactgaagtcataactgaatacagatgacaggaagaagcgacttcttggacatgcacattaagagacacaatggtggagtatgactttcctgaggcactctactggaaaaaggaagaaagcctcagacgggcattcatacaacttcctaaacacactgtacatgctcacttcctgagggtaagaggggcactgggcatgcaggcagcccaccctaagggaagaatcatgggaaggaatcatgggaaagtttaacctaagatgaaggttaaacatctacttgaccttggtgtctgcttgagtttcttccaagtatacttttctttcaattcttttctgctttaagccttttaaataaacttacactcctgctctgaaacttgccttagtctctttttctgccttatgtcactgggttgaattctttcttctgaggaggcaagaactgagattgctgaagacccatatggattcaccgctggcagctgataccttacaatggtaacggataggggtgagagtctctgtctctctctctaactgcccttgcatgca

SEQ ID NO: 81749 - DNA, 741 bp, Homo sapiens
tgtacggtatggtcctcaggtgcttggcaaaatgggtccaccccctcccgggtaaccctggctctaggccctcttccatgtcctggccttccccagcagtcccctggagccctctggcgaccaaaactccacagtgaagcgccgcctggagtggtggccggtgaagggttcccagttcgggacacgttattcctcttctgtaaaaactgcaccactttcagctagactctcaggcaaaggcacagaaaattacctgattagattcatgatcttttagaggtttcctatcgctgaggtcatctgagccagcagttttcaaaatgagttgacagcttcatatcctaaaatgttgcatttaaattccagttaaaaatagtttaactactgtatttttccattctaagacagatttttttcatgctttgctttttctggagttagcatgcatctwataattgatacacttcatttaatatgatgggatctcttctgttcttctaaaaaattatcaatacatttgtgatgaatattggtttaatagcatctcagaatgtaaaacatccaggttgcaatcattacctcttctacaatatttaggtgaagaaggtcatatttctttcttttttaagtcaaattatatctagcagaaactcccatatatcaagatgtggaagattccaattcacggaggttcctcgtcatattctgtgccagacactggaggccggtatggtgggactt

SEQ ID NO: 81750 - DNA, 610 bp, Homo sapiens
gccaagcagaatttttatatctaaatccatgttacttacatagaatatattgttctttaaatataaaaatctataaatctgtacaagaccaatcgatacaagtaaaaaaaaatgtctgatcctgcttgaagtaaattatcaaagccatctacgttgagagatgaaatgtattacgtctctcctgctaacttgaggagtaaaggaatttaytaaaaagttactaggatgtttttattccttttctttttttttcttgcagtgaagcctgtagatccttaagattctttaccagttgtgtggtcttaatttcacaaattgaggaatctgatccatagatggttccacttgaacgtggtgggagggtaacattctccttccatgaaatgtaaagactgcattgtgggacatggaggggctccatgagatccatttagttgcattcatcctcctgtccccaaagtatatcagtaaatgtactgtttcttgacagtttggctgtgttatcccagaggactggatgtgggaatctccaaatggccagataatactctcagcttccaattcagtgaaactattcttaagcatgttaatgaaaatatacttctttcct

SEQ ID NO: 81751 - DNA, 731 bp, Homo sapiens
ttaatctaaactccttttatagaaaaaaatgtccatatgtgctgatgtgtgtctctgtgcctttacctaaaagtcagggtctgtgggctccggtagccatcccgctcacactttcttcyagaattctaataagctcatctattttcttgcctataatacgaacaaacaattagaacaaaaaaggaaggaatgtaatctgcttctagaggacaacacttatggtagcaataagagaaagcctagcagagatgacagaaagaaaattagaaaaagcaaaggaatctgaagatatttactgtaattgatgtataagtacaatgctgattcgccaaaagaagattagattgtaagccatataatctggttgaaaagtcagtaaaatacataatgtttttaagtgtaaaaagaaaaaggttatgggacatttaaatttgttttgggggcatgtcatccctgtccaaagtttaacagatgaggaaccgctatatgtgtttttcattgattattggttttactcaacattttgcttaaatagtccctgctttaaattttaaagcagatgaatgagaacattttgtatttgtcccttcctaaaagatcccaccaaaaataaaatgaattactttcctggccctcaaccaaatttttgtcagaaataaaatatgactttccttgggcaccttcatgacctccctgagaagtgaagagtgaagagctgggcctcttcctgc

SEQ ID NO: 81752 - DNA, 731 bp, Homo sapiens
ttaatctaaactccttttatagaaaaaaatgtccatatgtgctgatgtgtgtctctgtgcctttacctaaaagtcagggtctgtgggctccggtagccatcccgctcacactttcttctagaattctaataagctcatctattttcttgcctataataygaacaaacaattagaacaaaaaaggaaggaatgtaatctgcttctagaggacaacacttatggtagcaataagagaaagcctagcagagatgacagaaagaaaattagaaaaagcaaaggaatctgaagatatttactgtaattgatgtataagtacaatgctgattcgccaaaagaagattagattgtaagccatataatctggttgaaaagtcagtaaaatacataatgtttttaagtgtaaaaagaaaaaggttatgggacatttaaatttgttttgggggcatgtcatccctgtccaaagtttaacagatgaggaaccgctatatgtgtttttcattgattattggttttactcaacattttgcttaaatagtccctgctttaaattttaaagcagatgaatgagaacattttgtatttgtcccttcctaaaagatcccaccaaaaataaaatgaattactttcctggccctcaaccaaatttttgtcagaaataaaatatgactttccttgggcaccttcatgacctccctgagaagtgaagagtgaagagctgggcctcttcctgc

SEQ ID NO: 81753 - DNA, 973 bp, Homo sapiens
gcatggtcaggacagggtttacagctgggcttcccaagctgagctgacactcagctctgccacttagcagctgcaaaatcttgggcaggtggcttgatcttctagccctcaatttacatattttcccatctgtgaacaatatactgttcctcataagaattatttgagtattaaatgaaatgttgtttattattctgttatctcatggggacattttggggagaaggaagataggagggttgtagctgtgatggctataggagactgagctggcccaagtgtggacmatacgcttcccctctctggggttgggggaagggctgggggagggtgtggggcgaagtcacttctgcagcctcacgaaagctgccatggccagtgctgtgaccctgacccattatcttaggcagggaggggtgctcttgggccaaggctcccagcaggtgcacccaggggctatgaggctggacattttgtcccttcacagcggccagcagcagagacttgtggatcccaggcaggactgagaacaagatggcagcccagatcagatcctcccaggatgagccccagaggaggggactgaggcggaatcccagaacagcaagggactgggccaacaggtgagaaccaagttctgtcaacaggagataaggcagccagggaggtggtgtgggccagcccagccctcacgcccaatccaccacggcagacacacagttgaggccctggaccactagaaacagagcccaacatggtgcatctgactaagggaaagaagccactcccaaaaggccacatatggtaagattccgactctaggacattctggaagaggcgaaacagcggagaagatgaaaggatcagtggctgccaggggctgggggagggacgaatcagggagcccagaggatttttagggcagtgacactgctctgttcgacatgacaatggcggaaacaagtcccatgca

SEQ ID NO: 81754 - DNA, 973 bp, Homo sapiens
gcatggtcaggacagggtttacagctgggcttcccaagctgagctgacactcagctctgccacttagcagctgcaaaatcttgggcaggtggcttgatcttctagccctcaatttacatattttcccatctgtgaacaatatactgttcctcataagaattatttgagtattaaatgaaatgttgtttattattctgttatctcatggggacattttggggagaaggaagataggagggttgtagctgtgatggctataggagactgagctggcccaagtgtggaccatacgcttcccctctctggggttgggggaagggctgggggagggtgtggggcgaagtcacttctgcagcctcacgaaagctgccatggccagtgctgtgaccctgacccattatcttaggcagggaggggtgctcttgggccaaggctcccagcaggtgcacccaggggctatgaggctggacattttgtcccttcacagyggccagcagcagagacttgtggatcccaggcaggactgagaacaagatggcagcccagatcagatcctcccaggatgagccccagaggaggggactgaggcggaatcccagaacagcaagggactgggccaacaggtgagaaccaagttctgtcaacaggagataaggcagccagggaggtggtgtgggccagcccagccctcacgcccaatccaccacggcagacacacagttgaggccctggaccactagaaacagagcccaacatggtgcatctgactaagggaaagaagccactcccaaaaggccacatatggtaagattccgactctaggacattctggaagaggcgaaacagcggagaagatgaaaggatcagtggctgccaggggctgggggagggacgaatcagggagcccagaggatttttagggcagtgacactgctctgttcgacatgacaatggcggaaacaagtcccatgca

SEQ ID NO: 81755 - DNA, 973 bp, Homo sapiens
gcatggtcaggacagggtttacagctgggcttcccaagctgagctgacactcagctctgccacttagcagctgcaaaatcttgggcaggtggcttgatcttctagccctcaatttacatattttcccatctgtgaacaatatactgttcctcataagaattatttgagtattaaatgaaatgttgtttattattctgttatctcatggggacattttggggagaaggaagataggagggttgtagctgtgatggctataggagactgagctggcccaagtgtggaccatacgcttcccctctctggggttgggggaagggctgggggagggtgtggggcgaagtcacttctgcagcctcacgaaagctgccatggccagtgctgtgaccctgacccattatcttaggcagggaggggtgctcttgggccaaggctcccagcaggtgcacccaggggctatgaggctggacattttgtcccttcacagcggccagcagcagagacttgtggatcycaggcaggactgagaacaagatggcagcccagatcagatcctcccaggatgagccccagaggaggggactgaggcggaatcccagaacagcaagggactgggccaacaggtgagaaccaagttctgtcaacaggagataaggcagccagggaggtggtgtgggccagcccagccctcacgcccaatccaccacggcagacacacagttgaggccctggaccactagaaacagagcccaacatggtgcatctgactaagggaaagaagccactcccaaaaggccacatatggtaagattccgactctaggacattctggaagaggcgaaacagcggagaagatgaaaggatcagtggctgccaggggctgggggagggacgaatcagggagcccagaggatttttagggcagtgacactgctctgttcgacatgacaatggcggaaacaagtcccatgca

SEQ ID NO: 81756 - DNA, 973 bp, Homo sapiens
gcatggtcaggacagggtttacagctgggcttcccaagctgagctgacactcagctctgccacttagcagctgcaaaatcttgggcaggtggcttgatcttctagccctcaatttacatattttcccatctgtgaacaatatactgttcctcataagaattatttgagtattaaatgaaatgttgtttattattctgttatctcatggggacattttggggagaaggaagataggagggttgtagctgtgatggctataggagactgagctggcccaagtgtggaccatacgcttcccctctctggggttgggggaagggctgggggagggtgtggggcgaagtcacttctgcagcctcacgaaagctgccatggccagtgctgtgaccctgacccattatcttaggcagggaggggtgctcttgggccaaggctcccagcaggtgcacccaggggctatgaggctggacattttgtcccttcacagcggccagcagcagagacttgtggatcccaggcaggactgagaacaagatggcagcccagatcagatcctcccaggatgagccccagaggaggggactgaggcggaatcccagaacagcaagggactgggccaacaggtgagaaccaagttctgtcaacaggagataaggcagccagggaggtggtgtgggccagcccagccctcacgcmcaatccaccacggcagacacacagttgaggccctggaccactagaaacagagcccaacatggtgcatctgactaagggaaagaagccactcccaaaaggccacatatggtaagattccgactctaggacattctggaagaggcgaaacagcggagaagatgaaaggatcagtggctgccaggggctgggggagggacgaatcagggagcccagaggatttttagggcagtgacactgctctgttcgacatgacaatggcggaaacaagtcccatgca

SEQ ID NO: 81757 - DNA, 973 bp, Homo sapiens
gcatggtcaggacagggtttacagctgggcttcccaagctgagctgacactcagctctgccacttagcagctgcaaaatcttgggcaggtggcttgatcttctagccctcaatttacatattttcccatctgtgaacaatatactgttcctcataagaattatttgagtattaaatgaaatgttgtttattattctgttatctcatggggacattttggggagaaggaagataggagggttgtagctgtgatggctataggagactgagctggcccaagtgtggaccatacgcttcccctctctggggttgggggaagggctgggggagggtgtggggcgaagtcacttctgcagcctcacgaaagctgccatggccagtgctgtgaccctgacccattatcttaggcagggaggggtgctcttgggccaaggctcccagcaggtgcacccaggggctatgaggctggacattttgtcccttcacagcggccagcagcagagacttgtggatcccaggcaggactgagaacaagatggcagcccagatcagatcctcccaggatgagccccagaggaggggactgaggcggaatcccagaacagcaagggactgggccaacaggtgagaaccaagttctgtcaacaggagataaggcagccagggaggtggtgtgggccagcccagccctcacgcccaatccaccacggcagacacacagttgaggccctggaccactagaaacagagcccaacatggtgcatctgactaagggaaagaagccactcccaaaaggccacatatggtaagattcygactctaggacattctggaagaggcgaaacagcggagaagatgaaaggatcagtggctgccaggggctgggggagggacgaatcagggagcccagaggatttttagggcagtgacactgctctgttcgacatgacaatggcggaaacaagtcccatgca

SEQ ID NO: 81758 - DNA, 1334 bp, Homo sapiens
ttaaagtcagctgattggaaatactaatcacatctaaaaaaaaactccttcacagctgtgtatggactcctgtgcaaccaaacaatgggacgctgcaacccagccaagctgacacagaaaatcaaccaccaccggggcctccaaaggaagggcctcaaaagaggagaccctctgttggtttcctccttctgcccttgaccttctctttcttcctgcctggaaggcagatgtaaggccaagcatggggcagccatcatgagaccatgaggcaagagtgagagtgaacaaagagagagagcgggtactgctccctggtggcattgtgggtgtattggtctgttctcacactgctataaaagaatacctgagactgggtaatttataaagaaaagaggtttaattggctcacagttccacaggctgtacaggaaacatggctgggaggcctccagaaacttacaatcatggcagaagctgaaggggargcaagcacataaatggccagagcaggaggaagagaggtgggaggtgctacacacttttaaacaaccagatcttgtgagaactcactcactgtcacgagaacagcaaagggaccatctgtcccccaaccccaggatccaatcacctcacaccaggccccttctccaacatcggggacatgagatttgggtggggacacagatccaaaccatattagtggggctgaaacaccagcacgccactgcccacctcccggcatcttgtcacatgacaaaaatacatgccggcttggttaagccacttgacacacagctgagcccatttctgacatatttgtgtttggaatatctcataataaaatgattaaatagaaaacaagggatacataggaaatatttctaagtatacctgtgacagtatttcctgacttacaaacctgtgagttgcaacaatttaaaggaagacttcctattctctttggccaataacattccatgcagcaatttgggcccagcaacaacaagaccaggttcacaaccacagtggaccaacaggccgacacgccctccagggcagtgagcttcagccccggaatgggtttgttcattcagcacacatgcattcatccctaccgtgcacaggccccaagagatacagcagtgagaccaggataataaggtcccctccttccaagaaaagactaatactaattgctagttagtaaaagtcagtttcctaggttgcaagcaacagaaaatctcagctcacctaagaagaaggggttctttagaaggccttaggggttaacagagcagctgaagggctcaggtgtgagacaacaaggaagctag

SEQ ID NO: 81759 - DNA, 567 bp, Homo sapiens
gatttaaagcccttataagaaaaactctaattggctctatggagctttttggtttggggagagtggtgagaaagtaaggagtggttggtaagagaaaaagttcaatccccacccttttatttttccctagtcacacagggaagcttctcagagcagcttccccgcagttagcagctgcctgtggcagagttaccttgagtaagaggccactctttggcagtggcagtgtgagcctgtgcagctcttcctgcagctggccctgctcctcctgcatcctcctctgatcctccaggagctcacactgctccatctgcagctgccccatctccttctggctggccttgtacttttcctgcaattctgtcagtctggacagcagtgtgtcacactgtgggtgggggcgggtgtggagggggtggttactctgtaaggtaagcttcttgggtggctaacagagcacttctgcgctctcctgcctcttgtgatcctctccctgtgcagtcaycttggactggtcaccccaagccacaatgcattctggctgtttagataccgattggggatccc

SEQ ID NO: 81760 - DNA, 1447 bp, Homo sapiens
ggcgctctttgactggaagatttacatcaggcaagtgagaccccagagtactatctccctccacagtggatgcctatggagatgtttctaccacaggctgggagaaggtgaaagaaagacaagaaatgtgcctgccttccccaccctctgtgccctaccttgttcttcatgccatgcatctgctcttcagcatcccgtagctgctgccgtaacaactgcatttcaggatcaggctctaagaaatccatttctgaagtctgagactctgctgacgtcatactcagtgtttgggactgcagccatctctctgttgctctctgtgtcctgcaattcagaaccgcagagctatgcttgaagggagttctgyctggcatcaccagccatgcaggctttgtcctgataccttcattttaggccaaagatagtaaggggccttctattgtgactcaccgctcagataaacatgcttaaaagactacagaaagtctccagcccctcaatctgcaaaggtgtgtttggctctgggagacccttagagtgccagtccagttagttttgaggctaggcctagtcaagcccactccaatctggaagcattgtgcctgccattagactgaaacaagtctatgcagacaataaaagaatctcttctgatccactttagggcagagcaaaccagaacccagtgcctagagcagaagtaaacttcagaactcactccctctagtcttgagataattgggtcggatccccatgtctgcttgtaggtggtatctgtatcctttggaaaccatggaaaggactgggtctccaggagcaaaggaacgctcactgccctggcatctgccttcagggaaagcccaaggtaaggcagagtcctgtggaaccccatgacctctcactctccagagacagctgtacctctcactctccagatctgcaagctgccccgtgaggctgctgttgctctcctgcagggcccggtattcctcattcaggaaatggtagcgttcccgcagctcctgcagttcttctgcagaggacaggcagagagagatgagaccgggaggaaaggaaagcactgatgaccagcccccagttttcctgtcttgaaacctgagagcagaaggttaaagagcttctctttttctaaagacagaaaaaaggtagaggcttagaagacagggcccaggaaattccacagtgcagtgagtctttctcctcttcccaatagctgtccttcttctcatctgccctgaagatttaccctgtgtgctcatcttcaaagcctcaaccgaagcagactcttgaacttttagcaatttttgaaagtttaattaactttcaaatttttactgtatgtaaaaactttcaaaagtttactgtatgtaaaatttccattcaactgtttatgattaccttccaattatgcttttagtacaaaaag

SEQ ID NO: 81761 - DNA, 1447 bp, Homo sapiens
ggcgctctttgactggaagatttacatcaggcaagtgagaccccagagtactatctccctccacagtggatgcctatggagatgtttctaccacaggctgggagaaggtgaaagaaagacaagaaatgtgcctgccttccccaccctctgtgccctaccttgttcttcatgccatgcatctgctcttcagcatcccgtagctgctgccgtaacaactgcatttcaggatcaggctctaagaaatccatttctgaagtctgagactctgctgacgtcatactcagtgtttgggactgcagccatctctctgttgctctctgtgtcctgcaattcagaaccgcagagctatgcttgaagggagttctgcctggcatcaccagccatgcaggctttgtcctgataccttcattttaggccaaagatagtaaggggccttctattgtgactcaccgctcagataaacatgcttaraagactacagaaagtctccagcccctcaatctgcaaaggtgtgtttggctctgggagacccttagagtgccagtccagttagttttgaggctaggcctagtcaagcccactccaatctggaagcattgtgcctgccattagactgaaacaagtctatgcagacaataaaagaatctcttctgatccactttagggcagagcaaaccagaacccagtgcctagagcagaagtaaacttcagaactcactccctctagtcttgagataattgggtcggatccccatgtctgcttgtaggtggtatctgtatcctttggaaaccatggaaaggactgggtctccaggagcaaaggaacgctcactgccctggcatctgccttcagggaaagcccaaggtaaggcagagtcctgtggaaccccatgacctctcactctccagagacagctgtacctctcactctccagatctgcaagctgccccgtgaggctgctgttgctctcctgcagggcccggtattcctcattcaggaaatggtagcgttcccgcagctcctgcagttcttctgcagaggacaggcagagagagatgagaccgggaggaaaggaaagcactgatgaccagcccccagttttcctgtcttgaaacctgagagcagaaggttaaagagcttctctttttctaaagacagaaaaaaggtagaggcttagaagacagggcccaggaaattccacagtgcagtgagtctttctcctcttcccaatagctgtccttcttctcatctgccctgaagatttaccctgtgtgctcatcttcaaagcctcaaccgaagcagactcttgaacttttagcaatttttgaaagtttaattaactttcaaatttttactgtatgtaaaaactttcaaaagtttactgtatgtaaaatttccattcaactgtttatgattaccttccaattatgcttttagtacaaaaag

SEQ ID NO: 81762 - DNA, 611 bp, Homo sapiens
agcaattgcttgacaaagctgtctgagaagctggcagaggcctgagtaaggcaaggaggagcaactgcattccagcagtgacaacaaaacccaggccctgagggagtacctgctaggacaatgcgcaggttctaagtgaaaaataaaaagagtcacgtggmtgtttatgtattttgtatctgcacgggacagaaagatcaaaacgataattttaagaactcaagagacccagcagaagcatttaaaagttcagtctccaagaagtgtgctctctttcaccagttcttgaacgaattaacgggaagaagagctaagtagcatttttaccttaaccatgcacatatgtttactcagcccgcaaagctgtgtcttctacaccttcaagacaaagggaggagacagccccagcatgcaactagcattatctttcaaaggcagagcctgcaggatttctccctgcaattttccagaaagcctctccctggcctgcagcctataacaccgctacaaatgtcattaacttaatcaacccactgaacctactatctacatctgaacaccgatcaggaggcaggggaaattctgaggcctgctgtgtggtgaggatccca

SEQ ID NO: 81763 - DNA, 611 bp, Homo sapiens
agcaattgcttgacaaagctgtctgagaagctggcagaggcctgagtaaggcaaggaggagcaactgcattccagcagtgacaacaaaacccaggccctgagggagtacctgctaggacaatgcgcaggttctaagtgaaaaataaaaagagtcacgtggatgtttatgtattttgtatctgcacgggacagaaagatcaaaacgataattttaagaactcaagagacccagcagaagcatttaaaagttcagtctccaagaagtgtgctctctttcaccagttcttgaacgaattaacgggaagaagagctaagtagcatttttaccttaaccatgcacatatgtttactcagcccgcaaagctgtgtcttctacaccttcaasacaaagggaggagacagccccagcatgcaactagcattatctttcaaaggcagagcctgcaggatttctccctgcaattttccagaaagcctctccctggcctgcagcctataacaccgctacaaatgtcattaacttaatcaacccactgaacctactatctacatctgaacaccgatcaggaggcaggggaaattctgaggcctgctgtgtggtgaggatccca

SEQ ID NO: 81764 - DNA, 1096 bp, Homo sapiens
tcacagagttgctgcaataattaagcaagataacacttgtggatctgattttcatggtgatgacgacaatgagaggatgatagtgacagtgacaatcatgatgccataaatactcacattttccttctaaacctatgaatgcagagaatctcatggctggtgtaaaatcttacacaatcccagtaaaaactagacgtgtaatatgtttaactcaatagtttatgcagcaaagttgttcttttttttaagctgaaaataattacaagaacacagccataatccactgtcatagccttgaggaagttttatgcaattggcagaagatacacataaaactgaaaaattgaaagcctatttgaaataggtagtcatagtgagcacttcttctttaattgcattctgcttacataactcaaagacctaaattaaagcataatcatgtctctaatgattttgcactctttttccccctccaamataaggaagctcaaggtgttaaaagagttatgctttgggaccaagataactaatgtataaattaaaaatccatttcatacgtttatttacataaatgaaaaaggaggcaaaaatctctactcctcgtttattccttcttcacgcttcaggaggaaagtctgctatagagcttttttttttttttccaatgcatagaaactaaaagtttctcaagtaagaaatacaaggtacatatttcagaagtttgggtggctttgcatagcctcagaaatgctgagaatatagaacacactgcagtatatctaattatctttataagatctctcaaaatcaatggcattatactcaagaccagctgcggccggggaagtaaaacagagcaagtgtcagggaggttactgagaagtatggctttcttcctaatagcacaatttttatggaacatggagtctttgaattgttatattctgttaactcttttaaagacccaaacagaatttaaccattttgttcgaaggcatcaattcaactcttatctcagttattttatttttttgcacttttaactcctgaaggacaaaaaacacaggttttgagacacaactctaaatctagctta

SEQ ID NO: 81765 - DNA, 674 bp, Homo sapiens
tcatgtgtcttcaaaaccaaccagaattaagtaattggaaattccacatcaagctgatgctgtttagaattttacccatttccaatcagtcaacacggttctctagagtcacatggctttgccaactgcatgaatgtgtgtcctagaatttgttttgagaagggtaaaaatcctagttctaacacgtcagagttgaaaacagattccaattatatttttcctgttctttctttctctatttcatcctactctgcacagaaattaatgttaatctccttttatgaacaaaaaggattcataaaacccttttatatgtgttgaaaaactcagggcatttacattaaaaaaaaaaaacctcaaaagacagtaagggaactccttcctaatacaagacagatascacagtggttaataacagaatttggagcttgaaagacccatgtttgactctttctctacctacaactatgggatttgtgaacagtgaccctctgagcccatttcttcatctggcagtggcaagatataataagtatttacttgataaggttcttatgagaaacatattgacaccaagcactttgcacatataggtggtcagcaagtgttgctgataatggcaagtgggggaaggaagagatgagcgtgcaaagcagcagaagatatgacaggta

SEQ ID NO: 81766 - DNA, 674 bp, Homo sapiens
tcatgtgtcttcaaaaccaaccagaattaagtaattggaaattccacatcaagctgatgctgtttagaattttacccatttccaatcagtcaacacggttctctagagtcacatggctttgccaactgcatgaatgtgtgtcctagaatttgttttgagaagggtaaaaatcctagttctaacacgtcagagttgaaaacagattccaattatatttttcctgttctttctttctctatttcatcctactctgcacagaaattaatgttaatctccttttatgaacaaaaaggattcataaaacccttttatatgtgttgaaaaactcagggcatttacattaaaaaaaaaaaacctcaaaagacagtaagggaactccttcctaatacaagacagataccacagtggttaataacagaatttggagcttgaaagacccatgtttgactctttctctrcctacaactatgggatttgtgaacagtgaccctctgagcccatttcttcatctggcagtggcaagatataataagtatttacttgataaggttcttatgagaaacatattgacaccaagcactttgcacatataggtggtcagcaagtgttgctgataatggcaagtgggggaaggaagagatgagcgtgcaaagcagcagaagatatgacaggta

SEQ ID NO: 81767 - DNA, 1270 bp, Homo sapiens
tttcttatgtgatttagacattactgtgcaagaaccaaatgaggtggctttttcatgtaatgtttcaacactaagttacttagaaggcaaaagacttgtcaggaagaaataagcctacacgcaaaaaagagagaagttaattgtacctgaaaattctccgtgtgcaactgttatctaatactgcttacaaataaagcaggaacccataacaacaaataaacctatttgtgaaaggtgataaaatagcaaatgagaggcaaaatgagaaggtaaaatgaacttattaactaaaggaattagggattactacgttgtcatcacacgtcatgaagaatacatctcagtccatagtatcttattaaattaaaaaataatgkatcacaaaatattatctacaattaatacaaattgtatttctaccacctgatacaattcctgcagcatagtagcaagtcattaaccatgtgttaaataaatgttaaaaaacaagaaggtgcctgggtgtgtggggctagaaaggaaatatccccatggcacacactaatgataaacactggtaaaattagaaatgatttttcttctttgtgtttttctgcatttttcatgttatctacaatgaacacatattattcaagtaattattataagtacttaaaaaacccactccaggtcgggcacggtggctcacgtctgtaatcccagtactgtgggaggccaaggcgggtggatcacctgaggtcaggagttcgagaccagcctggccaacatggcaaaaccccatctctactaaaagtacaaaaattacccaggagtggtggtgggcacctgtaatcccagctacttgggaggctaagggtggagaattgcttgaacccaggaggcggaggttgcagtgagccaagatcgcgccactgcactccagcctgggtgacaagagcaaaattcgatctcaaaaaaaaaaaaaaaaaaaaaaaagaaaaagaaaaacccactccaacattggcactgggattgaggaacagggcttatttttgacctttgtgttttcgatttatcagcaaaaagagaaaccaaaaacgcccctcttgttttgatgagtatccattcacatgacctcagataaaaaaagggaaatggcctcaacaaaatacccaagtagcatatgtctctccttattgtttttaaacccacattagaggaaaaagacacttaaaaatacaggttgaacagagcaacatcttctaggaagcaactttttcttcaggattcc

SEQ ID NO: 81768 - DNA, 2347 bp, Homo sapiens
aggattattttaytttatgtttaagatggagttttactcttgttgcgtaggctggagtgcaatggcactatctcggctcaccgcaacctctgcctccagggttcaagcaattgtcctgcctcagcctcccaagttgctgagattacaagcgcctgccatcatactcggctaatttcgtatttttagtagagacagggtttctccatgttgatcagacaggtcttgaactcctgacctcaggtgatctgcccaccttggcctcccaaagtgctggaattacagggttcagccaccactccaggccagatccaggattttacacttagtaaactgcagagactgtgctcttatgacacattactacatgctaagagtcacacaacaccttgtccaagagcactctctccacttggctgcatgcatgggcctcccagcctaatgtcttgtccacagggcatcactaccatcactaggcacaagtagtgcatgcaacctacagcagccacccagcctacatcacagcacacatacttctgagcagaagagcagaccttcaagcctagagatgcaacactgttttcccaggaaccgacaggccttgcctcttctcccaagagatttataattaagcctgcgaaaaattaagaaattaatataaaagttgccatgttgccaatgcttttatgatactttaatttactagaaacatgttcacaccacccctggggagtgagtgcaatgcaaaattgcttacattgctcttataagctgaagtaagcgcttccttttcatcttccataatcctattaaaaaaaaaaaaagccagcaagtcggcggaccagaagcagcaaatagataattatatcattctcgatattctcccaccctagctttttcaaagaccaccccccaccaataattctgtactttcctcatttatttacggctaaagaaataatggacaaaactcattggatagacaactgcacatcattctaatgcagttactagtgattccaagtagctctgccatcaccaagaggataaagcgggtgacagagtcagaggatgagtactacccaaggaaagggtagaggcttggtgtgctatccctgctaggaagctgtcaatggaacagctaagagttttggtatctggaaaactgtaactcatgtctcagcatggccactccccagtaatgtgatgttagataacttaccaaaatgctcgagcctcagttcgacacctttccttttttttttttttttttttttttagacagagtctcactcttgtcacccaggctggagcacaatggcatgatgttatctcactgcaacctccacctcctgggttcaagttgttctccctgcctcagcctcccaagtatcttggattacaggcatccgccaccatgcccagctaatttttgtatttttagtagagacagggctccgccatgttggccaggctggtcttgaactcctgacctcaggtgatccacctgcctcgacctcccaaagtgttgggattacaggcatgagccactgcacctggccagttccacatctttcaaaatgagataacagtaaatctacctcttacatttactgtgaatactcaatgtgacaatgtgcaagaaagggctttgctcagctcctggtacaaacaactgttcaactcatggtaactatgatttggaactactaacagggagattccatcaaaaggatgatgaacagagggcgaggccgtctgagactactccaggatccacctcgtcaacgactctcatgaacgaatgagaaggagctcgctgcaatgaaaggacttaagtagacatgactgatgctccaggatcagagccctgactctggaatgatattcagtgttctcactaataaaaccaacaaaagtcaaaatgacatgctggccaacaatgggaatgggtttctgtaaagatcaaaatggaataatgtaggtcaatctttgttacctggaaaagggttttcaaattgaaagcagctacatttctccccgggtacctgatagccaaccacaggaccattctcaggtttctcaaattggatgccagagaatacacaatccaataccataaacatggataactcttcgtatcactaatttggtttagtcattggtgcgggggccacattcttgttatataaaccaacatgagtatatcatgaaaaactacgaaaattttacataaatttgtaaggtaaaacacgagggttcaaagaaattgtattacacactatttggaggcttatttgtattttcatgtgccaataaaaagttctattgtaatacaaagacccatgca

SEQ ID NO: 81769 - DNA, 2347 bp, Homo sapiens
aggattattttattttatgtttaagatggagttttactcttgttgcgtaggctggagtgcaatggcactatctcggctcaccgcaacctctgcctccagggttcaagcaattgtcctgcctcagcctcccaagttgctgagattacaagcgcctgccatcatactcggctaatttcgtatttttagtagagacagggtttctccatgttgatcagacaggtcttgaactcctgacctcaggtgatctgcccaccttggcctcccaaagtgctggaattacagggttcagccaccactccaggccagatccaggattttacacttagtaaactgcagagactgtgctcttatgacacattactasatgctaagagtcacacaacaccttgtccaagagcactctctccacttggctgcatgcatgggcctcccagcctaatgtcttgtccacagggcatcactaccatcactaggcacaagtagtgcatgcaacctacagcagccacccagcctacatcacagcacacatacttctgagcagaagagcagaccttcaagcctagagatgcaacactgttttcccaggaaccgacaggccttgcctcttctcccaagagatttataattaagcctgcgaaaaattaagaaattaatataaaagttgccatgttgccaatgcttttatgatactttaatttactagaaacatgttcacaccacccctggggagtgagtgcaatgcaaaattgcttacattgctcttataagctgaagtaagcgcttccttttcatcttccataatcctattaaaaaaaaaaaaagccagcaagtcggcggaccagaagcagcaaatagataattatatcattctcgatattctcccaccctagctttttcaaagaccaccccccaccaataattctgtactttcctcatttatttacggctaaagaaataatggacaaaactcattggatagacaactgcacatcattctaatgcagttactagtgattccaagtagctctgccatcaccaagaggataaagcgggtgacagagtcagaggatgagtactacccaaggaaagggtagaggcttggtgtgctatccctgctaggaagctgtcaatggaacagctaagagttttggtatctggaaaactgtaactcatgtctcagcatggccactccccagtaatgtgatgttagataacttaccaaaatgctcgagcctcagttcgacacctttccttttttttttttttttttttttttagacagagtctcactcttgtcacccaggctggagcacaatggcatgatgttatctcactgcaacctccacctcctgggttcaagttgttctccctgcctcagcctcccaagtatcttggattacaggcatccgccaccatgcccagctaatttttgtatttttagtagagacagggctccgccatgttggccaggctggtcttgaactcctgacctcaggtgatccacctgcctcgacctcccaaagtgttgggattacaggcatgagccactgcacctggccagttccacatctttcaaaatgagataacagtaaatctacctcttacatttactgtgaatactcaatgtgacaatgtgcaagaaagggctttgctcagctcctggtacaaacaactgttcaactcatggtaactatgatttggaactactaacagggagattccatcaaaaggatgatgaacagagggcgaggccgtctgagactactccaggatccacctcgtcaacgactctcatgaacgaatgagaaggagctcgctgcaatgaaaggacttaagtagacatgactgatgctccaggatcagagccctgactctggaatgatattcagtgttctcactaataaaaccaacaaaagtcaaaatgacatgctggccaacaatgggaatgggtttctgtaaagatcaaaatggaataatgtaggtcaatctttgttacctggaaaagggttttcaaattgaaagcagctacatttctccccgggtacctgatagccaaccacaggaccattctcaggtttctcaaattggatgccagagaatacacaatccaataccataaacatggataactcttcgtatcactaatttggtttagtcattggtgcgggggccacattcttgttatataaaccaacatgagtatatcatgaaaaactacgaaaattttacataaatttgtaaggtaaaacacgagggttcaaagaaattgtattacacactatttggaggcttatttgtattttcatgtgccaataaaaagttctattgtaatacaaagacccatgca

SEQ ID NO: 81770 - DNA, 2347 bp, Homo sapiens
aggattattttattttatgtttaagatggagttttactcttgttgcgtaggctggagtgcaatggcactatctcggctcaccgcaacctctgcctccagggttcaagcaattgtcctgcctcagcctcccaagttgctgagattacaagcgcctgccatcatactcggctaatttcgtatttttagtagagacagggtttctccatgttgatcagacaggtcttgaactcctgacctcaggtgatctgcccaccttggcctcccaaagtgctggaattacagggttcagccaccactccaggccagatccaggattttacacttagtaaactgcagagactgtgctcttatgacacattactacatgctaagagtcacacaacaccttgtscaagagcactctctccacttggctgcatgcatgggcctcccagcctaatgtcttgtccacagggcatcactaccatcactaggcacaagtagtgcatgcaacctacagcagccacccagcctacatcacagcacacatacttctgagcagaagagcagaccttcaagcctagagatgcaacactgttttcccaggaaccgacaggccttgcctcttctcccaagagatttataattaagcctgcgaaaaattaagaaattaatataaaagttgccatgttgccaatgcttttatgatactttaatttactagaaacatgttcacaccacccctggggagtgagtgcaatgcaaaattgcttacattgctcttataagctgaagtaagcgcttccttttcatcttccataatcctattaaaaaaaaaaaaagccagcaagtcggcggaccagaagcagcaaatagataattatatcattctcgatattctcccaccctagctttttcaaagaccaccccccaccaataattctgtactttcctcatttatttacggctaaagaaataatggacaaaactcattggatagacaactgcacatcattctaatgcagttactagtgattccaagtagctctgccatcaccaagaggataaagcgggtgacagagtcagaggatgagtactacccaaggaaagggtagaggcttggtgtgctatccctgctaggaagctgtcaatggaacagctaagagttttggtatctggaaaactgtaactcatgtctcagcatggccactccccagtaatgtgatgttagataacttaccaaaatgctcgagcctcagttcgacacctttccttttttttttttttttttttttttagacagagtctcactcttgtcacccaggctggagcacaatggcatgatgttatctcactgcaacctccacctcctgggttcaagttgttctccctgcctcagcctcccaagtatcttggattacaggcatccgccaccatgcccagctaatttttgtatttttagtagagacagggctccgccatgttggccaggctggtcttgaactcctgacctcaggtgatccacctgcctcgacctcccaaagtgttgggattacaggcatgagccactgcacctggccagttccacatctttcaaaatgagataacagtaaatctacctcttacatttactgtgaatactcaatgtgacaatgtgcaagaaagggctttgctcagctcctggtacaaacaactgttcaactcatggtaactatgatttggaactactaacagggagattccatcaaaaggatgatgaacagagggcgaggccgtctgagactactccaggatccacctcgtcaacgactctcatgaacgaatgagaaggagctcgctgcaatgaaaggacttaagtagacatgactgatgctccaggatcagagccctgactctggaatgatattcagtgttctcactaataaaaccaacaaaagtcaaaatgacatgctggccaacaatgggaatgggtttctgtaaagatcaaaatggaataatgtaggtcaatctttgttacctggaaaagggttttcaaattgaaagcagctacatttctccccgggtacctgatagccaaccacaggaccattctcaggtttctcaaattggatgccagagaatacacaatccaataccataaacatggataactcttcgtatcactaatttggtttagtcattggtgcgggggccacattcttgttatataaaccaacatgagtatatcatgaaaaactacgaaaattttacataaatttgtaaggtaaaacacgagggttcaaagaaattgtattacacactatttggaggcttatttgtattttcatgtgccaataaaaagttctattgtaatacaaagacccatgca

SEQ ID NO: 81771 - DNA, 1405 bp, Homo sapiens
ataaaaatttttataacctctgttagggtaattacactaagaactacctagtagcaccaaacacaataatgtaatctaaaggacaatgatgaatatgtaattacagagtattcatatggtaattaggtagatagtaactgaagaataaatgaatggctaatgtctgccacagaagtaaagtaattttcaagggagatcattattgcacactctctctttttctttctcttttaatgtttcttttcatgtaaccagaaatacaagtaaatatattttcctttaatcttttcacagtaatagactctacataaaaatatgtgcgtgtatgtgcaaatgcacaggtttacaaatatttatggaaagccatatagctatacaatctataactgcatttaacttatttccctaatatttttctatagaaaagtaattgccaaaactatttagctatttactcatatttgcaactgggctattcacattgtaataattagtgaagtgtgaaatttaaagagaagaaaatcaaaataaactaatatcagctaagcagggtatgaagataccatataaggataataagaaactggagagcctttaatggctaatacagaatgrtcatataggagaaactatatgagaattagacattaatattattgcattttatgaatggacacttattgttctacttcactgaattttaatctggcctttaaaaataaattttgtgaaatggttttatattcatcatttaagtatgcatttgataatttaaggctgcattcacacacacaaaccaacaacaaattaaaagtaggatggaattaccatcacaaagactaggtaaatttcacagtgcatatccccaggcattctgtaactgaggagccagtttccgtgcaatttatattccaccttcactgttatatttaattgtgtcccagaggcagtagatcctatgaattctgctgatattatccctgcagagtggtttatggttgcttccatatctgtatgaaatgtagaatttccagagcaaccaacaatataattttataaacttttgatgaatacttatactgggatgagataataaggaaaagaaaaaaaaatggccagaatttgaggtactggaagcctaagtccagtccttcctcggtctaacaatatgacctcacctgagtttcctgattaagttctccaagatatcctttggccatctttgaactgaggcagttacattaaatcatgcccaagattatgtcatgattccttcctcacccaccaatttccaatggtgccctctatctaggtttagcaccttcttttagtaaaatgatgtaaatgataattacgatgttgataaacactcatttttcagtgtctcctacatgccaggcacatg

SEQ ID NO: 81772 - DNA, 1809 bp, Homo sapiens
cacacctgtaatccaggctacttgggaagctgaggcacaagaatcacttgaacccaggaggctgaggttgcagtgagccgagatagcacwgctgcactacagcgtgggtgacacagtgaaaatctgtcccaaaaaaaaaagagaaaagaaaagaaaagaaaattactaggaggtgacagctaggatccagggtagtgggattcttgctaaactgacttaacaagattcttaccaaaggtaagccaagtatatatgcaccaaaggctgagaatgagaaatctgatgagttatcgaggatgatcggatatcaaggatgggaagattcttgctaaagtggcttagcaggattctggctaaaattgcactaagcaggcctaaggtaaaacccaagaatgaggcctagtcttaaaggcagctcagaggagcctggctaaggtctggttaatgagagaacctttattatataaaagatcatatcaagagcccatctgaagttcatttgtctccaaatatcataaataagacttggccattatttaattcaacaatatgcatccactgaccttgctgtaggcactgtgctcaatatagaagaaataaattcaaatataatgccattttgacctgggaactcccactctagtggagagaccaaagtgtaaaataatcatcacaatgtaatacagcatgtgctttaatagagggtgaagaacatattatgaaacacaaggaagaaagggaattgatgttgaacaaaagagaaaaatacaggggtcatggaagtcttcacagcagtctattctttcggtttgggtcttgatggaaaggtaggagtttactgatcagaaaaataaaattgaggaatatctttcaaggaaaaagcaacaacacttacataggttcagaaatacaaaacaaataagatagctcactgggagatgcaagaagaggctggacccagcatggggtgcctgaagaggaatggaaatgagtaaggcaggtagtcacctggatccagattgtgatggacactgtactctaattgcgtccctgggtttgggatgcaataggatcctataggaggaacagaggagtggaagtcagatttacagtttagaaagatttctctgacacaagtggaagagggagactgaagtataaacagaccaaataaaaaagactactttggtggtttctggactctaggagaaaaataataatgagggtttcaaggaaggcaaatgaggttggaaaggaagtgacaaatttagaggggacagattttcattagaaatccaatgttaattataaggtaagacttctgagtgcttatgaagatagtggtagtattaatacatataaagagtatagaaaaatgaaataaaataaaaacgtgtcacctgtggggtatatagagagatttgtttcgaatatgttgaatttaaggtgctcaagtgacctccaagtctagatgtctggaatgcagatctgtgtgtgggtttgtgacgcaggtggaggtagaaggtgagacgggaaattgcaaatcactgtaacagaaacaggagtttgaaccactagagatggagagcgtacacaggaagaacaccgtgtgagaagacaacaaaaatggaacccaggtgcactcatgcataagaaaaaccactgtgtgttcaattaaaaagaaaaggcttatgttatataaccccaactgttcctaagcaggatgaattatgttagtaagaaaagccctgttttgagagtacattgataggtttagataagcaaatatgagatatgcaaatctgctaa

SEQ ID NO: 81773 - DNA, 915 bp, Homo sapiens
aacttacataatcaatggaataatattccagtattttaataaaataaaataattagagatattgaaatgattttttaaaatattcatgtagcagagactggctagaaattagtgaaattactttctgttatagggaacaccaataaatgaaatgtctcatcctgcttgccatattccttatttttttccaatgcaaagttgacraaagtgatgtatcattacctggccaaggcagttaaaaagctcttacttattctatttctcccttctccgttgcttcctgcctggaggcaagaggtccacagagtcatttcagatctcaggtactggtggagccactaaacttagattccattttactagattacagaccactaagaatttagactcattatgtcaccagatgaactattttaactaatgcaatttgtgttctttcttttatataagcatcaattcatttgaaacacctccaattaatttttgtttagtctctgtcctcagaagagaaattcataaaatttatttatatcttaccagtatttgaaatgttctgctaccactggcttcttgcaatacttctatcttctgaattccatactaacagataccttaacctcttcacctacattataggctgcttcctctcagatgtctttgctggtatctcattcttctttaaatgttagagtaccctaaaggtgagtcttcagccttcctcatggtcattagttgtgccctgaatgattactttcaggcccgtggctttgatctacatctcaaatcctcaatatccgcctgagttctaagctatgcacccaagccttaacatctccctttggtcaatatattgtattcttgaaaaatgctgagactggatggtaagtgatcttactacacaaatgataactatgt

SEQ ID NO: 81774 - DNA, 699 bp, Homo sapiens
  misc_feature (1)...(699): n = A,T,C or G
tgtcatggggtcgggggctggggggagggatagcagtaggagaaataactaatgtaaatgacgagttaatgggtgcagcaaaccaacatggcacrtgtttacatatgtaataaacctgcacgttgtgcacatgtaccctagaacttaaagtataataataataataatttgaatttagacatgttgannnnnnnnnnnnnnnnnnnnnnnnnnnnnnnnnnnnnnnnnnnnnnnnnnnnnnnnnnnnnnnnnnnnnnnnnnnnnnnnnnnnnnnnnnnnnnnnnnnngggagaaaatagtcaaaattcctactattttgtgatagttgatacagtcagtctttctgcatatttcaaaaaaaggtttcttgaaacctagtatagctaagaaagtgggagatttcaaagatgattgtagatttcagcttgggaaattgggtttccattgaaattctgaagggagagtaggataagagaagacaaatttcttttcaatatgctgcttgtaatgtttgcacagtactttgtcagagggatatagtcagcagctacctatatgatctacggctctggataaaatctgagctatagacatgaatttgggagtcattagactatgaatgacagttgatgtcacaaaagtagatgagacagcatggcctgccctttattatttaattcacatctatgtctcttccct

SEQ ID NO: 81775 - DNA, 1028 bp, Homo sapiens
catatatgaatgtgtatatgtacatgtatatattatacgtaatatgtgatatataccacgtatgtcacacattctcctgcatatatgtgtagatatatgtatggtgtgtgtgtatgtgtgtgtgtgtgtattggcttacatatcagcaactttctagctgtgtcctcacagtctttccccagtaggtctatattataaactcctcttctttttctgttattttttgtttgtttttggttttggtattttttgggatggtgtcttgctctgttgccgaggctggaatgcaatggtgtgatctcggctcgctgcaacttcggcctcccaggctcaagcgattctcctgccacagcctcccaagcagctgggattacaggtgtccgccaccacatccagctaatttttgtatttttagtagagatggggtttcactatgttggccaggctagtcttgaactcctgamctcatgatccacccacctcggcctctcaaagtgctgggactacaggcatgagccactgcgcctggccaataatctcctcttcttatgaggacaccagtcatactggattaaggcccacctatatgactccattttaccttagttacttctctaaaggccatctccaagcaaaatcacatgctaaggtagtgactaggacttcagcatatgaatttatggaaaaagataattcagcccataacatcagggtaaagagtgacaatatattttccataaaagttgtgaaaagaaaattcttaagtagctcagtaagcatgctatattatctaagtaaacagtgaaacatatgatgtacagtagtgcttttacatatgtgtcattgtgtcagttctgtgcatgccaagatgcagcttatgtaaaatcctaaaagaaagtgtcaaaaatcaatctgagataaatgaaatggcaggaatgaatgtcaaataaaagaaggattaaggtcttccacagcacttgaattagcctatttgtgttccatgcctgagttactccaaattcatttcc

SEQ ID NO: 81776 - DNA, 519 bp, Homo sapiens
tgcctcagcctcccgagtagctgggactgactacaggcacgcaccatcacacctggctaattattgtatttttagtcgagatggggtttcaccatgttggccaggctggtctcaaactcctgacctcaagtgatctgcccacctcagcctcccaaagtgctgggattataggcatgagccaccacacccagccagaatttagttttctaatactgaaagaaaaacttttttttttggtgacttcatatgatagtcttgagatgagcaccccaaggaccttgtaaatagtgggcgctggcactcagaacagcccatgtgagataatgaagcagccttccagacataagatsccagaatcagacacttatccaaggttcccctcctgcaatcagcgggtaggagtttgcaatgaaaacactccatgctatgtcccagagtgactcgttcatttatccgtgaaagcagagtccaaatccatgttcatgttaaatgtgcagaaaaatagcatcttgagagtta

SEQ ID NO: 81777 - DNA, 520 bp, Homo sapiens
cctaaagtcaaggccagtatttctttaagacttacttaaactggaagagtcctaagatttcagtagccacaaaaaattattctctgtgctcccccaagagggacagacacaatgagcaaccttaggatggtcaagggtcatctgttagctcttttagactcagtggagccttcatggggattggcagatggaaccgaaagcaacaaaaaagaccccaaaggaattggcatcttgggaactcagatttcctcaaggactcctccatctgatgatgttggtaatttcagctctacatcatcatttcttttcttttctttttttaaagatggagtctcactcggtygcccaggctggagtgcagtggcgcgatctcggctcactgcaaactccacctcccaggttcaagtgattttcctgcctcctgagtagctgggtctacaggtgtgcacaaccatgcccagctaatttttgtattttttagtagagacagggtttcacctggttagtcaggctggtcttg

SEQ ID NO: 81778 - DNA, 735 bp, Homo sapiens
gcaagttccaaaggcagaggcagacagggtgagcatttgcaaaaatgagcaaattcgctggaaaagaacggatttttatttttggtttgttctcgacgtgtcggagagtcaagacagagggaggaggaatgtgaattaagcaataaaatgtttaccaaggagccctcgaatgactccggcgtgctgccaaagttctgtgatccctgaactgagattgttcgaggacccgtttcttcctcggtggcccccgatggccctgctgagatgcagggatgcggtggcatcgctctgtcattcctcaggcagggtcccttcccagctggtctgagccactcacacctagagggcatgagcacttggacctccaagggcagagggggctcagaggccagcctccacctctctttcgtggacaggatttctgtccaggagcagcagggaatggtactcytatgccaactacacagcccgcggactttggacctagccttcagtatgtgctggcagcacagggttgtcccttgagggagccctggcaggaccctttgttgcactgttggaagctgcaccctccagtcttcactcctttgtcactaacctctaggttctcagagcctggattacagctccagcctctccagagaggagcagttagatatgtggcagtcagtcacactctagtgtaaatgaagccagccgtggtctttcttggtggctgctgcctgaatggaagtg

SEQ ID NO: 81779 - DNA, 1536 bp, Homo sapiens
acaggttcaggacagaattcctagtccctgtgctgggggggcaccaactagctggagacctggggtttcacttcttccctctgagtctcagtttcctcatctgtaaaaggggagagttggtccccatggtctctgggtcctctccagcctagaccacgtgtgattctatgttccacacaatttgcctcatggagctttctagatttgaagctctgctaggacagagagttttgtgtgttctgttctctgctgtatcctagaactgtgcctggcacgtggtctgtgtgtttgctgagcagctgaatgatggctggtgttttaacaggttgaatttgtatagaggccacttgcttttgctctcttctttaaaaaagagaaacttctaaaaagtttctaagaaaaaaacttttcattttttctttttctttttactcctcctcctcctcccttccttcttgtttgttttgtttttgttttttagatactcagacttttcctcactggctgcctccctgtcttccttcccagaccatggactggggctgtcggaggaggccaagtgagagaatcaaagctcaccctcactttcagagctccaggcccggggaggcctgtggctaatgctggatgagctttgacacccagtaggggtgtcctccccgtgtgtttatgtaactctcaccttcacgactgccggaaaggtgactcttatcccatccttacctactttgcagagaacaaaacagacactgactgcttcagtctgtgagatgacagaaatgactcccattgcaaagaaaagtgaaagcgaggctgggcgcggtggctcacacctgtaatctcagcactttgagaggcccaggcgggtggatcccttgaggtcaaaagtttgagaccagcctgcccaatayggcgaaaccccggctctactaaaaaaataaataaataaataatacaaaaattagccggaaatcgcttgaacccaggaggcagaggttgtagtgagccaagatcatgctactgcactctagccttcatgacagagcaagactccgtctcaaaaaaaaaaaaaaaaaaaaaaagtgaaggtgaaatcagagaaaccagtatgccagggcattgaccaacaggctactgttgaaaatgccggcgttatctcagcctaaaatgtacagtatgagccgtgtgtggctagactgtctttgaaatgagtgcccagtcactcgaggacacacttttcagtcctgaaagtcaggagtgccactgcaaacacacaagcagccggcatcaactcaatgatgagacaaccgccttgcagacaatgcaacgcctcgtttcctgggaggggtgtacaggcacgcacctgctgtgtacgtatttcctttgaaaactgtaaagtgctataattaacatgatatgtatcgtcttcctggagctgtgaaacaattcatgacccactgggttttgttgttagtgctttcactgtattttgataagacggtcctgtgtaaagacgctgtatcaacatttgcctgg

SEQ ID NO: 81780 - DNA, 747 bp, Homo sapiens
tctagaagcaaaatttctgaaactgccatgatgccctagaagtaaaatctctggaactgccaggatgttaagaagctctgcttatatagaaagaaaacaaatctgaagaatacgttttcttgagagaaaaaatatcatcaataatcttccactcggccctaaaattctatgattggtgacattaaagaacaacagcaacaaaatcagaaaatattccaggccaggccaccagggcaaatgcttgatctgttcatcgatggagggtctagcttgtctggatgtgaggctggacatgactcatacaactgatttttttttttccgtatcatatgggaagggtgtttaagggaagatcttcactttccaaggctctcttcccacaayatccacgtgaaaagatgtttcaagatgagctctcctcagcagagccagaaccatactggcttcagaccaaaaggaggactcctgtgttgtgtgagatggaatggactcatgttagaaaaattgagaaagatatgaatgtaagatggtgagggttttgttcatttgggaactggactttagagaacaaggaatgtgcctcacccctccatccagtcttttcttgctctggacatctaactcatgtcaacttagacgactgttcaaaaaccaagtgagggagaggatggtggagctcagtccccagatcactgggactctgtccttgagtctggccatgattcaagttaacatgggctgcagagg

SEQ ID NO: 81781 - DNA, 2116 bp, Homo sapiens
ctagggtttgtgatcattgttctcaggaggggttgtttgccaccctagaaggtgcttgcatcaactcacccactgtcaggccctgcccaccttgggggcacctctcttgccctcaatcaactgggcagggggggacactgcttagaagtctgctctctgggtcctccccatgctctctgcagggtcccagggggcaggctgggtgttctgcctaggcagggttgacagcaagtgatgctctccttgtcccctgcctctcaccccaacgccccaaccccatccttacctgccagcagagggtccagcgctgtctcctccatcgccagctcttccatcgctctttcctccatcccactcgcctcccacatgccggcctcgggcttcccagtggcaggtccgaatgccagggccaccccacccggcgacgcagcacctccactgctggaatctcaggtgaggtggcgtggcgggggctggacccaggctgctcccaaattttgcaagtgggatttgcaaaatgagtcagcagggcaagaaggctgaaaaccaggtggcaggtgtgggttaatcattaccccgtagacacttcccctggatgccaatagacccctgagggcagggcctcctccagccacgcccatggtcatgggtgtcccatgatcatttagctgtggacagccagggtcagtgcccaaggatcctctctccctccagggtatggcttcagctttgaaaagccacggttgcaggtggccctgtttcacagcctgcattaaccccctgagcagcgacttccattgcggggccaccctgagtgcctcctttgtttcccaagcagtgtcaggtgcttaacctcctttttttttggatattctcaccaaccctgccctgaggagctgtrtatctccatctcatgaagcagcgtggcagggcctggggaggggcctggggaggggcctggggtagggccccgggaggggctgtgtgtagcagcagagctggttaggagcgaggaagaaaacacgtcagggcaagttctttctttccttggggtctctgtttcctcaacggatacacgggggtcacagctgcacatgctttgcagggctgtcttgaggattaaatgaggtaacgagagtagaatgctgagcatggggtcccagcacacagtaggtgctcaaaaaatgttggctgattttcatgtcatggggttgtgtccagcaggccaggaatcctggcctggtttgcttgctgatggtcagcacgtggccggtactgggtgaatttctgttggatgaatgatgatgcccaaggtctgtgcaggccagaggcttgccccgggtgggtctcacgtccagtgatgtgctcctttaagaagtcacactgggggctgggcgcagtggctcacacctgtaatcccagcactttgagaggccgacgctgggggatcacctgaggtttgagaccagcctgaccaacatggtgaaatcccgtctctaccaaaaatgcaaagttgaccagttgtggtagtgcgtgcctgtaatcccagctactggggaggctgaggtaggaatcacttgaacctgggaggtggaggttgcagtgagtggagatgctgccactgcactccagcctgggtgaaaagagcgaaactccatctcaaaaaaaaaaaaaaaaagtcacactgggtccctggtattattggtcatctgggaaggtacattgcccttctttcgggcggtgggtttaaggcagcagtagctaggtgtggccaaggggctgtgcccttcattgtccccatgggccacttgttctgcctgacagtcaccatcatcacagactcagggatggcagagccctagcagcagtgacggcggtgacagcacggtcaccctgcacacatgctgctcacctggtggggaagctgtgcacatctggtggggccgtgagagaggaggtgggagacccctccaggggctgggggcagctctcagctggaagggtgactgccagggggtagcaggcagaacagctgaggacacatttgctgctggcctccccagaggtccactctgggctcaagaattttattctgcttggctacctcagccactgc

SEQ ID NO: 81782 - DNA, 2116 bp, Homo sapiens
ctagggtttgtgatcattgttctcaggaggggttgtttgccaccctagaaggtgcttgcatcaactcacccactgtcaggccctgcccaccttgggggcacctctcttgccctcaatcaactgggcagggggggacactgcttagaagtctgctctctgggtcctccccatgctctctgcagggtcccagggggcaggctgggtgttctgcctaggcagggttgacagcaagtgatgctctccttgtcccctgcctctcaccccaacgccccaaccccatccttacctgccagcagagggtccagcgctgtctcctccatcgccagctcttccatcgctctttcctccatcccactcgcctcccacatgccggcctcgggcttcccagtggcaggtccgaatgccagggccaccccacccggcgacgcagcacctccactgctggaatctcaggtgaggtggcgtggcgggggctggacccaggctgctcccaaattttgcaagtgggatttgcaaaatgagtcagcagggcaagaaggctgaaaaccaggtggcaggtgtgggttaatcattaccccgtagacacttcccctggatgccaatagacccctgagggcagggcctcctccagccacgcccatggtcatgggtgtcccatgatcatttagctgtggacagccagggtcagtgcccaaggatcctctctccctccagggtatggcttcagctttgaaaagccacggttgcaggtggccctgtttcacagcctgcattaaccccctgagcagcgacttccattgcggggccaccctgagtgcctcctttgtttcccaagcagtgtcaggtgcttaacctcctttttttttggatattctcaccaaccctgccctgaggagctgtatatctccatctcatgaagcagcgtggcagggcctggggaggggcctggggaggggcctggggtagggccccgggaggggctgtgtgtagcagcagagctggttaggagcgaggaagaaaacacgtcagggcaagttctttctttccttggggtctctgtttcctcaacggatacacgggggtcacagctgcacmtgctttgcagggctgtcttgaggattaaatgaggtaacgagagtagaatgctgagcatggggtcccagcacacagtaggtgctcaaaaaatgttggctgattttcatgtcatggggttgtgtccagcaggccaggaatcctggcctggtttgcttgctgatggtcagcacgtggccggtactgggtgaatttctgttggatgaatgatgatgcccaaggtctgtgcaggccagaggcttgccccgggtgggtctcacgtccagtgatgtgctcctttaagaagtcacactgggggctgggcgcagtggctcacacctgtaatcccagcactttgagaggccgacgctgggggatcacctgaggtttgagaccagcctgaccaacatggtgaaatcccgtctctaccaaaaatgcaaagttgaccagttgtggtagtgcgtgcctgtaatcccagctactggggaggctgaggtaggaatcacttgaacctgggaggtggaggttgcagtgagtggagatgctgccactgcactccagcctgggtgaaaagagcgaaactccatctcaaaaaaaaaaaaaaaaagtcacactgggtccctggtattattggtcatctgggaaggtacattgcccttctttcgggcggtgggtttaaggcagcagtagctaggtgtggccaaggggctgtgcccttcattgtccccatgggccacttgttctgcctgacagtcaccatcatcacagactcagggatggcagagccctagcagcagtgacggcggtgacagcacggtcaccctgcacacatgctgctcacctggtggggaagctgtgcacatctggtggggccgtgagagaggaggtgggagacccctccaggggctgggggcagctctcagctggaagggtgactgccagggggtagcaggcagaacagctgaggacacatttgctgctggcctccccagaggtccactctgggctcaagaattttattctgcttggctacctcagccactgc

SEQ ID NO: 81783 - DNA, 2116 bp, Homo sapiens
ctagggtttgtgatcattgttctcaggaggggttgtttgccaccctagaaggtgcttgcatcaactcacccactgtcaggccctgcccaccttgggggcacctctcttgccctcaatcaactgggcagggggggacactgcttagaagtctgctctctgggtcctccccatgctctctgcagggtcccagggggcaggctgggtgttctgcctaggcagggttgacagcaagtgatgctctccttgtcccctgcctctcaccccaacgccccaaccccatccttacctgccagcagagggtccagcgctgtctcctccatcgccagctcttccatcgctctttcctccatcccactcgcctcccacatgccggcctcgggcttcccagtggcaggtccgaatgccagggccaccccacccggcgacgcagcacctccactgctggaatctcaggtgaggtggcgtggcgggggctggacccaggctgctcccaaattttgcaagtgggatttgcaaaatgagtcagcagggcaagaaggctgaaaaccaggtggcaggtgtgggttaatcattaccccgtagacacttcccctggatgccaatagacccctgagggcagggcctcctccagccacgcccatggtcatgggtgtcccatgatcatttagctgtggacagccagggtcagtgcccaaggatcctctctccctccagggtatggcttcagctttgaaaagccacggttgcaggtggccctgtttcacagcctgcattaaccccctgagcagcgacttccattgcggggccaccctgagtgcctcctttgtttcccaagcagtgtcaggtgcttaacctcctttttttttggatattctcaccaaccctgccctgaggagctgtatatctccatctcatgaagcagcgtggcagggcctggggaggggcctggggaggggcctggggtagggccccgggaggggctgtgtgtagcagcagagctggttaggagcgaggaagaaaacacgtcagggcaagttctttctttccttggggtctctgtttcctcaacggatacacgggggtcacagctgcacatgctttgcagggctgtcttgaggattaaatgaggtaacgagagtagaatgctgagcatggggtcccagcacacagtaggtgctcaaaaaatgttggctgattttcatgtcatggggttgtgtccagcaggccaggaatcctggcctggtttgcttgctgatggtcagcacgtggccggtactgggtgaatttctgttggatgaatgatgatgcccaaggtctgtgcaggccagaggcttgccccgggtgggtctcacgtccagtgatgtgctcctttaagaagtcacactgggggctgggcgcagtggctcacacctgtaatcccagcactttgagaggccgacgctgggggatcacctgaggtttgagaccagcctgaccaacatggtgaaatcccgtctctaccaaaaatgcaaagttgaccagttgtggtagtgcgtgcctgtaatcccagctactggggaggctgaggtaggaatcacttgaacctgggaggtggaggttgcagtgagtggagatgctgccactgcactccagcctgggtgaaaagagcgaaactccatctcaaaaaaaaaaaaaaaaagtcacactgggtccctggtattattggtcatctgggaaggtacattgcccttctytcgggcggtgggtttaaggcagcagtagctaggtgtggccaaggggctgtgcccttcattgtccccatgggccacttgttctgcctgacagtcaccatcatcacagactcagggatggcagagccctagcagcagtgacggcggtgacagcacggtcaccctgcacacatgctgctcacctggtggggaagctgtgcacatctggtggggccgtgagagaggaggtgggagacccctccaggggctgggggcagctctcagctggaagggtgactgccagggggtagcaggcagaacagctgaggacacatttgctgctggcctccccagaggtccactctgggctcaagaattttattctgcttggctacctcagccactgc

SEQ ID NO: 81784 - DNA, 1957 bp, Homo sapiens
gcataggagaccttatttgggattattgagttccttggattttatgggcattaaacagtcactctaagcaccatgtcggagctccggtttctgctgcggtaatggcttaggaggctgagctcagaagggaaaggaggtagcagcggatctggtcacagtttggggctgcagtgtggcctgggtgagccacatgacctctctgaactgtctccttctctgcaaggtgctggtgctggtcaccagaggtgcaggacaagataagaggctgtgaaagagagagaggaagtccctggtgctgagcatcttgggaagagtacagagagccaaggcttggggaacactggccatgggccggagctgatgcaggcacttcgcatgctcattcagtcctgacaacagccctattgaacagacaaggaaaccgaggctcggagaggttgggtaacttgcttgagggcacacagcttgggagtgctggagctagagcttgagcgtagatgggtgcctgcacagctggtcctaccaccccccagccactctccaccatttgttagatgcaaagtgcagaggctttgacctgttgctaatagtctccccagcagctctgcaagggaagcttttcagataccttttctgtggggtgggtggcgggggaatataagatggtgcatccactgtggaagacagattggtgcttcctcaataagtcaaacatagagttaccttatgacccagaaattccactcctaggtgtataccccaaagaatcaaagacaggcaggcgtcccgttagatgccttgttagacattcaaaccaaagctgctacatgaatgctcatggcggcaccactcacagcgggcaaaaggtgaaagcaacccaagtgtgcattgatggatggatggagaaacaaaatgtggcccatccacacagtcgggtgttattcagccacaaaaaaggaataatgcactggcatggggcacagcatggatgaacctataagacactgtgcaactcaaagaagccagtcgcaaaagaccatccaatgcatgactccatttatatgacatgcccagaataggcaaatccatagagacagaaggtaggtttgtgtttgtcagaggcagggggagggaaatctgagctgcccctgcaggctggggtgggagccattggaaccagcagcagctgaagggccagggcaccctcccactgccatgctgggctggatgaaggaaggggagcttggggcctggcctgctgggaaagagtggaggggagtgtgcggtcaccccttcctcactgtgatcttaggggccatgcctccttggccatctggtttgggggaaggagtcctgactttggtgccagacccaggtttggctcctccccagccactgtcagctgtgtgcccctgggcctgtaagtgggggactgagaggcccaacacccggaggaggcttctgctcccactgactgggctggcagcctggctcgcatcctgctttcctcactgactagcctcggtttccccatctgtaaaataggggcaataagggcgcctccttcccagggctgctgyacagcagagagaagtttgtgagtgtaaatgtgccaaaaggtggccgggcatccctcggtgaacgccagctgtccctggtccttcctagggccatgatgaaaacaaaggagacagtctgggaaacgtctggggaggaagagaaaggaggccgtggtgctgggcacagaggcgcttctacattcgggtcttccctctgcacaccgctccacccctgagccgttccaggagtcagaggtggcagagctggctgcctccggagtagactgatttgtctcctggtgacagctgtgcctgcaacccttgcccggtcctcagctgtgatgccagcgtccaggaatgcaccatcccacagccttcagtctcttctcaggaagctc

SEQ ID NO: 81785 - DNA, 1957 bp, Homo sapiens
gcataggagaccttatttgggattattgagttccttggattttatgggcattaaacagtcactctaagcaccatgtcggagctccggtttctgctgcggtaatggcttaggaggctgagctcagaagggaaaggaggtagcagcggatctggtcacagtttggggctgcagtgtggcctgggtgagccacatgacctctctgaactgtctccttctctgcaaggtgctggtgctggtcaccagaggtgcaggacaagataagaggctgtgaaagagagagaggaagtccctggtgctgagcatcttgggaagagtacagagagccaaggcttggggaacactggccatgggccggagctgatgcaggcacttcgcatgctcattcagtcctgacaacagccctattgaacagacaaggaaaccgaggctcggagaggttgggtaacttgcttgagggcacacagcttgggagtgctggagctagagcttgagcgtagatgggtgcctgcacagctggtcctaccaccccccagccactctccaccatttgttagatgcaaagtgcagaggctttgacctgttgctaatagtctccccagcagctctgcaagggaagcttttcagataccttttctgtggggtgggtggcgggggaatataagatggtgcatccactgtggaagacagattggtgcttcctcaataagtcaaacatagagttaccttatgacccagaaattccactcctaggtgtataccccaaagaatcaaagacaggcaggcgtcccgttagatgccttgttagacattcaaaccaaagctgctacatgaatgctcatggcggcaccactcacagcgggcaaaaggtgaaagcaacccaagtgtgcattgatggatggatggagaaacaaaatgtggcccatccacacagtcgggtgttattcagccacaaaaaaggaataatgcactggcatggggcacagcatggatgaacctataagacactgtgcaactcaaagaagccagtcgcaaaagaccatccaatgcatgactccatttatatgacatgcccagaataggcaaatccatagagacagaaggtaggtttgtgtttgtcagaggcagggggagggaaatctgagctgcccctgcaggctggggtgggagccattggaaccagcagcagctgaagggccagggcaccctcccactgccatgctgggctggatgaaggaaggggagcttggggcctggcctgctgggaaagagtggaggggagtgtgcggtcaccccttcctcactgtgatcttaggggccatgcctccttggccatctggtttgggggaaggagtcctgactttggtgccagacccaggtttggctcctccccagccactgtcagctgtgtgcccctgggcctgtaagtgggggactgagaggcccaacacccggaggaggcttctgctcccactgactgggctggcagcctggctcgcatcctgctttcctcactgactagcctcggtttccccatctgtaaaataggggcaataagggcgcctccttcccagggctgctgcrcagcagagagaagtttgtgagtgtaaatgtgccaaaaggtggccgggcatccctcggtgaacgccagctgtccctggtccttcctagggccatgatgaaaacaaaggagacagtctgggaaacgtctggggaggaagagaaaggaggccgtggtgctgggcacagaggcgcttctacattcgggtcttccctctgcacaccgctccacccctgagccgttccaggagtcagaggtggcagagctggctgcctccggagtagactgatttgtctcctggtgacagctgtgcctgcaacccttgcccggtcctcagctgtgatgccagcgtccaggaatgcaccatcccacagccttcagtctcttctcaggaagctc

SEQ ID NO: 81786 - DNA, 1957 bp, Homo sapiens
gcataggagaccttatttgggattattgagttccttggattttatgggcattaaacagtcactctaagcaccatgtcggagctccggtttctgctgcggtaatggcttaggaggctgagctcagaagggaaaggaggtagcagcggatctggtcacagtttggggctgcagtgtggcctgggtgagccacatgacctctctgaactgtctccttctctgcaaggtgctggtgctggtcaccagaggtgcaggacaagataagaggctgtgaaagagagagaggaagtccctggtgctgagcatcttgggaagagtacagagagccaaggcttggggaacactggccatgggccggagctgatgcaggcacttcgcatgctcattcagtcctgacaacagccctattgaacagacaaggaaaccgaggctcggagaggttgggtaacttgcttgagggcacacagcttgggagtgctggagctagagcttgagcgtagatgggtgcctgcacagctggtcctaccaccccccagccactctccaccatttgttagatgcaaagtgcagaggctttgacctgttgctaatagtctccccagcagctctgcaagggaagcttttcagataccttttctgtggggtgggtggcgggggaatataagatggtgcatccactgtggaagacagattggtgcttcctcaataagtcaaacatagagttaccttatgacccagaaattccactcctaggtgtataccccaaagaatcaaagacaggcaggcgtcccgttagatgccttgttagacattcaaaccaaagctgctacatgaatgctcatggcggcaccactcacagcgggcaaaaggtgaaagcaacccaagtgtgcattgatggatggatggagaaacaaaatgtggcccatccacacagtcgggtgttattcagccacaaaaaaggaataatgcactggcatggggcacagcatggatgaacctataagacactgtgcaactcaaagaagccagtcgcaaaagaccatccaatgcatgactccatttatatgacatgcccagaataggcaaatccatagagacagaaggtaggtttgtgtttgtcagaggcagggggagggaaatctgagctgcccctgcaggctggggtgggagccattggaaccagcagcagctgaagggccagggcaccctcccactgccatgctgggctggatgaaggaaggggagcttggggcctggcctgctgggaaagagtggaggggagtgtgcggtcaccccttcctcactgtgatcttaggggccatgcctccttggccatctggtttgggggaaggagtcctgactttggtgccagacccaggtttggctcctccccagccactgtcagctgtgtgcccctgggcctgtaagtgggggactgagaggcccaacacccggaggaggcttctgctcccactgactgggctggcagcctggctcgcatcctgctttcctcactgactagcctcggtttccccatctgtaaaataggggcaataagggcgcctccttcccagggctgctgcacagcagagagaagtttgtgagtgtaaatgtgccaaaaggtggccgggcatccctcggtgaacgccagctgtccctggtccttcctagggccatgrtgaaaacaaaggagacagtctgggaaacgtctggggaggaagagaaaggaggccgtggtgctgggcacagaggcgcttctacattcgggtcttccctctgcacaccgctccacccctgagccgttccaggagtcagaggtggcagagctggctgcctccggagtagactgatttgtctcctggtgacagctgtgcctgcaacccttgcccggtcctcagctgtgatgccagcgtccaggaatgcaccatcccacagccttcagtctcttctcaggaagctc

SEQ ID NO: 81787 - DNA, 1741 bp, Homo sapiens
caggaattcttttagtgcctccttgataacagcagccaaggatggttactgaacacagactctgcccagcactgttccagtcatggccccacgctggtgcaggcagtgctggtgacagcccgtgtggcgtgtgcagcctacgtgcagtgccctgcattctatcagaccaccagctccagcttcagatatgactggacgcagaggcacagagagaggaagccgccggcctccggccacttagcaagtgctggccaagcagggctcaggccctggcccctggctctctgaaggacggaccctggtctcgttcgttctgttccctttgtctctgcacctggaatgggggtggtgacgtgcttctctgtctccaggctccttcccctccagaggggccacggcgtgctggcctttgccacccagtcccttgaccaactcccagggccctgtgggtggcagcatccccgccagctccctgctcctgtgtctggcccgagctaggcactcagcatcactggaaaggagctgggctgcctgagcttccttccttgggctcccccggccagaggcagctattgtcccccaccgtgggtgcaccaggttcctgcctcagagcccctccgatgccaaggctgctccccaagatgtagccagaatgccaatctgtctcggggccgtgtgccctctgagctggctccgtggtggcgggacagccctggcggccacagctcatgggaacagatgatttctttgggccaccaagcatcccgcagagaccacacccagcatcccgtggtggctggaattccacactgggtccataggcaagtctgccctgagacagtcagcctggggtgccagccaggggagcgcagctcacagggctgtgtggacacctctcggcatgatgaaaatctgtgtctgccaggatcacccatagacccccccagacctgagctagagacgcccctgccctagccccatgcctcatcggcctggtagagggttgattggcggcccctaagccacagctacctcagaagatggctttattggaaataagggtctgtgcagatataattaaggtaaggatcttgagacgagatcatcctgggttacccaggtgggccctaaatccaatgatgggatccttataagaggcaaaaaaaaaaaaaaaaagagaagacatagaggggaggtgaccgtgtgaccacggaggcaggggctggtgggaggcggccacagcaaaggagcagctggagccccagaagctggaagaggtagagtgggtcctcccctagcgacttcagagggcatgtggcactgccaacccctcgatcttagacttgaggccggcagaactgcgagggataaatgcctgctgttcatactgcctggtctgtgggatttcagtgcagcagctgcggggcactgagggcaccttgcccgcaggctgtccrggctggagctggggctcagagagtggaggcatggccgtgaccaacacacttctccccaagcctccatttccttttccctaccactcaggaggcaacaggacctaccctgtagggtttggggatgactaaacagtcttatcactcagggggctggagcagcacgtacacctggttgatgtggcatccattttcactgacactgtcgtgcaactttataacttgcccagtccctcagcttgtagtggggagctcagcttgtagtggggagctcatctttcaaccca

SEQ ID NO: 81788 - DNA, 312 bp, Homo sapiens
ttcactaaacatgtaaacttttaatcaaattacctaagtacacatggttcaggaaggacataataggaggcagtccagagactgatagacctctcccataggggcaaaacaaaacaaaaaccaccaaacacacatttactctaaaaggaaacataatctacagaaatataactctatgacaatagaaacaacattttatatgttaatgagagctgtctagatcctcaaaatagagcctttgatttgtcttamtaaactcaaaattatcccctctcccaaccaaattgaggggtttctcttcaaacatgaaca

SEQ ID NO: 81789 - DNA, 1159 bp, Homo sapiens
tgcatctatacatatgtatatatatgtgtgtgtgtgtatatatatatatggagagatagatacacacacatatacaaatatacacacatagatacacaaacttgtatgggtgtgtgtgcatgtgtagcgtatgtaataaaaagtcattttaagaatgtaacaaaattatagtttcatgttgtataaagaagcaaatagagactaaatgtgtcttaaatcagtgatgtgctggagccaggttgcaatggcttatgagagctgattattgacaccttttcccaactccatatttatccagagacagcacattggtagcttgaaagcagccaggtgggagcacttacaatgcaacactgcaaatcagggctggctgggatctcttttccctgcggcataccactgcttaaatgtagcaaacatacagctaaatgatagtcctcagagtagagtacaggggttagaagttttcttaacactatgaaggagttaggatctgaagatcgtcagggctgagccacaggcmgaaatcatcaggctgtcactttagcttgtgtatgctgcaaaggagacgggagcagaaaactgttgtctttcaggacaaaagtctagctgcaccacctggttagctgcaaacacaaatcaaataactaaatttacttttctagctccttgcacacgatgtttacacaaggaacctcaatggactcatatattttaaaatgtttattcttgatatatggggttctttctacgcaccacctgcttacattctgcaatgaagttaatgatccttttaaatccaggatagaacagagacctgatacaaatttactcatggtacatttgtttttgtaatgttttctttttaaaaaatgtcatgactatttgcctgagaatgtatttcttacattaagcttattcatagactttaccagaattgtataataaatgctttaaaattcatttcaagtggatttatactcatatctgtgtatatgtaggtcttgtcctcatacgtagcatcagcaacagcagaaagaaaatatattaaaaagctatattttaaattattaaaattttatataatttaagttatccaaattataataactttttctaaatattttcacaccaaaactcttccttagaggtaactata

SEQ ID NO: 81790 - DNA, 977 bp, Homo sapiens
ctctctaatagctgaagatgcagcatgagtccaaagtctaatagcaaccttaaaataaatcacttttacaccatgtaataaggcaaagccattttactaatggatcacaaagagggtatgaacatgacacaaatgttagtctaaattgaatatggtgaacactattacttctgtagacttcactgctaatgcctgtataagctcttcaacagactggattatcagacttttttttaaatgttcaaaatggatgttcttacgtggcttaatktaaattgtagaactgataatgtttgtgtcccaaaagttcatactaaaagatctcttatatttttcttatcttctgtattttcaaaggatatttctgaatagatccttttatttagaagtcgttattgattacaaaataaaaacccagaagacacacacgtataccctaaaaccaattccaaaagcccagacaatgcctggtggagtataaatgacattctttgaaattgcttatgtacacagacatacaagtgcacttagtagatgtaattacagcttttacaacagtctaattaaacagcacatccatcatatatattgtctgtattgctaagaattggataaatcactttgaagcaaagcaagcagtgagttgcttcttcctccccacctgctgttactaactgtaaacaagcagcagccacggggagaaaacaatctttcatatcagaaagtgataaatgatatgatttcctgttctcagtgcttcttggctgagaccaaaaaaaatctatatgtgcactgtaattattgcacattatttacttggaaatgaaatttatcctgtgatgtgaatcaacaccattatttttctatttagacaaaagagaaagataatttttcccaagatgataaagtagtgactatgcagaaggggtgtgcctgacaaacaaactaaattaatttcaaatgataacttccatcaa

SEQ ID NO: 81791 - DNA, 977 bp, Homo sapiens
ctctctaatagctgaagatgcagcatgagtccaaagtctaatagcaaccttaaaataaatcacttttacaccatgtaataaggcaaagccattttactaatggatcacaaagagggtatgaacatgacacaaatgttagtctaaattgaatatggtgaacactattacttctgtagacttcactgctaatgcctgtataagctcttcaacagactggattatcagacttttttttaaatgttcaaaatggatgttcttacgtggcttaatgtaaattgtagaactgataatgtttgtgtcccaaaagttcatactaaaagatctcttatatttttcttatmttctgtattttcaaaggatatttctgaatagatccttttatttagaagtcgttattgattacaaaataaaaacccagaagacacacacgtataccctaaaaccaattccaaaagcccagacaatgcctggtggagtataaatgacattctttgaaattgcttatgtacacagacatacaagtgcacttagtagatgtaattacagcttttacaacagtctaattaaacagcacatccatcatatatattgtctgtattgctaagaattggataaatcactttgaagcaaagcaagcagtgagttgcttcttcctccccacctgctgttactaactgtaaacaagcagcagccacggggagaaaacaatctttcatatcagaaagtgataaatgatatgatttcctgttctcagtgcttcttggctgagaccaaaaaaaatctatatgtgcactgtaattattgcacattatttacttggaaatgaaatttatcctgtgatgtgaatcaacaccattatttttctatttagacaaaagagaaagataatttttcccaagatgataaagtagtgactatgcagaaggggtgtgcctgacaaacaaactaaattaatttcaaatgataacttccatcaa

SEQ ID NO: 81792 - DNA, 1118 bp, Homo sapiens
ctgggaataccatatattgtgggtgaggcaaacaattattaataaataagccagtataatatagcaaagataacataaactcttccaacccacataattcatttattccatttccttaaatgaatacaaatcattataaatcccttcaagtgatgtcttcaacaaaaattgggtgtcataataccaggttgagtgcttcatgttgagtatcctaagtgtccagcagtaaacttgagtttacagtttggtgggcgctatagacagagaaacaggaaagtgtaagccagtatgatatttactgggggatgtgggaacataaattaagtatgtaacccaattttagagcccaggaaagctgcaagagaaggaartaacatctaagctgagatttgaatcccaatatatttgttcaggagaactgggaaaaggaatggtgagaaagagtaagtactaatcaaggaactgaataaaccttaatatgtattccaatcagaataaaggtaggtctgttctctctggttcctaattcaggctgtgctaatgtgcttgatgaaccaacattaaatcactgggtctcagggagactgtgaagagctgcattgcttagaacagatttacctggatttcttgaggttggagagttatttttaccatcacaggcatactgttactcaattctcttctagaacaaacaataacaataacaaaaacgaaaattctaaagagtggattaaaaaattatttaagtaaaagcaactcattcactttttagagagttgcttatcattatgtggtgcatttttattttctataagaaatataagagcaacattattctatcttcaccatccaaccctcatccccacaattccccccaaaattgggaacatccagaataatctacttttaaactgaaatatctgtgcatgcaatagaggttttaagggcaggttctcaaaagaacatacgttccacagttcattctgaggcagtttttggtatttacaagtaggtgctgttcagttacttatgtaaagaactattctcagacagaatctaaaacaccctggggttaatagattgcagatactgtatggaaatcaacaattttgatggtc

SEQ ID NO: 81793 - DNA, 728 bp, Homo sapiens
taaatgtttctttgttaatcgctttcgattactaattcaatctcctaggttataggtctattcagattttctctttcttcttgagccactttggtagtttgtgtctttctagcgattcatccatttcatccagggcacctartttgttgctagacagttgttcacagtatactcctgtaatccttttgtatttctataaagttggtagtaatggctctgctttcatttattattttaataattagtcttccatcttttgctcagtcaatatagtgaaaggcttgatctttcaaagaatctacattttttcattctactgctctccaaccttctgttttattgatttatgctctaattatgctctttattatttctttccttctgctagctttggatttagtcttccacctggatttattttgagagtgatattgatgtaacttcatggaaataatactagatagaaagttagcggatagattctctatctgatgagagtttggggcaagtcgagtaccaggttaccaagttttatttttttctctgacccaaaaaacaatttggcagccggtgagaaactctcacagctctggatgtgagtttaggacactgcatttctaccattcaatttcttactacttttttgcacagggatcatggcacaagttgcagtttccaccctgcccatggaagatgaggagtccatggaagatgaggagtctgttgaa

SEQ ID NO: 81794 - DNA, 728 bp, Homo sapiens
taaatgtttctttgttaatcgctttcgattactaattcaatctcctaggttataggtctattcagattttctctttcttcttgagccactttggtagtttgtgtctttctagcgattcatccatttcatccagggcacctagtttgttgctagacagttgttcacagtatactcctgtaatccttttgtatttctrtaaagttggtagtaatggctctgctttcatttattattttaataattagtcttccatcttttgctcagtcaatatagtgaaaggcttgatctttcaaagaatctacattttttcattctactgctctccaaccttctgttttattgatttatgctctaattatgctctttattatttctttccttctgctagctttggatttagtcttccacctggatttattttgagagtgatattgatgtaacttcatggaaataatactagatagaaagttagcggatagattctctatctgatgagagtttggggcaagtcgagtaccaggttaccaagttttatttttttctctgacccaaaaaacaatttggcagccggtgagaaactctcacagctctggatgtgagtttaggacactgcatttctaccattcaatttcttactacttttttgcacagggatcatggcacaagttgcagtttccaccctgcccatggaagatgaggagtccatggaagatgaggagtctgttgaa

SEQ ID NO: 81795 - DNA, 728 bp, Homo sapiens
taaatgtttctttgttaatcgctttcgattactaattcaatctcctaggttataggtctattcagattttctctttcttcttgagccactttggtagtttgtgtctttctagcgattcatccatttcatccagggcacctagtttgttgctagacagttgttcacagtatactcctgtaatccttttgtatttctataaagttggtagtaatggctctgctttcatttatyattttaataattagtcttccatcttttgctcagtcaatatagtgaaaggcttgatctttcaaagaatctacattttttcattctactgctctccaaccttctgttttattgatttatgctctaattatgctctttattatttctttccttctgctagctttggatttagtcttccacctggatttattttgagagtgatattgatgtaacttcatggaaataatactagatagaaagttagcggatagattctctatctgatgagagtttggggcaagtcgagtaccaggttaccaagttttatttttttctctgacccaaaaaacaatttggcagccggtgagaaactctcacagctctggatgtgagtttaggacactgcatttctaccattcaatttcttactacttttttgcacagggatcatggcacaagttgcagtttccaccctgcccatggaagatgaggagtccatggaagatgaggagtctgttgaa

SEQ ID NO: 81796 - DNA, 728 bp, Homo sapiens
taaatgtttctttgttaatcgctttcgattactaattcaatctcctaggttataggtctattcagattttctctttcttcttgagccactttggtagtttgtgtctttctagcgattcatccatttcatccagggcacctagtttgttgctagacagttgttcacagtatactcctgtaatccttttgtatttctataaagttggtagtaatggctctgctttcatttattattttaataattagtcttccatcttttgctcagtcaatatagtgaaaggcttgatctttcaaagaatctacattttttcattctactgctctccaaccttctgttttattgatttatgctctaattatgctctttattatttctttccttctgctagctttggatttagtcttccacctggatttattttgagagtgatattgatgtaacttcatggaaataatactagatagaaagttagcggatagattctctayctgatgagagtttggggcaagtcgagtaccaggttaccaagttttatttttttctctgacccaaaaaacaatttggcagccggtgagaaactctcacagctctggatgtgagtttaggacactgcatttctaccattcaatttcttactacttttttgcacagggatcatggcacaagttgcagtttccaccctgcccatggaagatgaggagtccatggaagatgaggagtctgttgaa

SEQ ID NO: 81797 - DNA, 728 bp, Homo sapiens
taaatgtttctttgttaatcgctttcgattactaattcaatctcctaggttataggtctattcagattttctctttcttcttgagccactttggtagtttgtgtctttctagcgattcatccatttcatccagggcacctagtttgttgctagacagttgttcacagtatactcctgtaatccttttgtatttctataaagttggtagtaatggctctgctttcatttattattttaataattagtcttccatcttttgctcagtcaatatagtgaaaggcttgatctttcaaagaatctacattttttcattctactgctctccaaccttctgttttattgatttatgctctaattatgctctttattatttctttccttctgctagctttggatttagtcttccacctggatttattttgagagtgatattgatgtaacttcatggaaataatactagatagaaagttagcggatagattctctatctgatgagagtttggkgcaagtcgagtaccaggttaccaagttttatttttttctctgacccaaaaaacaatttggcagccggtgagaaactctcacagctctggatgtgagtttaggacactgcatttctaccattcaatttcttactacttttttgcacagggatcatggcacaagttgcagtttccaccctgcccatggaagatgaggagtccatggaagatgaggagtctgttgaa

SEQ ID NO: 81798 - DNA, 728 bp, Homo sapiens
taaatgtttctttgttaatcgctttcgattactaattcaatctcctaggttataggtctattcagattttctctttcttcttgagccactttggtagtttgtgtctttctagcgattcatccatttcatccagggcacctagtttgttgctagacagttgttcacagtatactcctgtaatccttttgtatttctataaagttggtagtaatggctctgctttcatttattattttaataattagtcttccatcttttgctcagtcaatatagtgaaaggcttgatctttcaaagaatctacattttttcattctactgctctccaaccttctgttttattgatttatgctctaattatgctctttattatttctttccttctgctagctttggatttagtcttccacctggatttattttgagagtgatattgatgtaacttcatggaaataatactagatagaaagttagcggatagattctctatctgatgagagtttggggcaagtcgagtaccaggttaccaagttttatttttttctctgacccaaaaaacaatttggcagccggtgagaaactctcacagctctggatgtgagtttaggacactgcatttctascattcaatttcttactacttttttgcacagggatcatggcacaagttgcagtttccaccctgcccatggaagatgaggagtccatggaagatgaggagtctgttgaa

SEQ ID NO: 81799 - DNA, 1110 bp, Homo sapiens
cccaggatctccagaacaacaattaaaataaataaataaaaaagatggctgggggcagtggctcatgtctgtaatcccagcactttgagaggctgaggtgggtggatcacctgaggtcaggagttcgagaccagtctgactaacatggtaaaacctcatctctactgaatataaaaaattagccgggcatgatggtgcatgcctgtagttccaggtacctgggaggctgaggcaggagaatcatttgaacctgggaggtggaggttgcagtgatccaagattgtgtcattgcactgcagcctggtcaacaagagcaaaactctgtctcaaaaaaaaataagtaaataaaattaaaaataaagatattcactgaacctgttactatgatatatttaagcaagacacggtgaccctaaaaattagagatcattgaagaccaaagtaacaacatgtggtcattatttctcaaattgaagtatataaaatatataaaataartaaatttaattgcatgcttaggtaagaaaatattgataaaaatgattgaatattttatcttatttcataattctaagcagggctttagcacaatatgaaaactagattattcatgtaatccaaataaaagacaatttttattctaattttaactcagaaattattttgcttatttaacaattttactgaaaggtaaatgagataaataggacagattataattacctaacattgctatggtaacttatgtacaaatagctgttcgtcaccgaaagtcaaaaaagtaaccagcgctgcaacttaagatggatcatacaacagaaattagtaccaagttaccttatcttataatatgttattaaaatgaaattttaaaacaacaccaaaaattaagttggggctatacaaagtgtgcagaaaagatttcatataacaggcaagagactgccatccttagaaaggcctgcatgcaaggctggcccttggctggtgtttaggaaattggaattgggagggtttccaccattccctgagaagagtggctcactgtgtctaaagtttttatagaaaccgccaatgggtgaaatctaaagcagcagctggtgtatccat

SEQ ID NO: 81800 - DNA, 826 bp, Homo sapiens
ctccactagaatgttagttccatggcaatagaaaacgtatgtttcttctcacctgcatatccagtgggtgaagagtatatgaaaagagggagcactcaaaaagtgttgaatgaagctgggcacagtgatagctcatgcctggaatcccagcactttggcaggccaaggcaggagggttgcttgaagccagtttgagacccagcctgggcagcataatgagaccccatctttgcaaagaaattaaagtatttgttgaatgaggctggcatggtggctcacacctgtaatctcgttactttaggaggccaaggtggcaggtggatcacttgaggccaggagttcgagaccagcctggccagcatagtgaaaccccatctctactaaaaatacacaaaattagctgggggtagtggcacacacctgtaatcccagctactcaggagactgaggcatgagaattgcttgaaccagggaggtggaggttgcagtgagtggagatcacaccagtgcactccagcctgggtgacagagcaggactctgtctcaattaaaaaaaaaaaaagtttgttgaatgaatcagtgaatgaacaaacacacccagaggcagattgatttactctcctcgaattactcacttcagtcctttatagccacggattattatttacttattttgagtagtgggggtggggacattgacttcagagcctctaacagctggtgtccctgtccatygcactggcacagctcctggctggtgtgcagccccttctccctgtttctactcatcccacatctcccatgaactagctagcacctgtaggaa

SEQ ID NO: 81801 - DNA, 970 bp, Homo sapiens
ggatcctcccacctcagcatcccaaagtgctgggattgcaggcctgagccactgcttctgcaggcctgacatatttttgaaggaggtctttggcttctgtgtggagaatacactagcaagggcaaaarcaaaagcccaagagcagggaagtggctgccacggtaattccagcctccaggagacagagcttgggcagagcagtggctgtggtgaccttccaagttgagttgccagcttcagcctgcttttggacttgaaaggatgtgcagaatcgaagatggccctggcgatgtggtgacagcaacccgtggatcacttggaggatgagcaggtttagggacagaagcagaaattgatgtgtatggtttagacacactgctgacctgggctgcgtggctttgggccgtggttagggtattgtaacctaataggactcattctggatgactttctagagacaagctctggttttcatatcctgaatgctcctgttctgttaggataatacactcaattgcaaaatgaaatgtccttttaaactatttctgatgatatttaagaagaaaatgattactgaaattcggtgtgagtcaaagaagtgttgtttaacgagtttcattaacactcctgattgagacctttaaaccaaatgtcagatgatcctcatgtttgaaacactggaaacaggaatttataatggggacattaaaagaatttagttctgcaaatgggattacagtgataccttttctgttaaaagttaattgagtttaaatgaaggcaatttggcggaagttaaaaaatcaaatgggtggtggggctgggggagccagtggataacccgagacaaatgaatcccttaggaatagggacagcttggaaaattatgtagacatagggaaattggctaagtgttcccatatttaattaggtcataagtcgttcattggcagggacatttctgcacatg

SEQ ID NO: 81802 - DNA, 970 bp, Homo sapiens
ggatcctcccacctcagcatcccaaagtgctgggattgcaggcctgagccactgcttctgcaggcctgacatatttttgaaggaggtctttggcttctgtgtggagaatacactagcaagggcaaaagcaaaagcccaagagcagggaagyggctgccacggtaattccagcctccaggagacagagcttgggcagagcagtggctgtggtgaccttccaagttgagttgccagcttcagcctgcttttggacttgaaaggatgtgcagaatcgaagatggccctggcgatgtggtgacagcaacccgtggatcacttggaggatgagcaggtttagggacagaagcagaaattgatgtgtatggtttagacacactgctgacctgggctgcgtggctttgggccgtggttagggtattgtaacctaataggactcattctggatgactttctagagacaagctctggttttcatatcctgaatgctcctgttctgttaggataatacactcaattgcaaaatgaaatgtccttttaaactatttctgatgatatttaagaagaaaatgattactgaaattcggtgtgagtcaaagaagtgttgtttaacgagtttcattaacactcctgattgagacctttaaaccaaatgtcagatgatcctcatgtttgaaacactggaaacaggaatttataatggggacattaaaagaatttagttctgcaaatgggattacagtgataccttttctgttaaaagttaattgagtttaaatgaaggcaatttggcggaagttaaaaaatcaaatgggtggtggggctgggggagccagtggataacccgagacaaatgaatcccttaggaatagggacagcttggaaaattatgtagacatagggaaattggctaagtgttcccatatttaattaggtcataagtcgttcattggcagggacatttctgcacatg

SEQ ID NO: 81803 - DNA, 536 bp, Homo sapiens
tgcaacctccgcctaccgagttgaagcgactctcctgccttagcctcccaagtagctgggactacaggcacccaccaccatgcccggctaatttttgtatttttaatacagacagggtttcacyatgttggccaggctggtcttgaactcctgacctcaggtgatccacctgcctcggcctcccaaagtgttgggattacaggcgtgagccacctcgcccggccaccatttattttctaataggcacggcaactaaaagtaagccatcagaatccatccctttttaataggaaggggctctttggagatctgtctcaataaactggatttacaatcacagagcaattgttgtaccacttaacattctacaatgcagtttagctaatttttttgtttgtatgcttgttttgggtctttttgccaacaagagtgctacattctgaatatgagaataacaaacacagacttctcagacttgttttttcatttctaagctggtaaaccagaagtaaggttttcattcagaacccacacaa

SEQ ID NO: 81804 - DNA, 536 bp, Homo sapiens
tgcaacctccgcctaccgagttgaagcgactctcctgccttagcctcccaagtagctgggactacaggcacccaccaccatgcccggctaatttttgtatttttaatacagacagggtttcaccatgttggccaggctggtcttgaactcctgacctcaggtgatccacctgcctcrgcctcccaaagtgttgggattacaggcgtgagccacctcgcccggccaccatttattttctaataggcacggcaactaaaagtaagccatcagaatccatccctttttaataggaaggggctctttggagatctgtctcaataaactggatttacaatcacagagcaattgttgtaccacttaacattctacaatgcagtttagctaatttttttgtttgtatgcttgttttgggtctttttgccaacaagagtgctacattctgaatatgagaataacaaacacagacttctcagacttgttttttcatttctaagctggtaaaccagaagtaaggttttcattcagaacccacacaa

SEQ ID NO: 81805 - DNA, 536 bp, Homo sapiens
tgcaacctccgcctaccgagttgaagcgactctcctgccttagcctcccaagtagctgggactacaggcacccaccaccatgcccggctaatttttgtatttttaatacagacagggtttcaccatgttggccaggctggtcttgaactcctgacctcaggtgatccacctgcctcggcctcccaaagtgttgggattacaggcgtgagccacctcgcccggccaccatttattttctaataggcacggcaactaaaagtaagccatcagaatccatccctttttaataggaaggrgctctttggagatctgtctcaataaactggatttacaatcacagagcaattgttgtaccacttaacattctacaatgcagtttagctaatttttttgtttgtatgcttgttttgggtctttttgccaacaagagtgctacattctgaatatgagaataacaaacacagacttctcagacttgttttttcatttctaagctggtaaaccagaagtaaggttttcattcagaacccacacaa

SEQ ID NO: 81806 - DNA, 591 bp, Homo sapiens
agtagctgggattacaggcacccaccaccatgcttggccaattttttgtatttttagtagagatgggatttcatcatgttggccagactggtctcgaactcttgacctcaggtgatccgcccacctcggcctctcaaagttctgggattacaggcatgagtcaccacgctcagccttattttaacttttatttcatgactagatatacagaagcctattaggaagcttactttttataaaattaggtaaattttttttttttaatttatttttttattgataattcttgggtgtttctcacagagggggatttggcagggtcatgggacagtagtggagggaaggtcagcagataaacaagtgaacaaaggtctctggttttcctaggcagaggaccctgcggccttccgcagtgtttgtgtccctgattacttgagattagggagtggtgatgactcttaacgagcatgctgccttcaagcatctgtttaacaaagcacatctggcaccgcccttaatccatttaaccctgagtggacacagcacatgtttcagagagcacagggttgggggtaaggtsacagatcaaca

SEQ ID NO: 81807 - DNA, 623 bp, Homo sapiens
  misc_feature (1)...(623): n = A,T,C or G
agagaataagacacatgaaattaatggtgctcccacttttaggaatccatgccaaaataaaggcacggggtagcttggccctgaagactttcctatcatttccttaaacatytaacagcaatgacgttataaaagttatagcatgaatatgttattgctttgactataaaagtctcttacttaatgttacaattgtgtgcctgagaaaagatctccctatttattgtcctgatgtctttctgtaggaagaaaaattatatgcctttaaaaaagaggcaaaggtaaaagttgttggatgaaaattaaaataaccacattaaaaaaaaaacacctcaacagaagcatgtcatttacttttggtaaaaaacaaatacatataataaaaacaaatgtgttccaactgtaggggaaaagtttaagatttcttaaaatgtatttaaaaatatgtaatacatatatgttatatgctactaatgttattttttgtgtccttttattttattttgagatggagtttcgctcnnnnnnnnnnnnnnnnnnnnnnnnnnnnnnnnnnnnnnnnnnnnnnnnnnnnnnnnnnnnnnnnnnnnnnnnnnnnnnnnnnnnnnnnnnnnnnnnnnnna

SEQ ID NO: 81808 - DNA, 659 bp, Homo sapiens
acccacctcagcctcccaaagtgctgggattgcaggcatgagccaccatgcctggccttaggaaattcctttctatgtaacaccctgcatcattaatagccagcttttttgaaacttctacrttaaattgtctaaactctcaaataaattcctagtaaagtaattatatagggttgttaaatcagagatcaacagcacaatgactaatgcatactcatgatttcatctcactagacaaatgtactgaggctggagcctgtgtgaacagaacagaagaggccttcactctagtagtgctcacagtccagcaggtaagacagacttgaagcaagggacaccagagctctgatcagtgtgaaatagggagctaggagaacgtttagctttgggactcaactgagctgaagaatccagggaagcctgcctgaagaggtgatgtttgcgcatttgaagtatggatgggaagcaagcctctgtgtgtgtgttggaggataggtggtattttagtgagaaaaaagaacatttgtaatggactgatctgatgctttactggagaaagtttattatggctgaatagtgaaatacaagagctatagatggcaggaggtgagcttggagggaaaagcagcagtcaattaaattgcagttacaggttgagt

SEQ ID NO: 81809 - DNA, 1244 bp, Homo sapiens
tgataattgagagaagtgtgttaacgtttcccactgcaattatagacgtgctgtttcttcctatagttctatcaagttttgctttatatgtttttagcttatttcattagacgcatataagttatacattattttgctttctggtgaattgattcttttattcttttttgattactgggtttactctaataatgcttcaagacttgactcttctgtttgatgtaataaccagccttttattgattatttgcctggtttatattttttcaaccatttcttcttaatcttccagccattcttttgttttaggcatgttgcttataaaaagtattttattacttttaaaaatattcagtctggtttttttgaagagcaaggtgagtcactttatagtaattgttattactgatgtttttagatttacttcaattatctaacttaatttttttcttgctccttttatccttcttttgtcttgctttctttgaaaggggagtagattgagtttggtatatttttaattttgtcttattccatactttccgtgtataatagtttggaagttattgatctattttcctctttgagcaactacctttgaaatgtcactgtgacgatttaacagaatctaaagttgattaatatcttaattatctctttatctgtayatgaaccttagagcataaagctcctatctataggccaggcatggtggctcatgcctgtaatcccagcactttgggaggccgaggcaggtggattacttgaggtcaggagtttgagaccagcctggccaacatggtgaaaccctgtgtctactaaaaatacaaaaattagccaggcatggtggcacgtgcctgtaatcccagctactccggaggctgaggcagaagaatcccttgatcctgagaggcggaggttgcagtgagctgagatcgtggcactgcactccaaagtgagtctctgtctcaaaacaaagcaaaacaaaacagaacaaacaaaaaaattcctatcatctcctcccccctcgttcacatgccattgatgtctagtactctagctctcttctttctttttttaacccccacgtgagacatttttatttaacactgctaatatttgtttttatttacttcaatgttcttttggtcataattcctttaagtatcccaggcttttattctagatactttttctgaacttcctactgaaacaaatacatattttagaatttccttaatgaa

SEQ ID NO: 81810 - DNA, 1244 bp, Homo sapiens
tgataattgagagaagtgtgttaacgtttcccactgcaattatagacgtgctgtttcttcctatagttctatcaagttttgctttatatgtttttagcttatttcattagacgcatataagttatacattattttgctttctggtgaattgattcttttattcttttttgattactgggtttactctaataatgcttcaagacttgactcttctgtttgatgtaataaccagccttttattgattatttgcctggtttatattttttcaaccatttcttcttaatcttccagccattcttttgttttaggcatgttgcttataaaaagtattttattacttttaaaaatattcagtctggtttttttgaagagcaaggtgagtcactttatagtaattgttattactgatgtttttagatttacttcaattatctaacttaatttttttcttgctccttttatccttcttttgtcttgctttctttgaaaggggagtagattgagtttggtatatttttaattttgtcttattccatactttccgtgtataatagtttggaagttattgatctattttcctctttgagcaactacctttgaaatgtcactgtgacgatttaacagaatctaaagttgattaatatcttaattatctctttatctgtatatgaaccttagagcataaagctcctatctataggccaggcayggtggctcatgcctgtaatcccagcactttgggaggccgaggcaggtggattacttgaggtcaggagtttgagaccagcctggccaacatggtgaaaccctgtgtctactaaaaatacaaaaattagccaggcatggtggcacgtgcctgtaatcccagctactccggaggctgaggcagaagaatcccttgatcctgagaggcggaggttgcagtgagctgagatcgtggcactgcactccaaagtgagtctctgtctcaaaacaaagcaaaacaaaacagaacaaacaaaaaaattcctatcatctcctcccccctcgttcacatgccattgatgtctagtactctagctctcttctttctttttttaacccccacgtgagacatttttatttaacactgctaatatttgtttttatttacttcaatgttcttttggtcataattcctttaagtatcccaggcttttattctagatactttttctgaacttcctactgaaacaaatacatattttagaatttccttaatgaa

SEQ ID NO: 81811 - DNA, 631 bp, Homo sapiens
atctttatcgataaaggagcatctgtttcggtctttcagatcatactattagctccaaaattttttaacttccaaaattaaatacatattagtcagagaaatggtccttacttaagtcaaattgaaaaaatgaataaacgaggcacagtggctcacgcctgtaatcccaacactttgggaaggtaaggaaggagaatttcttgagcccaggagttcaagaccagtctgggcaacatggtgaaactccgcctctgcaagaaatacagatatacaaaaattacccaggcatggtggtacatkcctgtagtcccagctattcgaaaggctgaggtgagagagttgctggaacctgggagtttgaggctacagtgagccatgatcatgctgctgcactacatcctgggtgacagaaaaaaaaaaaaagaaaaaaaaaaaagaaaaatgtgtaacttcactcaaatagactcttttagaatgtgtttttttgtgtgtgttcattttgtttgcaaaccccatgcagcttcccgttttgccttggttactaagaagttctgagaaaaatttgatcaagtttgaagtaacaaaaatatttaataaattctaatttgtttctcatctgcatttattgtgt

SEQ ID NO: 81812 - DNA, 2610 bp, Homo sapiens
  misc_feature (1)...(2610): n = A,T,C or G
ttattctgttgcaattcagacaacagaattagaatcagggattgacagctaaagactggggcaggtttgagattaatatagagagaagttccaatcagaatgtctgtagaacaaaagcacgggcgtgaaggggagatgggggttatgtgaaaacaggcctgcatcccaggggcaggcccacagcgccaggtgatgggagtagacattcacaaaatcctctttccagcatgtcttcatgccaaaggagcaanggtgatgcccccaaatcttggcatttgaggtgtcccttattcrcagttaactgtccactacacaatgtattgctttctaaaggaaacatttacccaagaggaaaggccagttttactaaggaaagcgccattgtgagaaccagaccttcccgtgacggatgatggatgtgcgtttgattggccggtagtgcctgctgctatgcagattcggcttctccactccaccaggagagggaaggaaaacacttccctccacgccacattgcagatcaagacaaagttcactcctaattgcagcgggactgacctggtgcaggatgggctgggggaattaacggaaacaaaccgaaggatgactctggcagcacactgatgaagaaaccaagaggaaatgaagccagcaagggcgcccacaagtttatttcagagtcgacagagcatggacctaactgagcagagcttctgatttatgaagtatttttattatattacctattttatattatattggcggctctgctctttgagacagaaaaataaacagcagccctgcaagagcctttggtctagagagaagaatataaacacaaccttcctgctctgaatggagattcctgccaaacgttgtttcggggttttcaggcttctgagattggcctttgtgtttaggaaggcgaggttcacacgaaatataaacggtcctattctctaagttttgaaaaggcgaagagcttaaggtttgtttgataaaaccaatagaaatgcaccattgcccactgctataggaaatgtgtgtttcctattttgtctgtgcaatggctaaatagccctgcgttggcacagccaattccacaagtgggcaggattctatcggccaatatgatcctgagcctccccgccctttgccattctttgaggagctagagcctgacagaggtgctgaggaggcagctctgcctcccataatgcatgtgtgttttcttttctcaaagaaacaattcttccactagagcagatgccagttccaacagagagctcgccgggggcctttctggctcctgcaggctgaactgagtcattgttcacagtgagttagtaaggttttatgctaaacatgtgttatcagcttccagcatgcccctccctcagtgtgtacctggaagcattcctgcctgctctcccgcatgggcaccctagtgacgaggagaggcacacagggaccctatggcaaagatgaagtagcaaggagtttcatcggcatacacaggcacatgctctctactcttcagactcatctataaacaaagtgctatttatcttccatgaaacaaattaaaagctcaaagtcagaatgtctgcagccttgtatggagtgagtacatttcacactcaacattcgttacagtctgggaccaaggatttcactgcgttttcctagtgcagtgctagccccaaacctgttccctgtaaaagcttgtgaatgatgaaggaaagaacaaacaagtgaataaaggaaggcctcacagatacaactggatcatgatccagctcttatcaaaaccaaagcatgtaccaaactaaccaagctccagttcccatccccagacatgggtcacagtgaggcttgccctgtattgtatgccagaatcataaattaggattcctagcagatgagaatgtacaggatcagcactgccacagggatgaagtggagagcagtgggtttctcagaggctacagaactgctgatgcagaagcctagggacattttccacacccctcggagaaacgggctggctggcctcaattcccccaagaccattttaattgtagtgaaaaatgcgtaaaataaaatggaccatcttaatttaacccttttacagtttacagttctgtggcgttaaatacattcacattgttgtgcaaccatccccaccatccatctccagaactcctttcatcttgcaaaactgaaattatccccattagacaacagctcctgattcctcctcccgcagcccctggaaacaccattcttttgtttctatgaatttgacttccctaagaacctcacagaagtggaatcatgcagcacttgtccttcagtgactggcttatttcactgagcatgatgtcctcctgatccacccatgtggtgtgaatctgccattgtttttgtgcaggatggaatcagagcctcgtgcacatcccaagaggagccactgccaccccaggacctccatccctcccagcatcctggtcctcacactggaaggaagcccaactcactttttttggatggctcaatggggcttcattacactgtaagctaaactatgcttacaaaaatgggatcttg

SEQ ID NO: 81813 - DNA, 543 bp, Homo sapiens
agcgctttgctcccctctgcaaagcagatcctgggcccgggcagaggatgctgcagggagaagccctgggatggactgggaggaccagagcccgagaggcgggatggactgggagggccagagcccgagaggcaggagccctggcctgggtccctgcctgtgcctgtctctcaccagatgyatcactggcacccgggtcccccgtttgacccagtgtcctcacctgaccaacaaggtgaacaactgctctgagtcatggagagaacatgtcaacagtgaaatccctgaggatgggaatagggatggacaaggctaaatcaaggggtccctgggctgagctcttcctgggagtcaggcacattggagtcataggagtagatggctcacctaacacagaccacaacatcctttccttggctacagtgaagaccccaaaatgtgggtccacctcttcattgacgtgtcttttgtttcctacatatttcctttattcgtatctttgaagacttacctggtgcattggggaggttgggatgcagattt

SEQ ID NO: 81814 - DNA, 543 bp, Homo sapiens
agcgctttgctcccctctgcaaagcagatcctgggcccgggcagaggatgctgcagggagaagccctgggatggactgggaggaccagagcccgagaggcgggatggactgggagggccagagcccgagaggcaggagccctggcctgggtccctgcctgtgcctgtctctcaccagatgcatcactggcacccgggtcccccgtttgacccagtgtcctcacctgaccaacaaggtgaacaactgctctgagtcatggagagaacatgtcaacagtgaaatccctgaggatgggaatagggatggacaaggctaaatcaaggggtccctgggctgagctcttcctgggagtcaggcacattggagtcataggagtagatggctcacctaacacagaccacaacatcctttccttggctacagtgaagaccccaaaatgtgggyccacctcttcattgacgtgtcttttgtttcctacatatttcctttattcgtatctttgaagacttacctggtgcattggggaggttgggatgcagattt

SEQ ID NO: 81815 - DNA, 543 bp, Homo sapiens
agcgctttgctcccctctgcaaagcagatcctgggcccgggcagaggatgctgcagggagaagccctgggatggactgggaggaccagagcccgagaggcgggatggactgggagggccagagcccgagaggcaggagccctggcctgggtccctgcctgtgcctgtctctcaccagatgcatcactggcacccgggtcccccgtttgacccagtgtcctcacctgaccaacaaggtgaacaactgctctgagtcatggagagaacatgtcaacagtgaaatccctgaggatgggaatagggatggacaaggctaaatcaaggggtccctgggctgagctcttcctgggagtcaggcacattggagtcataggagtagatggctcacctaacacagaccacaacatcctttccttggctacagtgaagaccccaaaatgtgggtccacctcttcattgacgtgtcttttgtttcctacatatttcctttattcktatctttgaagacttacctggtgcattggggaggttgggatgcagattt

SEQ ID NO: 81816 - DNA, 1361 bp, Homo sapiens
agggtccatggtaatgaaggggaaggagaagagtccgaatcagacctgggcagtaatcttggagacaccactcactggccaaatgggacctcaggaggttcccattctttgtttgcagagtagggggttaccaagatattgcagaaaagcgtttaatgctgtacccagcacctaccattcagtcacctctgcctactggtatttgacaacttaactctggcttgctccatctgaggagacaaaatgactctggatggatgcttcctttttgaaaagaaagaaggaaaaatacccaccccagagtactgtttagaatagggaagccttctttgggtgagcagcctccctccccgctgggtgcagctgtgagggacccgaatcctccaaccacaagtgcacttgctatgcagcgagagcgaggttcaccgagtcacgtgagcggaggcggcaaaagctgcacaaacacatggggcgggaacaggcacaaggaggtgatgccggccccaggaggtccccgaggctggctgggacacggatctcttggaacgctgcagagagaaggactatgtaaataagagatcaaaacccagcctcgccgggccttcggtgtgatgaatgtttgtcctgaatgtgcaacagaagtcagaccaccaccatcttttgtagtctgagctttcagaggaccctagggaaaattcactggtgtgggatctgggggatcctttcagatggcttgtctccacggtgactggacccaccttccaagggcagacagccccctgcattttcaaagctcagcctgcttgcatgacccctcccgagaaaggggccagggagcacactgcttagagctttcatcatccaaggcggcgcacggtcccctcccccacggcgtgggaatgagcccgctgcctcctccaaattagcctatcatcccaggaccaccgacgaccttgtctgccagctcagccaagggaagtttaatgggaaggaaaacagcgtggccaggtgtgcccaaggttataaaacccaaataagtgtcagcagctcctcctccttgtttgctacccatcaggaggccacytctctttggcagttcctgattcagcccctccctgccttatcaagagcatcttcccttaaaggagaaaacacagaacagaaaacgtcctctattaaatgtccaaaaatgtgtggcttctctgtcttgccttagtgtgaaaatgacaggctgttatgactcaagcagtctccctgaatggacagacagacaaatagacacacaaacaagtggacagtcggtcagccagtggataatctattgatgaaaagatcccctgctggttgaaatggtcctcttg

SEQ ID NO: 81817 - DNA, 1361 bp, Homo sapiens
agggtccatggtaatgaaggggaaggagaagagtccgaatcagacctgggcagtaatcttggagacaccactcactggccaaatgggacctcaggaggttcccattctttgtttgcagagtagggggttaccaagatattgcagaaaagcgtttaatgctgtacccagcacctaccattcagtcacctctgcctactggtatttgacaacttaactctggcttgctccatctgaggagacaaaatgactctggatggatgcttcctttttgaaaagaaagaaggaaaaatacccaccccagagtactgtttagaatagggaagccttctttgggtgagcagcctccctccccgctgggtgcagctgtgagggacccgaatcctccaaccacaagtgcacttgctatgcagcgagagcgaggttcaccgagtcacgtgagcggaggcggcaaaagctgcacaaacacatggggcgggaacaggcacaaggaggtgatgccggccccaggaggtccccgaggctggctgggacacggatctcttggaacgctgcagagagaaggactatgtaaataagagatcaaaacccagcctcgccgggccttcggtgtgatgaatgtttgtcctgaatgtgcaacagaagtcagaccaccaccatcttttgtagtctgagctttcagaggaccctagggaaaattcactggtgtgggatctgggggatcctttcagatggcttgtctccacggtgactggacccaccttccaagggcagacagccccctgcattttcaaagctcagcctgcttgcatgacccctcccgagaaaggggccagggagcacactgcttagagctttcatcatccaaggcggcgcacggtcccctcccccacggcgtgggaatgagcccgctgcctcctccaaattagcctatcatcccaggaccaccgacgaccttgtctgccagctcagccaagggaagtttaatgggaaggaaaacagcgtggccaggtgtgcccaaggttataaaacccaaataagtgtcagcagctcctcctccttgtttgctacccatcaggaggccacttctctttggcagttcctgattcagcccctccctgccttatcaagagcatcttcccttaaaggagaaaacacagaacagaaaacgtcctctattaaatgtccaaaaatgtgtggcttctctgtcttgccttagtgtgaaamtgacaggctgttatgactcaagcagtctccctgaatggacagacagacaaatagacacacaaacaagtggacagtcggtcagccagtggataatctattgatgaaaagatcccctgctggttgaaatggtcctcttg

SEQ ID NO: 81818 - DNA, 1687 bp, Homo sapiens
attattgtcacgtctctcaaaacaaagcccccctactaccttgctgtgcttgagtgatgtttcaggagggcatgggatttcattgtgtgtgaccaatccattaacccaaatccagcatgcttttctatagtttctacattycctttgattagcatatattattattattttttaagagacagggtctcactctgttgcccaggctgcagtgcagtggtgtcaccatagttcaccacagtcttgaactcctgggctcaagcggtcctcccacctcaacctcccaagtagcagcgactaaaggcgtgcaccaccattcctggctaatttttaatttttttgtaggacaggatgtcactatgtggcccagactggtcttgaattcctaaagtgatcatcttgcctcagcctcccaaagtgttgagattataggcatcagtcactgtgcctggccacattatttttataatcagaaaagaaaaagcaatgagagggagacagatagagattttggaggtggactggaaagaccctggatcctgcctgcaagcaggagcgacagccaggcaggaattgacaagactcagagagatgggagatgaggtgccattagcagagatgtggagtcagattccagaaacaggccagggggtgatcagccagagtggaagttgctctgctcttgggggaagggatttgtcttcaagccatgaacacagggcacgtggggaaagaccaactttccagagtgtccaagtgggcatgcagtataactgagggcctgacccaatgaccaaatgcccgctggccttgaaaactggaaccacttggcacctttcaccctcctactcagactcagcccttctggatattctgggatccattttgactttagtagggaaggagtgagacatagaacatcttgggctctggagtctttagtatctagtcatcccagccgcagattcctctaaaacaggggttctcccaaaccccaggccgtggactggtaccagtccgtggcctgttaggagctgggctacacagcaggaagtgagcagcggtgagcattactgcctgagttccacctcctatcacatcagtggtggcatcagattctcaggagcgcattgtgaagtatgcatgcaaggttgtgcactccttatgagaatctaatgcctgatgatctaaggtagaacagtttcaacccaaaaccgtcccctaatccccggtccatggaaaaattaccttccacgaaaccagtccttagtgccaaaaaggttggggactgttctagaactcccaccccaatcctaataaccatctggtggataaggccccacctaaaccccaattctagcacctgtctaccaaacacatctctaagtccacatgttgtttcctgcccctggggcctcccaccaggacctgaaatctaagccagaacccaagctcttccctgtgacctgttgccaatcctctctaacaggccttgtcaagtttctccagagccctgcgcatccagagccaaagtcctgctttatccaggcacattcatgatcaacaaaggcagttagaatagccaacatcatcttcacttcaccctggaggacctgggcggatgactcaggggtaagagaaggaaacatttcttactggagacgactgctccataattactcctaaatga

SEQ ID NO: 81819 - DNA, 1687 bp, Homo sapiens
attattgtcacgtctctcaaaacaaagcccccctactaccttgctgtgcttgagtgatgtttcaggagggcatgggatttcattgtgtgtgaccaatccattaacccaaatccagcatgcttttctatagtttctacattccctttgattagcatatattattattattttttaagagacagggtctcactctgttgcccaggctgcagtgcagtggtgtcaccatagttcaccacagtcttgaactcctgggctcaagcggtcctcccacctcaacctcccaagtagcagcgactaaaggcrtgcaccaccattcctggctaatttttaatttttttgtaggacaggatgtcactatgtggcccagactggtcttgaattcctaaagtgatcatcttgcctcagcctcccaaagtgttgagattataggcatcagtcactgtgcctggccacattatttttataatcagaaaagaaaaagcaatgagagggagacagatagagattttggaggtggactggaaagaccctggatcctgcctgcaagcaggagcgacagccaggcaggaattgacaagactcagagagatgggagatgaggtgccattagcagagatgtggagtcagattccagaaacaggccagggggtgatcagccagagtggaagttgctctgctcttgggggaagggatttgtcttcaagccatgaacacagggcacgtggggaaagaccaactttccagagtgtccaagtgggcatgcagtataactgagggcctgacccaatgaccaaatgcccgctggccttgaaaactggaaccacttggcacctttcaccctcctactcagactcagcccttctggatattctgggatccattttgactttagtagggaaggagtgagacatagaacatcttgggctctggagtctttagtatctagtcatcccagccgcagattcctctaaaacaggggttctcccaaaccccaggccgtggactggtaccagtccgtggcctgttaggagctgggctacacagcaggaagtgagcagcggtgagcattactgcctgagttccacctcctatcacatcagtggtggcatcagattctcaggagcgcattgtgaagtatgcatgcaaggttgtgcactccttatgagaatctaatgcctgatgatctaaggtagaacagtttcaacccaaaaccgtcccctaatccccggtccatggaaaaattaccttccacgaaaccagtccttagtgccaaaaaggttggggactgttctagaactcccaccccaatcctaataaccatctggtggataaggccccacctaaaccccaattctagcacctgtctaccaaacacatctctaagtccacatgttgtttcctgcccctggggcctcccaccaggacctgaaatctaagccagaacccaagctcttccctgtgacctgttgccaatcctctctaacaggccttgtcaagtttctccagagccctgcgcatccagagccaaagtcctgctttatccaggcacattcatgatcaacaaaggcagttagaatagccaacatcatcttcacttcaccctggaggacctgggcggatgactcaggggtaagagaaggaaacatttcttactggagacgactgctccataattactcctaaatga

SEQ ID NO: 81820 - DNA, 1687 bp, Homo sapiens
attattgtcacgtctctcaaaacaaagcccccctactaccttgctgtgcttgagtgatgtttcaggagggcatgggatttcattgtgtgtgaccaatccattaacccaaatccagcatgcttttctatagtttctacattccctttgattagcatatattattattattttttaagagacagggtctcactctgttgcccaggctgcagtgcagtggtgtcaccatagttcaccacagtcttgaactcctgggctcaagcggtcctcccacctcaacctcccaagtagcagcgactaaaggcgtgcaccaccattcctggctaatttttaatttttttgtaggacaggatgtcactatgtggcccagactggtcttgaattcctaaagtgatcatcttgcctcagcctcccaaagtgttgagattataggcatcagtcactgtgcctggccacattatttttataatcagaaaagaaaaagcaatgagagggagacagatagagattttggaggtggactggaaagaccctggatcctgcctgcaagcaggagcgacagccaggcaggaattgacaagactcagagagatgggagatgaggtgccattagcagagatgtggagtcagattccagaaacaggccagggggtgatcagccagagtggaagttgctctgctcttgggggaagggatttgtcttcaagccatgaacacagggcacgtggggaaagaccarctttccagagtgtccaagtgggcatgcagtataactgagggcctgacccaatgaccaaatgcccgctggccttgaaaactggaaccacttggcacctttcaccctcctactcagactcagcccttctggatattctgggatccattttgactttagtagggaaggagtgagacatagaacatcttgggctctggagtctttagtatctagtcatcccagccgcagattcctctaaaacaggggttctcccaaaccccaggccgtggactggtaccagtccgtggcctgttaggagctgggctacacagcaggaagtgagcagcggtgagcattactgcctgagttccacctcctatcacatcagtggtggcatcagattctcaggagcgcattgtgaagtatgcatgcaaggttgtgcactccttatgagaatctaatgcctgatgatctaaggtagaacagtttcaacccaaaaccgtcccctaatccccggtccatggaaaaattaccttccacgaaaccagtccttagtgccaaaaaggttggggactgttctagaactcccaccccaatcctaataaccatctggtggataaggccccacctaaaccccaattctagcacctgtctaccaaacacatctctaagtccacatgttgtttcctgcccctggggcctcccaccaggacctgaaatctaagccagaacccaagctcttccctgtgacctgttgccaatcctctctaacaggccttgtcaagtttctccagagccctgcgcatccagagccaaagtcctgctttatccaggcacattcatgatcaacaaaggcagttagaatagccaacatcatcttcacttcaccctggaggacctgggcggatgactcaggggtaagagaaggaaacatttcttactggagacgactgctccataattactcctaaatga

SEQ ID NO: 81821 - DNA, 1849 bp, Homo sapiens
gaggattgactaataggtgaaattatgaattaaattaaaaatttgggttataaactaagaagaaagtacaatattacatatacaatatgattgcagctatgtgaaacatttgcatctgggtaaggtaatttgcaaatatttgcatatgaggggaagaagggtgtgaattgttggaggggggctcctttatttcttgtttcttccatcctattttcaagaatagagatttgataatgagttccataggcttctttcaaccttgaagaagagagtagaactgagagatgtcaagaataaagagtatgaagttagaggccctgaaaacttcttggagttgccacaccagccttgggccaattactttagactgcttatctaggtttttatttatttaagcctgcactctctgggttttttggttggttggttgtttctgctgtatgcctctgaacctaatcytaatcaatctgtcattcaaaagaatctaagattcattctatatttagcataaataaacaattacaagtgttaattataattttaaactaaatacaaatatttttactcataacatagcttgttatactacatcactgaatatcatatattacttttaatattctaaatatgttatttatcaaagtatttaccaaaatgaaaaatggtacactgcaatattttgtcattgttagcaatcattaaatttaaaagttttgtaaatagttaaacagtttcggttcatatttttcttctgtttccagttcattttccaccctaacaatcagagcagtcacttttattttcagttttttctctttgtttcaggaccatcatattccactcatgggaactggctaactctatttagttttggcagtcacaatatatgttcccaggacaaacggcccatgtacactgtgaattgcatacacaattcccagctcagaataatgctacatgttaacaagcagatgcatacagctggctttttaaaaggcctggcaaagttcactctttgttcagctttcctaggctcaattcttacaggatttttctgaatattttacattggtcttactttatactagaagatttaaattgagaaaaaaagaaagctaaacacacatggtgcatatacaatcattaagtcccagagtttttcttttttaagacttggatgatccaaacttcaatgtcactatttctagaaataaatattgcagatgctgctgataacaaatcaagtataatgaggcattaagaaatgtcagaaatgtttattaaaatatgtgctaattatgtggaataaaaagcaaaaagtagattttattttggcgagccagagagaaaatatgggtgcatgaaagaaatgcaaactttgcaaagattccagcttactatacacaagaaaaatagcatgtaatttttaatatattttttgtaccgattctatgctacacagttaaaagagagtagcttctgcttaaaagtttataatgatcacaactcaaatagacaagagggagggaaggagtgagggaaggaatgaaggaaggaaagacggaaggaggggagggagggagggagggagaaaaaacaggtacaatgctttgcacgagcagtgttacaattaatttctctagcaagcatgagtttccagtgaatgccaaggacatcattattaggttatatatacatgagccattaaaaacaggtgtgcaatgttcagatatgattcataagttatattttagtaatttttattaacaatgtacataaggatataaaagttaattgattttgcacaaattttcatgacaatagaatgtttagttgggaaatttttcac

SEQ ID NO: 81822 - DNA, 926 bp, Homo sapiens
tgtgacctaagatggtggtttcttgctttaaagaccttactaatcattacagagtattcttattctctgctcaataatttggaaatgacttaggtcctgtaactctctgtgtctctaatttctgatctctgtattcatccatgctgtctttagtacaagtatttatttatgtagacttcccttgttctgttctttatgttacatggaggaaattctgagaaacttcatcagtagcactatgaaactccttccatacagaacagtctagaacaggcattgtcaaactgggctaaatctgttctgccatctgcttttctaaagaaaatgttgttggaacacaaccacgttcattcatttctgtattgtctgtggcagagattgaccatcaygatagagaccatatgagttgaaaagcctaaaacatttattacctggctctgaacagaaaatacttgctgacttctggtctggaacagcactgtgtatatacctcaggtttaatactggaagtctccattagtccttcttcagaggtgactagagtgcacagtcataatgacagggccccaaggacttctctaactcacactccctgtccagtcaccttcactgcaacaaccatcttaccaaggggtgctgtcactgctcctgtccactttctggccgtcagatgcctcgagagttcttcttgcccttgataaggaataaacttgtcagttgcatgtggcagtttttcaactgatttgggagatgatgcagattttgctatttcttaactttcaattgttgtgttttctggttctcagtagggagacatgaagaaaattgctgattcccttcagttaaataacagtttagattaaaccagcaagaacttttgctctttaataaaatgcaaagttaccatgcctttctccggctcgatc

SEQ ID NO: 81823 - DNA, 650 bp, Homo sapiens
tatcagcaattaagcagtattgcaaagaatgccaatgaacccacaccaacctgtttgacagtgtggatagatgtgacaattcatcctcccatctaacctcaaattatcagtaaaacttaaaatgttttttccaccaaaacactgagctggttacacagagacttggaacactgaattgcataatttttgtacatgcctttccttggcggggtatggagtgggaggcagaagacgggagacggggaaagttcaatctcccccatacagtgggaagtagcatctttacttttggaaaacctgtcaaaaccaaactttagctttctcagcctcagctaagactggaaagttaaattaaggtcgcaattgctagctagatggcattaaatgtcactaacctgaagccaaggatttaaatagtaggcttcctgcgtggttgaatkccaaccctgttccaaagttcaaattatttgtttcccatggcaacttcctgaaacctaagtcagtgtttccgaaaactggccgatcagaacagccagggagtttagaaaaatacagactctggtttccctcagacttcatacttcagaatctcaaggatggaaacccaggatctagtcatcctggctgccacacacatttgagaactgagg

SEQ ID NO: 81824 - DNA, 1020 bp, Homo sapiens
cactggtttatgggaggaagcttcattctgcaagaaataaacagctggaggtgccctaggccctggtctcaaaccccttacatgtctaattggctgtgtgatctcagagaggaaataaacgaagggcttcagttttgctttatctcatcagaaaacactaatgtaaaaaatcaagtatgcattgttctcttcagttgttcctttatcaaatattgagtgcctactatatttgagtttatagctcagctgggaagacaagcaaaaatgtgaaattacaacctagataaatgctaagaaacggaggttaggagtgcatacaaggggaatttgagctagttagggattcagggaagacttatctaaggaaggaccctgcatgctgtcgtcttaaagactgaaagatggggtgcagactggtgtgtgatgggctggaaggtagatagggccagcatgtgcccatgcagagctttccagaccgtggtaaatatttggtctttattccaaagcagtgactggggagcatgttttatgtgtgtgtgtgggagggcaggggtgcgattgttcatccacatcaagtccctggtgacagatgtcatgataaaaagtgagtctcagccaggcactgtggctcatgcttgtaatcccaacacgttgagaggctgargcaagcagatcacttgagccgaggagtttcagaccagcctgggcaagatgatgaaaccccgtctctgcaaataatacaattagctggaagtggtggcatgcgcctgttgttccaggtactcaggaagctgaggtgggaggattgcttgagcccaggatgtcgaggctgcagtgagcagagatcacaccactgcactccagcctgggcaacagagtgagactctgtctcaaaaaaaaaaaaaaaaaaaaaaaaaaaaaaaaagaagaaagaaaaaggcaaatctgtataattctttgagaagttaatgttaaagacagtttttggtttatcagatccttgggtatgttatttggttc

SEQ ID NO: 81825 - DNA, 1020 bp, Homo sapiens
cactggtttatgggaggaagcttcattctgcaagaaataaacagctggaggtgccctaggccctggtctcaaaccccttacatgtctaattggctgtgtgatctcagagaggaaataaacgaagggcttcagttttgctttatctcatcagaaaacactaatgtaaaaaatcaagtatgcattgttctcttcagttgttcctttatcaaatattgagtgcctactatatttgagtttatagctcagctgggaagacaagcaaaaatgtgaaattacaacctagataaatgctaagaaacggaggttaggagtgcatacaaggggaatttgagctagttagggattcagggaagacttatctaaggaaggaccctgcatgctgtcgtcttaaagactgaaagatggggtgcagactggtgtgtgatgggctggaaggtagatagggccagcatgtgcccatgcagagctttccagaccgtggtaaatatttggtctttattccaaagcagtgactggggagcatgttttatgtgtgtgtgtgggagggcaggggtgcgattgttcatccacatcaagtccctggtgacagatgtcatgataaaaagtgagtctcagccaggcactgtggctcatgcttgtaatcccaacacgttgagaggctgaagcaagcagatcacttgagccgaggagtttcagaccagcctgggcaagatgatgaaaccccgtctctgcaaataatacaattagctggaagtggtggcatgcgcctgttgttccaggtactcaggaagctgaggtgggaggattgcttgagcccaggatgtcgaggctgcagtgagcagagatcacaccactgcactccagcctgggcaacagagtgagactctgtctcaaaaaaaaaaaaaaaaaaaaaaaaaaaaaaraagaagaaagaaaaaggcaaatctgtataattctttgagaagttaatgttaaagacagtttttggtttatcagatccttgggtatgttatttggttc

SEQ ID NO: 81826 - DNA, 2133 bp, Homo sapiens
ctaaggaatatacaaggttgcagaagataaggtcaattgaatttccataaactggatagaaatagaaattttaaaaataccatttacaatagsatcagctaaaaacatgaaatatataacttataaataagttaacaatgtatatataagtgcactaaaaactacaacatttaggaaaccccaatcttttataatgagctgcaagcaaacctgacaaacgtttgtcccagaaggagacatcatctttattatattgcacatcaagcaaatctgccctctgctctagagagagactctctttcttccatgatagagagaggactcttgtctgttgttattaatttccaaacctcaggacctacttcaagcaaatctgccctctgctccagagagggactctctctttcttccatgatagagaggaatcttgtctgttgtattaattaccaaacctcaggacctaaagcagtgccgagctcaataacattgaagaatagttagggaggatggatgtgaaggtggccatgaaagtatctggaattaaagcaaagacagggactgcagaagtaaagctaccaggtatggttaccccggccttacttagttccctgttctcaaattctgcaaccatactttgtgttctctggttgcaggaatgcttcagttttatcagaaggctccagtaagctttattctttatcctactccatcggctttctactttttcactctaaggaaggactgtggcctccacctaccacagttttcttctctatgatgtagtgtttccctcaggtaattagctggttgaaatcaactgtaccagctgtctcatttacgcatttcagagatcagctaaacaaagaggaggctgttctctaataaatatttgttgaaggaattaataaaaagtgactttctgtgactggattattacagcgtgttctcatgcattttctccttttaggaaaccaagtcgtagtctttctagaaagaaagaaaggatgtctaataatctcagggtaatgaaagacgaatctactctggaattgccttcatatacacctgatattatatgcaaccctgtgggatagcaagctgaacaaaatgagaagtctgatggaatactcaggaaagagaccaaaaaggttttctttatttcaaagagttacttaattcttaatcaagtctaaaactttgaccagccacacaatctgcacctcaaacaccacacagaaaatactggatccgattctgttcagagcagtcagcatgaaatgtaatgaaattcaaaatagacaggatacacatgctccagagggaagtcattaatacccatgaataatgataaagcaaaataccatctgccagcataatgtggcaaatctttttaaaattccaattagcctataaaccagaaacagggagcaaatatgctccctctgccatgtgagaccatgtgtccttgatgtctccatcactttatatgtaaacgaaagtgtgagtgatggaaacattacccatagatgaatagattttggagaatatattcattattctttaagacacaggtgctatgtatctaactgcgtggaacagaatgttataatctgctaattaaagccacatatgtattttcacatatatcttaatgggagggggtgaaaaattgtgtctgttataaacacagtatattaattttgctataacaatgtagttggatttaatccttacatgtatttagaacgagagataatgaaacatttctatcactgttatcccagggaaaattgcctagtttatgatggattcagatattcttagccattttcctgaactgcattttgtgaagcacatagctattaaaatcataatacccattattagaactggtgtattataccctgaaaagaaattgttctgattacaaacgtgtagaatagttccacaggctgactagctcatcacttgtcttttgaaatatctcaagaagcaagcaacctacttctgagcgcagatatttttctgtacctcttccttttcccatggtttgttgtagtataaatgacactggcattagtatttttgcagtttctaatcctagtgctgtcagtattcagttacacaattttt

SEQ ID NO: 81827 - DNA, 2133 bp, Homo sapiens
ctaaggaatatacaaggttgcagaagataaggtcaattgaatttccataaactggatagaaatagaaattttaaaaataccatttacaataggatcagctaaaaacatgaaatatawaacttataaataagttaacaatgtatatataagtgcactaaaaactacaacatttaggaaaccccaatcttttataatgagctgcaagcaaacctgacaaacgtttgtcccagaaggagacatcatctttattatattgcacatcaagcaaatctgccctctgctctagagagagactctctttcttccatgatagagagaggactcttgtctgttgttattaatttccaaacctcaggacctacttcaagcaaatctgccctctgctccagagagggactctctctttcttccatgatagagaggaatcttgtctgttgtattaattaccaaacctcaggacctaaagcagtgccgagctcaataacattgaagaatagttagggaggatggatgtgaaggtggccatgaaagtatctggaattaaagcaaagacagggactgcagaagtaaagctaccaggtatggttaccccggccttacttagttccctgttctcaaattctgcaaccatactttgtgttctctggttgcaggaatgcttcagttttatcagaaggctccagtaagctttattctttatcctactccatcggctttctactttttcactctaaggaaggactgtggcctccacctaccacagttttcttctctatgatgtagtgtttccctcaggtaattagctggttgaaatcaactgtaccagctgtctcatttacgcatttcagagatcagctaaacaaagaggaggctgttctctaataaatatttgttgaaggaattaataaaaagtgactttctgtgactggattattacagcgtgttctcatgcattttctccttttaggaaaccaagtcgtagtctttctagaaagaaagaaaggatgtctaataatctcagggtaatgaaagacgaatctactctggaattgccttcatatacacctgatattatatgcaaccctgtgggatagcaagctgaacaaaatgagaagtctgatggaatactcaggaaagagaccaaaaaggttttctttatttcaaagagttacttaattcttaatcaagtctaaaactttgaccagccacacaatctgcacctcaaacaccacacagaaaatactggatccgattctgttcagagcagtcagcatgaaatgtaatgaaattcaaaatagacaggatacacatgctccagagggaagtcattaatacccatgaataatgataaagcaaaataccatctgccagcataatgtggcaaatctttttaaaattccaattagcctataaaccagaaacagggagcaaatatgctccctctgccatgtgagaccatgtgtccttgatgtctccatcactttatatgtaaacgaaagtgtgagtgatggaaacattacccatagatgaatagattttggagaatatattcattattctttaagacacaggtgctatgtatctaactgcgtggaacagaatgttataatctgctaattaaagccacatatgtattttcacatatatcttaatgggagggggtgaaaaattgtgtctgttataaacacagtatattaattttgctataacaatgtagttggatttaatccttacatgtatttagaacgagagataatgaaacatttctatcactgttatcccagggaaaattgcctagtttatgatggattcagatattcttagccattttcctgaactgcattttgtgaagcacatagctattaaaatcataatacccattattagaactggtgtattataccctgaaaagaaattgttctgattacaaacgtgtagaatagttccacaggctgactagctcatcacttgtcttttgaaatatctcaagaagcaagcaacctacttctgagcgcagatatttttctgtacctcttccttttcccatggtttgttgtagtataaatgacactggcattagtatttttgcagtttctaatcctagtgctgtcagtattcagttacacaattttt

SEQ ID NO: 81828 - DNA, 2133 bp, Homo sapiens
ctaaggaatatacaaggttgcagaagataaggtcaattgaatttccataaactggatagaaatagaaattttaaaaataccatttacaataggatcagctaaaaacatgaaatatatwacttataaataagttaacaatgtatatataagtgcactaaaaactacaacatttaggaaaccccaatcttttataatgagctgcaagcaaacctgacaaacgtttgtcccagaaggagacatcatctttattatattgcacatcaagcaaatctgccctctgctctagagagagactctctttcttccatgatagagagaggactcttgtctgttgttattaatttccaaacctcaggacctacttcaagcaaatctgccctctgctccagagagggactctctctttcttccatgatagagaggaatcttgtctgttgtattaattaccaaacctcaggacctaaagcagtgccgagctcaataacattgaagaatagttagggaggatggatgtgaaggtggccatgaaagtatctggaattaaagcaaagacagggactgcagaagtaaagctaccaggtatggttaccccggccttacttagttccctgttctcaaattctgcaaccatactttgtgttctctggttgcaggaatgcttcagttttatcagaaggctccagtaagctttattctttatcctactccatcggctttctactttttcactctaaggaaggactgtggcctccacctaccacagttttcttctctatgatgtagtgtttccctcaggtaattagctggttgaaatcaactgtaccagctgtctcatttacgcatttcagagatcagctaaacaaagaggaggctgttctctaataaatatttgttgaaggaattaataaaaagtgactttctgtgactggattattacagcgtgttctcatgcattttctccttttaggaaaccaagtcgtagtctttctagaaagaaagaaaggatgtctaataatctcagggtaatgaaagacgaatctactctggaattgccttcatatacacctgatattatatgcaaccctgtgggatagcaagctgaacaaaatgagaagtctgatggaatactcaggaaagagaccaaaaaggttttctttatttcaaagagttacttaattcttaatcaagtctaaaactttgaccagccacacaatctgcacctcaaacaccacacagaaaatactggatccgattctgttcagagcagtcagcatgaaatgtaatgaaattcaaaatagacaggatacacatgctccagagggaagtcattaatacccatgaataatgataaagcaaaataccatctgccagcataatgtggcaaatctttttaaaattccaattagcctataaaccagaaacagggagcaaatatgctccctctgccatgtgagaccatgtgtccttgatgtctccatcactttatatgtaaacgaaagtgtgagtgatggaaacattacccatagatgaatagattttggagaatatattcattattctttaagacacaggtgctatgtatctaactgcgtggaacagaatgttataatctgctaattaaagccacatatgtattttcacatatatcttaatgggagggggtgaaaaattgtgtctgttataaacacagtatattaattttgctataacaatgtagttggatttaatccttacatgtatttagaacgagagataatgaaacatttctatcactgttatcccagggaaaattgcctagtttatgatggattcagatattcttagccattttcctgaactgcattttgtgaagcacatagctattaaaatcataatacccattattagaactggtgtattataccctgaaaagaaattgttctgattacaaacgtgtagaatagttccacaggctgactagctcatcacttgtcttttgaaatatctcaagaagcaagcaacctacttctgagcgcagatatttttctgtacctcttccttttcccatggtttgttgtagtataaatgacactggcattagtatttttgcagtttctaatcctagtgctgtcagtattcagttacacaattttt

SEQ ID NO: 81829 - DNA, 2133 bp, Homo sapiens
ctaaggaatatacaaggttgcagaagataaggtcaattgaatttccataaactggatagaaatagaaattttaaaaataccatttacaataggatcagctaaaaacatgaaatatataacttataaataagttaacaatgtatatataagtgcactaaaaactacaacatttaggaaaccccaatcttttataatgagctgcaagcaaacctgacaaacgtttgtcccagaaggagacatcatctttattatattgcacrtcaagcaaatctgccctctgctctagagagagactctctttcttccatgatagagagaggactcttgtctgttgttattaatttccaaacctcaggacctacttcaagcaaatctgccctctgctccagagagggactctctctttcttccatgatagagaggaatcttgtctgttgtattaattaccaaacctcaggacctaaagcagtgccgagctcaataacattgaagaatagttagggaggatggatgtgaaggtggccatgaaagtatctggaattaaagcaaagacagggactgcagaagtaaagctaccaggtatggttaccccggccttacttagttccctgttctcaaattctgcaaccatactttgtgttctctggttgcaggaatgcttcagttttatcagaaggctccagtaagctttattctttatcctactccatcggctttctactttttcactctaaggaaggactgtggcctccacctaccacagttttcttctctatgatgtagtgtttccctcaggtaattagctggttgaaatcaactgtaccagctgtctcatttacgcatttcagagatcagctaaacaaagaggaggctgttctctaataaatatttgttgaaggaattaataaaaagtgactttctgtgactggattattacagcgtgttctcatgcattttctccttttaggaaaccaagtcgtagtctttctagaaagaaagaaaggatgtctaataatctcagggtaatgaaagacgaatctactctggaattgccttcatatacacctgatattatatgcaaccctgtgggatagcaagctgaacaaaatgagaagtctgatggaatactcaggaaagagaccaaaaaggttttctttatttcaaagagttacttaattcttaatcaagtctaaaactttgaccagccacacaatctgcacctcaaacaccacacagaaaatactggatccgattctgttcagagcagtcagcatgaaatgtaatgaaattcaaaatagacaggatacacatgctccagagggaagtcattaatacccatgaataatgataaagcaaaataccatctgccagcataatgtggcaaatctttttaaaattccaattagcctataaaccagaaacagggagcaaatatgctccctctgccatgtgagaccatgtgtccttgatgtctccatcactttatatgtaaacgaaagtgtgagtgatggaaacattacccatagatgaatagattttggagaatatattcattattctttaagacacaggtgctatgtatctaactgcgtggaacagaatgttataatctgctaattaaagccacatatgtattttcacatatatcttaatgggagggggtgaaaaattgtgtctgttataaacacagtatattaattttgctataacaatgtagttggatttaatccttacatgtatttagaacgagagataatgaaacatttctatcactgttatcccagggaaaattgcctagtttatgatggattcagatattcttagccattttcctgaactgcattttgtgaagcacatagctattaaaatcataatacccattattagaactggtgtattataccctgaaaagaaattgttctgattacaaacgtgtagaatagttccacaggctgactagctcatcacttgtcttttgaaatatctcaagaagcaagcaacctacttctgagcgcagatatttttctgtacctcttccttttcccatggtttgttgtagtataaatgacactggcattagtatttttgcagtttctaatcctagtgctgtcagtattcagttacacaattttt

SEQ ID NO: 81830 - DNA, 1383 bp, Homo sapiens
gcattgtaagaagcctcactgtactcctgtccccagctgcccagttctcccctcctccccacagggaaacatcttcattagtttcattaggttcttatgaaaccttccagagtttctttaagcaaaatacaagcaagtaggactgtcatatcctgcagaccgctacatacaaatacatagaaagtgtcctcattctatcctccagtgatattccattttttggctgaaccacctaaatgatggatatttaggggaagcaagtattttttaaaaaaggtaaaaatcaaaggtttttattttttatttttttaaagaaaagttggtaggctgtgtttattcattcagaagtcaggccgtggctgaactgatagctcttggagatggccattgctcatctctgaatgtctggttttctcttgtaagaattgtgtgtatgatccagaccttcagtgtgtgcactatatattgagaattccagaagagatgatatggacaagaaaaaaagatgactttactttttacagtaaaaataaaacttaaattgaagagtacaattgtttaaacaattggaacttacttagctactgcttgttgaaacaaaatcctttttttaaaaggtatcgaagcaaattaaagctgatccgtgctaaggaagaagacagtggccattatactattgtagctcaaaatgaagatgctgtgaagagctatacttttgaactgttaactcaaggtatgtaaagggagtataaagataatgctagctctgtagatgagtgtcttccaaggaaagcctggcacttttctccccggtcatggaagaaaagcagcacttaggggagaagcagtgtctgcatatgtcacatatcgggaatacctctgctggactcatgaattcaggtatttctgggaggttctgggttactctagagtaggcgaggaatccctaggctccaccagctagctttatttttgtagagatggagtcttgccatgttgcycaggctggtctcctgggttcaagctatcttcccaccttggcctctcaaagtactgggattacaggtgtgagccactgcacctggcctccaccagcttacttagcacctgcttctcaatctgagaagagagaagcagatgaccttagattgttctggagagttttgctacaagttttccttatagacattgtacagtggtccttaccagaagggagtgcccaagtctgtttacattcaggctcagcacctatccagagtcccagccatgagccaggtgctgtctgaggtgcgctcatgtgatcctcacagtaaaacctgtgatacaagcaacaccgtatatctaatttatttgaccacagatttagaaaagaatctttaaaac

SEQ ID NO: 81831 - DNA, 1383 bp, Homo sapiens
gcattgtaagaagcctcactgtactcctgtccccagctgcccagttctcccctcctccccacagggaaacatcttcattagtttcattaggttcttatgaaaccttccagagtttctttaagcaaaatacaagcaagtaggactgtcatatcctgcagaccgctacatacaaatacatagaaagtgtcctcattctatcctccagtgatattccattttttggctgaaccacctaaatgatggatatttaggggaagcaagtattttttaaaaaaggtaaaaatcaaaggtttttattttttatttttttaaagaaaagttggtaggctgtgtttattcattcagaagtcaggccgtggctgaactgatagctcttggagatggccattgctcatctctgaatgtctggttttctcttgtaagaattgtgtgtatgatccagaccttcagtgtgtgcactatatattgagaattccagaagagatgatatggacaagaaaaaaagatgactttactttttacagtaaaaataaaacttaaattgaagagtacaattgtttaaacaattggaacttacttagctactgcttgttgaaacaaaatcctttttttaaaaggtatcgaagcaaattaaagctgatccgtgctaaggaagaagacagtggccattatactattgtagctcaaaatgaagatgctgtgaagagctatacttttgaactgttaactcaaggtatgtaaagggagtataaagataatgctagctctgtagatgagtgtcttccaaggaaagcctggcacttttctccccggtcatggaagaaaagcagcacttaggggagaagcagtgtctgcatatgtcacatatcgggaatacctctgctggactcatgaattcaggtatttctgggaggttctgggttactctagagtaggcgaggaatccctaggctccaccagctagctttatttttgtagagatggagtcttgccatgttgctcaggctggtctcctgggttcaagctatcttcccaccttggcctctcaaagtactgggattacaggtgtgagccactgcacctggcctccaccagcttrcttagcacctgcttctcaatctgagaagagagaagcagatgaccttagattgttctggagagttttgctacaagttttccttatagacattgtacagtggtccttaccagaagggagtgcccaagtctgtttacattcaggctcagcacctatccagagtcccagccatgagccaggtgctgtctgaggtgcgctcatgtgatcctcacagtaaaacctgtgatacaagcaacaccgtatatctaatttatttgaccacagatttagaaaagaatctttaaaac

SEQ ID NO: 81832 - DNA, 611 bp, Homo sapiens
tctatattaagttgtttttgaacttattgttttgttatttaagtttatgttatttataaaaaaaaccttaataagctgtatctgtttcatatgcttttaattttaaaggaataacaaaactgtctggctcaactgcaagtttccctcccctttgtgactgacactaagctagcacacagcacttgggccagcaaatcctggaaggcagacaaaaatgagggcctgaagcaatgcttacaatagatgtctcacacagaacaatacaaacatgtaaaaaatctttcaccacatattcttgccaattaattggatcatataagtaaaatcattacaaatataagtatttacaggattttaaagttagaatatatttgaatgcatgggtagaaaagtatcatattttaaaactatgtatatttaaatttagtaattttctaatctctagaaatctctcctgttcaaaagrtggcagcactgaaagttgttttcctgttagatggcaagagcacaatgcccaaaatagaagatacagttaggaataaggggccctgaatgttatgaaggtttgaagtcagcctacagataacaggattattacaaagatgaatttc

SEQ ID NO: 81833 - DNA, 611 bp, Homo sapiens
tctatattaagttgtttttgaacttattgttttgttatttaagtttatgttatttataaaaaaaaccttaataagctgtatctgtttcatatgcttttaattttaaaggaataacaaaactgtctggctcaactgcaagtttccctcccctttgtgactgacactaagctagcacacagcacttgggccagcaaatcctggaaggcagacaaaaatgagggcctgaagcaatgcttacaatagatgtctcacacagaacaatacaaacatgtaaaaaatctttcaccacatattcttgccaattaattggatcatataagtaaaatcattacaaatataagtatttacaggattttaaagttagaatatatttgaatgcatgggtagaaaagtatcatattttaaaactatgtatatttaaatttagtaattttctaatctctagaaatctctcctgttcaaaagatggcagcactgaaagttgttttcctgttagatggcaagagcacaatgcccaaaatagaagatacagttaggaataaggggccctgaatgttatgaaggtttgargtcagcctacagataacaggattattacaaagatgaatttc

SEQ ID NO: 81834 - DNA, 2362 bp, Homo sapiens
aaggggatcactgagctctgagtcttatgagagaagagagagargtctaagactttttgtgtataaatttatgggttccaagtgtaattttgctgtaagcatggatggcatagtggtgaagtcagggcttttaggtatccatcaccagaataatgcacattgtacccattaagtaatttctcactgttcaccccttccatcccctcaccctgctgagtctccattatcattccactctctacgtcaatatctacacatcttttagcacccgcttatgagtgatacaatatgatgtttactctgtgtctggcttgcttcacttacaacaatggcctccagttccatccatgtgtctgcaaaagttataattctattgttttttatgcctgaatggtatttcattgtgtatattttctacattttctttctccaatcatttgttgatgggtatttagtttcattttatgtctgtgctactgtgaatagtgttgcaacaaatacacaagtacagttatctttctgatacattgatttcttttcctttgcataaatactcagtggtgggattgctgaatcagacagagccaatagatgatcagtaatggtggccaatcatcagctagaaagaaagtgcttagcagggcttgaaaacaccaaaactctgagaccactgaccttcaaaaacttcaacagccctgagtgaaaagtccaaacacatttatctaccattcgaagacgctttattgtctgtcctctgcacatctcagtagtctctttttaccacactgtctatatactgcatgagccatttatatgaaactatctgacactccaaggcatcttgtactatatattcaactatgtatccctagtacctagcacagtcctggcatatagtttgctactaaacttttacagaatgaaggaattatcttgtatccaggttccaagttttaaggtgattcttcagtaaaaaaaagtattacagttcacaaataatctacttccctttttacaaatgggatcaattttaatcttatctcctaataacattactttcatttactctgatctaaatatactgtcctaagagagcaataagaaagagagttgaagctggagtttgaagaattgtacatggtcctgtgataccctaccttgttttaacctgagtgactctctcctagcggagagagagccggacagactccattttagtttcttcacgtgcagccccctttaccttccacccttaattgcataactagtgtaaactgactcaaagcaggtccaggaatgcacttagtgataagatattgaggcaagctgcaccagctgctcctgggtacgcactcggtgaatgtcacgcaaaacccctgcatttctctctttgtgatagtttaagcccctgcacctggaactgtttatttgttttgtaactgctattgtaaccaattaatattttaactatttgccagctctgcttctgtaaaacttgtttcagctaaactcccccctcccctatttagaccacggtataaaaacaaaaccagccccttcctcggggccaagagaattttgagcattacatgcctctcggttaccggctaataaaggactccttaatttgtctcaaagtgtggcattcctctataactcgcttggttacaacagtccacactgtggcctgaggtgcattgcccacctgagcttcatctgttatgtatgtcagggaatataagcagggtgagagtggcctcatcagaggaccccagatctctggcttacccatctggcaagtgcacctctgtgagcaaagacttcagagccaggtgacaagaatggcccaagcagtccaccaggaaaacctgggcccagtgtacgtcaatgcagagcatcaagcatggtgtaacaggtgcacagttgcctactcctgttcagagatgactgcatcccacataccgtaaaatgaggaaatgcatagaagcagatgtaactgaagaagacagcagaagcaacaaggagggacaaccaggacctaggagggcaccatgccagagacgcctggaccccatgctaggctcagtgcctgttatactcttgggagccagcactttccctctccatcacatggcatacttgccattatttgttgtgtaaaatattgtccttagttttcacctttcctaggagacacaggcagagcctgtgacactacagcttctggcacacagtaggtaggtgcatcacaaacatctgctgagttcacacactcttgccttctcaaaacttcttgtcaagtcttcagtgaaaaggaattgctgattgagcaagaattaaacttctagagactcctggatcc

SEQ ID NO: 81835 - DNA, 2362 bp, Homo sapiens
aaggggatcactgagctctgagtcttatgagagaagagagagaggtctaagactttttgtgtataaatttatgggttccaagtgtaattttgctgtaagyatggatggcatagtggtgaagtcagggcttttaggtatccatcaccagaataatgcacattgtacccattaagtaatttctcactgttcaccccttccatcccctcaccctgctgagtctccattatcattccactctctacgtcaatatctacacatcttttagcacccgcttatgagtgatacaatatgatgtttactctgtgtctggcttgcttcacttacaacaatggcctccagttccatccatgtgtctgcaaaagttataattctattgttttttatgcctgaatggtatttcattgtgtatattttctacattttctttctccaatcatttgttgatgggtatttagtttcattttatgtctgtgctactgtgaatagtgttgcaacaaatacacaagtacagttatctttctgatacattgatttcttttcctttgcataaatactcagtggtgggattgctgaatcagacagagccaatagatgatcagtaatggtggccaatcatcagctagaaagaaagtgcttagcagggcttgaaaacaccaaaactctgagaccactgaccttcaaaaacttcaacagccctgagtgaaaagtccaaacacatttatctaccattcgaagacgctttattgtctgtcctctgcacatctcagtagtctctttttaccacactgtctatatactgcatgagccatttatatgaaactatctgacactccaaggcatcttgtactatatattcaactatgtatccctagtacctagcacagtcctggcatatagtttgctactaaacttttacagaatgaaggaattatcttgtatccaggttccaagttttaaggtgattcttcagtaaaaaaaagtattacagttcacaaataatctacttccctttttacaaatgggatcaattttaatcttatctcctaataacattactttcatttactctgatctaaatatactgtcctaagagagcaataagaaagagagttgaagctggagtttgaagaattgtacatggtcctgtgataccctaccttgttttaacctgagtgactctctcctagcggagagagagccggacagactccattttagtttcttcacgtgcagccccctttaccttccacccttaattgcataactagtgtaaactgactcaaagcaggtccaggaatgcacttagtgataagatattgaggcaagctgcaccagctgctcctgggtacgcactcggtgaatgtcacgcaaaacccctgcatttctctctttgtgatagtttaagcccctgcacctggaactgtttatttgttttgtaactgctattgtaaccaattaatattttaactatttgccagctctgcttctgtaaaacttgtttcagctaaactcccccctcccctatttagaccacggtataaaaacaaaaccagccccttcctcggggccaagagaattttgagcattacatgcctctcggttaccggctaataaaggactccttaatttgtctcaaagtgtggcattcctctataactcgcttggttacaacagtccacactgtggcctgaggtgcattgcccacctgagcttcatctgttatgtatgtcagggaatataagcagggtgagagtggcctcatcagaggaccccagatctctggcttacccatctggcaagtgcacctctgtgagcaaagacttcagagccaggtgacaagaatggcccaagcagtccaccaggaaaacctgggcccagtgtacgtcaatgcagagcatcaagcatggtgtaacaggtgcacagttgcctactcctgttcagagatgactgcatcccacataccgtaaaatgaggaaatgcatagaagcagatgtaactgaagaagacagcagaagcaacaaggagggacaaccaggacctaggagggcaccatgccagagacgcctggaccccatgctaggctcagtgcctgttatactcttgggagccagcactttccctctccatcacatggcatacttgccattatttgttgtgtaaaatattgtccttagttttcacctttcctaggagacacaggcagagcctgtgacactacagcttctggcacacagtaggtaggtgcatcacaaacatctgctgagttcacacactcttgccttctcaaaacttcttgtcaagtcttcagtgaaaaggaattgctgattgagcaagaattaaacttctagagactcctggatcc

SEQ ID NO: 81836 - DNA, 2362 bp, Homo sapiens
aaggggatcactgagctctgagtcttatgagagaagagagagaggtctaagactttttgtgtataaatttatgggttccaagtgtaattttgctgtaagcatggatggcatagtggtgaagtcagggcttttaggtatccatcaccagaataatgcacattgtacccattaagtaatttctcactgttcaccccttccatcccctcaccctgctgagtctccattatcattccactctctacgtcaatatctacacatcttttagcacccgcttatgagtgatacaatatgatgtttmctctgtgtctggcttgcttcacttacaacaatggcctccagttccatccatgtgtctgcaaaagttataattctattgttttttatgcctgaatggtatttcattgtgtatattttctacattttctttctccaatcatttgttgatgggtatttagtttcattttatgtctgtgctactgtgaatagtgttgcaacaaatacacaagtacagttatctttctgatacattgatttcttttcctttgcataaatactcagtggtgggattgctgaatcagacagagccaatagatgatcagtaatggtggccaatcatcagctagaaagaaagtgcttagcagggcttgaaaacaccaaaactctgagaccactgaccttcaaaaacttcaacagccctgagtgaaaagtccaaacacatttatctaccattcgaagacgctttattgtctgtcctctgcacatctcagtagtctctttttaccacactgtctatatactgcatgagccatttatatgaaactatctgacactccaaggcatcttgtactatatattcaactatgtatccctagtacctagcacagtcctggcatatagtttgctactaaacttttacagaatgaaggaattatcttgtatccaggttccaagttttaaggtgattcttcagtaaaaaaaagtattacagttcacaaataatctacttccctttttacaaatgggatcaattttaatcttatctcctaataacattactttcatttactctgatctaaatatactgtcctaagagagcaataagaaagagagttgaagctggagtttgaagaattgtacatggtcctgtgataccctaccttgttttaacctgagtgactctctcctagcggagagagagccggacagactccattttagtttcttcacgtgcagccccctttaccttccacccttaattgcataactagtgtaaactgactcaaagcaggtccaggaatgcacttagtgataagatattgaggcaagctgcaccagctgctcctgggtacgcactcggtgaatgtcacgcaaaacccctgcatttctctctttgtgatagtttaagcccctgcacctggaactgtttatttgttttgtaactgctattgtaaccaattaatattttaactatttgccagctctgcttctgtaaaacttgtttcagctaaactcccccctcccctatttagaccacggtataaaaacaaaaccagccccttcctcggggccaagagaattttgagcattacatgcctctcggttaccggctaataaaggactccttaatttgtctcaaagtgtggcattcctctataactcgcttggttacaacagtccacactgtggcctgaggtgcattgcccacctgagcttcatctgttatgtatgtcagggaatataagcagggtgagagtggcctcatcagaggaccccagatctctggcttacccatctggcaagtgcacctctgtgagcaaagacttcagagccaggtgacaagaatggcccaagcagtccaccaggaaaacctgggcccagtgtacgtcaatgcagagcatcaagcatggtgtaacaggtgcacagttgcctactcctgttcagagatgactgcatcccacataccgtaaaatgaggaaatgcatagaagcagatgtaactgaagaagacagcagaagcaacaaggagggacaaccaggacctaggagggcaccatgccagagacgcctggaccccatgctaggctcagtgcctgttatactcttgggagccagcactttccctctccatcacatggcatacttgccattatttgttgtgtaaaatattgtccttagttttcacctttcctaggagacacaggcagagcctgtgacactacagcttctggcacacagtaggtaggtgcatcacaaacatctgctgagttcacacactcttgccttctcaaaacttcttgtcaagtcttcagtgaaaaggaattgctgattgagcaagaattaaacttctagagactcctggatcc

SEQ ID NO: 81837 - DNA, 2362 bp, Homo sapiens
aaggggatcactgagctctgagtcttatgagagaagagagagaggtctaagactttttgtgtataaatttatgggttccaagtgtaattttgctgtaagcatggatggcatagtggtgaagtcagggcttttaggtatccatcaccagaataatgcacattgtacccattaagtaatttctcactgttcaccccttccatcccctcaccctgctgagtctccattatcattccactctctacgtcaatatctacacatcttttagcacccgcttatgagtgatacaatatgatgtttactctgtgtctggcttgcttcacttacaacaatggcctccagttccatccatgtgtctgcaaaagttatrattctattgttttttatgcctgaatggtatttcattgtgtatattttctacattttctttctccaatcatttgttgatgggtatttagtttcattttatgtctgtgctactgtgaatagtgttgcaacaaatacacaagtacagttatctttctgatacattgatttcttttcctttgcataaatactcagtggtgggattgctgaatcagacagagccaatagatgatcagtaatggtggccaatcatcagctagaaagaaagtgcttagcagggcttgaaaacaccaaaactctgagaccactgaccttcaaaaacttcaacagccctgagtgaaaagtccaaacacatttatctaccattcgaagacgctttattgtctgtcctctgcacatctcagtagtctctttttaccacactgtctatatactgcatgagccatttatatgaaactatctgacactccaaggcatcttgtactatatattcaactatgtatccctagtacctagcacagtcctggcatatagtttgctactaaacttttacagaatgaaggaattatcttgtatccaggttccaagttttaaggtgattcttcagtaaaaaaaagtattacagttcacaaataatctacttccctttttacaaatgggatcaattttaatcttatctcctaataacattactttcatttactctgatctaaatatactgtcctaagagagcaataagaaagagagttgaagctggagtttgaagaattgtacatggtcctgtgataccctaccttgttttaacctgagtgactctctcctagcggagagagagccggacagactccattttagtttcttcacgtgcagccccctttaccttccacccttaattgcataactagtgtaaactgactcaaagcaggtccaggaatgcacttagtgataagatattgaggcaagctgcaccagctgctcctgggtacgcactcggtgaatgtcacgcaaaacccctgcatttctctctttgtgatagtttaagcccctgcacctggaactgtttatttgttttgtaactgctattgtaaccaattaatattttaactatttgccagctctgcttctgtaaaacttgtttcagctaaactcccccctcccctatttagaccacggtataaaaacaaaaccagccccttcctcggggccaagagaattttgagcattacatgcctctcggttaccggctaataaaggactccttaatttgtctcaaagtgtggcattcctctataactcgcttggttacaacagtccacactgtggcctgaggtgcattgcccacctgagcttcatctgttatgtatgtcagggaatataagcagggtgagagtggcctcatcagaggaccccagatctctggcttacccatctggcaagtgcacctctgtgagcaaagacttcagagccaggtgacaagaatggcccaagcagtccaccaggaaaacctgggcccagtgtacgtcaatgcagagcatcaagcatggtgtaacaggtgcacagttgcctactcctgttcagagatgactgcatcccacataccgtaaaatgaggaaatgcatagaagcagatgtaactgaagaagacagcagaagcaacaaggagggacaaccaggacctaggagggcaccatgccagagacgcctggaccccatgctaggctcagtgcctgttatactcttgggagccagcactttccctctccatcacatggcatacttgccattatttgttgtgtaaaatattgtccttagttttcacctttcctaggagacacaggcagagcctgtgacactacagcttctggcacacagtaggtaggtgcatcacaaacatctgctgagttcacacactcttgccttctcaaaacttcttgtcaagtcttcagtgaaaaggaattgctgattgagcaagaattaaacttctagagactcctggatcc

SEQ ID NO: 81838 - DNA, 2362 bp, Homo sapiens
aaggggatcactgagctctgagtcttatgagagaagagagagaggtctaagactttttgtgtataaatttatgggttccaagtgtaattttgctgtaagcatggatggcatagtggtgaagtcagggcttttaggtatccatcaccagaataatgcacattgtacccattaagtaatttctcactgttcaccccttccatcccctcaccctgctgagtctccattatcattccactctctacgtcaatatctacacatcttttagcacccgcttatgagtgatacaatatgatgtttactctgtgtctggcttgcttcacttacaacaatggcctccagttccatccatgtgtctgcaaaagttataattctattgttttttatgcctgaatggtatttcattgtgtatattttctacattttctttctccaatcatttgttgatgggtatttagtttcattttatgtctgtgctactgtgaatagtgttgcaacaaatacacaagtacagttatctttctgatacattgatttcttttcctttrcataaatactcagtggtgggattgctgaatcagacagagccaatagatgatcagtaatggtggccaatcatcagctagaaagaaagtgcttagcagggcttgaaaacaccaaaactctgagaccactgaccttcaaaaacttcaacagccctgagtgaaaagtccaaacacatttatctaccattcgaagacgctttattgtctgtcctctgcacatctcagtagtctctttttaccacactgtctatatactgcatgagccatttatatgaaactatctgacactccaaggcatcttgtactatatattcaactatgtatccctagtacctagcacagtcctggcatatagtttgctactaaacttttacagaatgaaggaattatcttgtatccaggttccaagttttaaggtgattcttcagtaaaaaaaagtattacagttcacaaataatctacttccctttttacaaatgggatcaattttaatcttatctcctaataacattactttcatttactctgatctaaatatactgtcctaagagagcaataagaaagagagttgaagctggagtttgaagaattgtacatggtcctgtgataccctaccttgttttaacctgagtgactctctcctagcggagagagagccggacagactccattttagtttcttcacgtgcagccccctttaccttccacccttaattgcataactagtgtaaactgactcaaagcaggtccaggaatgcacttagtgataagatattgaggcaagctgcaccagctgctcctgggtacgcactcggtgaatgtcacgcaaaacccctgcatttctctctttgtgatagtttaagcccctgcacctggaactgtttatttgttttgtaactgctattgtaaccaattaatattttaactatttgccagctctgcttctgtaaaacttgtttcagctaaactcccccctcccctatttagaccacggtataaaaacaaaaccagccccttcctcggggccaagagaattttgagcattacatgcctctcggttaccggctaataaaggactccttaatttgtctcaaagtgtggcattcctctataactcgcttggttacaacagtccacactgtggcctgaggtgcattgcccacctgagcttcatctgttatgtatgtcagggaatataagcagggtgagagtggcctcatcagaggaccccagatctctggcttacccatctggcaagtgcacctctgtgagcaaagacttcagagccaggtgacaagaatggcccaagcagtccaccaggaaaacctgggcccagtgtacgtcaatgcagagcatcaagcatggtgtaacaggtgcacagttgcctactcctgttcagagatgactgcatcccacataccgtaaaatgaggaaatgcatagaagcagatgtaactgaagaagacagcagaagcaacaaggagggacaaccaggacctaggagggcaccatgccagagacgcctggaccccatgctaggctcagtgcctgttatactcttgggagccagcactttccctctccatcacatggcatacttgccattatttgttgtgtaaaatattgtccttagttttcacctttcctaggagacacaggcagagcctgtgacactacagcttctggcacacagtaggtaggtgcatcacaaacatctgctgagttcacacactcttgccttctcaaaacttcttgtcaagtcttcagtgaaaaggaattgctgattgagcaagaattaaacttctagagactcctggatcc

SEQ ID NO: 81839 - DNA, 2362 bp, Homo sapiens
aaggggatcactgagctctgagtcttatgagagaagagagagaggtctaagactttttgtgtataaatttatgggttccaagtgtaattttgctgtaagcatggatggcatagtggtgaagtcagggcttttaggtatccatcaccagaataatgcacattgtacccattaagtaatttctcactgttcaccccttccatcccctcaccctgctgagtctccattatcattccactctctacgtcaatatctacacatcttttagcacccgcttatgagtgatacaatatgatgtttactctgtgtctggcttgcttcacttacaacaatggcctccagttccatccatgtgtctgcaaaagttataattctattgttttttatgcctgaatggtatttcattgtgtatattttctacattttctttctccaatcatttgttgatgggtatttagtttcattttatgtctgtgctactgtgaatagtgttgcaacaaatacacaagtacagttatctttctgatacattgatttcttttcctttgcataaatactcagtggtgggattgctgaatcagacagagccaatagatgatcagtaatggtggccaatcatcagctagaaagaaagtgcttagcagggcttgaaaacaccaaaactctgagaccactgaccttcaaaaacttcaacagccctgagtgaaaagtccaaacacatttatctaccattcgaagacgctttattgtctgtcctctgcacatctcagtagtctctttttaccacactgtctatatactgcatgagccatttatatgaaactatctgacactccaaggcatcttgtactatatattcaactatgtatccctagtacctagcacagtcctggcatatagtttgctactaaacttttacagaatgaaggaattatcttgtatccaggttccaagttttaaggtgattcttcagtaaaaaaaagtattacagttcacaaataatctacttccctttttacaaatgggatcaattttaatcttatctcctaataacattactttcatttactctgatctaaatatactgtcctaagagagcaataagaaagagagttgaagctggagtttgaagaattgtacatggtcctgtgataccctaccttgttttaacctgagtgactctctcctagcggagagagagccggacagactccattttagtttcttcacgtgcagccccctttaccttccacccttaattgcataactagtgtaaactgactcaaagcaggtccaggaatgcacttagtgataagatattgaggcaagctgcaccagctgctcctgggtacgcactcggtgaatgtcacgcaaaacccctgcatttctctctttgtgatagtttaagcccctgcacctggaactgtttatttgttttgtaactgctattgtaaccaattaatattttaactatttgccagctctgcttctgtaaaacttgtttcagctaaactcccccctcccctatttagaccacggtataaaaacaaaaccagccccttcctcggggccaagagaattttgagcattacatgcctctcggttaccggctaataaaggactccttaatttgtctcaaagtgtggcattcctctataactcgcttggttacaacagtccacactgtggcctgaggtgcattgcccacctgagcttcatctgttatgtatgtcagggaatataagcagggtgagagtggcctcatcagaggaccccagatctctggcttacccatctggcaagtgcacctctgtgagcaaagacttcagagccagrtgacaagaatggcccaagcagtccaccaggaaaacctgggcccagtgtacgtcaatgcagagcatcaagcatggtgtaacaggtgcacagttgcctactcctgttcagagatgactgcatcccacataccgtaaaatgaggaaatgcatagaagcagatgtaactgaagaagacagcagaagcaacaaggagggacaaccaggacctaggagggcaccatgccagagacgcctggaccccatgctaggctcagtgcctgttatactcttgggagccagcactttccctctccatcacatggcatacttgccattatttgttgtgtaaaatattgtccttagttttcacctttcctaggagacacaggcagagcctgtgacactacagcttctggcacacagtaggtaggtgcatcacaaacatctgctgagttcacacactcttgccttctcaaaacttcttgtcaagtcttcagtgaaaaggaattgctgattgagcaagaattaaacttctagagactcctggatcc

SEQ ID NO: 81840 - DNA, 2362 bp, Homo sapiens
aaggggatcactgagctctgagtcttatgagagaagagagagaggtctaagactttttgtgtataaatttatgggttccaagtgtaattttgctgtaagcatggatggcatagtggtgaagtcagggcttttaggtatccatcaccagaataatgcacattgtacccattaagtaatttctcactgttcaccccttccatcccctcaccctgctgagtctccattatcattccactctctacgtcaatatctacacatcttttagcacccgcttatgagtgatacaatatgatgtttactctgtgtctggcttgcttcacttacaacaatggcctccagttccatccatgtgtctgcaaaagttataattctattgttttttatgcctgaatggtatttcattgtgtatattttctacattttctttctccaatcatttgttgatgggtatttagtttcattttatgtctgtgctactgtgaatagtgttgcaacaaatacacaagtacagttatctttctgatacattgatttcttttcctttgcataaatactcagtggtgggattgctgaatcagacagagccaatagatgatcagtaatggtggccaatcatcagctagaaagaaagtgcttagcagggcttgaaaacaccaaaactctgagaccactgaccttcaaaaacttcaacagccctgagtgaaaagtccaaacacatttatctaccattcgaagacgctttattgtctgtcctctgcacatctcagtagtctctttttaccacactgtctatatactgcatgagccatttatatgaaactatctgacactccaaggcatcttgtactatatattcaactatgtatccctagtacctagcacagtcctggcatatagtttgctactaaacttttacagaatgaaggaattatcttgtatccaggttccaagttttaaggtgattcttcagtaaaaaaaagtattacagttcacaaataatctacttccctttttacaaatgggatcaattttaatcttatctcctaataacattactttcatttactctgatctaaatatactgtcctaagagagcaataagaaagagagttgaagctggagtttgaagaattgtacatggtcctgtgataccctaccttgttttaacctgagtgactctctcctagcggagagagagccggacagactccattttagtttcttcacgtgcagccccctttaccttccacccttaattgcataactagtgtaaactgactcaaagcaggtccaggaatgcacttagtgataagatattgaggcaagctgcaccagctgctcctgggtacgcactcggtgaatgtcacgcaaaacccctgcatttctctctttgtgatagtttaagcccctgcacctggaactgtttatttgttttgtaactgctattgtaaccaattaatattttaactatttgccagctctgcttctgtaaaacttgtttcagctaaactcccccctcccctatttagaccacggtataaaaacaaaaccagccccttcctcggggccaagagaattttgagcattacatgcctctcggttaccggctaataaaggactccttaatttgtctcaaagtgtggcattcctctataactcgcttggttacaacagtccacactgtggcctgaggtgcattgcccacctgagcttcatctgttatgtatgtcagggaatataagcagggtgagagtggcctcatcagaggaccccagatctctggcttacccatctggcaagtgcacctctgtgagcaaagacttcagagccaggtgacaagaatggcccaagcagtccaccaggaaaacctgggcccagtgtacgtcaatgcagagcatcaagcatggtgtaacaggtgcacagttgcctactcctgttcagagatgactgcatcccacataccgtaaaatgaggaaatgcakagaagcagatgtaactgaagaagacagcagaagcaacaaggagggacaaccaggacctaggagggcaccatgccagagacgcctggaccccatgctaggctcagtgcctgttatactcttgggagccagcactttccctctccatcacatggcatacttgccattatttgttgtgtaaaatattgtccttagttttcacctttcctaggagacacaggcagagcctgtgacactacagcttctggcacacagtaggtaggtgcatcacaaacatctgctgagttcacacactcttgccttctcaaaacttcttgtcaagtcttcagtgaaaaggaattgctgattgagcaagaattaaacttctagagactcctggatcc

SEQ ID NO: 81841 - DNA, 2362 bp, Homo sapiens
aaggggatcactgagctctgagtcttatgagagaagagagagaggtctaagactttttgtgtataaatttatgggttccaagtgtaattttgctgtaagcatggatggcatagtggtgaagtcagggcttttaggtatccatcaccagaataatgcacattgtacccattaagtaatttctcactgttcaccccttccatcccctcaccctgctgagtctccattatcattccactctctacgtcaatatctacacatcttttagcacccgcttatgagtgatacaatatgatgtttactctgtgtctggcttgcttcacttacaacaatggcctccagttccatccatgtgtctgcaaaagttataattctattgttttttatgcctgaatggtatttcattgtgtatattttctacattttctttctccaatcatttgttgatgggtatttagtttcattttatgtctgtgctactgtgaatagtgttgcaacaaatacacaagtacagttatctttctgatacattgatttcttttcctttgcataaatactcagtggtgggattgctgaatcagacagagccaatagatgatcagtaatggtggccaatcatcagctagaaagaaagtgcttagcagggcttgaaaacaccaaaactctgagaccactgaccttcaaaaacttcaacagccctgagtgaaaagtccaaacacatttatctaccattcgaagacgctttattgtctgtcctctgcacatctcagtagtctctttttaccacactgtctatatactgcatgagccatttatatgaaactatctgacactccaaggcatcttgtactatatattcaactatgtatccctagtacctagcacagtcctggcatatagtttgctactaaacttttacagaatgaaggaattatcttgtatccaggttccaagttttaaggtgattcttcagtaaaaaaaagtattacagttcacaaataatctacttccctttttacaaatgggatcaattttaatcttatctcctaataacattactttcatttactctgatctaaatatactgtcctaagagagcaataagaaagagagttgaagctggagtttgaagaattgtacatggtcctgtgataccctaccttgttttaacctgagtgactctctcctagcggagagagagccggacagactccattttagtttcttcacgtgcagccccctttaccttccacccttaattgcataactagtgtaaactgactcaaagcaggtccaggaatgcacttagtgataagatattgaggcaagctgcaccagctgctcctgggtacgcactcggtgaatgtcacgcaaaacccctgcatttctctctttgtgatagtttaagcccctgcacctggaactgtttatttgttttgtaactgctattgtaaccaattaatattttaactatttgccagctctgcttctgtaaaacttgtttcagctaaactcccccctcccctatttagaccacggtataaaaacaaaaccagccccttcctcggggccaagagaattttgagcattacatgcctctcggttaccggctaataaaggactccttaatttgtctcaaagtgtggcattcctctataactcgcttggttacaacagtccacactgtggcctgaggtgcattgcccacctgagcttcatctgttatgtatgtcagggaatataagcagggtgagagtggcctcatcagaggaccccagatctctggcttacccatctggcaagtgcacctctgtgagcaaagacttcagagccaggtgacaagaatggcccaagcagtccaccaggaaaacctgggcccagtgtacgtcaatgcagagcatcaagcatggtgtaacaggtgcacagttgcctactcctgttcagagatgactgcatcccacataccgtaaaatgaggaaatgcatagaagcagatgtaactgaagaagacagcagaagcaacaaggagggacaaccaggacctaggagggcaccatgccagagacgcctggaccccaygctaggctcagtgcctgttatactcttgggagccagcactttccctctccatcacatggcatacttgccattatttgttgtgtaaaatattgtccttagttttcacctttcctaggagacacaggcagagcctgtgacactacagcttctggcacacagtaggtaggtgcatcacaaacatctgctgagttcacacactcttgccttctcaaaacttcttgtcaagtcttcagtgaaaaggaattgctgattgagcaagaattaaacttctagagactcctggatcc

SEQ ID NO: 81842 - DNA, 2826 bp, Homo sapiens
ataaagatataggtacaaaaaatattttactttcctcttaattctactatgagaagaaagcattaagttcaatgataaagggcagctggtaattgaacttaggtgtaggcagaaagacactggtagggatgaggcaaacaagaaagtctgttttccatgtaaagggtgaaacagtttctcagcaattgctgagatcaaggataagccctacaagtttgggcaggaaagaggactcttattactctgagggaatgcagaaatccctccgttttgttgttgtttgttttctctgagcccttgtgatctggcccccaagaattcctgtgttggcagcagtaggtggtgcctaggagaaacaaaaccctgaggccagggcatcttcctctccagttggtgcagtagtgatcccaagagggtgatgcaaactttttaaagtcttttctcattttgccacctgtcacctggctccaaacatgggtgcagccatgaaacactgtagcagagtaccgtaatcaaagacccagcattctggccagaaaacagaaaagaggagctccaggaaaacagaaaatattggagacattgtggagaggaaggagtatgagaaagtgacaccataaagtttttaatgaactgagcgcatccccaagctgcatgtgtgtggatctgctcctaattagttaaccaaagattttgagaacgaagctagcagattattatccgagttccacactgaccaccaggacatatctgaagcaaactggaaaggttttgaaaactcgattattggaaccacagctcacaaaacagagattggaacttgcagcttgaatatgacaaggtcaattgcttctaaaacaaaaatagcatccatccgcctaatattttatgaagacccaggcctcaaaacttaatgtccatgacgcaatccaaaattacaaaaaaaacagataaactgcaccccacatgagaaaagacaatcagtactaagtagctaccaatactgagaagaaacagaaatttgaattacatcacaaggattttaaagcagcttttataaaaatgttccaacaagtggtcgcaaacactttttttctctcttgggacggagtctcactctgtcacccaggctacagtgcagtggtgcaatctaggttcactgcaacctcggcctcccgggttaaaacgattctcctgtctcagcctaccaatgagctggaactacaggcatgcaccaccacgtccagctaatttttgtatttttagtagagaaggggtttcaccatgttggccagatggtctcgatctcttgacctcatgatctgcccgcctcggcctcccaaagtgctgggattacargcgtgagccaccatgcccggccgcaaacacttttataccaatggaaaactagaagtatcagaaaataaatagacgatgtaaaaaggaacaaaatgaatatattaggaccaaaaaatccaataactgacatacaaaattctaagtaagctttttattacaataaaactaaagaggtaagaatctgttatcgtgaatataaatcaacagaaattatctaatctgaacaatagagagaaagaacgatgaaaaagtcttgattagagccttagagacttgaggaacaataactaaagttccaacacacatgtcatctgagtctcagaggagaaaaggaaaaggagcgcagtgctgaaagaattttgaaaacctaacaggaaaaattacccaaatttggcaaaaggcaaacactaattgaactaaaagaagaaataacaaatgtacaattatgtttagataattcaacactcctctctcactaataattagtgaacatttgaaattaattgatggtaagtttgattaattctgagatttttagcagtattgtttatcacatagaattaacagattatttctgtatagcagacaaaaatgcattctgagccctatgtaatagttcatcacagaaaatgttgagttaatgccagtcagaatgtctctcttcttccagtacagggattacaaataatggcaagacctaaggtcatgtatgcagtgatgcactaagtaccttaaataataggacatgagattgcaagcacaatgcagtcactatgaatgagaaaattacgtaagagctcaagttcatgtactgaggaggcttctgagaagccttaaaggatatctggccaattcagctgttactgggttagactattaatagttttattgccttaactctcatcaaaaaaaaggctgctttgcaggctttttcttactgtgggcaagtgattaacaacaccccagctagaaaattcttcctgatgtctgtcctgtgtctctgctgatctaacaagcaagggtatacaagaacttatcaactccatcatcaattacaaaaaagattaagttgtcataatcatagtatatgatttaaggatttactaaaatgcaatggtagtcaagctatcagaggatggaggaacctccgtttcaccatctggttgttcctctttgttccctttaggttagtctgagccaaaagacccaacactaatcacagtgctttgtccattgcagtaggcataattccttacaacaacaaataaaataattcctaagcatttatttcataaaataaatgtattagatattttggcctcacaaaaataagagatagagtctactcaaaacagtgttttgtgtatgattttcataaatttcaaattagaatgtaaagtttatcatatctcttccatttgttaggatagtgttagtaatatttataaaatcattttctttctcctg

SEQ ID NO: 81843 - DNA, 2826 bp, Homo sapiens
ataaagatataggtacaaaaaatattttactttcctcttaattctactatgagaagaaagcattaagttcaatgataaagggcagctggtaattgaacttaggtgtaggcagaaagacactggtagggatgaggcaaacaagaaagtctgttttccatgtaaagggtgaaacagtttctcagcaattgctgagatcaaggataagccctacaagtttgggcaggaaagaggactcttattactctgagggaatgcagaaatccctccgttttgttgttgtttgttttctctgagcccttgtgatctggcccccaagaattcctgtgttggcagcagtaggtggtgcctaggagaaacaaaaccctgaggccagggcatcttcctctccagttggtgcagtagtgatcccaagagggtgatgcaaactttttaaagtcttttctcattttgccacctgtcacctggctccaaacatgggtgcagccatgaaacactgtagcagagtaccgtaatcaaagacccagcattctggccagaaaacagaaaagaggagctccaggaaaacagaaaatattggagacattgtggagaggaaggagtatgagaaagtgacaccataaagtttttaatgaactgagcgcatccccaagctgcatgtgtgtggatctgctcctaattagttaaccaaagattttgagaacgaagctagcagattattatccgagttccacactgaccaccaggacatatctgaagcaaactggaaaggttttgaaaactcgattattggaaccacagctcacaaaacagagattggaacttgcagcttgaatatgacaaggtcaattgcttctaaaacaaaaatagcatccatccgcctaatattttatgaagacccaggcctcaaaacttaatgtccatgacgcaatccaaaattacaaaaaaaacagataaactgcaccccacatgagaaaagacaatcagtactaagtagctaccaatactgagaagaaacagaaatttgaattacatcacaaggattttaaagcagcttttataaaaatgttccaacaagtggtcgcaaacactttttttctctcttgggacggagtctcactctgtcacccaggctacagtgcagtggtgcaatctaggttcactgcaacctcggcctcccgggttaaaacgattctcctgtctcagcctaccaatgagctggaactacaggcatgcaccaccacgtccagctaatttttgtatttttagtagagaaggggtttcaccatgttggccagatggtctcgatctcttgacctcatgatctgcccgcctcggcctcccaaagtgctgggattacaagcgtgagccaccatgcccggccgcaaacacttttataccaatggaaaactagaagtatcagaaaataaatagacgatgtaaaaaggaacaaaatgaatatattaggaccaaaaaatccaataactgacatacaaaattctaagtaagctttttattacaataaaactaaagaggtaagaatctgttatcgtgaatataaatcaacagaaattatctaatctgaacaatagagagaaaraacgatgaaaaagtcttgattagagccttagagacttgaggaacaataactaaagttccaacacacatgtcatctgagtctcagaggagaaaaggaaaaggagcgcagtgctgaaagaattttgaaaacctaacaggaaaaattacccaaatttggcaaaaggcaaacactaattgaactaaaagaagaaataacaaatgtacaattatgtttagataattcaacactcctctctcactaataattagtgaacatttgaaattaattgatggtaagtttgattaattctgagatttttagcagtattgtttatcacatagaattaacagattatttctgtatagcagacaaaaatgcattctgagccctatgtaatagttcatcacagaaaatgttgagttaatgccagtcagaatgtctctcttcttccagtacagggattacaaataatggcaagacctaaggtcatgtatgcagtgatgcactaagtaccttaaataataggacatgagattgcaagcacaatgcagtcactatgaatgagaaaattacgtaagagctcaagttcatgtactgaggaggcttctgagaagccttaaaggatatctggccaattcagctgttactgggttagactattaatagttttattgccttaactctcatcaaaaaaaaggctgctttgcaggctttttcttactgtgggcaagtgattaacaacaccccagctagaaaattcttcctgatgtctgtcctgtgtctctgctgatctaacaagcaagggtatacaagaacttatcaactccatcatcaattacaaaaaagattaagttgtcataatcatagtatatgatttaaggatttactaaaatgcaatggtagtcaagctatcagaggatggaggaacctccgtttcaccatctggttgttcctctttgttccctttaggttagtctgagccaaaagacccaacactaatcacagtgctttgtccattgcagtaggcataattccttacaacaacaaataaaataattcctaagcatttatttcataaaataaatgtattagatattttggcctcacaaaaataagagatagagtctactcaaaacagtgttttgtgtatgattttcataaatttcaaattagaatgtaaagtttatcatatctcttccatttgttaggatagtgttagtaatatttataaaatcattttctttctcctg

SEQ ID NO: 81844 - DNA, 730 bp, Homo sapiens
ccaggccttgactttcgggttgaataaaggctgccaggtggaagttgttagggaaatggtgttaagtgaaaatgctatgtagactgtatgtcctttgcagaagttgtggttctcctgcccagcctgctgccactgagccatgcagatatgctgtccagcccatcaccagtgatttgtatgtatattggttcttctgttcagctcactgctgaactggactctctcctctgcaggtaagcccccaataaaaccccatgtatcatttattagcttggagtcttctcttcagcctcttgaacctggtgccatccccattggagtcaatagcgggtcagcacaaaaaccatctagatgaacaacaaaatgcactagtagatgattctgaaatggacttgatttttggakttaaatggctatgacaaaaaatattgaagaatgtgtatagaattttatgagagaacatttttcaaatgtcatcatcattatcccaatgattatatatatgtatattttaagtaattctctactatgatcacaattactatcatcatttttcatacaaagtttatgtgagttattttcatcaaagtattttatttcattcttataaggtccagtgaattttctcatttacatttattaaagatgccctaattttccaactacttccatatgaaaagtactatggtttttctacttgtctgtgccataatatttagtttttagcatt

SEQ ID NO: 81845 - DNA, 495 bp, Homo sapiens
cactatttgcccagactggtttcaagttccaggactcaagtgaycctcttggcttgatctcccaaagttcttaaattacaggagtgagtcaccatgcctggccctgccccctggcttctaattgtggtctagcagtggcgatattggaattagggaagacgttgtgttcatcctatttattttcttgctcactcactccctgtggcatcacttttggctggttgtgttcctcaacaaaggccacaactctgtcaaatgccatacgaattttcttcctcttggtttcctgcttcctgcctttgatacctgaattgcttgctctgatgtactgcactagattttatggtttatccttaaactttcctaaataaaattctctaaaaatagccacttgaaatgtataatccttttcctactgagactctgactgatatagttagttcacgaagtaaaaataactaagcatccctttgggttgggaagcttactagattg

SEQ ID NO: 81846 - DNA, 673 bp, Homo sapiens
tgtataattgccattcccttgcactatggaaggttcaggtaaaggagtttctgctgagggcaaggactttgctactgagagcagaattctctgggcatatttcaaaatggttacttttatccttaccctgtcaaaagtagaagcaaacatttttttctaataatcactctgaaaacctgatggtctcttgaatataaaactaatcaaaatgtgggagcatctctatgactagctcctcaagagttttaaactttcaaactaatttatgctaagtctctagtaattaatcaattactgtttgaagcctttttgccagttaggagtagacccaagtgacttttacttttctatgctgtgattttctatattctcctattttgagtttttggggcattagtttaattttccctgtacactcaattctctgatgatatataaatagtttttgagttctagtttgttcaacttttttcttatcatgtttgagaatgacaacgtccaagctcaatacatgtttgagcaggaagcagcctacttctggtactcacattttyactggctgtattcaaatattacaatgatagcagtattagagtgtgtcaacaaaagcgagagttttattgtaataatccaaatgagcagtggtgagtagataaattaggcagaatataaa

SEQ ID NO: 81847 - DNA, 741 bp, Homo sapiens
actgtcatgtattagaaaatagcccaaaattcctaagttgtctatataacaaattaatttcagagtatgaaactggaaaaatacacgaacatatttcttcactaatataaaagtaataagagaaggattatctttagttacactgtcattgattctttgtaattgatcactcgtggaaacttcttgacaatgcttagacattttgctgttttactgtctttatgtagygagaattattttgctaagaattattttcccaaaactcaaatattattccaacttaaggcatattttgatggaatcaataaaatgggaaaataatacctgggtttttgtcctaactctgtcactcaatatgtttgtcattctagtcaagttatttatgagtttcagtttttttgacttgtgaaattatgtaattatttttacattactaattaacctcataagctttgtttacttataaaatgaaataatgtatgcaaaattactgtgtatataatgaagttatgtaataaattagctattactattatgtcagtattataaagttacagtagatcagtttttaaaacaaggtaatcattcttaattcaatacagttataaaaatattatcatcaataaatgaattggtttctgcctattgaggaaatctatgactagtacttacctattatttctcaggccttttgtagttatcctctaaatcagtgtttagaaaacttgtttgttaggaaag

SEQ ID NO: 81848 - DNA, 1022 bp, Homo sapiens
tttttaaattttagtgaagaaattcattaatacacttatttccaagctggttcacttagctgatgggagaatattgctatcacaattaaagttaaactcctgaatgagtcaggaaatacatctgggtggatggtagagsgtaaaaagcttggaccttggagtcagataaatctggttctgaattccacaaccttcactttactaaaacatgaccttgagctctggtttcatcttctgtaaaatgtagttaatatcgaattttaaaaatcagctttcctggttgcaaggaaaaaagcctcaactcaagtaaccttgaataacagggcaggattttgtgagatgaagtggttggtacaaatacacttggcagtgaggacacagaaatttcaatcatgaggccaagccttcaaagacatacaggaaatgctaaacaaccaggtctcagaaagagaaaaagcctcatgttgttcagaactaaggagtgtatacagtttgtcattggcttgtcatcaccttgacccagatactccttctctctggctgctcgtcttcattctataagtacattttttatcttccgggtcctgctttctcatcattctggttgtgtataacttccacgatcatcttgacctaccagcttccctccgccaatgacctgtaaactactcccactaagtcttacctacttcttatatattcaaattactaggttcaggattattaaaaacaagacatgataggcttggtaattccctgtttgggtagagctttttgctgtacctcaaaggacactgaccagtttgtaataggctacatttgtgctggttgcccacctttgggctaatctgttatggctcaagggtgaagtcttgctgtgggagctaagttatgtggtgtgaaataggcaggtgggtctccgggttagttcccttagtaagtgtgaggatgttggtgctggggctgacatttctggcacagtaactccttcaggccatatctaatataggcatccagcacca

SEQ ID NO: 81849 - DNA, 883 bp, Homo sapiens
agcactctcccttcaaaggtgcctcaccaccatttactctttcaaattcaggttcttgtgtgttcttttaaattttcgcccttgcagaatggccataatccaaaaataaaaaaatatagtagatgttggtgtggatgcggtgaacagggaacacttctatactgctggtgggaatgtaaactagtacaaccactatggaaaacagtgtggagattccttaaagaactaaaagtagaactaccatttgatccagcaatcccactactgggtgtccactcagaggaaaagaagtcattataygaaaaagatacttgcacatgcatgtttatagcagcacaattcacaataggaaaaacatggaaccaacccaaatgcccatcaatcaacgagtggataaagaaactgtggtatatatatacaatggaatactactcagccataaaaaggaatgaattaatggcatttgcagggacctggatgagactggagactattactctaagtgaagtaattcaggaatgggaaaccaaacatggtatattctcactcctaagtgggagctaagctatgaggatgcaaaggcataagaatgacacaatggactttggggacacgggggaaagggtgggaaggggatgagagacagaagactacaaatagcatgcactgtgtactgctcaggtgatgggtgcaccaaaatctcacaaatcaccactaaagaacttactcatgtaaccaaacaccacctgtttcccaataacctatgggaaaaaaatttttttaattatgcccttgcagactgcttttatcacattacttattttcttattgttgtgctaattaatttattttaattacctcatcaacaatatgccttcttact

SEQ ID NO: 81850 - DNA, 677 bp, Homo sapiens
cttcctaagtccacagagtaaatacaacaacattctagttgatttgcccagtgaaatgggacacttttgtgggcaggctgatatgactcctaagctcaagacacctttagtcaaattcaacaaacaaaatggartcacgccagcaggtgactataggaagacatatggggatgtgatatagtgaaggacaaagtggagagaatggcccttggtggcccccaaagcagctcagcctcttgtcaggggagaaacagcaaaacaagagagagatcaaagacagaagaattaagttcgctgctccctggtggtatcagagagagctttggcaattgtgcatctcaattgaagtgtaaggcacacagggaacagttactgccagaggtttccataacacagaaagtgaaatcaaagtagcccaagaaaccagagacaggggagagacatggtccaactgaggcagagctagaaagctttacctgacttcctccaaggtctagcatcagatcccaagaaatctgggtggccgcatagaacaatctttcaagacaggcaggaaaaggagtaaggcctcagcggctatagctgaagcaaataagttttgaagacaggagttgccccagaattgtgtcgcatttatatgctttcttgtctcttcctgcttgatgaggtgtgtaatg

SEQ ID NO: 81851 - DNA, 1536 bp, Homo sapiens
tggaggcagaatttagggtgagaactgttacactcgtaattgaggccctgaatggaaatgtgctgagaaagaaaaacataaagagaaagacacagaaagaaatgaagatagccagacaggtatagaaggaacatgactccctttaaatagagaaacagccacatgatactctcaagtaatgctgctttgttatgtccatattttgacccattgtggtacctgtccaaatagccctgatttcgggccaagccctgccttgataaatggaactcacayagtaacaacaggtttcctaccacatcaatcttgttgatgttggagcaaattaaagcagatgtttcctgtcaactgtgaatctcttcccaaagaacacatcagcatcctcaacctcttcaagccacacaaaagaccaaggacctccatgcaactggatttctccttaaccgcaccattctatttattaggtccattatctctaaacaattaacatgctctggaatactgtgttccagaatgtgtatataaatggaacatagcacatggccctataaaagaaagaaactgttaagaaaatggtccctttagccagttagaggaaatataatttctgacacagggccgctatggccagctggatactgatgcataaagatacctaaccgtttgtagcagagcaggaggtgggacccagagtgtgagccctgagatgatctagaaattcctgtgcagatggatccatcaacgaagggtgatttcatccattaaggaaaaccaagctgcttgtgaagaaaatttgacaactgttcgacagtgcttttccctcatttaggaagtagggaacactgagtaaatgggaatgtaggaaatattagcatgtgatatttatcagaataagaccagaaatgtctttgtaaacttcatgactctcagataccatgaagcatcatgtgtaaggttcactttcagctgccagtaatgttatgtttagagacagcattttcttcaataagcaattcagcaaagttgaagatttaaataaaggaagaaaaataatgcagactacattataaagtaataatagcaggtaatagtcactgagtgcttcttctatgctaattactttacatttattatcccattcaagtttgcatgacaatcagacaagaagcagattagaaaagagaaagcattctgtagcaaaccattcattgtgagtaacaaagtgctatgtatggtgttagagagcctgggctttgaatttacaaagacctgctgaagtccagcaaacaccactactagctgtaatgtagggaagctaccttttctgctcaccacattgatcaactactatagtcaaagcactacactcagactaaaaaataaaaacaaagaagttgtggtccctgttctcagggagctcatttaagtgctccccatgagcaacattcataatctaagagaagaaagctttattacagccacaagttccgattccccaggccaatataagtggtttcctctaagcatcctcattgc

SEQ ID NO: 81852 - DNA, 1536 bp, Homo sapiens
tggaggcagaatttagggtgagaactgttacactcgtaattgaggccctgaatggaaatgtgctgagaaagaaaaacataaagagaaagacacagaaagaaatgaagatagccagacaggtatagaaggaacatgactccctttaaatagagaaacagccacatgatactctcaagtaatgctgctttgttatgtccatattttgacccattgtggtacctgtccaaatagccctgatttcgggccaagccctgccttgataaatggaactcacacagtaacaacaggtttcctaccacatcaatcttgttgatgttggagcaaattaaagcagatgtttcctgtcaactgtgaatctcttcccaaagaacacatcagcatcctcaacctcttcaagccacacaaaagaccaaggacctccatgcaactggatttctccttaaccgcaccattctatttattaggtccattatctctaaacaattaacatgctctggaatactgtgttccagaatgtgtatataaatggaacatagcacatggccctataaaagaaagaaactgttaagaaaatggtccctttagccarttagaggaaatataatttctgacacagggccgctatggccagctggatactgatgcataaagatacctaaccgtttgtagcagagcaggaggtgggacccagagtgtgagccctgagatgatctagaaattcctgtgcagatggatccatcaacgaagggtgatttcatccattaaggaaaaccaagctgcttgtgaagaaaatttgacaactgttcgacagtgcttttccctcatttaggaagtagggaacactgagtaaatgggaatgtaggaaatattagcatgtgatatttatcagaataagaccagaaatgtctttgtaaacttcatgactctcagataccatgaagcatcatgtgtaaggttcactttcagctgccagtaatgttatgtttagagacagcattttcttcaataagcaattcagcaaagttgaagatttaaataaaggaagaaaaataatgcagactacattataaagtaataatagcaggtaatagtcactgagtgcttcttctatgctaattactttacatttattatcccattcaagtttgcatgacaatcagacaagaagcagattagaaaagagaaagcattctgtagcaaaccattcattgtgagtaacaaagtgctatgtatggtgttagagagcctgggctttgaatttacaaagacctgctgaagtccagcaaacaccactactagctgtaatgtagggaagctaccttttctgctcaccacattgatcaactactatagtcaaagcactacactcagactaaaaaataaaaacaaagaagttgtggtccctgttctcagggagctcatttaagtgctccccatgagcaacattcataatctaagagaagaaagctttattacagccacaagttccgattccccaggccaatataagtggtttcctctaagcatcctcattgc

SEQ ID NO: 81853 - DNA, 1536 bp, Homo sapiens
tggaggcagaatttagggtgagaactgttacactcgtaattgaggccctgaatggaaatgtgctgagaaagaaaaacataaagagaaagacacagaaagaaatgaagatagccagacaggtatagaaggaacatgactccctttaaatagagaaacagccacatgatactctcaagtaatgctgctttgttatgtccatattttgacccattgtggtacctgtccaaatagccctgatttcgggccaagccctgccttgataaatggaactcacacagtaacaacaggtttcctaccacatcaatcttgttgatgttggagcaaattaaagcagatgtttcctgtcaactgtgaatctcttcccaaagaacacatcagcatcctcaacctcttcaagccacacaaaagaccaaggacctccatgcaactggatttctccttaaccgcaccattctatttattaggtccattatctctaaacaattaacatgctctggaatactgtgttccagaatgtgtatataaatggaacatagcacatggccctataaaagaaagaaactgttaagaaaatggtccctttagccagttagaggaaatataatttctgacacagggccgctatggccagctggatactgatgcataaagatacctaaccgtttgtagcagagcaggaggtgggacccagagtgtgagccctgagatgatctagaaattcctgtgcagatggatccatcaacgaagggtgatttcatccattaaggaaaaccaagctgcttgtgaagaaaatttgacaactgttcgacagtgcttttccctcatttaggaagtagggaacactgagtaaatgggaatgtaggaaatattagcatgtgatatttatcagaataagaccagaaatgtctttgtaaacttcatgactctcagataccatgaagcatcatgtgtaaggttcactttcagctgccagtaatgttatgtttagagacagcattttcttcaataagcaattcagcaaagttgaagatttaaataaaggaagaaaaataatgcagactacattataaagtaataatagcaggtaatagtcactgagtgcttcttctatgctaattactttacatttattatcccattcaagtttgcatgacaatcagacaagaagcagattagaaaagagaaagcattctrtagcaaaccattcattgtgagtaacaaagtgctatgtatggtgttagagagcctgggctttgaatttacaaagacctgctgaagtccagcaaacaccactactagctgtaatgtagggaagctaccttttctgctcaccacattgatcaactactatagtcaaagcactacactcagactaaaaaataaaaacaaagaagttgtggtccctgttctcagggagctcatttaagtgctccccatgagcaacattcataatctaagagaagaaagctttattacagccacaagttccgattccccaggccaatataagtggtttcctctaagcatcctcattgc

SEQ ID NO: 81854 - DNA, 907 bp, Homo sapiens
ttgtcagagtacaaccacatcctctcctaccaataaaattcctcttaataccacctgaaaaattacctgctaagcatgaagcacctttctgtcaaaccaaagcacgttaattttattttcaaagacaccatcgcaggtagaagtattacttaaggtgatttatttgctgattccatgtaaacccaaactgcagaaacatgtttacatcctcatcattatagaaatatgaaacatgcaattgcacacacaacttctaattgtgttgcttatgtcttttggattcattaggggacaggatttattaaataagcaagtccagttgtgtacaaagcatcaattttgtgtggaatgacatgccactgggtacttgcaagaaataaaagagctccctctgctgccagaaaatgaatttttcattaattgttattaaaatctcccacctaacttctctgatgtttacttcataagttatattttttgtaattactgtttctgttatctttaaaattgttttatattataccatttgatttttaagaaaagataagtaatttaaattcaatatttaattatttyaagtaactcaaaatggtctccacttaaatagtaattacaaacagttctttgttgcaaaaccaaaacatcagtccacacagacttgcattaatctcaagaatgttataattacctaaaattacatatgaattaatatttcagcacatgccatcaaagagtctaacacatgaacttttcaataaatgaagttggtatcctgaagatgattcaaaaaacctctgcacatccatagcatccataatttattagtttacctatgcttatagaattttcaaaatgtgtctttttctgaatttcttcagagtctgaaataggtctaaatgaatcttgt

SEQ ID NO: 81855 - DNA, 762 bp, Homo sapiens
actcattgaaaggtgaggagagcagaatttactaaaagaaaactctcagctgtaaaacaagaagtcctactaacaggctcagattgaacaccacactaccacgcaccagcygaagaagccaggctcctccccactgcagaaggtgcaaattcctgtggttccaccccatttctccagtgtgcatggggacattttttagaaagaatcagtcaggaaagggcaggcaaaaggggcagttctccctctgggtcacgggtttcatctgggatcagcagtccagtatttcagccttcagcctgttttaggcttgaaggtaggttttcgctggggacagttggctgtctcctgccaagggttattattattataggtgtttaaatatttgttttcattttaagaaaaaaaatgtagaatgatcctactcttactcagacacacacacagacacacacatcccatacatataaccttaattgagtagagggaaggaaaataaagtgcatcttttttctactgttaaacttctgctttgttcattacccttccattacttttcctttgttttcctcccatagggcaatgaagataagctcctgttgatggttcatgaatttcaatttatgttcccaggggcagggcatttttcatgcaatgtccccagtattacaatttcctgctgcttgtgttttcagagaacccatgtttaaaccttcaggccaatatgtaaatctgtttttgttcctttaaacagaagacttgtgg

SEQ ID NO: 81856 - DNA, 3629 bp, Homo sapiens
ttttgtgtgcttttttctttttctcagatttttctaagtactgaaattaacctcatgtaattaaatttctccatttaaaaattagttactttttaaaaataatttcaacttttattttagatgcayggggtacatgggcagtttgttatgtggatatattgcatgacactgaggtttggggtgtgaatgtctgtcacccaggtggtgaacatagtacccaataggttgtttttcagccctccctgctttctctctcctgcctctagtagtccccagatgaattttttcttaatgcttactaatttttcaataccattatatggtattgaaatgacaaatattttaaattgatgtatcttagagggcactaaaatgaaacattaaatatacatgatgaaaaatacttttaaagtagaatcctaaacatatacattaagaaatataatttgtgtgttgaaaattattttcaggagaatctactaacttgtgcctgtatcttcgaatcatgagcagtgttcaaaacttgggaaatgtttgatcctagaatatctgctgtttacctttgagcagatattatatttattcagtttatgttagggaaatatcagacaggtgtacaaagatacatataaaagactggtgattttttataacacagaaatattagaaaaagtcaaaattaccaacttaaggtgattggttaaataaaatttcattacatggtccacaatggaataccatcatggagatgcatacctattgatatgcaaaatgctcattttaaatttcaaaataatatataatgcaagtctatctttgttcaaaaacaagttgtaggtagttggtagataggtatgaatgtatgtataggtatcaatatagatatagatataaatatacagatgtggatatagacaaaaataaatacaatgtttatcaaaagaaaaacagattattttgtaacatctgtgtgtgtaattgtgatttttaaaaatatttctatgagtggattacttaataaattaataaataaaataaaaataaaacattgtaatagaagtcaatatttattaagcacatactatgtatcgtatatgcttctaaataatttacatgccttacctatttaattgtaattatgctactcttcagtccttattatcttagcctgtttgtcctgctataacaaaccaccatagactgggtggcttaaacaacaaaaactatttctcatagtctggatgctgggaagtcctagatcgaggcactggcagatttgatatctggtgatgccctatttcctggttcacagatggctgtcttctcactgtatcctccacagcagaagaaacaaggcagctctctggggcctgttttataacaacattaatcctgttcatgagggctcaaccctcctgaactaatcacctcccaaagccccatcacctaaataccaccacattaagagttaatatttcaacatatgaatttgggcgaggtggcggggggggcaacttgcagcccatcaccattatttatgctgtagattataagcatgtgaatttttcacactggaatgttagaaataaatgataataatgtaatttcacatttttatggagtccatgaaccctctgaggctgtatcgtggggtgggtgtgtgtttgtgtgtgtgtgtatgtgttttcctggggagcagttacttagcttttaatcagattgtgcgatgagttaatatcgtcctctgatagttttagtcaaactcaccattcatttctgtactattgaaaactccactacaaagtcaagatactaacagcaagcaaaactatacagtgaaaatgaatttgttgttttcacctcattaatctacccaaggcagttggtaaagatagcaagcagcaacagcgtgacctcaggtcacattttcaagcaggctaggaagaaatgggagttggggaggtcatcaggtgccaggagtgttctagccagagcagaactctacttttagatagtgcctaaaatgttaattttaagtggtatataatcaactgtcagttaaactacaaataacctttgagagcttattcagaggctttgcaaggtgaacatgtagaatagtgaggctttcatgagggtggatataggattcctaacatagtaatctgatttacccaatcagtctgtgtcttgtaacaacattattttcattttcaattctgtcttttaagatctaaaacagtagatgattcaaagcacattaatacttggctttgggatatatgtttgtattattaaaatatgaataaatgcatctgtgcagaacttcagcactttaaagaaaggaataaggccattccatgaaaacctgtatgaacaagagccaaatagctagcaaccctttggattcatccttgttacctgtatgggcagctggttctctcctcagaatgatgattttacagatgaggaaaccaagcactagagagattaaattgcctatattcacatcacttataagtggcatagctgtgatttaaacccaagtcttgctaacttggaaatctgtatccatgggcatcatgttgtctaactgactacttttaaaatattatggagaagttgataaactgtagattccagcctactaatcactccagaagtaatgtatccatatcattgagggtaggggtgaacatttttaacagccttccttggtgattctggaatgtaatatagattgaaaagcatagctttacaccatcttatttctgcatcagaggggagatcatgtagcaagttcttatttatgattttatttttcggtagcatttaatgctactgaccaccatccttgggacttttcttagccttctatgttttcttctaatgtcccctttaccctgctaaccattgctctcagtcttccctaacatggcttctttctgccttcagttccttggtatgctggccatggcgttttttctctggtggctctcattatctttgcttattgaggctttataaattactctttctgcccacctacaattctctcttgagtttcagtaccttatttttatcgttcttctaaatctacagatgctgatgtttccttcgtgtcttaaatttagcaggcctaaaattgaactcattatcttcttaccccaaactttctgtcaccgttttcctctagtgtagttaacactgtcactactcagccttctgaactcaaaacttcaaaattgcattccgactttccttttcctcactgtcgccattcagtcagtctgtcatcaaatcttgttatttccatctcagaaatgccatttgaatcgatcattcttttctgtgtttccacagaatctcatcatctgttatacattggattccataccagttttcctatcattcaactttccctgatatccagtcttttttccacatggtaccagagatattttaataataaacacatttggaattctcatttccctactttaaaatagcctttgattccctaatgcctgcaatataaggtacaaaatgtatacggttcatcctaatgatcctgctttatctccttaccacaagtcttattttgtggctaaactgaactttttactaca

SEQ ID NO: 81857 - DNA, 1084 bp, Homo sapiens
tgcagggatctaggttgtgcgttccttatgagaatctaatgcctgatgatctgagctggaacacttttatcctgaaaccatccctccccctcattcccctatctatggaaaaactgtcttccatgaaattggtccctggtgccataaaggttggggactttaggaagcctctttgaggagtgacatcttagccaagacctgctagccatcatcagttccatcttgccctcatctctctcactacagtcacttggaaggtctgagtgatgcttcacatcacaaatgcataatcttaggattgagatggagagggaatgggggaatgtaccctcttttctttctagtgggaacagaaaaatttttctaagtagaaacctattacaactgtcaaactacatggaattggctaggtaaattgtaaattattaccatgatttgactttttggagacactaaaagctacagccctttttttttttttttttttttttttttttttttttttttttttggtaaaagggtaaaaatgaaagtctaagccctagaagagaagttaccagattcttgggataagtaagatagccattcaccaggtactgctggttcaggaccaaggacagcatctaagtgtttctgggttttttttcctggccccccttcccctgttcattttaattatgccatacctaaacaaatatctctttatgtttctactgctgctactccaataatgccagaatctrtcaattcttgcagtgccttccatttgggggaagagcattcatggtggaagaactagcaagtgctatgaagaaagtaaaacacaataatgggatagaaaatgactggaaggcagagccacagcaaatatagtggtctaggacagggattcccaacccctgggccacgtaccagtacagtcctgtaaggaaccaggcttccattgtactgaagttcatcccatgactgtgatgcctttactaatgtgcattctttcaacagtttacccctatgttcttcattgaagtaacatacacataacatttaccatgtaaccatttataagtgtatatagtccaattat

SEQ ID NO: 81858 - DNA, 1122 bp, Homo sapiens
ctcttacaatccgaagtagtacaaatttttaatatactattatacaaataaataatcttcaggtccccaggatgtgtacaaaaacattgttatgggataagaaaagaagaggaaattaatgttaacaatagcgtctatacaaattttaaatagaatttgggattaatgtccaagatattttccaaattatgtcagcaattatgtactagagattgtgaattaaacaagagaggtatagaccctaattttatatatgttagaagtcaacagaawgatatttttaaaactctcaatttagtgtttgaatttaactttttaattttaactataataaaacagaaatattgggtgcatcacaatagattttagggtcctgacctgtactggggcgatcacaaatgttttcttcaagaaatttctgagttttgaaagatgtatgaaaatttttcaagtgaatattcagggctggctgctgaaaatatatctccaagtgatggaaatacatgcaacattccttaggtggaaaggaacacgatgcttggaaagaaaaaggaaaccaatatggttacagggcagaaaatgacaagaagagtgacatcagctggtggtggtgaagaaagcaggggacggtcctgccttctttgtagaccaggctaaggatggtgacctttttcttagagcaatggaaaattattttaagtagggaaatacatgattaagtttgcatttttaaaagttcattctcgatgtagtgcaaaaacagataggagaggggcaaaaataaatttaagaagacaaggtaggagaccagaaacagaagaatagtttcctgtcatgaagagacatttgaaaggagtagtctactcacgacttaattgtgaaatactagctctattatcattataatgagaatcaaagcatggacttgggataacgcttcacagatatgagaggtggaaagcctggagctcaaggtgctatcccaaactgaggaatgcagaacttcaggctgccagaggtgaagtacatgtgttaacgttcttaggtgctgtcgggtaggtgctcaataacggtttccttggttttcccttttctgtctggatacactaagaaaagacctgt

SEQ ID NO: 81859 - DNA, 916 bp, Homo sapiens
tgcattattaagtcatgactttttctaaagtggatggagggagggagctgggtgactggaagagaagtcatagaattgtgcatcagacgaagcatcaagaccaggctaatctctttaggactacacccatgcctggaacatcttcactaaacatatggaccacattgcatcaaaatttctttatgtgtaataatctctttaattaggttgaagacctcttgacagtagtaacgggttataaataatctttatttccgcagtacttagcatatcacctggcacagagcacgaaatcagtgttttctgctgagtgaacgttgaggagattgccaagcaagaaatgtgaactggggccgggcgcrgtggctcacgcctgtaatcccagcactttgggaggccgagacgggcggatcacgaggtcaggagatcgagaccatcctggctaacacggtgaaaccccgtctctactaaaaatacaaaaaaaaattagccgggcatggtggcgcgtgcctgtagtcccagctacacaggaggctgaggcaggagaatggcgtgaacccgggaggcggagcttgcagtgagtcgagatcgcgccactgcactccagcctgggcgacagagcgaaactccgtctcaaaaaaaaaaaaaaaaaaaagaaatgtgaactggattttctttggcagattatgttctgttcaaagacatcaagaccagtgaaggagatggcgttagagtctgcttgaatctgaattttcacaaaggaaaaacaaacgtagaatttaaaaagttaggcatagagacagagctggtttgaataactctgctttcttccagcttatgacttcacccctgtgaatatcagaatcctaatttaaaagaaggtagatcaccatatctattgatacggttagtgcta

SEQ ID NO: 81860 - DNA, 2422 bp, Homo sapiens
aatagagaaaagtgtatattttgttattatcctcagttaatttacaatcttactggggcaatcagagaggcaaayaggaaatttgcaaactgaaaatgaatgtgtaattaaggttcaaataaataaaccaaataataactgctatgtggtgtttctaaaagtataatcacaagtccaccagagtcagaatcacttgtaaattttgttaaaaacaaaaattctgtgggctcaccattgatttactgaatccaaatatctagaatggagcctgaaaatgtgcattgtacaagcattgcaagtaattttgatataatgttgtgtttgagagatgtatgtaaaaaatggaaactcagaatggattaaaataattgccaatgggcagaattcaagtgagatccatggagccacaaacattgagaagaaccatgaaaatagatggaatttatatcagtgaagatgggagaatatgtttcaggtagggggaattgaatcctaggaatgaataaacgagcaaaggatatttaagacattttgaatagatcatacagattataatgttgtgcaaacgagaaacataggaaatgaagttagaaatacatttgtatcaggtagtggagagctttgaattccagacttagaaatttttactttattctgaaagcaatggagagtatttatttatgccaagggagagtgtttatttaggcaaagttttgtgaacattaacctggctgtggtgagtagggtaacttgaaatgaagagacactgtaaacaagatgtcagtaaagagaccattgagatagtgcaggtatgatatgaacagcctagatttatgtagtggaagtggaagaggtagatggatgtaaggaagactgcagaaagaatacttcatacatgttttcatttgcttctttaaaaaagtgaaagctgatatttattatcccaaagtatgcactgaagtgtaaataaggtaaaaatctgatttgataaatgataattgtaataatgcatgtcatgtgccttgtctagtcacatagggaactgatgttcaaagaatgccagccctagcaccaactattctcatatggcacaaacctgtgctcttgtgaaaggataattgactatagttaggaattctgggttcaagtaccagcaagttcttgctttttgttaggctgttgctgtttcttctggagtatgcaaaatggctctaaggtcctttttaagttctgagattccaagaaatgaaaagctaataggtattataatagctatcatatacataaatatgcaccgtattccataaaaaacagtagcaactcctggagcctcttccaggaagagataattcccttcttttcacataaagttttttttaattcctttatttgtactgttttcagtatacagtatgcatttgaggttaaaggaatttttttaaaactttaagaaataagtcttgttctaagaaagaagataaacaatgtggtataacaaagattagaactgcccatcttatatttgcctatagttgtagaagcacttgtagaaatcatttttaaaatcctgtttctaagaaaaaaaagacacagaagcatgaagatgaacctctaaggcagggaaactgtagaacactcatctctgtatattgagtttaaagaccaagaaatatgattgggaaatgtcttttgtgtcatctatgaagagaagtataagctggcttaggtcagacttgccttattgaaattcatatactgcaaagacaagtgtttttaagtttggaaaaaaaattcttctctcatcttcagtttaaaataagacaacttgctttctgtgaaaaaaaatattccagaaaacaaaagaaagtttgggaggtgtggggaaatgtgtgcctggtggtttagctttaggcaatcatttctagtcaagcacatttttctttatcaatatttatagacaatctgtaacaaaaatcaacttaaaaataaatcatgtttatttagtaataccaatgataactatgaaaagttttggtgtcaacaaggatttatttcaaaatagatttgttttatactaacaagtatcctgttacaaaatatcgtataattttaatcgattaaatttgtgattcatattttaaaaagtgattattacttttatgaaaatatagtagcaaatttttcaagtatattaaaatgatattcaatattctaacttgtattttatgcttttttaaggtttatgtttgttgaatttataaatatattgttgaatcttgggtattgaattggcttcctggaatttatctaagttgattatcccttatgttgtgtaccagtgtatgatataagccccaccagaacaaaaaaatgtgcatataggtctttctattaatttattttttataacctaacatcattt

SEQ ID NO: 81861 - DNA, 2422 bp, Homo sapiens
aatagagaaaagtgtatattttgttattatcctcagttaatttacaatcttactggggcaatcagagaggcaaataggaaatttgcaaactgaaaatgaatgtgtaattaaggttcaaataaataaaccaaataataactgctatgtggtgtttctaaaagtataatcacaagtccaccagagtcagaatcacttgtaaattttgttaaaaayaaaaattctgtgggctcaccattgatttactgaatccaaatatctagaatggagcctgaaaatgtgcattgtacaagcattgcaagtaattttgatataatgttgtgtttgagagatgtatgtaaaaaatggaaactcagaatggattaaaataattgccaatgggcagaattcaagtgagatccatggagccacaaacattgagaagaaccatgaaaatagatggaatttatatcagtgaagatgggagaatatgtttcaggtagggggaattgaatcctaggaatgaataaacgagcaaaggatatttaagacattttgaatagatcatacagattataatgttgtgcaaacgagaaacataggaaatgaagttagaaatacatttgtatcaggtagtggagagctttgaattccagacttagaaatttttactttattctgaaagcaatggagagtatttatttatgccaagggagagtgtttatttaggcaaagttttgtgaacattaacctggctgtggtgagtagggtaacttgaaatgaagagacactgtaaacaagatgtcagtaaagagaccattgagatagtgcaggtatgatatgaacagcctagatttatgtagtggaagtggaagaggtagatggatgtaaggaagactgcagaaagaatacttcatacatgttttcatttgcttctttaaaaaagtgaaagctgatatttattatcccaaagtatgcactgaagtgtaaataaggtaaaaatctgatttgataaatgataattgtaataatgcatgtcatgtgccttgtctagtcacatagggaactgatgttcaaagaatgccagccctagcaccaactattctcatatggcacaaacctgtgctcttgtgaaaggataattgactatagttaggaattctgggttcaagtaccagcaagttcttgctttttgttaggctgttgctgtttcttctggagtatgcaaaatggctctaaggtcctttttaagttctgagattccaagaaatgaaaagctaataggtattataatagctatcatatacataaatatgcaccgtattccataaaaaacagtagcaactcctggagcctcttccaggaagagataattcccttcttttcacataaagttttttttaattcctttatttgtactgttttcagtatacagtatgcatttgaggttaaaggaatttttttaaaactttaagaaataagtcttgttctaagaaagaagataaacaatgtggtataacaaagattagaactgcccatcttatatttgcctatagttgtagaagcacttgtagaaatcatttttaaaatcctgtttctaagaaaaaaaagacacagaagcatgaagatgaacctctaaggcagggaaactgtagaacactcatctctgtatattgagtttaaagaccaagaaatatgattgggaaatgtcttttgtgtcatctatgaagagaagtataagctggcttaggtcagacttgccttattgaaattcatatactgcaaagacaagtgtttttaagtttggaaaaaaaattcttctctcatcttcagtttaaaataagacaacttgctttctgtgaaaaaaaatattccagaaaacaaaagaaagtttgggaggtgtggggaaatgtgtgcctggtggtttagctttaggcaatcatttctagtcaagcacatttttctttatcaatatttatagacaatctgtaacaaaaatcaacttaaaaataaatcatgtttatttagtaataccaatgataactatgaaaagttttggtgtcaacaaggatttatttcaaaatagatttgttttatactaacaagtatcctgttacaaaatatcgtataattttaatcgattaaatttgtgattcatattttaaaaagtgattattacttttatgaaaatatagtagcaaatttttcaagtatattaaaatgatattcaatattctaacttgtattttatgcttttttaaggtttatgtttgttgaatttataaatatattgttgaatcttgggtattgaattggcttcctggaatttatctaagttgattatcccttatgttgtgtaccagtgtatgatataagccccaccagaacaaaaaaatgtgcatataggtctttctattaatttattttttataacctaacatcattt

SEQ ID NO: 81862 - DNA, 1546 bp, Homo sapiens
ctgagaacttaataaagctaccctacaggcacagaccacctatttccatcattttggataaaaaagaaataaactttcaacttatktaagccacagttttcttagatgttgccattcacagatgaacctaaccctatttcttataatgaataacacattattggttctttggattaacttaattaattcactgttgcagcagatattatcatcaaccaggagtcaagtactttgccagctgctggggtacagtagtgaacaacataggtgttaataaagttcaaggtccaggattcaaaacagacaaaatacaataattacaagcaagagggttaaagacaaagtattgggtatttaattagatcgcttaattctatatctaactgagagtggtgtcctaaagaaaaagaaatattgctagagagtgatgaacggttcttctctagaggacagaccctcggaaggccatgtccaggagtcctgagcaccctgggaccagagatttaagggtgagacactgcgaacatgaaaaggtgggaggaaattaaaatcactagagtctctctccgtgagagaattgaaaggaattatttgataaacttcttaggatgggaaccagggttgaaatccccaagggaaacacttagaaacacaaactgctatctaaggatgatggctctaattaatggcaagattgttattttgctgaacaggtgttcatatttgaggcaagaatggaactgtgctggacagtagaggaggttcatggggcccctgatggctcttctctacttcgccatgaagcacagtcagactctgttaaataaatactgactacacacacacacacacacacacacacatacacacaccaaacacaaacacacacacacggtttaaagtaccctaacttattggtctggcctggttgtgaacatgctttgttttgatttgtctggagtagaggaacaacaaaagagaaaaagcatgaaaaagagaacgaaagggctcctaacgtcaaggacttagagtacccacattattgcataatacagttaccttttgttgaatttttaaagagcaataaaaaatctccccgatcagtaaatgtatgaatgactaactagtgggaagatcctcattgcagagacacaaatggtaatgaaggaaaatgtgttgtaaatttcagaaatttattccattaatagaaaagaaaatttaaaaagcttttaacaaagtataaattgcaattagtttgtgtatacagaagggcacacaaaacatatgcctagcaactgatgctgttttgcaattacttgacataagaaattaagttctctgagctacctgaccttgcacaagtgacttaacctgcgcatgcctcctgctcaccagttaaataaagggtcagaattgcatgatttctgggtcaacactgactgaaaaatccatggagctatgtttgtttcattaggtgaaggtcaattttaaattcactgccatattccttttttctctttgatgttgtccaggctctttcctaggt

SEQ ID NO: 81863 - DNA, 644 bp, Homo sapiens
actttttcttttggcactgccagatttctgtcctcttgtatagaagaattcctactttcctcatatcctgattgacatttggtgttagccaccttcaaatgtttgacagttttgtgtatctaagatgatagctcagtgttcttttcattttcacttctctgattcccagtgaatacgggtgaataggttcttcacatacctattgacccttcacatttccatttgtgaattaaatggcaaggttttaagaaagaattccttctgccaaattagtcgggacacacaggcgaagagagatggattaaaattcagatcttgctagaaaatctttggccaaggtggggtgagagagaagcagaggaaataattccagcatgtaggactgtgatctggaccatttttgactgagtgtgggagaggaattgtcaatggattatggtcatttttctccttgattgttggaaacctgacacctggaattaaaatgttgcaatccagattggcacatgygtaattctgagattgcctctaattattgtcagtttgacagagatccttgaggatgtccagcaagaaccgtcatgggaaactatgagatgaggagacttgtgactaagggagagtaagaccagagtcaaggatcc

SEQ ID NO: 81864 - DNA, 698 bp, Homo sapiens
tccccacttctgtatgacctcgtcttaaccagttacatctccaagwccctatttccaaataaggccacatttcgaggcattgggggttaggacttcaacatatgacttttagaggggacataggggacacaattcaactcataagagttcccaagagatgagtcctcatgatttaaaagtgtataaacttccctacacaagggaatgaagcctacagtccataagctgctttctctctctcataatcaacacgaaatgcttttttttttttgaagacagggatcttgctgattgcccaggctggattgcaggggtgtgatattggctcactgtaacctctgcctcctgggctcaagtgatccctccacttaaacctccctagtagctgggaccacaggcgtgcaccaccacgcccggctaatttttgtattttagtggagacggggtttcacagtgttggccaggttggtcttgaactcctggcctcaggtgatctgcttgccttggcctctcaaagtgctgggattacaggcgtcagccacctcgcccaggcataattttttactttttgtagagatggggttccgccatcttgcctaggctggtctcaaccaaaatgctattcttaatggacttttctcttgacctgtaagcagtgcacaatgaagaactaataaaaatatcctcactttaagaaa

SEQ ID NO: 81865 - DNA, 698 bp, Homo sapiens
tccccacttctgtatgacctcgtcttaaccagttacatctccaagtccctatttccaaataaggccacatttcgaggcattgggggttaggacttcaacatatgacttttagaggggacataggggacacaattcaactcataagagttcccaagagatgagtcctcatgatttaaaagtgtataaacttccctacacaagggaatgaagcctacagtccataagctgctttctctctctcataatcaacacgaaatgcttttttttttttgaagacagggatcttgctgattgcccaggctggattgcaggggtgtgatattggctcactgtaacctctgcctcctgggctcaagtgatccctccacttaaacctccctagtagctgggaccacaggcgtgcaccaccacgcccggctaatttttgtattttagtggagacggggtttcacagtgttggccaggttggtctygaactcctggcctcaggtgatctgcttgccttggcctctcaaagtgctgggattacaggcgtcagccacctcgcccaggcataattttttactttttgtagagatggggttccgccatcttgcctaggctggtctcaaccaaaatgctattcttaatggacttttctcttgacctgtaagcagtgcacaatgaagaactaataaaaatatcctcactttaagaaa

SEQ ID NO: 81866 - DNA, 1461 bp, Homo sapiens
ggtagagtttcaaatttttgtttttattgctcctgtataaatgactttggatcattcctggtaaatgacttaaagttgcttttgaatagaaatgtccaaacacatctgagtatctggttctatttttgttggtccagctgtcccagccttaaacccatctcgcagtgctaagatgcccacgcaaatcttttgcgatcaactcggtgcattacttttatctgcccacrgtagtaacacgatccttatatgcctgtatgtgaatacggacaactagtaaggatagagagagaaagagagagagagggggagaccctaaagccattgtgactttattgtttgaaccactctatgcttattcagctctgccgtttgccagctgtgtcaccttgagaaagttacttaacctctttgtgcctcacatacctcataggtagttgtgatgattaatgtattaatatacatgaagcatttagaacagattctagtacataataagcatgtatatgacttcattgacattattacttgatttgtacgtgcaaggaaaactaatatggtgtttataaattcaaaaaagtttcaaaaggtgatttacaaaatgggagccatctagattaatactatttcatgctggctctggacacagatgcagggggagttattctctggggaaagtgagccttttcagtaaccacaggcagcagggtgagaaatcttagttctaaaccaatgaagtaaatgctgggatcccctactgttctcatatattctgcatagaagatatgaaagtattatggaaatgattttaagtacatgaagagagagaaaagaatcctagtgttgaaagtctaagaatatgtatttgagcacactacatttctcttcctcctgaaacatctttagaaatcatagcctttttaaatttaaaattcattggtgattcttagattttagcatcaaagggaggactaagctctgatttttctcttgctcaaattcctacctaaggggtctagggagtcatgccctatgaaccataaattcttgtcagatgggttttatttgaccctatatattgtgactgacttttcagtctgactttggcataacgttatgagacgaggaaaaatatttaaccccaaaatacatttccttgccatatcttgaagttgccctgcaaagtctcttgtggggaaaaatccacattctctggagaatccccttccccctttgttttcctcccttctttccagatccaggagataattaactaagaggctggcacccttttaagtcccataagaaacattttacaacctactgtctctctaaagtctgctgagaaattcctctgcacactaaaacttggtccccacaatcctttatcttaacctgaacattcctttccattaatcccaggtcttcagataaactccaccaattgtcaaccacaaaatgttc

SEQ ID NO: 81867 - DNA, 1461 bp, Homo sapiens
ggtagagtttcaaatttttgtttttattgctcctgtataaatgactttggatcattcctggtaaatgacttaaagttgcttttgaatagaaatgtccaaacacatctgagtatctggttctatttttgttggtccagctgtcccagccttaaacccatctcgcagtgctaagatgcccacgcaaatcttttgcgatcaactcggtgcattacttttatctgcccacggtagtaacacgatccttatatgcctgtatgtgaatacggacaactagtaaggatagagagagaaagagagagagagggggagaccctaaagccattgtgactttattgtttgaaccactctatgcttattcagctctgccgtttgccagctgtgtcaccttgagaaagttacttaacctctttgtgcctcacatacctcataggtagttgtgatgattaatgtattaatatacatgaagcatttagaacagattctagtacataataagcatgtatatgacttcattgacattattacttgatttgtacgtgcaaggaaaactaatatggtgtttataaattcaaaaaagtttcaaaaggtgatttacaaaatgggagccatctagattaatactatttcatgctggctctggacacagatgcagggggagttattctctggggaaagtgagccttttcagtaaccacaggcagcagggtgagaaatcttagttctaaaccaatgaagtaaatgctgggatcccctactgttctcatatattctgcatagaagatatgaaagtattatggaaatgattttaagtacatgaagagagagaaaagaatcctagtgttgaaagtctaagaatatgtatttgagcacactrcatttctcttcctcctgaaacatctttagaaatcatagcctttttaaatttaaaattcattggtgattcttagattttagcatcaaagggaggactaagctctgatttttctcttgctcaaattcctacctaaggggtctagggagtcatgccctatgaaccataaattcttgtcagatgggttttatttgaccctatatattgtgactgacttttcagtctgactttggcataacgttatgagacgaggaaaaatatttaaccccaaaatacatttccttgccatatcttgaagttgccctgcaaagtctcttgtggggaaaaatccacattctctggagaatccccttccccctttgttttcctcccttctttccagatccaggagataattaactaagaggctggcacccttttaagtcccataagaaacattttacaacctactgtctctctaaagtctgctgagaaattcctctgcacactaaaacttggtccccacaatcctttatcttaacctgaacattcctttccattaatcccaggtcttcagataaactccaccaattgtcaaccacaaaatgttc

SEQ ID NO: 81868 - DNA, 1461 bp, Homo sapiens
ggtagagtttcaaatttttgtttttattgctcctgtataaatgactttggatcattcctggtaaatgacttaaagttgcttttgaatagaaatgtccaaacacatctgagtatctggttctatttttgttggtccagctgtcccagccttaaacccatctcgcagtgctaagatgcccacgcaaatcttttgcgatcaactcggtgcattacttttatctgcccacggtagtaacacgatccttatatgcctgtatgtgaatacggacaactagtaaggatagagagagaaagagagagagagggggagaccctaaagccattgtgactttattgtttgaaccactctatgcttattcagctctgccgtttgccagctgtgtcaccttgagaaagttacttaacctctttgtgcctcacatacctcataggtagttgtgatgattaatgtattaatatacatgaagcatttagaacagattctagtacataataagcatgtatatgacttcattgacattattacttgatttgtacgtgcaaggaaaactaatatggtgtttataaattcaaaaaagtttcaaaaggtgatttacaaaatgggagccatctagattaatactatttcatgctggctctggacacagatgcagggggagttattctctggggaaagtgagccttttcagtaaccacaggcagcagggtgagaaatcttagttctaaaccaatgaagtaaatgctgggatcccctactgttctcatatattctgcatagaagatatgaaagtattatggaaatgattttaagtacatgaagagagagaaaagaatcctagtgttgaaagtctaagaatatgtatttgagcacactacatttctcttcctcctgaaacatctttagaaatcatagcctttttaaatttaaaattcattggtgattcttagattttagcatcaaagggaggactaagctctgatttttctcttgcycaaattcctacctaaggggtctagggagtcatgccctatgaaccataaattcttgtcagatgggttttatttgaccctatatattgtgactgacttttcagtctgactttggcataacgttatgagacgaggaaaaatatttaaccccaaaatacatttccttgccatatcttgaagttgccctgcaaagtctcttgtggggaaaaatccacattctctggagaatccccttccccctttgttttcctcccttctttccagatccaggagataattaactaagaggctggcacccttttaagtcccataagaaacattttacaacctactgtctctctaaagtctgctgagaaattcctctgcacactaaaacttggtccccacaatcctttatcttaacctgaacattcctttccattaatcccaggtcttcagataaactccaccaattgtcaaccacaaaatgttc

SEQ ID NO: 81869 - DNA, 1076 bp, Homo sapiens
tgtgctatgatattacaaaggcaacaatgtcaatagaaatttttcagttccattataatcgtatggagtcttcatagtacatactgtacagcctgttgttgactgaaagagcattatttggcatgactctattttagcctctccttttgggctggtcatatttccagataagcctcttcaatctcccttctgcagggtgaagagtgggctgatgcctgtgttcttagagtgagcaagcaattggactgggacatcagtatgaatactgcattatgtatggtcactgaattgaattgtgtttttgattaaggactctcttaccctacagatgaataaatttctagctttctgctaagggaggggaggggcagttacctggcagttggggaagagctttggagcaacacctgtttttcagatagctctccccacaggcctttgctgacttaggattcattcagctttctgctacgtcaggcaccacatgtcagtcttctcttcagttcccaaaatttgtttctcttgtcctttctcctgttctccatattcttatgagtcaaaaaaaaaaaaaaaaaaaaaaacccaacattttcttaagtctctttactgtggttttagtggagctttttgaagaagcaagattcgatgttcatcttaactctgatgttatcagagttatcagagacttgatgttatcaagtctcacctgatctgcaacctcctctagaggaccttcccatacctactgccactccactccccataacttggttaggtccctcactgtgggtgcccatagcactgtgtgcttcttttatgcaaacactattaatatttgttgcaattggtggcattcttctcgttcttgctaaattcaatgctctgaagggaaaractatcacaattctgtccccagtgcctaaagagagcctaacctgcagcaaatacaccacaattatctcctgagttaatagattaattatttctgatgttgaacagcaaattataatagaagaggatttggctaatttctatcttatttgatttaggggttcaaggcctttaaagccaaaagt

SEQ ID NO: 81870 - DNA, 852 bp, Homo sapiens
ttgtgtataatgtatgcaattaagcaactaagtgctaaaagttagaatttaacagaaattgcaaagagcttttctactttccttattcccatctcctaaaacagccatcatatttctaaccccgaaggcctcttgatgttcaactctttctcctacatctgctaccaaccccattgtttgtggaccataaatcctttaatttgacaaaataaaatcttcagcttgagagaagtgctttccccaaagaatgctgtgctcaaaatcggaagctttgggcttttagagggaaaaatactctattgctgcaaatgattactatttctatttgctttataggttgttaagtgtgtagaagatgttcaaataaagctggctagaaagtataatagctcatggatttttataatggaaaacaaaccccaactgaaattaggccaggctctcccattcacagaggtttctgatacataagtgtaatgctccctcctggcccccaaatgcagaggggataggtcttgattcaccactgggtgcactggcagagccaaattctaggctgaggtttcggaaaagtttrttggtcatggcatcactcctggcaaacacaaatttatcttttttccgctgaggtcccagtttgcttggcaagacctagtttatctggcaaagctaattcatggtgctccagcttttcagaactgcctgcctcttgcaaattggctgggtgtggtgattttaataggctcactgtttagaatatattttcacattttctttcatctgtttattctttggtttcctatcccaatcattcctgccttttcttcttcatttgaatgctgaaagttttaa

SEQ ID NO: 81871 - DNA, 1630 bp, Homo sapiens
tatgtcaataagaaaccctcaaaattaaaaaaaatctgattcctcatcaagaaaaccatttatataattgtttcactttgttacttacaagtctttgaaattttctattgctcttaggataagcttcaagtgcattaaagtggcttgtaagacctggccccagtctcttctccagctcccaccctcacattctaatcacaacataatcaatttctttcatttcctctagagtattaaactctcttgcctctggatcttcatgttgtattttatcttcctggaatgctcttcctagtcctccatctgggtaactcttccttatttgtgagtctcagctcacaggtggtttcctctgaggagcatccccacatctgcttggtttgggttaaggtcccctcctctgtgctgtgtcatcacagcaggtcgttgcggcttagttctctgtctcttctaccaatctgtaaaatagccatgtctttctgttaccattttatccttgaaccaagcacagtgcctggctggcacatagtaggtgcttaataaatatttcttaactgaatgggtgcattggaataatttgttgagaaaaggaatcaggattaaagtgattttctaggtcccatgctgcccttgggtgcctgaattatcaggtcaattcagactgaacaaatattattgaacacagatatgtgccagctgcttccacctaccctatttcatttgatctcttccttagctttctattttccagctgaggacagtcggacccagcgaggctaaacaacttgatcatggcaacccatgaatagaaagaaccttgagtttcagagacctacctcattgctcttggacctatatcagggtgctgtctctttaaacatgtatgtgcctgttattctctgtygccacagccatccactaggctatcttattagaacataagagctcttgaattgctgacataaaagttacaactgagaccaaaatcaaaatggaatcctggaaaggaattggggaaggaagcgctggtctaagattccagacatttgagtttttgtctttcctgtgtgactctgggaaagttgtttagtctctgtgggccttagctttctcatctatacaatgagtgggaattattggataattttgtaggggccttcccactttaaatttaatgatccttgcaagctggtatgagagttaaaccttaacactttgagaaaatgctggaaatgtcgtattaggaatgacaccacagactgcagccttatttcaagttaagtaaatcctagaagtagatgtccacttttaatggaaaaaaaatgatacattttatttccatactgaatcaacttcctaccttaaaatgggatttctgctatgaaaatggcctgacaagtgacactgtggtgtgggtacataaaaaccaaaccccgcagaacttagatgtaaaaatttctgaggaccttcacctgtgtgacaaaatgtagaatatacccctttaatagattcagaatcaagagatacatttctagtagggcttttgaagtattgagacctctcatggaaaatggatctcttttctcttttaggaatgctgcacattttttgagaagttaattaagaacag

SEQ ID NO: 81872 - DNA, 1257 bp, Homo sapiens
ttaatgcacagagtctggattcagactctttcagtttgaattctagctgttctgcttagttttgtgaacttgggcaagttgcacacttctaagcctatttcctcatatataaaatggggccaagcataataactatcacataggtaggatagttgtgactatttaaagcaaaatgttatgaaccaaacagcatcattacttgacttatacatgtgtcaagaatactcatatattcatatatatatatatatatatatatatatatatatatatatcaaacttgacatactrttcaaatattttgatagattttattactgtgctgatagtggtccagttgtagtactgtaaaaggaagttaggtgtgtgatttggactatctagaaattacaatcaccctcagtatccttgggggattagttccagaccctcttaccctgcagatactatagtctctgcatactcaagccccttatataaataagattgtgtagtatttgagtacagcctacacacatcctcccttatactttaaatcatctctagattatttataatacctaacacaatataaatactatgaaagagttgttataatgtattgtttttatctgcatttttttattttttatttttttctgaatatttttaaactgcagttggtttaatctgtggatgggaaggcaaggatatggagggctgactgtacctttaaaacacattaaatgctaagattctctgattatttttgacgtgtgaaaacaactaccactgcaaaacttatagctgcagcaagagatattttgggggggagaggaagattaaaatctcccccacccacaaaatcaacccagataaatacaacaactgagtaaaaatagtaagccttattgtgagatcaacttcaagccttccccttctaaccagaatgttatgtataaatccttcctgaataaatacctagtgacatactcttactgttttctaatttttttgcggtggaacacagacgtcagtgagggctgtaaaatgggagttcctggctttgactcccagcctagcctcttattagcagtgggaatataggcattttccttaaccatggtgaacagcagttttttcatctgaaaaacgagaacagcatttgcacctacttcatggaggatgtttgaggattcacatttttaaagtgcctagaacagtgcctgacacagaacagtcattcaaaaaagcactcaagatactactgacaaactt

SEQ ID NO: 81873 - DNA, 274 bp, Homo sapiens
ccagcctggctaacatggtgaaaccccatttcwactaaaaatacagtaaattagctgggcgtggtggtgcatgcctgtaaccccagctactcgggaggcagaggtaggagaattgcttgaacgtgggaggcggaagttgcagtgagccgagatcgcatcactgcaccccagcttaggtcacaagagcgaaactctgtctcaaaaaaaaaaaaagatttagttcttttgtgaaaaatattcaaagattacttttttgcaaaagatcaccaagcca

SEQ ID NO: 81874 - DNA, 637 bp, Homo sapiens
ggctagaatacactaactaggtcaaacattttaggctcccaggcaccacctctgtgttgtgaaagaagacttgccttctagtctctacatgatcacttactagctatataagtattaggtgcagttatatcagtagcacaccaatattaggattgttttcaaaatcaaacatgataatatatcctaaaacacattataggtcatcttgcataaacattagggttttagtagtaccaatacagagttgtccaaatttctttttctgaattttttaggtcttcmtgaggttagaaagggagctgtaatctagaaagaaaaaaaaaataaactgagagagctatctgctgacaagctatactcagcccaggtctatagcaaagcttgccactgattacaacccatgaccaagactctcttctgtctatccccagttgcccaccttgagtggaacataacatctctaaatttgccttaaataaatacataccatttattacttcatgaaaactttgattcattttttccattcaatagcagcacatttctgagcagctatatgaaagtaaatggtaaatggatggtaaaagccattctgatgaggcctcagacagaaatgactaacaaggtattggaaact

SEQ ID NO: 81875 - DNA, 842 bp, Homo sapiens
agaaacaaggtctcactatattgcccaggctggtctcaagctcctgggcccaagcaatcctcctgtgtcaccctctagtgctgggattacaggcgtgagccactgtgcccagcctcttaaccaattttaagtgtatgatttagtaatgttaggtatattcgtgttgttgtgcaaccagtttccagaactctttaattttgcaaaactgaaactttctatccattaaacaactccctattctctcctcccctagccccagacaaccaccactctactcttgataggagatatgaatttgactattctagatacctcatataggtggagtcatacagtatttgattgtttatgamcagtttacttcacttagtatagtgccctcaggatttattcatatcatagcatgtgtcagagttttcttcctttttaaggctgaaaagcagcctattgcatgtaagtactgtgttttgtttatccattcatccacggatagacagtagggttaattctaccctttggttattttgaataccactgctatgaacatgggtgtatggaatgatttaactttcacacataaatgagatttagaattatttttctcataactctcagaagctcatatcagctaccttttaagaccagaggtgtagctcagaaaacctaccttccagggatactgggaagattaagggaagtagccgagggagcgtaccacacacatagtaggtgctccatatacttgccatcccctttccttcccttctcttcccttataacttgccccattctaggtgcagattgctggggagtacacaagtcccatggttgcctacagtgca

SEQ ID NO: 81876 - DNA, 585 bp, Homo sapiens
tttctgcttgacacatgaaattaataattagggtgaaaaattataatcacacccaataaaaggcatcagttgactgggttatcagaggtattccttggcaccaggattccatgtggtgaggcctttcaggtgctggttttgatttttcccagtgtgcattttgctcccacagagctctcttagaagcctacagaaaaatggggaatgtagatagaattgcatgctgagctaattaggcttctatactcaattcttttgtcggagtggagtagttttggaggggaagagcaaagcgcatctttactccaacacctcattgcttccctatgccaagcaatattggaacgacactctgcagcattggcccattggtcatcatggtggggtgctaattctttaagcctgaagcatatggmaatgagcttgcactctggagtttaaaggaaattagacttggctaaagttaattggatttaagttatagagtgttatggacaaagtacaggccttgcagtcccctagaccactagctctgttactagctgtgtggcattaggcaactctttccacttttcttgatagtag

SEQ ID NO: 81877 - DNA, 787 bp, Homo sapiens
atggaatattagatggtattttagcatggactatgtggggacattctagtgcattctttcttatctggcagtgtccattaaaattacctgtgtatatgtttcaaaatagagactctaagtgcccacctcaatttactgcatcaggatttaagtgtgtgtattttgaaaaaaaatcttccaaatgaatctgatacatactttcttcagagccaattatttgagttttctaatagaatttaaattgtggaataggcacaagaattagaactcattgtggaatagcaaagtaaacacagacattaaatacaaagatttataaacatttctgctttgaaatgatgctgttacatttccatgtgtagtacatatcctatagtaaattcatctagagctgtaaagcttctattatggagagattccactagtacatagagttttacatttttttatttgattaagttctgcaatcattgtgtgtgtgtgtgtgtgtgtgtgtgtgtgtagtttacaggctcattttaccttagaaattgtatagtagtttggaaatgagagtcagatatatgaatataccccacataaaccttctaaccgaattattctccctacctatgaatcttctcctttcttgtctttccctttagtactatttggaaaatkagccttcagccttgtatattcttctttcaagtatggttctctaggaaagtgggagtaaggaacaaatcaacatgaaaactgttttcaagtcattatgttagattggctttaagaaatgtggagaaag

SEQ ID NO: 81878 - DNA, 1383 bp, Homo sapiens
atagctattggagcgaatttatgtagcaaattgctgtctgctgtattcagattattccctgagctctgactcattcagaaagcaccaaatatcacggagacacacaattatcatgcttaattaatgtttgcaaccaaaaagtgtaaggttggaattcttaatatcactgtggatattgaagagctgaaattgactgactgttatcttgagattaatatattttccccaagccataccctggggtcaaaagacagagtattaaaactatttgaaaaattcactgcaattaattgctttaggggctaattttttttaatgtcttgcttccttacgcctgtactactgactgttatagcctgcagacttcacccattaagtggtaattcagagtgacaactacattgaaatgaagcaagttagttaatcaccatgaaactgttcctgaaataccctgtccaagtactccctagtcacaggagkcctctgattacctgattttctcctgaagttagattttcatgtacaaagttgtaattatttttattttaaatacaggccaggggagggctgaagtttggttggaattgttatcagagccattcagaatttttcacaggagaccatagcgactctctgattgcgtagagccctcatggatgtgctgcagggatcctaggaagctgctattggcttcatccccgcagccttgaaatactgacaagctaggagtctgggtagggctgtggcagttataatatgacttggttttcatcaaagcatgacctccagcaacaagaggctcgatcaataggcacgggcccagtcttgtttgcccattttggttgacctgcttggacaaccagggtgacctgccctttgtcttcctttcctttatgattaggtgggctatgccctgaacagtcatgtggtgcgtcctcctttcagagaaggctgtgttgggactagtgaactatgtgggtccctgaaaaagtctgccttttagaagggatacagcagccagctgaggggctaggtactactgtctaaactgccacagcccctgcctggcttgcaggttccttgatatactgtgaatcatccatggcacatttcttatccctgcatgattgtatatccttctctcagtggggatatttgtggaccagctaaagtgctttcaggggctaaagataaaatcaagtattctagctgtcagattggctataggaagaaggaaaccccctcaaattctaaatctgtctacactccttttcaagagaatggcattcggtggctccaaggaaatggtgaccaattaggtagttccctgtatgcccataaacccacaacctgatgcttgaagtcatgacctggagatattgt

SEQ ID NO: 81879 - DNA, 890 bp, Homo sapiens
atatgtgtacaccaatacacacagactcttggttacacagatatacwtacccgtatctgtagataaagttttcactaacctggtagtgttttagtgtggagtgagaggctcattttgtaaaataataaccttttgtaggaacagctccaagaagagggagatccacaaattaaaagtgctgtgtgtgagcgtgtggctgcagggagacatgtgtgagagacagagaaggtatggacaggtgagccagataaagttaaccccaggccaaggaggagcaaggtggaaaatcaaaggggattgtgcagccacctctgtgagcagagactgtcaggacagaggaggaacttgcaggggacactgatgggctgtttattcccgtagcatgaattatatgagacttagacctcagcagcaaggaaacaaaaggtcaaataacagaatgcggattatgggaaagagtggagtgcagacctgtgggagtgagtctgtctggtccatagggccaaggctcaatacaggcctacctgacttgaaggagcccaagctagtgagtcggctgtggccaggcagagccagcctgcactccaaggcaggcagggagaagcatgacctccagctttgacgtcaggcaggggtctcagccttcccagctggggtgatgaaagaatgactaagctttctttaaaagagaaatcaatggaggactttagagctggatgtccattctaccatgttgcactgatttctgagattctattttattttgtagctttttaaaaaattaacatttgctcattaaaaaaaggcaaagatacccactcttatagtccgtgttgactttgtggaccttacctaaggaattgtacctaccaccctcaacccctccaatg

SEQ ID NO: 81880 - DNA, 607 bp, Homo sapiens
tcctatttccctgaaaagatgaaaagataagctatcctatggtgaaaaattgaaggctgtatgaattgcaagggggggaaattatagttgaaatgctattatgaatctttttgaccagacctgccgaatataatattaaaatttaaacacactgtctcaaacattgctcaagaacttcacgaaaccccttcatgtggtcatgccctgttctcatggctgagtgcgcgctctgatgaatgttcccagaggacagggacaaagtragtgtctcagctctctctgcatgatccttttaggaactcttctcacaggccccaagagcagaaatgtaacaaacatttattggccaaaaggcactcagttcgtgactaccacttgataaaatgttcgtctgtgcattaaagcttgccttcagtaccaaagagcgaatgaagctccacaaggtcttcatctaataagcaccccgggaagacctggcctcaggagagtctgactgcatggagtaagagggctatgcccaggcagtgccaacagcagagggctaggagccggtggcgagaggagcaacagaggaggtcagggtggagtgaggagggctaccaagaac

SEQ ID NO: 81881 - DNA, 718 bp, Homo sapiens
cagtaaaggccgggtgcggtctctcacgcttgtaattccagcactttgggaagttgaggtgggtggatcacgaggtcaggagttcgagaccagtctggccaacaacacagtaaaaccccgtctctactaaaaatacaaaaattagcagggtgaggtggcgggtgcctgtaatcccagctacttgggaggctgaggcaggagaatcacttgaacccaggaggcagaggttgcagtgagccgagattgtgccactgcactccagcatgggcgacagagctagactccatctcaaaaaaaaaaaatawatatatatatatatatatatatatatatatatagtgtttttatatatatatatatatatatatatatatatatatatatatatatatacacacacacacactatattattatacagcagtaaaaataaaaatattgctcacggctgtaatcctagcattttgagaggccgaggtgggtggattgcttgagctcaggagttcgagaccagcctgggcaacctggcaaaaccccatctctataaaaaaatacaaaaatcagtcagatgtggtggctagtgcctgtggtcccagctactcaggaagctggggtggaaagatcacttgagcccgggaggttgaggctacagtgagctgtgactgcaccactgcactccaacctgggagacagagtgagaccctgtttcaaaaaaaaa

SEQ ID NO: 81882 - DNA, 1333 bp, Homo sapiens
cttccaacttctgcccattattcaattccaaaattccttccacattttcagatatctttatggcaatgtcccactccttttaccaattttttgtattattcagttttcacattgctataaagaaatacctgagactgggtaatttataaagaaaaaaggtttaattggctcacggttctacaggctatataagaagcatgatgctggcatccactcagcttctggggaggcctcaggaaacttacaatcatgacagaagacaaaggggaaacaggcttgtcttccatggccaaagcaggaggaagttgtggggaggtgccacacacttttaaacaaccagatctcatgagaactctatcatgagaaccacaccaaagggatggtgctaaaccattcatgaaggatccatccctgtgatccaattacctctcaccaggccctacctgcaacattggagattatgatttgacatgagatttgggtggggacacagatgcaaaccatatcaccatatagacacgaagcataccacatccttctaaacctatgattagatcttcctaccctgccagatgggatgtgccctacactgtgaaagtatctaagtcccatttgatggcaattttactttctctgtgttccctagcacttagtacatatcttagaacattgatttatactagattgtatttatacataattttctgatacataccattatatctcaattttcacattgtcttctctcacatcctggttccccatttggtgcatgtgtgtttccattggcttgtgtatttcaaacttcatcaaagaatactaccatctcaattccaaatttttaaaaattaggttttcattgatattattgtccagttaatttatttactaagrttgccataacaaaataccacagaatggatggcttaaacagaaatgtattttctgacagttctggaggctagaagtccaagatcaaggtgtcaacagggttggtttctccagaggcctctggagaggcttgcaaatggctgccttcttgctctctccacatggcctttcctctgagagtttgcactcctggtgtctctctcttcttaaaaggacaccaatcctattggatttggactctgcccttatgatcttatttaaccctaagttcctccttaaaagccctatctccaattacaatcacattagggtttagagctttcatatatgaatttggggcataatttattccacaatacctggtgtggcaggcagcatatttaaatgtcccctaaatttccttccccctgatgaacatgcttcctcactttaaagatgatgg

SEQ ID NO: 81883 - DNA, 1333 bp, Homo sapiens
cttccaacttctgcccattattcaattccaaaattccttccacattttcagatatctttatggcaatgtcccactccttttaccaattttttgtattattcagttttcacattgctataaagaaatacctgagactgggtaatttataaagaaaaaaggtttaattggctcacggttctacaggctatataagaagcatgatgctggcatccactcagcttctggggaggcctcaggaaacttacaatcatgacagaagacaaaggggaaacaggcttgtcttccatggccaaagcaggaggaagttgtggggaggtgccacacacttttaaacaaccagatctcatgagaactctatcatgagaaccacaccaaagggatggtgctaaaccattcatgaaggatccatccctgtgatccaattacctctcaccaggccctacctgcaacattggagattatgatttgacatgagatttgggtggggacacagatgcaaaccatatcaccatatagacacgaagcataccacatccttctaaacctatgattagatcttcctaccctgccagatgggatgtgccctacactgtgaaagtatctaagtcccatttgatggcaattttactttctctgtgttccctagcacttagtacatatcttagaacattgatttatactagattgtatttatacataattttctgatacataccattatatctcaattttcacattgtcttctctcacatcctggttccccatttggtgcatgtgtgtttccattggcttgtgtatttcaaacttcatcaaagaatactaccatctcaattccaaatttttaaaaattaggttttcattgatattattgtccagttaatttatttactaaggttgccataacaaaataccacagaatggatggcttaaacagaaatgtattttctgacagttctggaggctagaagtccaagatcaaggtgtcarcagggttggtttctccagaggcctctggagaggcttgcaaatggctgccttcttgctctctccacatggcctttcctctgagagtttgcactcctggtgtctctctcttcttaaaaggacaccaatcctattggatttggactctgcccttatgatcttatttaaccctaagttcctccttaaaagccctatctccaattacaatcacattagggtttagagctttcatatatgaatttggggcataatttattccacaatacctggtgtggcaggcagcatatttaaatgtcccctaaatttccttccccctgatgaacatgcttcctcactttaaagatgatgg

SEQ ID NO: 81884 - DNA, 675 bp, Homo sapiens
cacagaaacaatacctgtcactacatcccattgctcggctctttagtgtgcttgcattcatgtgcgcgcrcacacacacacacacacactcttactattcttttctccctcttttatgaacgtttgttagaatgactatttaattttgagaattcttgtggtttattgtgttataccatttagtgttatagatgaaagtttgatgcttactgatttatttttctttgtagtttgctttgttatttagaagcgattcaaatttctttttagccttagaaaatatgtatttttctgggctatttctacaaataagttttattctcccaaataatctgccctgctttcagttagttctttttatctgagactcaagtttttctttggttcaggaacaattaatgtcgttttatttttgatgaatcttctctttagtctgttttttttttaaattttgcaactgtcttccattccttgtatattttaaagcataattttaattttaaatattttcatattgcttctttggagaattacttgaattattcccaatattctacttaggagcatctattttgctgttctatcactctcttgatatttttattttagcaacaatgttttatgttttcatataaaattagtaatttttagagagttctcttaaaatgtcagttt

SEQ ID NO: 81885 - DNA, 1064 bp, Homo sapiens
ggaatgtaagtttgattgactgtgttaaccttcatgttgagagccttttgaagcagaaatctcttttattggtacacatacaacttgatttcaaaaatggaataaattagaatataatggcatagtataattaagcttggtttcatctgagatctgcaaccacattaaagggtgtcagaaaaattttttaaaatgtatttacttagagttctttcatctggggaacaaaagtaaaacaaagtgaattatataatataatagtccttttagaacagcagagtggtatccaaaaatcaaaccaatgacctactaagaaaagcagaggatcacttttctaacaacagtccaagaaggcctgaagtacctagtgagccacacttgaaatttcaccacttcataaatatctgcacacactgagtaaataaccctctatcacatagccttaaattgcacccctgttgcaatactgcattaatattattacatttttcaaaatctgtagaaaatattatctggaaccccaaaggaaaatcaattaatttttaaaaagttcattacaaagttgactgtataaaatgctaaaacataatccatatatacaaaatgctgttgtttaagaaaataatgggacccagttttagaataaaataattttatacaaaaaagcctactgcattcaaatcaatattttaaaaaaaaactttaaaaaagaatattgacatgtcttagttcagaagaataactataaagtgttgatttgcttttatgccctctgcacatcttgcaggtagaacaccagtcagctgagggaaagtatcctgcttctccctaggmagagattcatcaccaaggcagacagtcatcgccgagatgcgtacttggaagcccagtctgtccggccatgcactggctgggcggctggaggccgtggtatcaacccaggagtgcttctaggctgggtgtggaagaatggtcgcccaggatgaggtctcatggccttcagggaggaataacctgcaatgaaagaaaaaggccggcatgactgatatggggccaatgtaagc

SEQ ID NO: 81886 - DNA, 958 bp, Homo sapiens
ttaacatcaaatattattcagtaagtcaatggcatgataaaaaggaaaagaggactattcaagattaaaagactcagaagagactagagagacataacacccatacacaagagggggctttgtttggaacctgacttgaatgtattaactattaaaaaaaaaaaacaactttttcaggtgggcacagttgcacatgctgtagttaactactcaggaggctaaggcaggaggatcatttgcacccaggagtttgagaccagcctaggcaacatagcaagaccccatctctaaataatactactactaataaaattaaaaagtattttttcaatcaaacaaaattcaatatggtaataaggaattgttagttttgttaggtatgataatggtattgtggttatctaagtagatgtcctttttcytgagatgcgtttggaagtatccggggtcaaatggcatggtatttgaattttttaagataccagcaaaaaaaaaagaaaaaagacagatgaaacaaaaatggtaaaatgtggaatactgttaaggctagtgggttcttgggggatcactgtatcactctatttttctggattcgtacctgcaccaggagctccttttcccaaatgcctctccagagaagacatattcatagttcttttatttcctagtcattattttccttttaaaaagattaaactgctatttccttgcctatgtatgttttcattttttaaaaaagtagtccctttaattcctgttgcatcacctacaataactcttaactgcccaactttgatatcattagagccctcttcacttttccacgtctttccattccttaccatctattgtctatatttttactttcatatcattgaggttgattagcattactgttttataaccacgagctttgtaatttgtctataaattgattgtgtttatattataaccatgt

SEQ ID NO: 81887 - DNA, 713 bp, Homo sapiens
aagtcagctcctcagctacccttagttgaatgcaacagccccttgctgtgtctcgcgacttcagccaccttgcatgctatactcagatctaccatggacatggttatgggaaaggagccacagaaaacagtagccttaatgtgtccttcacagaacagaaccctgggcttttggattaggtttagatccatgcataggaagcctctagtgtaaagagttcctggcaggagaatatggcaatctaaatgttgcgcaggaaaagccctgggatatctgatttttgcatagtgctaagagtttcattttcatacacttgacagagcatttatctgtcttctttacagcctggttgatgatcgttgtgttgtacagccagaaaccggggaccttaacaatccacctaagaaattcagaggtaaggtggtggctttcctggagtagtcaccttgactcacttgaaaattcttgaagtgtgttgttggtgtgtgtgtgtgtttataagcaaaataggcttatttattatgtatttttttcagagtatgatttsagttctaagctttacaacttgaaaaatgcatacataaatttagtatcaagattgggttggcttttactgggtccttaatttgtctattgaatatgtgttgacaagtgctaattcggtttaaagtcttacatttgtacaggtatttcttcaaacaaatagtatttat

SEQ ID NO: 81888 - DNA, 2494 bp, Homo sapiens
gcatgctttaaaaagtagagtacctagaattggttactgtcatgcagagcagtctagacaatttcaactgtattataaaagacttagaggcaataataggatcttctggcctttaaatcaaagcttcttaagaagaaaaaggaagctgtagaaaatactcgaattacccaaaactggtaccatttttttttttttttaagacggagtctcactctgttgtctaggctgaagtgcagtggcatgatcacagctcactgcaacctccgcctcccgggttgaagacattcccctgcctcagcctcccacataggtgggactataggcatgtgccaccatgcccagctaattttttttttttttttgtatttttagtagagacggggtttcaccgtgttagccaggatggtctcgattgcctggcctcgtgatcctcccgcctctgcctcccaaagtgctgggattacaggagtgagccaccgcgcccagccccaactggtaccatttttatttccttcaagtttagaagacagttacataaccatcactatcacacacacactgaacaccatgtccagttgtgtccaataatcaccctttgttcttttaactatctttttgcctagaaggcaaaaacatgttggtgtcccctagaagctaagggagatgcccattcagattgaaactcctaacttcaaggcctgtggttttaagaactccaaggaagcttgcagcaggtcaagcagcagcccaatgcctgcccatatcccctggccctttctgtgctagtaacttctgacctgatttcccagtgccaccacctgcttctctctgcctgaggctttctccagccatggaagcttatgttgccgcctgtatgccaggccagaagctgcagggaattaacactccccaacacagaagccctcaaccacaaccaggggaatgcatataaatatgcaagtttcctggccccttgaacaggataattctgaggtgtatgcttcctcataagaacagatgtctaccagggtttctcagtggggattaaactccattagcccacaaaggttacagcaagtttcgatggctgccttccctttcctgttccactccctcaatcccttgccagggtctccctcacctcccaatacattcctgatacagagttggcttgtggaggaacccaaattaatacaaggctcagctgtccagccatcccttaacaccatgaagtggtccttggagctcattggtttgagagtggggttccaggtgaaaatgcaaaacccctgaaagaagcctcctgtcaagcattgtgagctattcatagtttaatgagcagaagggacttgacagccacctaggcaggtaggagtgaaaaagaagagaccaggagtctgggtggtggaaaaaagcacacctaggaaggagagaggcgaggctcatcactccattccctctcttggctgggaaaaagttgctctagattgaacacagctctaactcaaatcagccccactgcacatgaagtccgatcacctcgatttcatttgactgtgtcctgtgctctgtctgaaccttgatttcctcatcttgaaaatgggaatactactatattaatacctccccctgagggttgttagaattaagtaaaatattctgcatagtggactaagcacagtccctggttcatacttaatttaacgattattattaattctttctcatgattatcattaccttttcaaatcatacaattaggcttgaatttctaatttgcccccctgacctaccaggcagacaaagttgccacaaggatccaatatcaaagcaaatgataaccacaaaaatcagagcagctgctgcgatttgcacatcttctctccacctccctcttcccctggcacacacaccagccccactgactgttgagcctgtccatttcctttttccttcctaagctgggyggagatagacaggaatctcatgtgctttgaaagacgccgaacagctgcaacaaaaaacaaacgggagaaaggaacagtcacactcatcaacacaaggtgaatatgcggtgggaaatgctcacatctcatgtcctctcctgtccagctctgcttccctgtgtgagctgctctgcggcaccgacagccttccagagccatttttcaggcactttgcagcagatgtgatcgttataaaatgcactgtcccaggacttaggcatttatctgttttccataatttcagtttttactacctttcctttaaagacagcaagacacagattgagccataaactgtcagatttgttatcttatgaggctactaattgcctaaaatgtgagatgatttgaatttccaatcaaacagacagataggaacacacattgcaactccagcaggagttgtaaaactctcgagctctgttttccccttttaatctctatcagctcagagtattgatatggacatagagaaaataagtgcacat

SEQ ID NO: 81889 - DNA, 947 bp, Homo sapiens
actaacgtgaactcttgttcatcgtgcaagggactaacaggaacttttactaaggggctaattcattctgggttccatttgttttcttcatacaaaagctcttgagtgtgcctcctacgagaggataaaactctctgggcatttttgaaagtactgaggatagtgaagttttttaaagtagtactctgtctcttactccaataaggaatcaataggcactttacaactgcagttaaagtggmattttcaatcacactaatcatgggcaagtttcctaagtaattaaaaccactttaaaacaaaaaagaatggtgatcattcatgcttggtttgagatctctacctcacagctgttgattttagaattagaatgtagtggtgtgtccaaacaagttttgccaccaggattagatgctagtctcactagaaagtgaatttaaattcgcttacttcaacccccatctcatccccaccacatttaaagatagaaaagtatctatatgatctatatgtctacttaacgacagactcagcttcaagtctgtaaggttttttgattgcaggtcattacagtcttgaccctgcgtaatgccttcagtctctccagatgatcatgctattaagaggtcgccacaacttttgataatattcatcttccctgatattttgaatctcctgctgagacacaggaagacaggaaactagactatgttcaccaaccatttgagtgattctgtgtgccatacactagagctgctgatacataaaattcctgacatttaagtggaaatgtctgcactataagactcgcccataactcctaagtcacatcataagaatttcaattgcataaaatatatgcaagtcttaggaaatgtttgtaagttttaggaaatgttggtcagggccttcatagccagctagatgtttcagaagtggaagtgaat

SEQ ID NO: 81890 - DNA, 1611 bp, Homo sapiens
gttttggtaagctaaatccggaaaaagaggtgaaaagagaaataaagaagagagaaaaatggaaagacttagttgcttatttctgccataaaatataaaaaataatgatttatttccttygagtcaattatttccctgttataactttatttttaatttcacattttaatcttttatactctctccccatgaaatagcctgaatgttatttaagaattatccaaatagaatttgagtaaaataacattacagttagtggaaataattcagccttttgagtaagctgaatacagttttggttctgtctgtatcactttttaaaatatattgttgaacaagttagacctcagagtccccattttgaaaattgcttttgtggttgaatctgcagattagaagtgtaatatgcttaaaacacacaaacagggtgctagcttataacaggtttattaacatgtagagttttatatacacctgaatgatagccagtaaatcagtagttctgtagggatttattcctctcccttttctccttttccttccccttatccttttgatttgataagatcttaccagatactaggaaagatactaattttgaataaagcaaaagatcacttacccataaaaatactcatacctttacctttaagttcctcatcctttcttgcccttaccccttcagtaaaatccaggaatgtttttgttttttcttttacctgaatggtatagatacttttttcatttgtaggaaaatgcaatgcttattagagttaactgggagagaggggtccattcatccactcaacagttatttattaatcacctaaacattcaaggcagtgttctagtagttgggactaatcagtgaatgaaaccctgtacttagggaacttatattctagaaggaaaaacacaccataagcaagtaagagtataatataaaaatacatagtggtaagtgctatgggggaaaacacatcagtgcataagatggagagtgacagatttggagagggctagaactgctgataaagaagtcttaggtggtattatttgtgcctatacttgatgaagtgagcgagggacaactgcggtgtgagcggagatttttaatgaaaaaattatcctggccgggtgtggtggctcacgcctgtaatcccagcactttgggaggccgaggcgggtggatcacctgaggtcaggagttcaagaccagcctgaccaacatggggaaatggtgtttctactaaatacaaaaaattagcctggcgtggtggcgcatgcctataaccccagctactggggagtctgaggcaggagaatcacttgaacccaggaggcagaggttgcagtgagctgagattgcacccttgtactccagcctgagcaagaagagcaaaactccgtctcaacaacaacaacaacaaagaaaaggaagagaaaaggaaagaaaaaattatccatgacatttgttaaaactgtaaggctgactttattcagcagggactactacaatggtgtttggtagtagggaagagagatttggctcaactttgaatccagtgaggaagagtggagacttatagccaaggagcagagtagggggat

SEQ ID NO: 81891 - DNA, 1611 bp, Homo sapiens
gttttggtaagctaaatccggaaaaagaggtgaaaagagaaataaagaagagagaaaaatggaaagacttagttgcttatttctgccataaaatataaaaaataatgatttatttccttcgagtcaattatttccctgttataactttatttttaatttcacattttaatcttttatactctctccccatgaaatagcctgaatgttatttaagaattatccaaatagaatttgagtaaaataacattacagttagtggaaataattcagccttttgagtaagctgaatacagttttggttctgtctgtatcactttttaaaatatattgttgaacaagttagacctcagagtccccattttgaaaattgcttttgtggttgaatctgcagattagaagtgtaatatgcttaaaacacacaaacagggtgctagcttataacaggtttattaacatgtagagttttatatacacctgaatgatagccagtaaatcagtagttctgtagggatttattcctctcccttttctccttttccttccccttatccttttgatttgataagatcttaccagatactaggaaagatactaattttgaataaagcaaaagatcacttacccataaaaatactcatacctttacctttaagttcctcatcctttcttgcccttaccccttcagtaaaatccaggaatgtttttgttttttcttttacctgaatggtatagatacttttttcatttgtaggaaaatgcaatgcttattagagttaactgggagagaggggtccattcatccactcaacagttatttattaatcacctaaacattcaaggcagtgttctagtagttgggactaatcagtgaatgaaaccctgtacttagggaacttatattctagaaggaaaaacacaccataagcaagtaagagtataatataaaaatacatagtggtaagtgctatgggggaaaacacatcagtgcataagatggagagtgacagatttggagagggctagaactgctgataaagaagtcttaggtggtattatttgtgcctatacttgatgaagtgagcgagggacaactgcggtgtgagcggagatttttaatgaaaaaattatcctggccgggtgtggtggctcacgcctgtaatcccagcactttgggaggccgaggcgggtggatcacctgaggtcaggagttcaagaccagcctgaccaacatggggaaatggtgtttctactaaatacaaaaaattagcctggcgtggtggcgcatgcctataaccccagctactggggagtctgaggcaggagaatcacttgaacccaggaggcagaggttgcagtgagctgagattgcacccttgtactccagcctgrgcaagaagagcaaaactccgtctcaacaacaacaacaacaaagaaaaggaagagaaaaggaaagaaaaaattatccatgacatttgttaaaactgtaaggctgactttattcagcagggactactacaatggtgtttggtagtagggaagagagatttggctcaactttgaatccagtgaggaagagtggagacttatagccaaggagcagagtagggggat

SEQ ID NO: 81892 - DNA, 894 bp, Homo sapiens
  misc_feature (1)...(894): n = A,T,C or G
tnnnnnnnnnnnnnnnnnnnnnnnnnnnnnnnnnnnnnnnnnnnnnnnnnnnnnnnnnnnnnnnnnnnnnnnnnnnnnnnnnnnnnnnnnnnnnnnnnnnnagcacagacaggctatggcctctctcaggagctgctccaaaggctgtgggatggacacacggacactctgtccttctggctgcccttccctcccgttgcacaggcaggctcccagctcttccctctggcagctgcctcttagggtgttccctggccagggcagccgggcgggcrggagctgcgagcaggtatccagatgagaaaccacttgcaggccaggcaggcagtgggcggtgatgtcatcccacagaggccactctggatcccctctcagccaaggcctgcagaactaggggctggaggagtctgcctgagtggggagggggcagtggagggagcctggtgtctttagatgaggagtgcttggcaggagcatggagaaggggtgtacctcttctagacagcagagcctctcctgggttggaaggggcctttgcatgagtctgatccagagatggacccttgtgctttattacagagcccctggctggacctgctggggtcccaggggtcccctggacccctgccccacccttgcctcacatctgcattccttcaactaccacctggatggaaccctggctgccaacttaaacttctcaactgggcttttgccaagtcagtcccatgctccaacgccttccacggctccctcttgcctataaaggacaaattcaagcccagtctttcttgccaatctgagctccccaagttccttgatccccgtcccccacaccaccattcaatacatcattcatgattcaacacatgtatcgagcacccactaggcgcc

SEQ ID NO: 81893 - DNA, 1356 bp, Homo sapiens
gagtttgctgggtgtggtggttcacgcctgtaatcccagcactttgggaacctgaggtgggaggatcacttgagcccaggagcttgagaccagcctgggcaacctagtgagaccccttctctacaaaaataaaaaattagtccagtgtggtggcacacacctgtggtttcagctactcgggagggcraagaaggattgttgagcccaggaggttaaagctgcagtgaatggtgatcgcaccactgcactccagcctgggcaatagagcaagaccctatctcaaaataaaacataaagaaggcaggccgggtgtggtagctcacgcctgtaatcccagcactttgggaggccgagttgggcggattacttgaggtcaggagtttgagaccagcctggccaacatggtgaaaccctgtctctacaaaaatacaaaaattagcttggtgtcgtggtgggcgcctgtaatcccagttactcaggaggctgaggcaggagaatcacttgaaccggggaggcagaggttgcagtgagcagagatggcgccattgcactccagcctgggtgacagagcgagactctatctcaaaaaataaataaataaataaaataaaagagaaggcagagctggccatctcttcaccatcctcccccttgtcactgcttctggatccctgtgagtaagggtgtcctcagctcagccctggagcaccttaggctctttgagtgttggaagaggatcaggtctgggtacataacttcccagctggagggtcagatccttgctatgctaagcagtgatgacaggctggtgacaacagaccaaactaagactgtctttgtatgttggcaatggcccccccagggggaccttgcaaatatgcagattttaacatccctcatttcagatctgtcagggtgggacaagttcttctggcctgtgagctcctgccatacacagtcctggagcctgctggctctgagttgctcatttgcatttggccacagggttctggtcaggggaactcccctctcccccacccttcctccatgacttggctcgctccttctgctccaagcccatggctcagtggacactaggcagctgtctcctggggcgcagggagggtacccttgaaggctagtggataggaagcaagtttctgaatggacactggtactaggtcttccttctgggatgaggtggctccttccagactaaagctggcttttctggctctggctgtgcctgccttctaggtttgtctactgcacatctgacaggtcttgtgatggaacctcagtgataccaagatggagacaatgaggtccttgtcctcagaggactcctggccagat

SEQ ID NO: 81894 - DNA, 755 bp, Homo sapiens
tcccccttcacaccatgaccacttcccactgccctataaccagtyccagtctggcaggacagcagggccctctgctggggctcagttccctaacaactcaagaaccccccctcttcccatcagtccccttctccaatccacactccgtccttgctccaagtcttgccctgagctggtgctgacagcccccaccctgccggtgactccactcctggtaggtcacagtctagcctgcttccgacttgctgctgaatcatatcggccagggagccacaggaagaagaggaggggaggaagggcggggctagcatctccctctagcgttgccagaggctaatgtaattgaaaaggcctcccaagctgtgtcctaaaacagctcccatcagaccactcagccattcattctctgcagctggtccaggggtgactcaaaccacaggtacagtgacccacagtcccaggaaaacagggacatgggactttcagggctcaaactggacaaactgggatgggtgatctcctgtggtccacaggtctggcctggctgggaaagaggggtggagttcctccaaccagcactccatccctccccatctaaacaaggactcctggggcctctactcccaccccgccccatccccgggtgatacggttcctctcttggcccctccccataggatgatgcaagctatgtttggatgagcaggttctggagacggaggcctccagttcaaatccctgctgcttgcagtggg

SEQ ID NO: 81895 - DNA, 700 bp, Homo sapiens
aagagccactgaggcacgggagagagaggaaagggggctgggcctggctgggccggctctgtggaagggtgctgagtacctgccaggtgsagttctgctgaatgctgcagggttgtaccctccactgcccgccacacccctcaccactctccctcccactggcaagtgccttggcagagaaggacacacacacaaacttccagcctgatgttctcacccttctgtctgccagctgacattggctgctgggcccaggatgcctgtctgcggggcctacagccactgggaactgctcaagaggccggctgggctgccagacagctgacttgggggtgaccttcagagcccagcagtcactggggacatgggcactatctagaatatgagggctggagaagatgcaaccttggccaggggagtgacgtggggctcttgaggtacataatgattttgactgctgttatcaacctaaaagcactttttaagctctcgctgtaggcaacctcattaaggcctgtgcaggcaggcagaagagatatatgtgacataagtccaacgagaaagccaacattctcagacaatccacgctgagaattacaggaggggttacactcagtgcagagaaaagagaggtcctgggggctacagaacatcccaggtagcttcctggaggaggaggccttaaaggacaagggggttt

SEQ ID NO: 81896 - DNA, 1433 bp, Homo sapiens
gggtgagggctgcaggtgggacttctgacagcacaggcaaggcaatggagcacagtggtctctagtctggggtgtgtgtgtaagaaggcagtgcggttgagtgagcaaagtctttggctggtcatcatgacaaggccagataggcaggcaagcactaaataaactcgcaatattctgtgggcagggtagaactcattggagatcctcaatgcttttcagaaactggcacagcagcatctaagcatgacattcaaggacatttagaagctggctttggcccatggtttgtgagcctcacccattcatttaacaactgtttgttgtgtgtctactgggtgccagacactggtctaaggcaccgagcgcccagtaggaaaccaaatggacaaccccctgcccttgtggattgtatatttttgcttcaatggtcttgtctctactcagctaaaatggactttgtaccccgctatttatgtcctccctcatgcaaaggggttcaaataaagcaattgggaaaaaaaggtgggagggatgaggggacgggaagaagcttggtgtagcaggaagacctggaaagacctcaaccttggggctggactccaatcatagcaatttaccagctgtgtggccctgggcaaagcccttgacgtctctgaacttcagttctctcatctgtaaaatggaactaataccagcatcctgaagaggatccctgagataacatacatcactttgggcccagcccccgccaagggagagctcaataaatagaagctggaactcagcactccttctgaacttctcttcttcccagccttcctcatccttcaaggctctgcatgtcctaaccccaccagttgaaactgagctgaggcagagtgagtgaggggtgggaggaagctggttttgagggattgagtgagaatctgccacctttcctggccccagggcctggctgtgcagccrtgcatgtgagcagacacagcccaggctcagcccaggccacatctctggccaggtgggatgcagctgggcctaactggaaacagcagccctgcctcagcaatccccacatttggtaagtgtggaaggaattaccccattcttgccaaaatcaagtctgcctgaaaataattagccgtggctaggagagatggttgagagggagaattcagtgtttgggtgtgtaaaactcaggaggaaaaagagaaactccactggggtccatggccaaggcaaggaaggtctcatctccagggatgaaatctttaaaaaccatatttttatggagggcctactcttccatagactggtgccatctcccttagccagggctgatgtcactgaccacagtaactcttgttgctaagcccagatgtgacttcagaatcctccttaacccagtgcaccaggtagtattaccaagcaggcaa

SEQ ID NO: 81897 - DNA, 1183 bp, Homo sapiens
cgtggtttactatatattcctccaactgatgacatttttcagacatttcaaaatttacatgctaaagtatttctgtttataataatgtgtgatgtaaagtaaaaacatcataacccatttcaaggtgtgtcataattaaagggcagggaggaggtaaggggacatcattgcttgcactgttttatttctaaaattcttaaagtaactctacatgcagttgctacaaacagagaaaaccaagaaaataaactatccatatcatgtgagcaatttaaacactattagtgaagagttaaaaaaaaamcaaaggggaaattaagcattttattttatgatacagaaccttaaaaagttaaacatagttaaaaattgtatttgtaaatattcaaaagttcatatagttacatttcagtttttcattttgataccgaaatagtgaaatatcaagttaaaccagttaatttgactgctaatttctaaaatgaatatgttgaccattttgacaaaaccatgtttattcagttattttggttactaatcagaattccatttgaagaaagaatctgccttcataacatgctgctaccctatgcaaactttttgagaagatttacatgcaaaatggtagaaatattagtttagcctgaaatactaaacatagcgctgtgatgttgatctgtatattatttctctaccaatcagcaccataatttcacaaagaaatgttcagcttaattttaattcaaatatagcttccaaaatgccctaaaatacattcttaattctgacctaaggggaatttattgaattttgtgaagtggaggtctttgatttcagtatatgttacatggtgagtcatagtgcctttgtattgagtatatagtgatcctttttatcttttcataaaataggcatttcaaaaactactaacctgctattccatgtgctgcacatgttaggcattaactaatgtgatttttcaagcatctcttacatgtgacacattcaggactgcattcttttgagggtctcgattctgagagccacaattataggttagagcccattctccctttttatttgtggttcagtcttaatgtggtcatggtacatagtcccatgatttacgatcagatggattaaccactgacttatgcctcacataagcattataaatttatat

SEQ ID NO: 81898 - DNA, 997 bp, Homo sapiens
ttctgcctgctacatagtttctagttatataacctaattttgatgatctaggagattttaaggtttcatattattcttagaaaacaaacgactttttgattatttttatatgactacctttattttgtagtcactcaattaaaaaaaagttttcactgaaagcattactcctccaagcattttatttttctgaaatgctattaaatataattctaggcttttgactagtagtttttataatgaaattgttgttttccttaaactagggatacataataatttttaataatattattaacaaatatattgcttagtagcttctgagatgatgtcttttgaagcaaatgataaaattgcctttatttttataaattagaaaactgagatgaaaagattggtttttatcagtgcatattaagagaaaagaaaagctaaaattagaggtcacagatattttacctgtaattcttcttatagttcattaaattctactgtcaccaagttatcaattcattgtatttgtttttaatatctctcttgttaaattatgctttaagttctgggatacatgtacagaacatggaggtttgttacataggtatacatgtgccatggtggtttgctgcacccatcagcctgtcatctacattagttatttctcctaatgctatccttcccgtagccccccaacccccgacaggccctagtgtatgatgttcccctccctgtgtccatgtgttcccattgttcaactcccacttaccagtgagaacatgyggtgtttggttttctgttcctttgttagtttgctgagaataatgttttccagcttcatctatgtccctgcaaaggacatgaactcattcttttttatggctgcatagtgttccatggtgtatatgtgccacattttctttatccagtctatcattgatgcacatttgggttggttccaagtctttactattgtgaatagtgctgcaataagcatatgtgt

SEQ ID NO: 81899 - DNA, 686 bp, Homo sapiens
ttcataaacttaaatttttgactgttttgtaataaaacgtagattaaaacacgtggtacagctgtacaaaaatatctttcttctgtcctcattttataggttttatctatttttaaaattttaatacatttctttgtttttcatacctttttcttaaaatctaagacacaaagacacattagcctaggtctacatagggtcagaattatcaacatatcacttggtgacaggaagttttcagctccattataatcttatgggactaccatgatagatgtggtccattgttgaccaaaacatcattatgcagagcatgactgtacttaataatttgattatttaatttaaagttatgtgatgcagtgaggccactgtaccttaatccaggtattggccttatttattctcgaagcatacttcaggataaagaaagaagwcttctttctttcttccatcaaagatattactatgccatcatcactctctcttttacctctaccttgtacattactgagatatacagttggatgaaaagctaaaccttaccccagcctggggaaatttagaagtacaaataaaatccaaatatctaactctttcttgaggctagaaaatattacaacatttctatcctaagatttacatattccttttaaaggtaactctcaaatatccacatttaaaaa

SEQ ID NO: 81900 - DNA, 1320 bp, Homo sapiens
aatgtccaactgtgacctgttgtgcacctggaacctaggcatccacctgcagcctgatgttcagctgggctgggacccggagttcacctgaggcatgatgtccacctgaagcttgatgttcacctgggggctgggtgtccacttgrggcctaatatccacctggactaggtacccacctgggatctggtgttcactcaagattggtgttcagctgtggcctaatgaccacctgggtcatgatgtctaccttggactgggtgcttacctggagccagtgttcactggggacctagtgtgcacctgagaccaggggatgtacctggggcctggtgtctacctggtgcctaggtatccacttgaggcctaatgttcatctggaatctggtatccacctggggccttgtaattacctggggtctgggcatccacctagggcttgagtatcctcctggggccttgagttttactggggactcgtgtctgccttggacctgggtgtacatctgtggcctaatgtacaccttgagagtgatgtcaacctggggacagatgtcctcttggggtctgagtgtacacctggtgtctgatgtctgcctgaggacttgtgttcatctgagacctgatattcacctggggactgggcgtccacgaggggctgatgtccagctggacactggatatccacctggggcttaaggatccacccagaaactgatgtcaaactggggcctgatgcctacctgcggactaggtatccatgtgaggcttgatgttcatccgcagccagacgtccatctgatgcttgatgtccaccttagtcctgggtgtctactggagacctcatgttcaactagagcttaggaacctacttggggcctcgtgtaaacctggggactggtatgcagctgggtcccaatgatcccctgggtcatattattcacctagggcctggtgtccatttggggcttgaatgacaaccttaggtcttgtgttcatctttgacgtggtgcccacctgggacttggttatcaacctgaggacttggtgtccaattgaggtgtcatgaccacctggggactgaatgtcaatctggggtctgatgtaaacctctagttcagtatccacctggggccagatgtcttcctagagacttatattctcttttgacctgatgtccacctggggacttgctatccatccatggtctgatattcacctggggacagatgtccaactgtggccagaagtgcacctggggtctgggcttccacctggagcctgatgtttagctggggctagagtttacatggagaacgatg

SEQ ID NO: 81901 - DNA, 1320 bp, Homo sapiens
aatgtccaactgtgacctgttgtgcacctggaacctaggcatccacctgcagcctgatgttcagctgggctgggacccggagttcacctgaggcatgatgtccacctgaagcttgatgttcacctgggggctgggtgtccacttgaggcctaatatccacctggactaggtacccacctgggatctggtgttcactcaagattggtgttcagctgtggcctaatgaccacctgggtcatgatgtctaccttggactgggtgcttacctggagccagtgttcactgggracctagtgtgcacctgagaccaggggatgtacctggggcctggtgtctacctggtgcctaggtatccacttgaggcctaatgttcatctggaatctggtatccacctggggccttgtaattacctggggtctgggcatccacctagggcttgagtatcctcctggggccttgagttttactggggactcgtgtctgccttggacctgggtgtacatctgtggcctaatgtacaccttgagagtgatgtcaacctggggacagatgtcctcttggggtctgagtgtacacctggtgtctgatgtctgcctgaggacttgtgttcatctgagacctgatattcacctggggactgggcgtccacgaggggctgatgtccagctggacactggatatccacctggggcttaaggatccacccagaaactgatgtcaaactggggcctgatgcctacctgcggactaggtatccatgtgaggcttgatgttcatccgcagccagacgtccatctgatgcttgatgtccaccttagtcctgggtgtctactggagacctcatgttcaactagagcttaggaacctacttggggcctcgtgtaaacctggggactggtatgcagctgggtcccaatgatcccctgggtcatattattcacctagggcctggtgtccatttggggcttgaatgacaaccttaggtcttgtgttcatctttgacgtggtgcccacctgggacttggttatcaacctgaggacttggtgtccaattgaggtgtcatgaccacctggggactgaatgtcaatctggggtctgatgtaaacctctagttcagtatccacctggggccagatgtcttcctagagacttatattctcttttgacctgatgtccacctggggacttgctatccatccatggtctgatattcacctggggacagatgtccaactgtggccagaagtgcacctggggtctgggcttccacctggagcctgatgtttagctggggctagagtttacatggagaacgatg

SEQ ID NO: 81902 - DNA, 1320 bp, Homo sapiens
aatgtccaactgtgacctgttgtgcacctggaacctaggcatccacctgcagcctgatgttcagctgggctgggacccggagttcacctgaggcatgatgtccacctgaagcttgatgttcacctgggggctgggtgtccacttgaggcctaatatccacctggactaggtacccacctgggatctggtgttcactcaagattggtgttcagctgtggcctaatgaccacctgggtcatgatgtctaccttggactgggtgcttacctggagccagtgttcactggggacctagtgtgcacctgagaccaggggatgtacctgggkcctggtgtctacctggtgcctaggtatccacttgaggcctaatgttcatctggaatctggtatccacctggggccttgtaattacctggggtctgggcatccacctagggcttgagtatcctcctggggccttgagttttactggggactcgtgtctgccttggacctgggtgtacatctgtggcctaatgtacaccttgagagtgatgtcaacctggggacagatgtcctcttggggtctgagtgtacacctggtgtctgatgtctgcctgaggacttgtgttcatctgagacctgatattcacctggggactgggcgtccacgaggggctgatgtccagctggacactggatatccacctggggcttaaggatccacccagaaactgatgtcaaactggggcctgatgcctacctgcggactaggtatccatgtgaggcttgatgttcatccgcagccagacgtccatctgatgcttgatgtccaccttagtcctgggtgtctactggagacctcatgttcaactagagcttaggaacctacttggggcctcgtgtaaacctggggactggtatgcagctgggtcccaatgatcccctgggtcatattattcacctagggcctggtgtccatttggggcttgaatgacaaccttaggtcttgtgttcatctttgacgtggtgcccacctgggacttggttatcaacctgaggacttggtgtccaattgaggtgtcatgaccacctggggactgaatgtcaatctggggtctgatgtaaacctctagttcagtatccacctggggccagatgtcttcctagagacttatattctcttttgacctgatgtccacctggggacttgctatccatccatggtctgatattcacctggggacagatgtccaactgtggccagaagtgcacctggggtctgggcttccacctggagcctgatgtttagctggggctagagtttacatggagaacgatg

SEQ ID NO: 81903 - DNA, 1320 bp, Homo sapiens
aatgtccaactgtgacctgttgtgcacctggaacctaggcatccacctgcagcctgatgttcagctgggctgggacccggagttcacctgaggcatgatgtccacctgaagcttgatgttcacctgggggctgggtgtccacttgaggcctaatatccacctggactaggtacccacctgggatctggtgttcactcaagattggtgttcagctgtggcctaatgaccacctgggtcatgatgtctaccttggactgggtgcttacctggagccagtgttcactggggacctagtgtgcacctgagaccaggggatgtacctggggcctggtgtctacctggtgcctaggtatccacttgaggcctaatgttcatctggaatctggtatccacctggggccttgtaattacctggggtctgggcatccacctagggcttgagtatcctcctggggccttgagttttactggggactcgtgtctgccttggacctgggtgtacatctgtggcctaatgtacaccttgagagtgatgtcaacctggggacagatgtcctcttggggtctgagtgtacacctggtgtctgatgtctgcctgaggacttgtgttcayctgagacctgatattcacctggggactgggcgtccacgaggggctgatgtccagctggacactggatatccacctggggcttaaggatccacccagaaactgatgtcaaactggggcctgatgcctacctgcggactaggtatccatgtgaggcttgatgttcatccgcagccagacgtccatctgatgcttgatgtccaccttagtcctgggtgtctactggagacctcatgttcaactagagcttaggaacctacttggggcctcgtgtaaacctggggactggtatgcagctgggtcccaatgatcccctgggtcatattattcacctagggcctggtgtccatttggggcttgaatgacaaccttaggtcttgtgttcatctttgacgtggtgcccacctgggacttggttatcaacctgaggacttggtgtccaattgaggtgtcatgaccacctggggactgaatgtcaatctggggtctgatgtaaacctctagttcagtatccacctggggccagatgtcttcctagagacttatattctcttttgacctgatgtccacctggggacttgctatccatccatggtctgatattcacctggggacagatgtccaactgtggccagaagtgcacctggggtctgggcttccacctggagcctgatgtttagctggggctagagtttacatggagaacgatg

SEQ ID NO: 81904 - DNA, 2309 bp, Homo sapiens
tccagagagatgcccaagaagagcggaacttgaggccaggtgggctgtgcgctctgcgaccctgaggccatccaagggaagctccgccgtcccacgccagtgccagatctgcagctgcaaactgtgcatggggcactggcagcagttagggctgatgggggaaagagcagcccctgactctgcctccatgcctctacagctacctgacactagccacacagactccagggccagagcctcagcgtgaagccaggccatctgcgaagccacccaggtggcagcggagtgcccttgccagcaccctatctcccttccgaggaggagcggggcgggctgcaaggccagacaggccctccttctcaggccgggctggcggcgctcctgcgatcctggggccacccgggcgatcccaagaggacctgcgagctcatcggcgcccgcccagagctgcagccccacctgccagcgcgcgccaccagggaagggcttccgggagccaggcagcaactgcggtgcaggcgcgcgcccaaaggctttgcgagactcactcggtctgagaggtcggaggctgcgagtgtcgctgctgaaggctgtggtggaccgggctggatcgcggactgtggagtagatcacagatttgggatcgcggattgggggttgatcgcggattgggggttggatcagggatttggggttggataggggatttggggctgggtcggccggggtcggcggagtaggtgggtgaaaaggtgacagggaggtcggccggggtcgggggaggggggtggtgaaaaggtgacagggagctgcccccgctcaagagccggaggttggggtttctgagaagtcaccactatgaagttattcggcttcgggagccgcaggagccaaacggcccacggctccatagaacatgtctacacgggttccggataccgaatcccggactccgaactgcagaagatccacagggcagctgccaagggcgaccccgcgggggtggagcgctgcctggcgcgcaggagcggagacctggatgccctggacaagcagcacaggtagcggggactcagcccggggtgggagggggtccccaggcccggcttccccactgcccctgggacggggcctttcagggctctgggcaccctcagagcagcggagccaaacggactgtcagctgttttccatccctcataattccatggctggagcagttggagaatttgagtgatttaactcacaaagttaagcatacacagtgttgttatttttaacatacacgttgaaaacatggtttatatacattataggaggtgcctaatgagagaactcgttcccctatcaaaaataccgtgagttatttcagtagacaaaaagttctcagataagagagcttacttgaaaaatatttactatattttatatatatatatatgtattttcagatgaaaagtatgttttcattttatagggaattcattatattctttttttttttgagtcggagtctcgcttctttgcccaggctggtgtccaatggcacaatcttggctcactgcaacctctgcctgccgggttcaagcaattctcctacctcagcctcccaagtagcttggattataggcaggtgccagcgtgcctggctaatttttgtatatttagtagagagggggtttcaccacgttggccaggctggtctcgaactcctgacctcaagtgatctgcccgcctccgcctcccaaagtgctgggattacaggtgtgagccaccgcgcccagcctatgttgtttattatatatcataagttatatatatatatatatatatatatatatatatatatatattactgatacgtatacatatataccagatataatatgtcatatatatcagttatatatacacattagatgaaaagcacattttcatttgacagggaattctttcaaatcaaatcatcaaacactctaaaattgggcaaagtacacttttccagatctgcaagttacttgtgtacataggaaaaagtccttcgcatttctggtataagaatttaaattaaaagaggaatgaarcagttttctatccacaatatttgtgaggatgttttatactcctgcttaaagtttaagttgctgattacttttcaaatagataatttggtggtaagtactacaattaaaaaatatgtatgccctttacccatcaattccatttactaaaacacccttaggaaataaagatacatgcactttatttttcacctcacttattttaaaaagaacccaaagaatggatcc

SEQ ID NO: 81905 - DNA, 884 bp, Homo sapiens
tgatctctaggagccactgcacaagggggcagatgagggaaccctgacatgggacagccgagggcgaccccaacacggagcgggcagctgtgtccaggctccactggattccgcagaggacagaacacagctctgactccagggtgtgggctcactgagggacaggacaggctggggttgggagagggccatgctgcagctgggccagatcccacctgcacccctcagatggcagggcctggacgtctccatccccaccctgacccggtcagtaacagccatgggccagcagcccccagcaacccctccctctgtgaactgccaaggacaggaggtaccacagtctcttccaggcaagagctgctggagccttctttattcttgtgctagaagcccagggtggggagaggagcctgagaacagcccagtgtgggcatccaccttcctgcccactttggaggtctgagtcacctccggccactctcccaatccccaggagcccagaggcttcctggagcaagccacacctgatctccaccatgggtaggagttcaaggccaggccaacagggactccacagaggggcctgtgggttagcagcagctgccagtgtccagatggcctcaggggtgggggttagacaatctggaggtsagcagggaattcagcatgaggagacagcccttagggttctggcccagcagccccaggtgctggctctgcactgagtcatgaagtttgtgggccaggggcgttggcctctctctagctgagagtgacttccatcactgctgtcattagcctcccctgcatcaacctgtccctggggtgggagcacagttggcacagggaccctcaggccttagttttccctgctgtaaaat

SEQ ID NO: 81906 - DNA, 1128 bp, Homo sapiens
tgggatgacgagtccataggcagagccagcctcacaggggacccaaaggccagttcagatggacagcaactggaggtcccaccgggcacacacacacactgtgcagaaagctaacgcactgtttatttgggggattggggggaagcaccgtgccgctgctcactggtagccagccagctgcagaatggtggggtagcaagtacgatgggccatgcacttctggcggtcgatgaagagactgttggtcatggcagtgacgtccttctccaggctcatgtggatgtccttgaggttgcgcagggactgctccgcttgtagaagcttctcccgcagcgctgtgatggacttgtacagctcctccacctcactcaccagcttgggggtgttggggggtgtgagctggggctggggagggcagaagtatgcacctactggggtggaggggacccaaaactcccaatgggagctggcaggaggtcctgggaagacgccatgaaaggatcctaccaggaaagcggctctagggcagagcataaattacgagggtcctcccagggagcgcgggcctgagtgggaatgagtgacccgcgtgcaatctcgaccctgacaggacaggactggcctcagccgaccaggctcagttctttycattcctgatatttgacggaaggaggcacccagttccttgaaggaactgaggggcagggaaggaagaaaggtacttaggctcagaaggggccaccaggcatccgttaacaagggaaacaaaaggacggcccatctatgcctgtagcccaggcgtaggtcatactttccaccagaggtggggacagcaccctcagggcagcagggaatggccctctctggcctctctggccccgtggcctccaggagctcaccttgtctgaaggagcttcctcccgggaagatgaggtagcacagggtggggtgagaccacgtgggcacaggtccctggcacggggaggcccccgacccatgacctgcccagtgtcatgtctatatctgtgtgtttaaggcgtgcttgcatgttgtgtgtggccgcagagtctccctcccctctcagcacctgtgggggatgtgtgtgtggagattggagtgtttattgga

SEQ ID NO: 81907 - DNA, 1128 bp, Homo sapiens
tgggatgacgagtccataggcagagccagcctcacaggggacccaaaggccagttcagatggacagcaactggaggtcccaccgggcacacacacacactgtgcagaaagctaacgcactgtttatttgggggattggggggaagcaccgtgccgctgctcactggtagccagccagctgcagaatggtggggtagcaagtacgatgggccatgcacttctggcggtcgatgaagagactgttggtcatggcagtgacgtccttctccaggctcatgtggatgtccttgaggttgcgcagggactgctccgcttgtagaagcttctcccgcagcgctgtgatggacttgtacagctcctccacctcactcaccagcttgggggtgttggggggtgtgagctggggctggggagggcagaagtatgcacctactggggtggaggggacccaaaactcccaatgggagctggcaggaggtcctgggaagacgccatgaaaggatcctaccaggaaagcggctctagggcagagcataaattacgagggtcctcccagggagcgcgggcctgagtgggaatgagtgacccgcgtgcaatctcgaccctgacaggacaggactggcctcagccgaccaggctcagttctttccattcctgatatttgacggaaggaggcacccagttccttgaaggaactgaggggcagggaaggaagaaaggtacttaggctcagaaggggccaccaggcatccgttaacaagggaaacaaaaggacggcccatctatgcctgtagcccaggcgtaggtcatactttccaccagaggtggggacarcaccctcagggcagcagggaatggccctctctggcctctctggccccgtggcctccaggagctcaccttgtctgaaggagcttcctcccgggaagatgaggtagcacagggtggggtgagaccacgtgggcacaggtccctggcacggggaggcccccgacccatgacctgcccagtgtcatgtctatatctgtgtgtttaaggcgtgcttgcatgttgtgtgtggccgcagagtctccctcccctctcagcacctgtgggggatgtgtgtgtggagattggagtgtttattgga

SEQ ID NO: 81908 - DNA, 1128 bp, Homo sapiens
tgggatgacgagtccataggcagagccagcctcacaggggacccaaaggccagttcagatggacagcaactggaggtcccaccgggcacacacacacactgtgcagaaagctaacgcactgtttatttgggggattggggggaagcaccgtgccgctgctcactggtagccagccagctgcagaatggtggggtagcaagtacgatgggccatgcacttctggcggtcgatgaagagactgttggtcatggcagtgacgtccttctccaggctcatgtggatgtccttgaggttgcgcagggactgctccgcttgtagaagcttctcccgcagcgctgtgatggacttgtacagctcctccacctcactcaccagcttgggggtgttggggggtgtgagctggggctggggagggcagaagtatgcacctactggggtggaggggacccaaaactcccaatgggagctggcaggaggtcctgggaagacgccatgaaaggatcctaccaggaaagcggctctagggcagagcataaattacgagggtcctcccagggagcgcgggcctgagtgggaatgagtgacccgcgtgcaatctcgaccctgacaggacaggactggcctcagccgaccaggctcagttctttccattcctgatatttgacggaaggaggcacccagttccttgaaggaactgaggggcagggaaggaagaaaggtacttaggctcagaaggggccaccaggcatccgttaacaagggaaacaaaaggacggcccatctatgcctgtagcccaggcgtaggtcatactttccaccagaggtggggacagcaccctcagggcagcagggaatggccctctctggcctctctggccccgtggcctccaggagctcaycttgtctgaaggagcttcctcccgggaagatgaggtagcacagggtggggtgagaccacgtgggcacaggtccctggcacggggaggcccccgacccatgacctgcccagtgtcatgtctatatctgtgtgtttaaggcgtgcttgcatgttgtgtgtggccgcagagtctccctcccctctcagcacctgtgggggatgtgtgtgtggagattggagtgtttattgga

SEQ ID NO: 81909 - DNA, 863 bp, Homo sapiens
acaagtcctggccacccaaggctgctggcaccttcagcagctccgtctccacatagtcacgcacaaggttggcgtgctggtggcgctggctgcactgcatgttgtcagtggcgatggagaagggcacctccatggcatccagggcacgctccagccgttgcttctgggccagcagcaggtcggtctctgcagccagcacctccacctcgtgctgcagctctgacttccagctgtgcgtgtcttgcagtcgctcgcccaccctgcacgtggagtcttgctgtgtcggctgtgccagcgcctgggtctctgcggccagctgctggctctcgcgcccctgcagctcccgctccgactggttgcagtcggcgaaggcctggtggtagcgagcatagcagttctggaaccacacctccagctggcggtggccaggctggaggacgtgtagacgcccatgttgcgggccacgtcatactctttgcagggcagctcgcagggtgacactgtctgcggtgctggctctggtaggagcacatccgtctgcaccatggtgtctgccgcccatcagggccaggggagtgaggagtgtgtgtggtcagcttgttgcggtcagcccagtgcagtcatcggtcggctccaaaggctcagtcccagagcagcacgtggctcccagtcgcttgggtgacacagtaaaccaagagcttcctgttgccaagaaacgggatctcttctccagtggctaggggagggggcattcagggcggcagrcagaattgccctcttaaagggccaggcagacccagccccaccatccctgtccccacctcggggcaatcaacagtggccaagggttcctgtcacttaga

SEQ ID NO: 81910 - DNA, 2078 bp, Homo sapiens
gtaatagcagagctagtttgtagcataaagaaaaaataataatattaggtgacacaaataatgctagccaccatttctaagtgtcatggtaagtacagtgattattttctttttttctgactcttttttattggattttttattttttttcccataggttattggggtacggtggtatttggttcgggtccatgaataacttctttactggttatttgtgagatttgggtgcacctatcacccgaacagtgtacactgcaccttatttgttatcttttatccctcgccccccwccctattaaataatagacaaaaaataatgggtttagaataaatgagttcaaatgaattgtcaaacgtatgtgggaaaagtggaatcagtttgtgagaaaaaggaaaaaaactcaacagaaatgctgataaagcatcatcccttcatggctagagctgccaggacactagaacaccaaaatcagctagggaaattttgtagaagtcccagatgtactagatgttctgtgaatacacagagatataattataactgttacctgcatgtagagtaaagatgagaaggcattggtcatggtggcagctacctcaggagttacaaagcagacgtggttccaggacagtgtatgtcagggcaaagctgtcctaggaggctattaggagttggttatggcatagacattgtaagtcagatggtctcattactttcaatgacaaaaccaaaattacttttgtatcagcctaatacaacggcctggcaagagcacagaaaaagtccctgtgctgttaggtggggacctctgatgcagcacaattccttcattcccttctccaaaacccccctcttccaattccactgaagagagaatctgatggaagtgctgtgtaagtaggctcagatatatctaccactatagatagtagaggtgattcataaatccaagcctatcaaatacatcataaagttacacgtttaatttttttttgaaattagggatcatgatataaaagttatcagaatcaaaactgtcagtaatctttaaaaagaaaagaaaaaacctggacaaatagattcagagaaggccttgaagagagggttctcatgcttctaggcctgatacaaactgtcacaaaataccacaaaatccacaaccttgcacaaaggccatagcaaccttacacaaaatacacttctgtgaggacatctatccaacaaccacctgctcaaacttcagctgacatcgaccttgttgttgatctttatagtcaaagataactataacaaaacaattatataagcctcttcatttttcctttatttttttctactcccccataattccaggttgatcgcttttcttttaaagaccttgtcttcctttaccatttgaatctacacagtttgctttgtcatgcatattcccattgcagtgtcctcctccctaagatgtgtctttttcctttaaagaacctttctctgtttgttatttaggtttacaatgagaaggcgtgtaaagtaattttactgtcttcctaggaaaaaatcactgacttatatttatatttatttatttacattcctggggatgaggaattaaagatttcacaaattttcttattgagaagatccaagttttcatgtgagcaaaactgaatatgtaaattgatatgtaaattatgctgcagataatatgctcaaatgtttacttgtatttaatttgttacacatgaatattgcatatgtaagataatatactaagaaattatcacatttaatgaaatgctttaatcaaattcctgattgaatttttgatatcaatatctttttccttgtttaatccatctttagagtgaacagggctgtctaggccaaagtcctcacttctatctaaattgtctgagttacagaactttttgaatttattatgttgtcacaggaagtttcttattgcttgcttaaaggagtcgctctcaatatgatgcggaatccaaaagcactgaagggcatatatcctgagtttctgttactgaagccaaaggttgccaatttcttgtagatcctgcta

SEQ ID NO: 81911 - DNA, 2078 bp, Homo sapiens
gtaatagcagagctagtttgtagcataaagaaaaaataataatattaggtgacacaaataatgctagccaccatttctaagtgtcatggtaagtacagtgattattttctttttttctgactcttttttattggattttttattttttttcccataggttattggggtacggtggtatttggttcgggtccatgaataacttctttactggttatttgtgagatttgggtgcacctatcacccgaacagtgtacactgcaccttatttgttatcttttatccctcgccccccaccctattaaataatagacaaaaaataatgggtttagaataaatgagttcaaatgaattgtcaaacgtatgtgggaaaagtggaatcagtttgtgagaaaaaggaaaaaaactcaacagaaatgctgataaagcatcatcccttcatggctagagctgccaggacactagaacaccaaaatcagctagggaaattttgtagaagtcccagatgtactagatgttctgtgaatacacagagatataattataactgttacctgcatgtagagtaaagatgagaaggcattggtcatggtggcagctacctcaggagttacaaagcagacgtggttccaggacagtgtatgtcagggcaaagctgtcctaggaggctattaggagttggttayggcatagacattgtaagtcagatggtctcattactttcaatgacaaaaccaaaattacttttgtatcagcctaatacaacggcctggcaagagcacagaaaaagtccctgtgctgttaggtggggacctctgatgcagcacaattccttcattcccttctccaaaacccccctcttccaattccactgaagagagaatctgatggaagtgctgtgtaagtaggctcagatatatctaccactatagatagtagaggtgattcataaatccaagcctatcaaatacatcataaagttacacgtttaatttttttttgaaattagggatcatgatataaaagttatcagaatcaaaactgtcagtaatctttaaaaagaaaagaaaaaacctggacaaatagattcagagaaggccttgaagagagggttctcatgcttctaggcctgatacaaactgtcacaaaataccacaaaatccacaaccttgcacaaaggccatagcaaccttacacaaaatacacttctgtgaggacatctatccaacaaccacctgctcaaacttcagctgacatcgaccttgttgttgatctttatagtcaaagataactataacaaaacaattatataagcctcttcatttttcctttatttttttctactcccccataattccaggttgatcgcttttcttttaaagaccttgtcttcctttaccatttgaatctacacagtttgctttgtcatgcatattcccattgcagtgtcctcctccctaagatgtgtctttttcctttaaagaacctttctctgtttgttatttaggtttacaatgagaaggcgtgtaaagtaattttactgtcttcctaggaaaaaatcactgacttatatttatatttatttatttacattcctggggatgaggaattaaagatttcacaaattttcttattgagaagatccaagttttcatgtgagcaaaactgaatatgtaaattgatatgtaaattatgctgcagataatatgctcaaatgtttacttgtatttaatttgttacacatgaatattgcatatgtaagataatatactaagaaattatcacatttaatgaaatgctttaatcaaattcctgattgaatttttgatatcaatatctttttccttgtttaatccatctttagagtgaacagggctgtctaggccaaagtcctcacttctatctaaattgtctgagttacagaactttttgaatttattatgttgtcacaggaagtttcttattgcttgcttaaaggagtcgctctcaatatgatgcggaatccaaaagcactgaagggcatatatcctgagtttctgttactgaagccaaaggttgccaatttcttgtagatcctgcta

SEQ ID NO: 81912 - DNA, 2078 bp, Homo sapiens
gtaatagcagagctagtttgtagcataaagaaaaaataataatattaggtgacacaaataatgctagccaccatttctaagtgtcatggtaagtacagtgattattttctttttttctgactcttttttattggattttttattttttttcccataggttattggggtacggtggtatttggttcgggtccatgaataacttctttactggttatttgtgagatttgggtgcacctatcacccgaacagtgtacactgcaccttatttgttatcttttatccctcgccccccaccctattaaataatagacaaaaaataatgggtttagaataaatgagttcaaatgaattgtcaaacgtatgtgggaaaagtggaatcagtttgtgagaaaaaggaaaaaaactcaacagaaatgctgataaagcatcatcccttcatggctagagctgccaggacactagaacaccaaaatcagctagggaaattttgtagaagtcccagatgtactagatgttctgtgaatacacagagatataattataactgttacctgcatgtagagtaaagatgagaaggcattggtcatggtggcagctacctcaggagttacaaagcagacgtggttccaggacagtgtatgtcagggcaaagctgtcctaggaggctattaggagttggttatggcayagacattgtaagtcagatggtctcattactttcaatgacaaaaccaaaattacttttgtatcagcctaatacaacggcctggcaagagcacagaaaaagtccctgtgctgttaggtggggacctctgatgcagcacaattccttcattcccttctccaaaacccccctcttccaattccactgaagagagaatctgatggaagtgctgtgtaagtaggctcagatatatctaccactatagatagtagaggtgattcataaatccaagcctatcaaatacatcataaagttacacgtttaatttttttttgaaattagggatcatgatataaaagttatcagaatcaaaactgtcagtaatctttaaaaagaaaagaaaaaacctggacaaatagattcagagaaggccttgaagagagggttctcatgcttctaggcctgatacaaactgtcacaaaataccacaaaatccacaaccttgcacaaaggccatagcaaccttacacaaaatacacttctgtgaggacatctatccaacaaccacctgctcaaacttcagctgacatcgaccttgttgttgatctttatagtcaaagataactataacaaaacaattatataagcctcttcatttttcctttatttttttctactcccccataattccaggttgatcgcttttcttttaaagaccttgtcttcctttaccatttgaatctacacagtttgctttgtcatgcatattcccattgcagtgtcctcctccctaagatgtgtctttttcctttaaagaacctttctctgtttgttatttaggtttacaatgagaaggcgtgtaaagtaattttactgtcttcctaggaaaaaatcactgacttatatttatatttatttatttacattcctggggatgaggaattaaagatttcacaaattttcttattgagaagatccaagttttcatgtgagcaaaactgaatatgtaaattgatatgtaaattatgctgcagataatatgctcaaatgtttacttgtatttaatttgttacacatgaatattgcatatgtaagataatatactaagaaattatcacatttaatgaaatgctttaatcaaattcctgattgaatttttgatatcaatatctttttccttgtttaatccatctttagagtgaacagggctgtctaggccaaagtcctcacttctatctaaattgtctgagttacagaactttttgaatttattatgttgtcacaggaagtttcttattgcttgcttaaaggagtcgctctcaatatgatgcggaatccaaaagcactgaagggcatatatcctgagtttctgttactgaagccaaaggttgccaatttcttgtagatcctgcta

SEQ ID NO: 81913 - DNA, 2078 bp, Homo sapiens
gtaatagcagagctagtttgtagcataaagaaaaaataataatattaggtgacacaaataatgctagccaccatttctaagtgtcatggtaagtacagtgattattttctttttttctgactcttttttattggattttttattttttttcccataggttattggggtacggtggtatttggttcgggtccatgaataacttctttactggttatttgtgagatttgggtgcacctatcacccgaacagtgtacactgcaccttatttgttatcttttatccctcgccccccaccctattaaataatagacaaaaaataatgggtttagaataaatgagttcaaatgaattgtcaaacgtatgtgggaaaagtggaatcagtttgtgagaaaaaggaaaaaaactcaacagaaatgctgataaagcatcatcccttcatggctagagctgccaggacactagaacaccaaaatcagctagggaaattttgtagaagtcccagatgtactagatgttctgtgaatacacagagatataattataactgttacctgcatgtagagtaaagatgagaaggcattggtcatggtggcagctacctcaggagttacaaagcagacgtggttccaggacagtgtatgtcagggcaaagctgtcctaggaggctattaggagttggttatggcatagacattgtaagtcagatggtctcattactttcaatgacaaaaccaaaattacttttgyatcagcctaatacaacggcctggcaagagcacagaaaaagtccctgtgctgttaggtggggacctctgatgcagcacaattccttcattcccttctccaaaacccccctcttccaattccactgaagagagaatctgatggaagtgctgtgtaagtaggctcagatatatctaccactatagatagtagaggtgattcataaatccaagcctatcaaatacatcataaagttacacgtttaatttttttttgaaattagggatcatgatataaaagttatcagaatcaaaactgtcagtaatctttaaaaagaaaagaaaaaacctggacaaatagattcagagaaggccttgaagagagggttctcatgcttctaggcctgatacaaactgtcacaaaataccacaaaatccacaaccttgcacaaaggccatagcaaccttacacaaaatacacttctgtgaggacatctatccaacaaccacctgctcaaacttcagctgacatcgaccttgttgttgatctttatagtcaaagataactataacaaaacaattatataagcctcttcatttttcctttatttttttctactcccccataattccaggttgatcgcttttcttttaaagaccttgtcttcctttaccatttgaatctacacagtttgctttgtcatgcatattcccattgcagtgtcctcctccctaagatgtgtctttttcctttaaagaacctttctctgtttgttatttaggtttacaatgagaaggcgtgtaaagtaattttactgtcttcctaggaaaaaatcactgacttatatttatatttatttatttacattcctggggatgaggaattaaagatttcacaaattttcttattgagaagatccaagttttcatgtgagcaaaactgaatatgtaaattgatatgtaaattatgctgcagataatatgctcaaatgtttacttgtatttaatttgttacacatgaatattgcatatgtaagataatatactaagaaattatcacatttaatgaaatgctttaatcaaattcctgattgaatttttgatatcaatatctttttccttgtttaatccatctttagagtgaacagggctgtctaggccaaagtcctcacttctatctaaattgtctgagttacagaactttttgaatttattatgttgtcacaggaagtttcttattgcttgcttaaaggagtcgctctcaatatgatgcggaatccaaaagcactgaagggcatatatcctgagtttctgttactgaagccaaaggttgccaatttcttgtagatcctgcta

SEQ ID NO: 81914 - DNA, 1517 bp, Homo sapiens
atcctgattttcaggtggggagtggatatagacctgggacctgatggccacctatgctataagtaacccaaccacctgaggcctgatgttcacctgcagcctgatgtccacctggtayctgtgtgtcaatctagtgcctggtgtccacttgaggactaggtagacacctggggctttgtgttcaccaggggactggtgttcatcttgcacccagtgtccacctggaccctgtgtatcaacctgtggcctaggtggtcacttggagctttatgtgcacctggggcctgagagtttcctaggatctgatgaccactggggcccaggtatccacctgggacatcaggctccaagtgtatatccaggctccatgtggacaccaggccaggagaacgccagcccttatctgaatatcaggtcctagatggatgcccaggccccatgtgtacatcagtccccgggtatacactggactccaggtggacaccagcactcaattggatacacacactcaaggtggacaccaggccccacgtgaattcgtacactccaggtgaacatcaggtcccaagtggatacctggactccaggtgtataccagtctctaaattaataccaggcctcagatggtccttaggagccatgtgggcattagtcatcaggaagttacctaggcccaaagtgcacatcaagccacctgttgacacaagatctatttggaagtcaggccccaggtggacacccaggccctaggtaaatacttaggtcccaggttgacagcaggccctgtgttaacactcagaactcaggtggacatcaggcctcaggtggacatctgagttcatctggaacctcttgttacaggccccatgtaaacaacaggccttaggtggatacccaatctctaagtggacatcagagctcagattgacacaaagactccagtagacataatgtaccaatgaatatccaggcctccggtaaatacccaggccccagattgacatcagggtctatgtggacacacaggccccgggtagtaaacaggcccaaggtggacactggactagacatcaggtcctaggttgacaaccatgcttcaagttgacacctggccccaagtgaacatctggtcccagctggacactagtctcctggtgaatacctgggctcaaggttgacatcagaccctatgtgaacactagaccccagctaaacacttatgccctaagtggacatcaggcctcaggtggttacccagtcccaaggtaaacataggaccctgatgggcaccagttatcaagtggattcccaggccccaggtgaatatcaagtcctaggtggataccaggccccaagtggataccaggatctggtagacatcaggtcccaagaggaccctagaacccaggagtacattagactcagcactcagatgaacattaggcttcaggtggacatcgtgcctcaggtgaactccaggccccagatgaacatcaggccccaggtggatgcccagg

SEQ ID NO: 81915 - DNA, 1517 bp, Homo sapiens
atcctgattttcaggtggggagtggatatagacctgggacctgatggccacctatgctataagtaacccaaccacctgaggcctgatgttcacctgcagcctgatgtccacctggtatctgtgtgtcaatctagtgcctggtgtccacttgaggactaggtagacacctggggctttgtgttcaccaggggmctggtgttcatcttgcacccagtgtccacctggaccctgtgtatcaacctgtggcctaggtggtcacttggagctttatgtgcacctggggcctgagagtttcctaggatctgatgaccactggggcccaggtatccacctgggacatcaggctccaagtgtatatccaggctccatgtggacaccaggccaggagaacgccagcccttatctgaatatcaggtcctagatggatgcccaggccccatgtgtacatcagtccccgggtatacactggactccaggtggacaccagcactcaattggatacacacactcaaggtggacaccaggccccacgtgaattcgtacactccaggtgaacatcaggtcccaagtggatacctggactccaggtgtataccagtctctaaattaataccaggcctcagatggtccttaggagccatgtgggcattagtcatcaggaagttacctaggcccaaagtgcacatcaagccacctgttgacacaagatctatttggaagtcaggccccaggtggacacccaggccctaggtaaatacttaggtcccaggttgacagcaggccctgtgttaacactcagaactcaggtggacatcaggcctcaggtggacatctgagttcatctggaacctcttgttacaggccccatgtaaacaacaggccttaggtggatacccaatctctaagtggacatcagagctcagattgacacaaagactccagtagacataatgtaccaatgaatatccaggcctccggtaaatacccaggccccagattgacatcagggtctatgtggacacacaggccccgggtagtaaacaggcccaaggtggacactggactagacatcaggtcctaggttgacaaccatgcttcaagttgacacctggccccaagtgaacatctggtcccagctggacactagtctcctggtgaatacctgggctcaaggttgacatcagaccctatgtgaacactagaccccagctaaacacttatgccctaagtggacatcaggcctcaggtggttacccagtcccaaggtaaacataggaccctgatgggcaccagttatcaagtggattcccaggccccaggtgaatatcaagtcctaggtggataccaggccccaagtggataccaggatctggtagacatcaggtcccaagaggaccctagaacccaggagtacattagactcagcactcagatgaacattaggcttcaggtggacatcgtgcctcaggtgaactccaggccccagatgaacatcaggccccaggtggatgcccagg

SEQ ID NO: 81916 - DNA, 1517 bp, Homo sapiens
atcctgattttcaggtggggagtggatatagacctgggacctgatggccacctatgctataagtaacccaaccacctgaggcctgatgttcacctgcagcctgatgtccacctggtatctgtgtgtcaatctagtgcctggtgtccacttgaggactaggtagacacctggggctttgtgttcaccaggggactggtgttcatcttgcacccagtgtccacctggaccctgtgtatcaacctgtggcctaggtggtcacttggagytttatgtgcacctggggcctgagagtttcctaggatctgatgaccactggggcccaggtatccacctgggacatcaggctccaagtgtatatccaggctccatgtggacaccaggccaggagaacgccagcccttatctgaatatcaggtcctagatggatgcccaggccccatgtgtacatcagtccccgggtatacactggactccaggtggacaccagcactcaattggatacacacactcaaggtggacaccaggccccacgtgaattcgtacactccaggtgaacatcaggtcccaagtggatacctggactccaggtgtataccagtctctaaattaataccaggcctcagatggtccttaggagccatgtgggcattagtcatcaggaagttacctaggcccaaagtgcacatcaagccacctgttgacacaagatctatttggaagtcaggccccaggtggacacccaggccctaggtaaatacttaggtcccaggttgacagcaggccctgtgttaacactcagaactcaggtggacatcaggcctcaggtggacatctgagttcatctggaacctcttgttacaggccccatgtaaacaacaggccttaggtggatacccaatctctaagtggacatcagagctcagattgacacaaagactccagtagacataatgtaccaatgaatatccaggcctccggtaaatacccaggccccagattgacatcagggtctatgtggacacacaggccccgggtagtaaacaggcccaaggtggacactggactagacatcaggtcctaggttgacaaccatgcttcaagttgacacctggccccaagtgaacatctggtcccagctggacactagtctcctggtgaatacctgggctcaaggttgacatcagaccctatgtgaacactagaccccagctaaacacttatgccctaagtggacatcaggcctcaggtggttacccagtcccaaggtaaacataggaccctgatgggcaccagttatcaagtggattcccaggccccaggtgaatatcaagtcctaggtggataccaggccccaagtggataccaggatctggtagacatcaggtcccaagaggaccctagaacccaggagtacattagactcagcactcagatgaacattaggcttcaggtggacatcgtgcctcaggtgaactccaggccccagatgaacatcaggccccaggtggatgcccagg

SEQ ID NO: 81917 - DNA, 1517 bp, Homo sapiens
atcctgattttcaggtggggagtggatatagacctgggacctgatggccacctatgctataagtaacccaaccacctgaggcctgatgttcacctgcagcctgatgtccacctggtatctgtgtgtcaatctagtgcctggtgtccacttgaggactaggtagacacctggggctttgtgttcaccaggggactggtgttcatcttgcacccagtgtccacctggaccctgtgtatcaacctgtggcctaggtggtcacttggagctttatgtgcacctggggcctgagagtttcctaggatctgatgaccactggggcccasgtatccacctgggacatcaggctccaagtgtatatccaggctccatgtggacaccaggccaggagaacgccagcccttatctgaatatcaggtcctagatggatgcccaggccccatgtgtacatcagtccccgggtatacactggactccaggtggacaccagcactcaattggatacacacactcaaggtggacaccaggccccacgtgaattcgtacactccaggtgaacatcaggtcccaagtggatacctggactccaggtgtataccagtctctaaattaataccaggcctcagatggtccttaggagccatgtgggcattagtcatcaggaagttacctaggcccaaagtgcacatcaagccacctgttgacacaagatctatttggaagtcaggccccaggtggacacccaggccctaggtaaatacttaggtcccaggttgacagcaggccctgtgttaacactcagaactcaggtggacatcaggcctcaggtggacatctgagttcatctggaacctcttgttacaggccccatgtaaacaacaggccttaggtggatacccaatctctaagtggacatcagagctcagattgacacaaagactccagtagacataatgtaccaatgaatatccaggcctccggtaaatacccaggccccagattgacatcagggtctatgtggacacacaggccccgggtagtaaacaggcccaaggtggacactggactagacatcaggtcctaggttgacaaccatgcttcaagttgacacctggccccaagtgaacatctggtcccagctggacactagtctcctggtgaatacctgggctcaaggttgacatcagaccctatgtgaacactagaccccagctaaacacttatgccctaagtggacatcaggcctcaggtggttacccagtcccaaggtaaacataggaccctgatgggcaccagttatcaagtggattcccaggccccaggtgaatatcaagtcctaggtggataccaggccccaagtggataccaggatctggtagacatcaggtcccaagaggaccctagaacccaggagtacattagactcagcactcagatgaacattaggcttcaggtggacatcgtgcctcaggtgaactccaggccccagatgaacatcaggccccaggtggatgcccagg

SEQ ID NO: 81918 - DNA, 1517 bp, Homo sapiens
atcctgattttcaggtggggagtggatatagacctgggacctgatggccacctatgctataagtaacccaaccacctgaggcctgatgttcacctgcagcctgatgtccacctggtatctgtgtgtcaatctagtgcctggtgtccacttgaggactaggtagacacctggggctttgtgttcaccaggggactggtgttcatcttgcacccagtgtccacctggaccctgtgtatcaacctgtggcctaggtggtcacttggagctttatgtgcacctggggcctgagagtttcctaggatctgatgaccactggggcccaggtatccacctgggacatcaggctccaagtgtatatccaggctccatgtggacaccaggccaggagaacgccarcccttatctgaatatcaggtcctagatggatgcccaggccccatgtgtacatcagtccccgggtatacactggactccaggtggacaccagcactcaattggatacacacactcaaggtggacaccaggccccacgtgaattcgtacactccaggtgaacatcaggtcccaagtggatacctggactccaggtgtataccagtctctaaattaataccaggcctcagatggtccttaggagccatgtgggcattagtcatcaggaagttacctaggcccaaagtgcacatcaagccacctgttgacacaagatctatttggaagtcaggccccaggtggacacccaggccctaggtaaatacttaggtcccaggttgacagcaggccctgtgttaacactcagaactcaggtggacatcaggcctcaggtggacatctgagttcatctggaacctcttgttacaggccccatgtaaacaacaggccttaggtggatacccaatctctaagtggacatcagagctcagattgacacaaagactccagtagacataatgtaccaatgaatatccaggcctccggtaaatacccaggccccagattgacatcagggtctatgtggacacacaggccccgggtagtaaacaggcccaaggtggacactggactagacatcaggtcctaggttgacaaccatgcttcaagttgacacctggccccaagtgaacatctggtcccagctggacactagtctcctggtgaatacctgggctcaaggttgacatcagaccctatgtgaacactagaccccagctaaacacttatgccctaagtggacatcaggcctcaggtggttacccagtcccaaggtaaacataggaccctgatgggcaccagttatcaagtggattcccaggccccaggtgaatatcaagtcctaggtggataccaggccccaagtggataccaggatctggtagacatcaggtcccaagaggaccctagaacccaggagtacattagactcagcactcagatgaacattaggcttcaggtggacatcgtgcctcaggtgaactccaggccccagatgaacatcaggccccaggtggatgcccagg

SEQ ID NO: 81919 - DNA, 1517 bp, Homo sapiens
atcctgattttcaggtggggagtggatatagacctgggacctgatggccacctatgctataagtaacccaaccacctgaggcctgatgttcacctgcagcctgatgtccacctggtatctgtgtgtcaatctagtgcctggtgtccacttgaggactaggtagacacctggggctttgtgttcaccaggggactggtgttcatcttgcacccagtgtccacctggaccctgtgtatcaacctgtggcctaggtggtcacttggagctttatgtgcacctggggcctgagagtttcctaggatctgatgaccactggggcccaggtatccacctgggacatcaggctccaagtgtatatccaggctccatgtggacaccaggccaggagaacgccagcccttatctgaatatcaggtcctagatggatgcccaggccccatgtgtacatcagtccccgggtatacactggactccaggtggacaccagcactcaattsgatacacacactcaaggtggacaccaggccccacgtgaattcgtacactccaggtgaacatcaggtcccaagtggatacctggactccaggtgtataccagtctctaaattaataccaggcctcagatggtccttaggagccatgtgggcattagtcatcaggaagttacctaggcccaaagtgcacatcaagccacctgttgacacaagatctatttggaagtcaggccccaggtggacacccaggccctaggtaaatacttaggtcccaggttgacagcaggccctgtgttaacactcagaactcaggtggacatcaggcctcaggtggacatctgagttcatctggaacctcttgttacaggccccatgtaaacaacaggccttaggtggatacccaatctctaagtggacatcagagctcagattgacacaaagactccagtagacataatgtaccaatgaatatccaggcctccggtaaatacccaggccccagattgacatcagggtctatgtggacacacaggccccgggtagtaaacaggcccaaggtggacactggactagacatcaggtcctaggttgacaaccatgcttcaagttgacacctggccccaagtgaacatctggtcccagctggacactagtctcctggtgaatacctgggctcaaggttgacatcagaccctatgtgaacactagaccccagctaaacacttatgccctaagtggacatcaggcctcaggtggttacccagtcccaaggtaaacataggaccctgatgggcaccagttatcaagtggattcccaggccccaggtgaatatcaagtcctaggtggataccaggccccaagtggataccaggatctggtagacatcaggtcccaagaggaccctagaacccaggagtacattagactcagcactcagatgaacattaggcttcaggtggacatcgtgcctcaggtgaactccaggccccagatgaacatcaggccccaggtggatgcccagg

SEQ ID NO: 81920 - DNA, 905 bp, Homo sapiens
cctggatcaaccacccatgggcttatgaatgtgttgaccgctggcatatgagaaataattgtcaattaggttatgtgacccttcctctttctatttataactccaatgtttctgaacactgaagtagttcatcgaaattactttccaggattagacaaaccatacctgcaaaccaaggaggtgaattttggccaatgtttggcagaagtcacttgcaatggtggggagtaacctctcatgaacgtataattagaaatctgtcaaccactctaggtaaattagcgaatgaactagctgaagccatagctaccaaacaaagatctttagactctttagccaggatagtcatggatgacggaataactttaggctgcatagtggtgaaacacggagaaattcatatggcagctagctaacacattatgttgtgtttagatccatgcatcttctgaagttgaaacaaatgtaaaaaaataagacaatatgagaattaattatgacaaatcctagggaagaggctgaaagagctgtaacacaaacagggttgagtcatgccccttgcttgccacattgtgggcaaagagaaggaaacaagagctgtgaccctttgggaagcccagacctgggagctccccgagccagggctgtgattccctmtttggggccctgtggttcctggtatctccaagcttccgggtgccactgtgttcccagtgtgccagctgtggaagctgcttgcggtgcccatggtccagccacagacttgtggagagctggcacccatgttggcacctggagctacctgccccactgcagcagccaggaagtctgactgcacagtggccagaccccatgcttgctcacacaccccttgccactccacgcagtctcccttggcaaacatg

SEQ ID NO: 81921 - DNA, 905 bp, Homo sapiens
cctggatcaaccacccatgggcttatgaatgtgttgaccgctggcatatgagaaataattgtcaattaggttatgtgacccttcctctttctatttataactccaatgtttctgaacactgaagtagttcatcgaaattactttccaggattagacaaaccatacctgcaaaccaaggaggtgaattttggccaatgtttggcagaagtcacttgcaatggtggggagtaacctctcatgaacgtataattagaaatctgtcaaccactctaggtaaattagcgaatgaactagctgaagccatagctaccaaacaaagatctttagactctttagccaggatagtcatggatgacggaataactttaggctgcatagtggtgaaacacggagaaattcatatggcagctagctaacacattatgttgtgtttagatccatgcatcttctgaagttgaaacaaatgtaaaaaaataagacaatatgagaattaattatgacaaatcctagggaagaggctgaaagagctgtaacacaaacagggttgagtcatgccccttgcttgccacattgtgggcaaagagaaggaaacaagagctgtgaccctttgggaagcccagacctgggagctccccgagccagggctgtgattccctatttggggccctgtggttcctggtatctccaagcttccgggtgccactgtgttcccagtgtgccagctgyggaagctgcttgcggtgcccatggtccagccacagacttgtggagagctggcacccatgttggcacctggagctacctgccccactgcagcagccaggaagtctgactgcacagtggccagaccccatgcttgctcacacaccccttgccactccacgcagtctcccttggcaaacatg

SEQ ID NO: 81922 - DNA, 905 bp, Homo sapiens
cctggatcaaccacccatgggcttatgaatgtgttgaccgctggcatatgagaaataattgtcaattaggttatgtgacccttcctctttctatttataactccaatgtttctgaacactgaagtagttcatcgaaattactttccaggattagacaaaccatacctgcaaaccaaggaggtgaattttggccaatgtttggcagaagtcacttgcaatggtggggagtaacctctcatgaacgtataattagaaatctgtcaaccactctaggtaaattagcgaatgaactagctgaagccatagctaccaaacaaagatctttagactctttagccaggatagtcatggatgacggaataactttaggctgcatagtggtgaaacacggagaaattcatatggcagctagctaacacattatgttgtgtttagatccatgcatcttctgaagttgaaacaaatgtaaaaaaataagacaatatgagaattaattatgacaaatcctagggaagaggctgaaagagctgtaacacaaacagggttgagtcatgccccttgcttgccacattgtgggcaaagagaaggaaacaagagctgtgaccctttgggaagcccagacctgggagctccccgagccagggctgtgattccctatttggggccctgtggttcctggtatctccaagcttccgggtgccactgtgttcccagtgtgccagctgtggaagctgcttgcggtgcccatggtccagccacagacttgtggagagctggcacccrtgttggcacctggagctacctgccccactgcagcagccaggaagtctgactgcacagtggccagaccccatgcttgctcacacaccccttgccactccacgcagtctcccttggcaaacatg

SEQ ID NO: 81923 - DNA, 663 bp, Homo sapiens
ttaatcaatgcttataatttcctcttgaaaagatttatattgcaaaaaagaagactaagtgttggaatatgtcaatatatagggaaaaactttgccatgaaatataatatttgataaaatcattttagaattgtatctctaaatggtatgcctaagaatattgttctataggaccttaatagatatgcctcgggggaaaaaagtattgtgtgctcaagtgagtttgagatatactgcattaaatataagaagttgcctgcaggacttctcagagtctttaacactttctgaatttctgagacaagatatatagagggtacagtactttgcaaacctatttatccctataccacctagtaacatttttcaggaaaatgttttgagaacacgaatttgacctgttttaggaatttatacctttgacaatgttgaggaccttgtyttttcctattataatgatgatgtgatattcacatatattactttttcccaattctttaagatatttttccaatgtattatattcaaccctctgctcagtgccttccttctgctaactaaagtgatggtttccgtctgttgctacacatcagacatacttggccctgaccctggagattctgtatgaacagaaatgccagaatacctgctcaggattctgta

SEQ ID NO: 81924 - DNA, 839 bp, Homo sapiens
tgcatagctaaaattccctaactacttttacgacacatacttagaaggttttaaaaatgcctgtagtcccagctattcggcagggcaaggcaggagaatcacttgagcccaggagttttagaccagcctgggmaacacagtgagggcccttctctaaaaaaaacaaaaaaaaaagaaaacttcggaaatgtttcttgaactaacttaaaagccgccttccacttctcactttgaattagtttgaattaatttacaaactgcaatatattttaaaggagcttattgtagaaaataagttgataaaaaaataaggatatatctttagggatttgtctttagggacttgttaccaagcatgtctattttccctcccgcagcttctccaaacaggctggtgtacagggagcaacaccggagctggtgcacgctggggtttgtgcagagcatcgctctcacgctgcaggtgtgcggcgccctcagctccccgcagtggatcacgctgctcatgaaggtcgtggaagggcacgcacccttcactgccacctcgctgcagaggcaggtaatgtgctgccaggcaaaaccagttccctgagagaggcctccatgtactgaagttccctgccctcagagtcaggggcctttattccgtaacgagtgcagaaagggtctagaagtgacagggtagattttctggaggcaaggggcagaggtccttgataattggtaagttgctaaccttcagtttacctgcttttctcttaagtggtaaatcctgcaactacttactcatctgcttcacagaatttgtagtgtaattgtcttaagaattaaactaaaaa

SEQ ID NO: 81925 - DNA, 839 bp, Homo sapiens
tgcatagctaaaattccctaactacttttacgacacatacttagaaggttttaaaaatgcctgtagtcccagctattcggcagggcaaggcaggagaatcacttgagcccaggagttttagaccagcctgggcaacacagtgagggcccttctctaaaaaaaacaaaaaaaaaagaaaacttcggaaatgtttcttgaactaacttaaaagccgccttccacttctcactttgaattagtttgaattaatttacaaactgcaatatattttaaaggagcttattgtagaaaataagttgataaaaaaataaggatatatctttagggatttgtctttagggacttgttaccaagcatgtctattttccctcccgcmgcttctccaaacaggctggtgtacagggagcaacaccggagctggtgcacgctggggtttgtgcagagcatcgctctcacgctgcaggtgtgcggcgccctcagctccccgcagtggatcacgctgctcatgaaggtcgtggaagggcacgcacccttcactgccacctcgctgcagaggcaggtaatgtgctgccaggcaaaaccagttccctgagagaggcctccatgtactgaagttccctgccctcagagtcaggggcctttattccgtaacgagtgcagaaagggtctagaagtgacagggtagattttctggaggcaaggggcagaggtccttgataattggtaagttgctaaccttcagtttacctgcttttctcttaagtggtaaatcctgcaactacttactcatctgcttcacagaatttgtagtgtaattgtcttaagaattaaactaaaaa

SEQ ID NO: 81926 - DNA, 839 bp, Homo sapiens
tgcatagctaaaattccctaactacttttacgacacatacttagaaggttttaaaaatgcctgtagtcccagctattcggcagggcaaggcaggagaatcacttgagcccaggagttttagaccagcctgggcaacacagtgagggcccttctctaaaaaaaacaaaaaaaaaagaaaacttcggaaatgtttcttgaactaacttaaaagccgccttccacttctcactttgaattagtttgaattaatttacaaactgcaatatattttaaaggagcttattgtagaaaataagttgataaaaaaataaggatatatctttagggatttgtctttagggacttgttaccaagcatgtctattttccctcccgcagcttctccaaacaggctggtgtacagggagcaacaccggagctggtgcacgctggggtttgtgcagagcatcgctctcacgctgcaggtgtgcggcrccctcagctccccgcagtggatcacgctgctcatgaaggtcgtggaagggcacgcacccttcactgccacctcgctgcagaggcaggtaatgtgctgccaggcaaaaccagttccctgagagaggcctccatgtactgaagttccctgccctcagagtcaggggcctttattccgtaacgagtgcagaaagggtctagaagtgacagggtagattttctggaggcaaggggcagaggtccttgataattggtaagttgctaaccttcagtttacctgcttttctcttaagtggtaaatcctgcaactacttactcatctgcttcacagaatttgtagtgtaattgtcttaagaattaaactaaaaa

SEQ ID NO: 81927 - DNA, 839 bp, Homo sapiens
tgcatagctaaaattccctaactacttttacgacacatacttagaaggttttaaaaatgcctgtagtcccagctattcggcagggcaaggcaggagaatcacttgagcccaggagttttagaccagcctgggcaacacagtgagggcccttctctaaaaaaaacaaaaaaaaaagaaaacttcggaaatgtttcttgaactaacttaaaagccgccttccacttctcactttgaattagtttgaattaatttacaaactgcaatatattttaaaggagcttattgtagaaaataagttgataaaaaaataaggatatatctttagggatttgtctttagggacttgttaccaagcatgtctattttccctcccgcagcttctccaaacaggctggtgtacagggagcaacaccggagctggtgcacgctggggtttgtgcagagcatcgctctcacgctgcaggtgtgcggcgccctcagctcccygcagtggatcacgctgctcatgaaggtcgtggaagggcacgcacccttcactgccacctcgctgcagaggcaggtaatgtgctgccaggcaaaaccagttccctgagagaggcctccatgtactgaagttccctgccctcagagtcaggggcctttattccgtaacgagtgcagaaagggtctagaagtgacagggtagattttctggaggcaaggggcagaggtccttgataattggtaagttgctaaccttcagtttacctgcttttctcttaagtggtaaatcctgcaactacttactcatctgcttcacagaatttgtagtgtaattgtcttaagaattaaactaaaaa

SEQ ID NO: 81928 - DNA, 839 bp, Homo sapiens
tgcatagctaaaattccctaactacttttacgacacatacttagaaggttttaaaaatgcctgtagtcccagctattcggcagggcaaggcaggagaatcacttgagcccaggagttttagaccagcctgggcaacacagtgagggcccttctctaaaaaaaacaaaaaaaaaagaaaacttcggaaatgtttcttgaactaacttaaaagccgccttccacttctcactttgaattagtttgaattaatttacaaactgcaatatattttaaaggagcttattgtagaaaataagttgataaaaaaataaggatatatctttagggatttgtctttagggacttgttaccaagcatgtctattttccctcccgcagcttctccaaacaggctggtgtacagggagcaacaccggagctggtgcacgctggggtttgtgcagagcatcgctctcacgctgcaggtgtgcggcgccctcagctccccgcrgtggatcacgctgctcatgaaggtcgtggaagggcacgcacccttcactgccacctcgctgcagaggcaggtaatgtgctgccaggcaaaaccagttccctgagagaggcctccatgtactgaagttccctgccctcagagtcaggggcctttattccgtaacgagtgcagaaagggtctagaagtgacagggtagattttctggaggcaaggggcagaggtccttgataattggtaagttgctaaccttcagtttacctgcttttctcttaagtggtaaatcctgcaactacttactcatctgcttcacagaatttgtagtgtaattgtcttaagaattaaactaaaaa

SEQ ID NO: 81929 - DNA, 725 bp, Homo sapiens
ggaagggagagaagaaaggaaagataaagaaagcccaacctccttccaaaatgtcatgagaatcttgagcacatatggtccttggcatgaccacatgacctgcagagcccctgttatagaactcatttttatattttccttagtataacagttaatataatatgtcatttttgttaatagtgtctttttgtcattttactttttaaaagattttattgaaatatacatacaggaaagtgcatctatcataagtgtgcaaattgatgaattctaaaatctttattgtacctgtttagcacatagattgacactgaacataactaacaaccagaaatctccgtgtactcccttcctgtaactacccctgcgcccgaccaaatcactctcttctaacagcataactttgtgtgactagcttttttaatgtaaaagaatgaaatctacagcatgtattcatttgcatctggcttctgccacccaacattatatttgtgggattcrtttgtacagttgcatattagtttgcagatccctcactctcatttctatatggtattatattgcataaacgtaccacactttatccaactactgttaaatatttgtgcattttctacttgggggtgatttcaaatagtgctgctatgaacattcttgtaaatgtcttttggtgaacatatgcaacacatatatgcgttgttgggtggttcccaggaggggcattc

SEQ ID NO: 81930 - DNA, 725 bp, Homo sapiens
ggaagggagagaagaaaggaaagataaagaaagcccaacctccttccaaaatgtcatgagaatcttgagcacatatggtccttggcatgaccacatgacctgcagagcccctgttatagaactcatttttatattttccttagtataacagttaatataatatgtcatttttgttaatagtgtctttttgtcattttactttttaaaagattttattgaaatatacatacaggaaagtgcatctatcataagtgtgcaaattgatgaattctaaaatctttattgtacctgtttagcacatagattgacactgaacataactaacaaccagaaatctccgtgtactcccttcctgtaactacccctgcgcccgaccaaatcactctcttctaacagcataactttgtgtgactagcttttttaatgtaaaagaatgaaatctacagcatgtattcatttgcatctggcttctgccacccaacattatatttgtgggattcatttgtacagttgcatattagtttgcagatccctcactctcrtttctatatggtattatattgcataaacgtaccacactttatccaactactgttaaatatttgtgcattttctacttgggggtgatttcaaatagtgctgctatgaacattcttgtaaatgtcttttggtgaacatatgcaacacatatatgcgttgttgggtggttcccaggaggggcattc

SEQ ID NO: 81931 - DNA, 725 bp, Homo sapiens
ggaagggagagaagaaaggaaagataaagaaagcccaacctccttccaaaatgtcatgagaatcttgagcacatatggtccttggcatgaccacatgacctgcagagcccctgttatagaactcatttttatattttccttagtataacagttaatataatatgtcatttttgttaatagtgtctttttgtcattttactttttaaaagattttattgaaatatacatacaggaaagtgcatctatcataagtgtgcaaattgatgaattctaaaatctttattgtacctgtttagcacatagattgacactgaacataactaacaaccagaaatctccgtgtactcccttcctgtaactacccctgcgcccgaccaaatcactctcttctaacagcataactttgtgtgactagcttttttaatgtaaaagaatgaaatctacagcatgtattcatttgcatctggcttctgccacccaacattatatttgtgggattcatttgtacagttgcatattagtttgcagatccctcactctcatttctatatggtattatattgcataaacgtaccacactttatcyaactactgttaaatatttgtgcattttctacttgggggtgatttcaaatagtgctgctatgaacattcttgtaaatgtcttttggtgaacatatgcaacacatatatgcgttgttgggtggttcccaggaggggcattc

SEQ ID NO: 81932 - DNA, 725 bp, Homo sapiens
ggaagggagagaagaaaggaaagataaagaaagcccaacctccttccaaaatgtcatgagaatcttgagcacatatggtccttggcatgaccacatgacctgcagagcccctgttatagaactcatttttatattttccttagtataacagttaatataatatgtcatttttgttaatagtgtctttttgtcattttactttttaaaagattttattgaaatatacatacaggaaagtgcatctatcataagtgtgcaaattgatgaattctaaaatctttattgtacctgtttagcacatagattgacactgaacataactaacaaccagaaatctccgtgtactcccttcctgtaactacccctgcgcccgaccaaatcactctcttctaacagcataactttgtgtgactagcttttttaatgtaaaagaatgaaatctacagcatgtattcatttgcatctggcttctgccacccaacattatatttgtgggattcatttgtacagttgcatattagtttgcagatccctcactctcatttctatatggtattatattgcataaacgtaccacactttatccaactactgttaaatatttgtgcatyttctacttgggggtgatttcaaatagtgctgctatgaacattcttgtaaatgtcttttggtgaacatatgcaacacatatatgcgttgttgggtggttcccaggaggggcattc

SEQ ID NO: 81933 - DNA, 725 bp, Homo sapiens
ggaagggagagaagaaaggaaagataaagaaagcccaacctccttccaaaatgtcatgagaatcttgagcacatatggtccttggcatgaccacatgacctgcagagcccctgttatagaactcatttttatattttccttagtataacagttaatataatatgtcatttttgttaatagtgtctttttgtcattttactttttaaaagattttattgaaatatacatacaggaaagtgcatctatcataagtgtgcaaattgatgaattctaaaatctttattgtacctgtttagcacatagattgacactgaacataactaacaaccagaaatctccgtgtactcccttcctgtaactacccctgcgcccgaccaaatcactctcttctaacagcataactttgtgtgactagcttttttaatgtaaaagaatgaaatctacagcatgtattcatttgcatctggcttctgccacccaacattatatttgtgggattcatttgtacagttgcatattagtttgcagatccctcactctcatttctatatggtattatattgcataaacgtaccacactttatccaactactgttaaatatttgtgcattttctacttgggggygatttcaaatagtgctgctatgaacattcttgtaaatgtcttttggtgaacatatgcaacacatatatgcgttgttgggtggttcccaggaggggcattc

SEQ ID NO: 81934 - DNA, 752 bp, Homo sapiens
gtaattctgggctgaaattccattacctgggttctataaataattctagtgccaaggaattgtgtgacaataaacatgtcatttttcttatgctagcctcagatttttcttctataaatgtagctaattcaacttggatgatatctaagtttctcaccaattctcaaattcagatattgattatctgaaatactcatataaactagaatttagtggtcctaataattgcatagggtaattgcatatttatgtgactttacatgaattataagtaggatgactctttttatttgcatggaacagtcccaatttgcaacatctccttataattattagcagcacctccttttactctcaaaattgtcctagtttttataataaattataaatcaccctaggtttagctttgtctttggaatatgtagcatgttattccacatgtataaaaaacataagtctacacaaaaatgtgcacgtgggatgtttatagaagctttattcataattgccacacttagaggctaccaagatgttagccagtaggttaatgaataagtaaataatgatacattcagataatggaatattattcagtgctaaaaaagaaayaagttatcaagtcatgaaaagacatggaggaatcttaagtgcatattactaggtgaaagaagtgaatctgaaagtgctacatgctgcaaaatttcaactaaatgacattttagaaaagataaaactgtggaaacagtaaagga

SEQ ID NO: 81935 - DNA, 2058 bp, Homo sapiens
tgcatgtgtccacatgcaggtgtgcgtgtgagtgtgtgcaggtgtgcgtgtgtgtatgtgtgtgcacatgtgcactcatggctctaagatgacaggacagcctggtactgagtttcaagtattcaaatgggaggcggaagaccgggatctttttcccactgagcctctaagtccctttgtgactttgggcaggtgacttgccctctctgaatccttacctcctcacctgtaaaatgagagtggggaccgctaaggtcagatgaccggttgcagttgcgtgagtgtgcacgtgagcaagagtcatcttggggcagaggtgcatgagggtgggcatgggtgtcggaaaggggaggtctcccgggcaggcgctgtgaagccgtgggtgtatagacgtgcatttacaagcaaaggtacagggcatatttagtggtaagcctgcacctaagggggaggtgggtgtgtgcagtaaggtagatgggagttgtgcatacgtgtatgtgtcagtgtgaacacaagcactgtgcaccagactttcctcacaccagacagggaacagcactccatgcccaatgcggctgcagctgcaaccagtattttctgaagacacctggcaaacagagcctgtttgcaatgagacttttctgccctttggtttgtcaatagaacatccaattcccaagagtggtcccaggagaarcaaaacttttcccaacaggttgcacatttaggggctgggatttcacccaagcccaggtacatgcccagttgtgggtgggggaattcaaatacaaccccaacaacaatactggactatttcatcatccaaggttgtacccctattctcagcagcccagcccaagcctggaaccaacactggactcacccctgactttcttgcctaacccagccccatcctgggttctccaccccagctacagctccatctcaggcctgtctaatccctacctcctccctgcctgaggtcaaggaccacgtctcatgcatttgaaccccatcccaagccctgtgtatagccaacagtgcctggacttattgaccccatgatcccagctagtctgaccctcaccaaccacacccagctctaggaccatgactccagcccagaggcccggcccagcccaccttgctactctccttgcccaagtcaactcatctagacctaggctgaggctcccagagctgcccgaagagccctgacaaactgatgggtcattaattgtagtcagggctgggagcagtatgcccattttctaatcacccaggagtcaccatagctgcaaccagaaagatcgcccagggctgggccacagggaaagttgagctagcaccacccacagagccaacacacagcctgacaatgccaacatcttgccatctccacggagaatggaaggaaaccaagtacagcaggggaccttatgccaggcccactccccatctccctgatcaatatgtgctgcaaatcccagagttagcagtagagctgccacactggcagtatgaggggaaggcacaggccagggctggatgccagacagaggaaaagggccgaatggaggactatgttgtgcagtggtgcagtggtgcaaagagttcacagatctgccccacagacaccctgcgacatacgaagacagagtatagagtagaggggcatggggctgtgcacaaacccgagcagtgtgacgatctgtacttcataaaggtccatggagagaggcctctgctgtgccacagtgcagtgtgtggagggtgcagtacagcagctttgcagtgtagagacagaatactgttatacaatgcagggagcagagcccacagtgtgcacaggcctcattacagacatctggtacagcatggcagaactggccagggccatgatgcaccatggaagtgccacatccatcatgggcatgacccagagctgcacaaggcacaccgcgccactgcagtgcatttagtggtacactgggctggcacccagtgctacatgataggtgtatggaggaatgccaagatggtaagtttaagccttac

SEQ ID NO: 81936 - DNA, 2058 bp, Homo sapiens
tgcatgtgtccacatgcaggtgtgcgtgtgagtgtgtgcaggtgtgcgtgtgtgtatgtgtgtgcacatgtgcactcatggctctaagatgacaggacagcctggtactgagtttcaagtattcaaatgggaggcggaagaccgggatctttttcccactgagcctctaagtccctttgtgactttgggcaggtgacttgccctctctgaatccttacctcctcacctgtaaaatgagagtggggaccgctaaggtcagatgaccggttgcagttgcgtgagtgtgcacgtgagcaagagtcatcttggggcagaggtgcatgagggtgggcatgggtgtcggaaaggggaggtctcccgggcaggcgctgtgaagccgtgggtgtatagacgtgcatttacaagcaaaggtacagggcatatttagtggtaagcctgcacctaagggggaggtgggtgtgtgcagtaaggtagatgggagttgtgcatacgtgtatgtgtcagtgtgaacacaagcactgtgcaccagactttcctcacaccagacagggaacagcactccatgcccaatgcggctgcagctgcaaccagtattttctgaagacacctggcaaacagagcctgtttgcaatgagacttttctgccctttggtttgtcaatagaacatccaattcccaagagtggtcccaggagaaacaaaacttttcccaacaggttgcacatttaggggctgggatttcacccaagcccaggtacatgcccagttgtgggtgggggaattcaaatacaaccccaacaacaatactggactatttcatcatccaaggttgtacccctattctcagcagcccagcccaagcctggaaccaacactggactcacccctgactttcttgcctaacccagccccatcctgggttctccaccccagctacagctccatctcaggcctgtctaatccctacctcctccctgcctgaggtcaaggaccacgtctcatgcatttgaaccccatcccaagccctgtgtatagccaacagtgcctggacttattgaccccatgatcccagctagtctgaccctcaccaaccacacccagctctaggaccatgactccagcccagaggcccggcccagcccaccttgctactctccttgcccaagtcaactcatctagacctargctgaggctcccagagctgcccgaagagccctgacaaactgatgggtcattaattgtagtcagggctgggagcagtatgcccattttctaatcacccaggagtcaccatagctgcaaccagaaagatcgcccagggctgggccacagggaaagttgagctagcaccacccacagagccaacacacagcctgacaatgccaacatcttgccatctccacggagaatggaaggaaaccaagtacagcaggggaccttatgccaggcccactccccatctccctgatcaatatgtgctgcaaatcccagagttagcagtagagctgccacactggcagtatgaggggaaggcacaggccagggctggatgccagacagaggaaaagggccgaatggaggactatgttgtgcagtggtgcagtggtgcaaagagttcacagatctgccccacagacaccctgcgacatacgaagacagagtatagagtagaggggcatggggctgtgcacaaacccgagcagtgtgacgatctgtacttcataaaggtccatggagagaggcctctgctgtgccacagtgcagtgtgtggagggtgcagtacagcagctttgcagtgtagagacagaatactgttatacaatgcagggagcagagcccacagtgtgcacaggcctcattacagacatctggtacagcatggcagaactggccagggccatgatgcaccatggaagtgccacatccatcatgggcatgacccagagctgcacaaggcacaccgcgccactgcagtgcatttagtggtacactgggctggcacccagtgctacatgataggtgtatggaggaatgccaagatggtaagtttaagccttac

SEQ ID NO: 81937 - DNA, 2058 bp, Homo sapiens
tgcatgtgtccacatgcaggtgtgcgtgtgagtgtgtgcaggtgtgcgtgtgtgtatgtgtgtgcacatgtgcactcatggctctaagatgacaggacagcctggtactgagtttcaagtattcaaatgggaggcggaagaccgggatctttttcccactgagcctctaagtccctttgtgactttgggcaggtgacttgccctctctgaatccttacctcctcacctgtaaaatgagagtggggaccgctaaggtcagatgaccggttgcagttgcgtgagtgtgcacgtgagcaagagtcatcttggggcagaggtgcatgagggtgggcatgggtgtcggaaaggggaggtctcccgggcaggcgctgtgaagccgtgggtgtatagacgtgcatttacaagcaaaggtacagggcatatttagtggtaagcctgcacctaagggggaggtgggtgtgtgcagtaaggtagatgggagttgtgcatacgtgtatgtgtcagtgtgaacacaagcactgtgcaccagactttcctcacaccagacagggaacagcactccatgcccaatgcggctgcagctgcaaccagtattttctgaagacacctggcaaacagagcctgtttgcaatgagacttttctgccctttggtttgtcaatagaacatccaattcccaagagtggtcccaggagaaacaaaacttttcccaacaggttgcacatttaggggctgggatttcacccaagcccaggtacatgcccagttgtgggtgggggaattcaaatacaaccccaacaacaatactggactatttcatcatccaaggttgtacccctattctcagcagcccagcccaagcctggaaccaacactggactcacccctgactttcttgcctaacccagccccatcctgggttctccaccccagctacagctccatctcaggcctgtctaatccctacctcctccctgcctgaggtcaaggaccacgtctcatgcatttgaaccccatcccaagccctgtgtatagccaacagtgcctggacttattgaccccatgatcccagctagtctgaccctcaccaaccacacccagctctaggaccatgactccagcccagaggcccggcccagcccaccttgctactctccttgcccaagtcaactcatctagacctaggctgaggctcccagagctgcccgaagagccctgacaaactgatgggtcattaattgtagtcagggctgggagcagtatgcccattttctaatcacccaggagtcaccatagctgcaaccagaaagatcgcccagggctgggccacagggaaagttgagctagcaccacccacagagccaacacacagyctgacaatgccaacatcttgccatctccacggagaatggaaggaaaccaagtacagcaggggaccttatgccaggcccactccccatctccctgatcaatatgtgctgcaaatcccagagttagcagtagagctgccacactggcagtatgaggggaaggcacaggccagggctggatgccagacagaggaaaagggccgaatggaggactatgttgtgcagtggtgcagtggtgcaaagagttcacagatctgccccacagacaccctgcgacatacgaagacagagtatagagtagaggggcatggggctgtgcacaaacccgagcagtgtgacgatctgtacttcataaaggtccatggagagaggcctctgctgtgccacagtgcagtgtgtggagggtgcagtacagcagctttgcagtgtagagacagaatactgttatacaatgcagggagcagagcccacagtgtgcacaggcctcattacagacatctggtacagcatggcagaactggccagggccatgatgcaccatggaagtgccacatccatcatgggcatgacccagagctgcacaaggcacaccgcgccactgcagtgcatttagtggtacactgggctggcacccagtgctacatgataggtgtatggaggaatgccaagatggtaagtttaagccttac

SEQ ID NO: 81938 - DNA, 1576 bp, Homo sapiens
acaggtgctcctaaaatgttagttcaatctaaatctaaatttccaaaaaaagtgaaccttttattaagttctgctgtggtgatgaggaaggcctgggaaagttcagctgaatgcagttgcctcctaattgattccctcctcttggagagccagagaagctggaacagaccggtctgtttgcagatgccacttaggaaaaaaaaaagcttctattatgtccttctgtggaacttcagtaatttccctctagttcaaaacatgatacttccaaccgggcgcgatggctcatgcctgtaatccctgcactttgggaggctaacatgggcagatcatggcgaaacccygtctctactaaaaatacaaaaattagctgggcatgggggtgcaagcctgtagttccagctactcgggaggctgaggcaggagaattgcctgaactgggaggcagaggttgcagtgagccgagatcgcgccattgaactttagcctgggtaacagagcaagacttcctctcaaaaaaaaaaaaaaaagatacttccacaaagcattatattcaactttggcttcacagcacagtcaccatttgtagtgcttttattttttgtatttgcccacataaaatatcagacagcttttattttatatatatatttatttatttatttatttattttgagatgagatcatgccatgttgcccaggctggtcttgaactcctgggctcaagggatcctcccacctcagcctcctgagtagcagggattgcaggtgtgtaccaccacacccagcttgacctgtagtgcttttagaaactacggtatgtattcctaggccccactcctgaggtacttagtaggtctaggatggcttggagcttctgtttttttcaaagctctccaggtgactctgctgcccaggccaggcttgagaaccactgccttgtggatacagattgtcagacaagcagtaattctctccgtgctccagaagggcaactttactttctgacccagattcaggcggctttacttgttctcgtatggactgaagccagagactgggattctctttgtagtcatgtcttacaaggtttagggtaaccacactgtcacagaaagaatcaggtgtcctttacacatcctggtaactggctgtctgggtcaggttacaccaggtaggggtcatgggactacctagagtctgaacagagcattgtcagaactagtgtggtttgtgatgcttgcgctgtgggccacacctctgcaagcaggagggaaggaatgaggaacagccttctcaggtctgaatcctcaaaaggaggcctccaggtttctcctgttctcacgtccctgttttcattcctgttggcctccaaacattgcagctgttctctcctaagccattttcccctgttgcttagtttctttccctttcttccaaaatgggattccctaaataagtatttgggccttttttatttaaaagattaaactgtagatctaagtaaagtaagactgtgcagaagaatgacaaacatttgagaaatttcagagttctccatagccactgtcccttg

SEQ ID NO: 81939 - DNA, 392 bp, Homo sapiens
taaaaacccacaaatgagcatatcctccacaatcatgtccagcacaaccatatccatcccccagaagggccctgaatgggccttgcccatccctgaaccagtgccctggggcggggtagggccactccggttgctctgattgagtctctcaccctcctctgtgatacaggtggggccttgtggttgacagccccagagattaggaaggagcacttgtagagagaaaaagatactaggcaggaaaaaaaaaaacagtaataggagtctactacaagctctttgcttctctgagatcaggaaggctgccaagaatggctccaccgtctcctacacccacctggcrgtgaaggagctcagccatttgagcaaattgagagctgcaaggattcact

SEQ ID NO: 81940 - DNA, 575 bp, Homo sapiens
tatcatgttggtcaggctggtctcaaactcctgacctcatgatccacccgcctgggcctcccaaaatgctgggattacaggtgtgagccactgcacctggctgttaggtatttcctgcgatccaatttgtttgggaaatgctgcctactaagccccttttctaagattctgactacacgttagtcataaaggctctgagaagtcccggaataaagaaacccatgtggcctgtgtcatccagagctttccagatttaatgtgggctgggaacattacagtattttcacagcacagcctgccccaaacagcagtttgagaaacgatgctctgggcccctcgttctcttctttgtcttctgggaagcccagcagctctgccatttgagattcactgaagtgggagagaaggaragtgaagagggccaagcaggggtgagggtttaggagatgggaagttaagttgaagctgcaaacacaggtggatggtgtcgggggctggccccacatttgctgcaagcctgggggtgggggggtccagctgcctctcaccagggaggccagccttggcctgcccca

SEQ ID NO: 81941 - DNA, 764 bp, Homo sapiens
aaaattagttgggtgtggtagcgcatgcctgtggtcttggctactcaggcggctgaggtaggaagattgcacaagccagggaggtcaaggctaaagtaaactatgatcacaccactgcactccagcttagataacagagtgagactctgtctcaaaaaagaaagaaaaaaaaaaactaatacaaatactaattatctatataaagtggccatttcctgttctattaaactgcattgcatttttctatgtaaaatatgctattcataagtaaaaactgttaagtatttaagatatttttcattcaaaaatatcatccaaagcagtgacatctggcaaaatatcataaacattaactgtggtactttgtttttatttatattgattattcatgtttaagtctctgaaaatcctaaaacatttactgattccaacaacactgttaaacaaatgcaragaaaaaaaggttaggctagcaacatattcaaaaataaagtgaagaaccctccatatatactgaaaaatcattttaatatgaacaatgtgatgtagtatcagttgttagggcccaaataggaagaagagagcatcgttggtgtgggggtggcaaagccagagcagggagaggacggacgggtggtatagcacaggaggacaaggaagccatttaaactgaaggtctacctagcaagggtatatgagcctgaatatgaacaacaggaggttattcatgcaagagaagagggaaaccctgacacaggttttgg

SEQ ID NO: 81942 - DNA, 764 bp, Homo sapiens
aaaattagttgggtgtggtagcgcatgcctgtggtcttggctactcaggcggctgaggtaggaagattgcacaagccagggaggtcaaggctaaagtaaactatgatcacaccactgcactccagcttagataacagagtgagactctgtctcaaaaaagaaagaaaaaaaaaaactaatacaaatactaattatctatataaagtggccatttcctgttctattaaactgcattgcatttttctatgtaaaatatgctattcataagtaaaaactgttaagtatttaagatatttttcattcaaaaatatcatccaaagcagtgacatctggcaaaatatcataaacattaactgtggtactttgtttttatttatattgattattcatgtttaagtctctgaaaatcctaaaacatttactgattccaacaacactgttaaacaaatgcaaagaaaaaaaggttaggctagcaacatattcaaaaataaagtgaagaaccctccatatatactgaaaaatcattttaatatgaacaatgtgatgtagtatcagttgttagggcccaaataggaagaagagagcatcgttggtgtgggggtggcaaagccagagcagggagaggacggasgggtggtatagcacaggaggacaaggaagccatttaaactgaaggtctacctagcaagggtatatgagcctgaatatgaacaacaggaggttattcatgcaagagaagagggaaaccctgacacaggttttgg

SEQ ID NO: 81943 - DNA, 1236 bp, Homo sapiens
gcattgaataatccctttatatataaagtttttaatagatcaagtcaaactaaattacaaagaaaaggaaatgattactaaaagtcgtttctttttggagacaggtagaaaataatggatgggaaggagaagaaggggaatttttgaggtattggtgataactatttctttacgtgagtggttgttacatgaatgttcactttgtgataaatcaatgtaacattacatttttattttgtacagttttctgtattgtatattatttctcattactttaagaaaaggctaaaaataataataaacaggaaggtagaaagaaaagaatactcttacagaaggcaaaagaagaaaatgagaaatgagtgtgttcatctgagtcaaattttgctgctaggtcaagcatgatgagcactgccattaaccactggatatagcaatatggaaataattggtggctttgagaaaaggagcataattagatacacaaattacagataatcctcccagtggagtggtgaggcgaagatttgtttggaatgggtttggagagaaaagaagcataattagatacatcagttacagataatccttccaaaaaatattgctttacagagaaacagaagaaaagtagagggggaagtaaaaacaagcaaaaaaagccattttatatttttttaatgaagcgataatagcatgtttatatttctctttgacccaagcgtcttgtgccttctgtcagcatctatgaaactatggcaggctaactagttagtttgcaactagggtagaatctcagatcccttgcagttctagataatactatgctgtaattgcttattttatttttacccaaatataacattggagtataaattcttttggatcagagctgtaattcttattatattttagcacttatcataatacttactaaaatgaatcatagaataaatcaaagaaggaatcatatacttcagatactctatatggcagtctgaaatcatttgaaaaaaagttattcaaaatgatgcaaaaaactcatgataaaaattagaaaaatatctttaatataaatttttcaaatgttggggaaagtattttaagcatttgtagtggaaaacacaaatattcttartgcaatacattaagtgctatggttatagatactgtacagaaagaaaattgtgttaagataagaaatttaagctttatttttagtgaacacttatggtcaga

SEQ ID NO: 81944 - DNA, 675 bp, Homo sapiens
tgtatctacactgtatatgctatccactccagtcacttagcccatgagtcacttagtagccacttggttatcaggtctactgttgtggtatcacagtgcttgcgttcgagttaacacttattttacttaatagtagcctcaaagagcaagagtagtgttgctggaaatttggatatgccaaagagaagctatgaagtgtttcctttaaaagtcaaaaggtgaaagtcctcaacttaataaggaaaaaacatcttatactgagtaagaacaaaccttctgtctgtgaaattgtgaagagggaaaaagaaatttgtactagttttgctgtcatacctcaaactgcaaaagttatagccacagtgcatgacaagtgcttagttaagatggaaaggcattaaatttgtgggtggaagacatgaacggaaacatgttatgattgacagcaattatattcagtactatcagtggtttcagacacccactgggggtcttagaacatactmcccatggataaaaggcagaggactataatttgattccaaggctagaacccttctagtacactacagcacatctttacattagcttgttctgaataacataatggataaacatgctcatactgtaagctttacctgaaagctaatcttcaacataaaagcatttggcagaaag

SEQ ID NO: 81945 - DNA, 702 bp, Homo sapiens
cccccatcagataaggatgacctaatgtatactcaaaataattgaaagcagggtctctaagagatatttgtgtacttagtgttcataggtatagcccattgatcaagggatgaatgtataagcaaaatgttgtaagtacatacaatggaatattattcagcctttaggatggctgctagtaaaaaatcaaagtaacaggtgttggcaagaatgtagaggaattggaacctttatgtattgctggtggcaatgtaaaatggtgcattcactgtggaaaacagtatsgtggttcctcaaaaaaattaaatgtagaattatgatacaactgtttcacttctgagtgtatattcaagacaattgacagcagcgacttgagcagctatttgtacacccatgtttaacaacattattcacaacagccaaaaggtggaaggaacctagataaacaaaatgtatataatgtatacatatgatggaatattattcaggcttgaaaaggaaggagattctgatgtgtagtataatatggataaacattgggacattatggtgtgtgaaatgtcagacacgaaatgataaatatatgattccactgccatgaaatacctcaagtagtcaaattcataatgatagaatgttgaatagtggttaaccaggagaggggagagtgagtagttcttgtttaatgggcacagaatttta

SEQ ID NO: 81946 - DNA, 702 bp, Homo sapiens
cccccatcagataaggatgacctaatgtatactcaaaataattgaaagcagggtctctaagagatatttgtgtacttagtgttcataggtatagcccattgatcaagggatgaatgtataagcaaaatgttgtaagtacatacaatggaatattattcagcctttaggatggctgctagtaaaaaatcaaagtaacaggtgttggcaagaatgtagaggaattggaacctttatgtattgctggtggcaatgtaaaatggtgcattcactgtggaaaacagtatcgtggttcctcaaaaaaattaaatgtagaattatgatacaactgtttcacttctgagtgtatattcaagacaattgacagcagcgacttgagcagctatttgtacacccatgtttaacaacattattcacaacagccaaaaggtggaaggaacctagataaacaaaatgtatataatgtatacatatgayggaatattattcaggcttgaaaaggaaggagattctgatgtgtagtataatatggataaacattgggacattatggtgtgtgaaatgtcagacacgaaatgataaatatatgattccactgccatgaaatacctcaagtagtcaaattcataatgatagaatgttgaatagtggttaaccaggagaggggagagtgagtagttcttgtttaatgggcacagaatttta

SEQ ID NO: 81947 - DNA, 503 bp, Homo sapiens
cacacacacacacacacacacacagaggaagaaacaagaatctatgaaagtgcttctctgcactcatgagaatggatcacagatgatctgctatctccaatttttaaatacagacctcttcatatgaatgatatcctctgaagggcactgaggcctctggaattaaggaagcctgtaattcttccaactactacagcccttatctcctaagagagcttttcctcastgcctcacaggaatggcaatatcaccaccaacagcattccttatgcaggaatgaagtggtgatattttaaaaatcatcttctgaataccgactttgtgccctacacttctcgtgtgtcatctcagttgtgtctaatcctcacagtcctttgagggaggaatatatattcccaatgttacacacttccgaattccttttcttgctttttctctatagcgctttcactttctaatatataattatttgttttgctaactgcactgccctcattacaatg

SEQ ID NO: 81948 - DNA, 2302 bp, Homo sapiens
actactaggcattgggcattctttgccaattcaaattttagtgtcagaaacatcatatgtcatttctgcccatttcttctctctccttatatcttatacctgccatcctgccttttctttttccaggtaagcagacagtggacctctaatgaacacatttttcaaagatctagcctaacctctgaacatctttagtcactgagttaagcaatacaaacaattaaattaaatgtgctaggtttctaaaactgtgtagagacttgtagtgtccttaaatagtctcagttgtttatataaaaagcagttattaacaggcaaggattaggacataagtatctagtcacacagttcttagttctcaaaaacattcagagaagttaaccaacaggccgcaactgtgcttctaattctaaagagctgcttgggtagggtgtctccctgtctccatgttaggttttcctgttctcttttcttatcagggtcttccttgacacagtctgttctcaaggcctgagcagctccctcagccactgagcatgggggccctggcaaaggagagggtgtggatttgccaggaaggataaaggtgagttcttcagagtagggccacgcactgagaaaccaggaagagcccaataagcttgtcacctctccagtttccttaatgggactttgagtactaaggggagagatagtgaatgagagagcagaggtggctgcaaggcagcagcccctgatccttgaggggctggaagacttggacggcagaggcagtgagttctgcttcaggatcccagccaaaggaattaggaactgggtggccaggacagctgtttctgagctctgaaaagttaagcctggccaaggattcatggtgtgctgccctggaaactagtcaaaggctctcatcaagagcctctgggaagctgtttgtataaattgctctaggtcatgcattggtcttccacatctgctgccccagtgacttcccagtgctaatttctggtgaaggaggaaaagactgcctgtgcccacaacgtcatccttcagaaggtgggcaggtgggagcaaccggtgtgggaagagggccaaggggtctagggccctgcgttctaccttacctctgcctcgcagcctgtgcagcgtgtgtcgccaagtggctctgtggcagaggagagaggaggagggaggaggaggcaggaggaggcagcaggaggcaggaagaggcccagctcttcactcttcacttctcagggaggtcatgaaggtgcccaaggaaagtcatattttatttctgacaaaaatttggttgagggccaggaaagtaaytcattttatttttggtgggatcttttaggaagggacaaatacaaaatgttctcattcatctgctttaaaatttaaagcagggactatttaagcaaaatgttgagtaaaaccaataatcaatgaaaaacacatatagcggttcctcatctgttaaactttggacagggatgacatgcccccaaaacaaatttaaatgtcccataacctttttctttttacacttaaaaacattatgtattttactgacttttcaaccagattatatggcttacaatctaatcttcttttggcgaatcagcattgtacttatacatcaattacagtaaatatcttcagattcctttgctttttctaattttctttctgtcatctctgctaggctttctcttattgctaccataagtgttgtcctctagaagcagattacattccttccttttttggtctaattgtttgttcatattataggcaagaaaatagatgagcttattagaattctagaagaaagtgtgagccgggatggctaccggagcccacagaccctgacttttaggtaaaggcacagagacacacatcagcacatatggacatttttttctataaaaggagtttagattaatgcattaaatatttttgaaactccctctatatgccaggcacttggctaggcactggctgtcaaatagaaataattcccagtatctttccttgaaacatagacagttcatggggcatgatgctttgtaataatcagacgcctcatcatggttcttgaaagatattttaatgtgataaataactgccaaggaagtgctactgactactaaagaggggccttagacagatctgaacattaggagggcctcaaggaagagtcctccctcagatggagtcccaagagattacatttatacctaaatctcagagtaaattgagatttgtcagacaaataaataccatacagcctttaaaa

SEQ ID NO: 81949 - DNA, 2302 bp, Homo sapiens
actactaggcattgggcattctttgccaattcaaattttagtgtcagaaacatcatatgtcatttctgcccatttcttctctctccttatatcttatacctgccatcctgccttttctttttccaggtaagcagacagtggacctctaatgaacacatttttcaaagatctagcctaacctctgaacatctttagtcactgagttaagcaatacaaacaattaaattaaatgtgctaggtttctaaaactgtgtagagacttgtagtgtccttaaatagtctcagttgtttatataaaaagcagttattaacaggcaaggattaggacataagtatctagtcacacagttcttagttctcaaaaacattcagagaagttaaccaacaggccgcaactgtgcttctaattctaaagagctgcttgggtagggtgtctccctgtctccatgttaggttttcctgttctcttttcttatcagggtcttccttgacacagtctgttctcaaggcctgagcagctccctcagccactgagcatgggggccctggcaaaggagagggtgtggatttgccaggaaggataaaggtgagttcttcagagtagggccacgcactgagaaaccaggaagagcccaataagcttgtcacctctccagtttccttaatgggactttgagtactaaggggagagatagtgaatgagagagcagaggtggctgcaaggcagcagcccctgatccttgaggggctggaagacttggacggcagaggcagtgagttctgcttcaggatcccagccaaaggaattaggaactgggtggccaggacagctgtttctgagctctgaaaagttaagcctggccaaggattcatggtgtgctgccctggaaactagtcaaaggctctcatcaagagcctctgggaagctgtttgtataaattgctctaggtcatgcattggtcttccacatctgctgccccagtgacttcccagtgctaatttctggtgaaggaggaaaagactgcctgtgcccacaacgtcatccttcagaaggtgggcaggtgggagcaaccggtgtgggaagagggccaaggggtctagggccctgcgttctaccttacctctgcctcgcagcctgtgcagcgtgtgtcgccaagtggctctgtggcagaggagagaggaggagggaggaggaggcaggaggaggcagcaggaggcaggaagaggcccagctcttcactcttcacttctcagggaggtcatgaaggtgcccaaggaaagtcatattttatttctgacaaaaatttggttgagggccaggaaagtaattcattttatttttggtgggatcttttaggaagggacaaatacaaaatgttctcattcatctgctttaaaatttaaagcagggactatttaagcaaaatgttgagtaaaaccaataatcaatgaaaaacacatatagcggttcctcatctgttaaactttggacagggatgacatgcccccaaaacaaatttaaatgtcccataacctttttctttttacacttaaaaacattatgtattttactgacttttcaaccagattatatggcttacaatctaatcttcttttggcgaatcagcattgtacttatacatcaattacagtaaatatcttcagattcctttgctttttctaattttctttctgtcatctctgctaggctttctcttattgctaccataagtgttgtcctctagaagcagattacattccttccttttttggtctaattgtttgttcatattataggcaagaaaatagatgagcttattagaattctagaagaaagtgtgagccgggatggctaccggagcccacagamcctgacttttaggtaaaggcacagagacacacatcagcacatatggacatttttttctataaaaggagtttagattaatgcattaaatatttttgaaactccctctatatgccaggcacttggctaggcactggctgtcaaatagaaataattcccagtatctttccttgaaacatagacagttcatggggcatgatgctttgtaataatcagacgcctcatcatggttcttgaaagatattttaatgtgataaataactgccaaggaagtgctactgactactaaagaggggccttagacagatctgaacattaggagggcctcaaggaagagtcctccctcagatggagtcccaagagattacatttatacctaaatctcagagtaaattgagatttgtcagacaaataaataccatacagcctttaaaa

SEQ ID NO: 81950 - DNA, 2302 bp, Homo sapiens
actactaggcattgggcattctttgccaattcaaattttagtgtcagaaacatcatatgtcatttctgcccatttcttctctctccttatatcttatacctgccatcctgccttttctttttccaggtaagcagacagtggacctctaatgaacacatttttcaaagatctagcctaacctctgaacatctttagtcactgagttaagcaatacaaacaattaaattaaatgtgctaggtttctaaaactgtgtagagacttgtagtgtccttaaatagtctcagttgtttatataaaaagcagttattaacaggcaaggattaggacataagtatctagtcacacagttcttagttctcaaaaacattcagagaagttaaccaacaggccgcaactgtgcttctaattctaaagagctgcttgggtagggtgtctccctgtctccatgttaggttttcctgttctcttttcttatcagggtcttccttgacacagtctgttctcaaggcctgagcagctccctcagccactgagcatgggggccctggcaaaggagagggtgtggatttgccaggaaggataaaggtgagttcttcagagtagggccacgcactgagaaaccaggaagagcccaataagcttgtcacctctccagtttccttaatgggactttgagtactaaggggagagatagtgaatgagagagcagaggtggctgcaaggcagcagcccctgatccttgaggggctggaagacttggacggcagaggcagtgagttctgcttcaggatcccagccaaaggaattaggaactgggtggccaggacagctgtttctgagctctgaaaagttaagcctggccaaggattcatggtgtgctgccctggaaactagtcaaaggctctcatcaagagcctctgggaagctgtttgtataaattgctctaggtcatgcattggtcttccacatctgctgccccagtgacttcccagtgctaatttctggtgaaggaggaaaagactgcctgtgcccacaacgtcatccttcagaaggtgggcaggtgggagcaaccggtgtgggaagagggccaaggggtctagggccctgcgttctaccttacctctgcctcgcagcctgtgcagcgtgtgtcgccaagtggctctgtggcagaggagagaggaggagggaggaggaggcaggaggaggcagcaggaggcaggaagaggcccagctcttcactcttcacttctcagggaggtcatgaaggtgcccaaggaaagtcatattttatttctgacaaaaatttggttgagggccaggaaagtaattcattttatttttggtgggatcttttaggaagggacaaatacaaaatgttctcattcatctgctttaaaatttaaagcagggactatttaagcaaaatgttgagtaaaaccaataatcaatgaaaaacacatatagcggttcctcatctgttaaactttggacagggatgacatgcccccaaaacaaatttaaatgtcccataacctttttctttttacacttaaaaacattatgtattttactgacttttcaaccagattatatggcttacaatctaatcttcttttggcgaatcagcattgtacttatacatcaattacagtaaatatcttcagattcctttgctttttctaattttctttctgtcatctctgctaggctttctcttattgctaccataagtgttgtcctctagaagcagattacattccttccttttttggtctaattgtttgttcatattataggcaagaaaatagatgagcttattagaattctagaagaaagtgtgagccgggatggctaccggagcccacagaccctgacttttaggtaaaggcayagagacacacatcagcacatatggacatttttttctataaaaggagtttagattaatgcattaaatatttttgaaactccctctatatgccaggcacttggctaggcactggctgtcaaatagaaataattcccagtatctttccttgaaacatagacagttcatggggcatgatgctttgtaataatcagacgcctcatcatggttcttgaaagatattttaatgtgataaataactgccaaggaagtgctactgactactaaagaggggccttagacagatctgaacattaggagggcctcaaggaagagtcctccctcagatggagtcccaagagattacatttatacctaaatctcagagtaaattgagatttgtcagacaaataaataccatacagcctttaaaa

SEQ ID NO: 81951 - DNA, 560 bp, Homo sapiens
tgcatgtatgtgtgtttatgtgtgtacatatacacatagataatcatatgtctatggtcatagatctataacttgttaaattctgctgttctgaaatgatgtacctgaactagaaaggtaatgacctcgttgggaacataaaagtcatctggcatgtactcaccatgattccacttgtaatcattaatttgtaatctgtatgttttttcataatttcaacatacgattgtcattttagttgatgtttactatatattaaatatttgtgactaaaaacctagttgttatttaatgtagctattcgtttagtcctataagtttttctacatgttctggaaatacataataatcttatttatattttttattgtttcattttattttattatwattttttaactttaatttttttcttttgatatggagtctcgttctgttgccaggctggtgtgcagtggtgcaatctcggctcactgcaaccttcatctcctggattcaagcaattctcctgcctcagcctcccaagtagctgggactacaagcacctgccaccacgcccg

SEQ ID NO: 81952 - DNA, 560 bp, Homo sapiens
tgcatgtatgtgtgtttatgtgtgtacatatacacatagataatcatatgtctatggtcatagatctataacttgttaaattctgctgttctgaaatgatgtacctgaactagaaaggtaatgacctcgttgggaacataaaagtcatctggcatgtactcaccatgattccacttgtaatcattaatttgtaatctgtatgttttttcataatttcaacatacgattgtcattttagttgatgtttactatatattaaatatttgtgactaaaaacctagttgttatttaatgtagctattcgtttagtcctataagtttttctacatgttctggaaatacataataatcttatttatattttttattgtttcattttattttattataattttttaactttaatttttttcttttgatatggagtctygttctgttgccaggctggtgtgcagtggtgcaatctcggctcactgcaaccttcatctcctggattcaagcaattctcctgcctcagcctcccaagtagctgggactacaagcacctgccaccacgcccg

SEQ ID NO: 81953 - DNA, 1508 bp, Homo sapiens
actacagccaatgtctactattactgtaattctagtaatctagcacaaaggaaacaaaagctgaagggcataggggaagaatctcagagaaatggtgaatttgttctacacgttttgccaataataagacaacgaagaaagaaggaatgtcttctttaagtttaatagataatgactaaagcaagagataaaaatattcataaaaatggaatcttgaattcccccattcatattaaagcctcttttaagtaaataactccaccagtttcccaccatcaggtatgaactcagttttcctggactcttatccttctgctcactcttaaatcctgtccctcaataactgttctacctcaaaagccactgtcatcacaattccaagacagcttttatagccatggattagtcttcgttccctaattctttactgatcgatactgttaatagagaataaatgttagctacacagaacaaacaaaatagtactccaggcaattacactaattaatgcagaattgttgtattatgatagtatccctagtcataagattaaacgattatgcttcagaaaatatatatattttatcatgctgtaatataaacaaagcatgataaatagtcacattaaataatcttaattcattgctgatgtcacagagccaatgatcttttctttcaaattaaaaagaaaatcagacagccaggtccagtggcgtgtttctgtagtcccaacttcttgaaaagctgagacaagaggatcccttaagcccaagagttctagtccagcctgggtgacatagtgagacccccatctcaaaaaaagaaaattaggattgcatcatctgctatcattctacttaaggctagattccaaggagactcatgtgaggctgctcacccctttagatgcactactgtctgtgcttaaaatgttgcatatgggaggccagtggattgacttccaagcacagacatattttgtttgaatarcacagtggtttaagattttttgagcagacattaaaaatatatatagacgcttaactggcctttcattaaaaattggaaaatctggcaacaatggacattatttattctatcttccctctttctctagcttccttctctatctttttccctctcattctttcctcaaacactgatccatttcatttatttagacttcctgactggccccattgggatatgagttttctaccctttctgtaggaactcagatcacaagactggtagtgtctttgtttggatttcctttatttacgtacagtttaaaaggttttcctgcttctgagtttttgtcttaatgtcagtataatatgaccaacttaatagtaatagactagaatgatagacattctttaaacatgtactagcgatataaatagaaaaagtacttccagtcagatgaaatccacagggggaaaaaaaaatagagaaagtacagagagtgaaggcattggaagggttccaaacggaaaaaaaaaatg

SEQ ID NO: 81954 - DNA, 729 bp, Homo sapiens
atagactgtgatatcagcatctcctttgcttccaataattgtttcacttcagctaagtaaaaagtagaccactggaaaaaacagccagggctgagagtcagtttgttttaaaacgccagcacgtgggtgctgcactggcatgggctacagctacatggcaactgatggactccatagattatgcaagggcagataccttgttcttctctgtacgggctgctcggttctgagttcactttcctctggatcctctcagaagcctgaactgtgttaaaagaaccatggcgagccagcttctgttttgcacagacttgaatctggccatatgtttctcttttcaattctggtaagacagatgcagaaacatccaccagttcttcatctacataaacgagagaattggtagtgttgttatacagctgtaattcaggataattttcgtctatttaagagatggctttgaacctataattgtaatggagctatcaccctataaatcaaaaactaagayaatcaaaggaattttatgagccttgtctcaaaccccaatttctttcaatgtacttttttttttaagttagtggatgactataaaatgagattgaatccatatatattctaaaattatctgaattgcaacagaagtagagcaagatgttcttcaacccgaattagaatgagcctcacattttagatgctctatttgagcagagagtatcaaaggaaagc

SEQ ID NO: 81955 - DNA, 986 bp, Homo sapiens
ataccagggacacataaagggaaaattgygtgatagcatgtaagtttgaaggaaagtttattatccagtaagaatctcatagccattggagaagagctcatcccagctggcacatgatctcagccttttgagaccttaagtagagaacccagttgagcccacctggacttctgacctacagaaatcatattattatatgttacacaacaacagaaaactaattcgaattaccaaacagctgtattatagattgcacagagggaagatggtgttacccactgcagaaatgttctgtaggcctttacttagaaagtactttttcccaaaaactgtgatatatgatgagaatacaacactttctaggtccctgaccatactcataatgtcatctttatcgcactcataatgtcatctttacatttgtaagagttaatttacttcacaatataaatttaaaaaataaataacaaaataaacgttagtgagctaaaataacctgaccaatgattgggctcaccaaacatcagcttccctacagggccatattagaataagcacagatttagggactggaatatttctattgatatcttgtatgaccctgaaacaaggcctactcacaagaaggaaggagcactgtttttcccttgccctcattcattcctaaatcctactgcaatgcctcacctgcccagaggaggcacctttctcttgttggcataaatccctaggtagccttataaaagtacttacaaacattcactactaaatatcacttcacaaaacaactggctcttcagaaacggtacattaagaagatttttaaaaatcccatttgaaaaagtaccagctacccttccaaaacagaatatattagaaaatacttgggtagcgtggtgatgttgaggttaaggttgacaaacaattgtacatggcaatgttcccaatgacattaacaggcaattaagccacggaatcggtgcatg

SEQ ID NO: 81956 - DNA, 1379 bp, Homo sapiens
aaagagtcttattcacgaagttgcaattgaattttgactcaagtagaactaaatagttctgcctaaccacttttggctttctgcccagacatggaaataaaaactcagaagtaagtaaagtggaaatgtgagaaaagagaaactattcaagactattttgaagattaaatgtagaatcattcaatgctaattatttagaattaagaagtgacatgggaccataaaactattaatcaaacmattaaaaagagatgaggctattctcagtaaattacttttcaaataatttttataataaaatctgtttcataagccctaagtaaaaaaatcaatactttatgaatgtatatatcaatatttagatttttttacaaataattaatttgacattatcagaaatatttagaaaatacaaaatcaagtaacgatttgcctaggtgacataggtcctaaaagaggactaatcataaaacccgtggaattgggattttaaattaaaaaaaaaaaaattctaggttacagctaccaaaaatgaaccagaataaattgaggctagaagatttatagccagataagacattttaaacaatttcttcaaattctaagttggccattaatataaacctttgagtattgccatatgtgtgaggcagagaggaaatacttaaatgcgtatatgagttatttaacaaagctatctagtaagaggtaagaaaatctaacatttatggagcacttgcagtatactagatggggttctaagtgctttataaatattagttcattaaacactcataacagctgcatgaggtaagtactattactagctcccttttgcaaatgaagaaacgaagggacagagtaatagagaatttgtccaacattaaggagacagtgcaacagattaaaatacaatctaggtctactgagtaatatttatcagcttttttttttttttttttatgaagtgtcgctcttgttgcccaggctggagtgcaatggcacaatctcagctgactgcaacctctgcctcccgggttcaaacaattctcttgcctcagcctcccgagtagctggattacaggcgtttgccatcatgcctggctaatttttgtagttttggtagagacggggtttcaccatgttggccaggctggtctctaactcctgccctcaggtgatccgcctgcctcggcctcccaaagtgctgggataggcctgaactactgtgcctggccagcttctttgtttttaaaaggagaaaattttaaaggggggataatactgtttgaatgtttttcctttctgaatctcatattaaaagctaattcccaatattggaggtgaggccaggtgggaggtgactggattatgggggt

SEQ ID NO: 81957 - DNA, 1160 bp, Homo sapiens
ttagaatttaaggtcatgattcctttacccttttattcttagcatgtgccctgccaaataataacacattatattaaattccagagactcacaatttcccactgtgattcaaatcctgtacaaaatgtctcatcacagacagataaaccagcctatcatgaattctytaaatatttgcctgctcactaaaagcccctgggagacttaaaactacaaatttctgagctactccccagactgaattcaaatcttctgggctgaaacagaaatctgtatttttaaaaaatctcttttcccttggtctgtttgtttgtttttaaatggttgggagcatgaagcaagaggtttcattaggctgttgaaatgtatgatgtgagaggctcgtgataccaaatttagctcccattaggtattaacctgatgtagtttctccctgtttccaatccaccagccatgtacctaccaagaaggttaatagctactattcccatttactgtggatgtgagatctcttagctcttataatcatgcttagctaaaacttctaggaaaatattggcagaataaatcatttctaatttctaattttatcacccctcccatttatttctctatttcctgtggtaattatatgggcttaattcattataatttattcccctttctctttcctgaatctggtcttaattacagctgttactttcttttgttctgccttgtcatttttgtgggggaaaaagaacagaagaccctagcgaagcagaagcagaagtagcatttcatatggacacctgtgaagttcttgattccctgctgacatttattctgcatgcttaccacacaaggggtggattatttcctcctgtgaactttcatttaggtagagagcttagggtctatgagctttgcaaggaaccaggaccttagacaaacaacaaaggaaacaaacattgactctaaaatgcaccaaataaaactgcaaaatccatattaataagaactaactaaatatatattaatttacttgttattactaataatcacaaaaattgcattacatttgaatgtgatttgtaatttgtagcttagcttttcctcattttgcaaaaattttagagtatacatgatgattactgagaaatcatagccaaatgttaatt

SEQ ID NO: 81958 - DNA, 1160 bp, Homo sapiens
ttagaatttaaggtcatgattcctttacccttttattcttagcatgtgccctgccaaataataacacattatattaaattccagagactcacaatttcccactgtgattcaaatcctgtacaaaatgtctcatcacagacagataaaccagcctatcatgaattctctaaatatttgcctgctcactaaaagcccctgggagacttaaaactacaaatttctgagctactccccagactgaattcaaatcttctgggctgaaacagaaatctgtatttttaaaaaatctcttttcccttggtctgtttgtttgtttttaaatggttgggagcatgaagcaagaggyttcattaggctgttgaaatgtatgatgtgagaggctcgtgataccaaatttagctcccattaggtattaacctgatgtagtttctccctgtttccaatccaccagccatgtacctaccaagaaggttaatagctactattcccatttactgtggatgtgagatctcttagctcttataatcatgcttagctaaaacttctaggaaaatattggcagaataaatcatttctaatttctaattttatcacccctcccatttatttctctatttcctgtggtaattatatgggcttaattcattataatttattcccctttctctttcctgaatctggtcttaattacagctgttactttcttttgttctgccttgtcatttttgtgggggaaaaagaacagaagaccctagcgaagcagaagcagaagtagcatttcatatggacacctgtgaagttcttgattccctgctgacatttattctgcatgcttaccacacaaggggtggattatttcctcctgtgaactttcatttaggtagagagcttagggtctatgagctttgcaaggaaccaggaccttagacaaacaacaaaggaaacaaacattgactctaaaatgcaccaaataaaactgcaaaatccatattaataagaactaactaaatatatattaatttacttgttattactaataatcacaaaaattgcattacatttgaatgtgatttgtaatttgtagcttagcttttcctcattttgcaaaaattttagagtatacatgatgattactgagaaatcatagccaaatgttaatt

SEQ ID NO: 81959 - DNA, 698 bp, Homo sapiens
ggaaggatcactggaggccaagacttggaaaccagcctgggaaacatagctagaccccacccatctctgcaaaaaatgacttaaaacaattcttcaggcatggtggcgtgtgccaaggttgctgagtagtaaaaagagagatggctgggtgcggtggctcacctgcatttcatgatactggtaatcccagcattttgggaggccatggtgggtggatcatctgaggtcacgagttttgagaccagtctggcccacatggcaaaaccccatctctactaaaaatacaaaaattagcctggtgtggtggtgcacacctgtaaccccagctgctccagaggctgaggcaggagaatcacttgaacctgggaggtggaggctgcagtgagccragatgacaccaccgcactccagcctgggggacagagcgagactcggtctggaagaaaaaaaaaaggatagttaccatgctggttaattaaggccactaaggtcggggactgtaggcaaacgggagtcccaatgctgcagggatctcgaatgactcttcccactgccattcgtcatgcagagccctttctacagttgctttgtcaatgacccacccccataacctgaagaagtgttagcgtggcctatgttgctacacttcagttatacactttgcttaattcaaacacctttgactttaatagggatcc

SEQ ID NO: 81960 - DNA, 646 bp, Homo sapiens
  misc_feature (1)...(646): n = A,T,C or G
taaaaatacaaaaagtgagctaggcggggtggcgcacacctgtagtcccagctcctcaggaggtctgaagccaggagaatcgtttgataccggggaggcggaagttgaagtgagccaagatcacaatactgcactccagcctgggtgacagagctagacactgtcaaaaaaaaaaaaaaaaaaaaaaaaaaaaaaaaaagaaaaaaatcactgaaaatatgttttcagtattctttacttcagaagaggccaaatctagaaataattcagatttcagagagagagaataataactttctaacagaatgaaaagggattgctactttgttatatatacmcaaggcactgtagatactttgcatatataatttcttttttagcaatcgcttttattttacatttaatagagaatttcatgtggattcattatgttttaaagaagagaaagtgagtgagagaataagagagactaagaagaattatatgatccactttaaaagctaccaagttaacgatgaaatttcattttctttagtacttaaagannnnnnnnnnnnnnnnnnnnnnnnnnnnnnnnnnnnnnnnnnnnnnnnnnnnnnnnnnnnnnnnnnnnnnnnnnnnnnnnnnnnnnnnnnnnnnnnnnnnt

SEQ ID NO: 81961 - DNA, 677 bp, Homo sapiens
acttgtggtgtttggtttttttgttcctgtgttagtttactgagattgatggtttccagcttcatccatgtccctgtaatggacatgaactcatcctttttttggctgcaaaatatttcatagtgtatatgtgccacattttctttatttagtctatcattgatggccatttgggttggttccaaaattaactcaagatggattagagacttaaatgtaagacctaaaaccataaaaaccctagaagaaaacgtaggaaataccacargacataggcatgggcaaagacttcatgactaaaacaccagaagcaacggcaacaaaagccaaaattgacaaatgggatctatttaaactaaagagcttcagcacagcaaaataaactatcatcagagtaaagaggcaacctacagaatgggagaaaaattttgcaatctatccgtctgacaaagcgctaatatccagaatctacaaagaacttaaacaattatcccttttaaagtttgctcactagctgacttattagaaaacagacagaatgatagcatggggaaaacaatattattagaaacaatcccctactgttgctcaaaagttcattcttgctgtaatgcttgtcctaaaaataatcctggaaaatcccttcatgcttcctagaaacatttcttttaccttta

SEQ ID NO: 81962 - DNA, 479 bp, Homo sapiens
gagattctgaagatttacccactcatgtttatagatagaaaagcctagaacaaaaaaacacagacaraagtccaggggaaacattttcctgtttttccctttcctcttgctcgctttccctcaactttccacacaagcactccaaaataagattttttttttaaagaaagacaagagaaaacatttcgttgaatttttctctattttccacaaggttttacttccttgttcatattcaaggtacttaaaatttggcagatggtgtttcctataacactcaaacttttcttttcttttattttaagtaaatgaaaaactgtgaaattttaactatgaaggacatgaaagtcagattccaaagaggaaggcactgcctcttaccgagtatttctcctttccgtagatgtggcgcattgcatgtgggagatcacatcctctccatcgatggaaccagcatggagtactgtacacttgcagaa

SEQ ID NO: 81963 - DNA, 2153 bp, Homo sapiens
tcatttggcaagttttgatacttgtgcttcttgagcttatgggaaagtatcaacagaacagtttagacaacagtacatattccctcctcaggtttatttcaggttctactcagtttcaggtttatttcctgaaacttcaagaagttacatttatccaatgatatcaccaggaactgcaaccaagtaagtgcatgcacaggcaataataataatattatgattatcacatgtctaagaacaactataaaatgcatcccagttcacagttgttaaaatgtgtatgttggggggtagtttgtaggcattgcatgtatgtatgtatgtatgtatgtatatattagagacagggtcttactccgtcacccaggctggagtgcactggtatgatctagctcactgcaaccttgaattcctgggctcaagtgatcctccagcctcagcctcctgagtagctgggaatacaggtgcatgccaccatgcctggctaatttttaaaatttttgtacaggtagagtcttgttatttgctcaggccagtctcaaactcctggcctcaagtgatcccagcctctgaaagtgctaggattagagaggcatgagccaccacaccgggcctcaactgaaattcttccagagaagatagagaccaaataggcatatctctaagtcctaggtcccatcttcagttatgctagtcagttttttcctcttattcctccacataagattttgaaaagaggtttctactgctaaaaaaacaagtgtgaacccctgtcacacttgtatggccatttctagctttagcattctctaagtctataataatgctgcacaggctaagtaactgagtctcgaatttctgggaccttaactggcacaggcttcttccaaagtcttgggaggcatcctagcaatgtattcacaccaccatatggttttgtcaaattcgaaaaatgatatttttgtattttttttcttaaagaactccctcccctcaaattgtataaacttgaggcggcacaaaacctagatcttcctttgatcatacaattttatatcaagacagcacttaagttggccagaagagtcacatacatttgattctcacagaaacccaggatcctacagatgaaaaatctgaagcttttgaaggttagacaacttgcctaaggacaggtatcaggcaaatccttttgtgaggacttaaaactctaacttcagttctcattccacatccagtcttctttctgcactatcactttagttaacatgggttgtcttggcttgaccaggttgccaaagtgactcttatcataaaagagttctgaattctaattgcaagttctaagactatttttcttttattctgaatgtaaacatgaaactgtaaaaccaattgtagctcaagtagcctgtgaaagtcactttcacacgatgtgtaagagaatatttaccgatttgtattgagtaaaccacctgccaaaccctcacttgggaggccacaccagttccagagaataacaactttgtgttaaaattccagaaaaatatgcctgctgagtatcttttttgttgtgtttgtttaatctttgttaagctcagtgatatatgcacatataagaacatatttttctcatatctgaaatctggatacatacttcctgaaaatgtattactactgcctttgtttttttttcattgcatattttcctttcacagattcatcaygtagtctgaatataatacccactcttgttgtcaagcacaaacagaaaagagtacagtttccctttaaaagcacaatgccctattgatgcctttaaaagtcattaaagaatatctcacaaagcccaggagagcattacaataattgcttccctttcctaggtgaaaaaggacatatctgtcaaatagaaaagtgcagaagcaattaacaccttaatactctactgggaaattgcctgaattaacagagatgcttcatggttattgtatttctaaagtttagttactagcatgactgtcctcagtcatttccatttactttccccaggacaacagggctcggagttaggtatgggcatggcagagggtgtatttgagtgtttgcatatgaggcacacatggttcttcagtcacatgtttcagaggatg

SEQ ID NO: 81964 - DNA, 1950 bp, Homo sapiens
ttttttttgacttcctcacattttccaggaccttaactgtgaactcaattttcagacattgcaggatttatgtttatccacactgtctctgagaaattttccctcatgagcttgagttcctctgaaagtcaaaattcctaaatagataacagctttagatttttaaaaaaacatacatggaaatatatggttaaggcaagcacaaaaactggtgtgtgtgtataatcctgccgattctattagcttccacaagtctccaacttttgatagttagcaatattcctgggaaataccctagtgaatcccattacatttttctcatgaatgaattgcacacagacactttgaagaaagaaaacaggaagtaaaatttgggaaggtttgaatgaatgcttctaaaaccatcaactagatttcttgaaaagaaacatgaaacaatgcttttgggaaataatgttgaatataataaaaaaatgctcacttggagtttataaaccaagagaatctttaattcctcaacgatttcatctcatagaaacgatgatactatcctaaatatagtcatttcaggattaatatactttcactatatttatttttattcaaagtttttctgtatccgtagtgagcttatgtaaatatcgaattcaagtttatttcaaagttttctttaacatattgaccagtaaaatttgaatagaatttcaaagacaaggcaaagttcagaaaactgaaatgatgtaaaacctgaagtagatggatttaatactactttgaacattaaatatacctaagaattcagcattttaaaaataactctttggtatttataaaattaaaaaacactcagtcctttattttcttttcaatggctacatatacatgatctgtgaaacatattaaatatggtagccccagtgcatgcattcatcagtcatatcagctagggttccattaggaaagcaagaccactatgtgtaaaaatcactatcatagaaattaagtcttacaccatttaaggagaaactgaagaattagaaaataaggaaatgggaaaaaaagatcattaaacatccctgtgtggatgtaaaagtcagagcttgcaggacgctgctagagcagaaccacgaagcaggtgagtattgttagttctttgttgctgctatctctgagtttatagctaagtatctagttggtccacagggccagaaatagctgaggagaactggtcatggagcaaggaaaagagaacaaattgcaactgcacctgtttcttctcactgccttagacgataagtactttcaaaatgcggtggttttcgtttcatcttctcctcagtctcagaagaatatctcttacagccaatttttacgtaaaaccacacaaggaaggagactctgggaagtatcggatattttcagcctaaactgacgaaatgcaaaattacccaacaaacctgctgctgtccatcttttcagggtgaaatctgccttgtgatcatttagcttaaacaactctctgcacagatgaggaaactgagtggcagagaggatcagataatttcccaaggacataccgagagagttgatgcttcaacaactttatcactttaaatctcagctcaaggtcttctttacaaacacaacaatgttaactttctgcacttaggagtgggactgtagattaattcagtgtcactgtaaaactgatagagaaaaagacagtactaaataaggcactttacagattgtgtggcactaaagtctgcgtaaattttcctgctaactactgtatcttccagaaacaatgtaaaatacctttttttcttctgtcaakcttccatttataacagatcattacaagaattttcttgtaagtcattttaaggcatctcatcattttatattatccttgtccacattgtactgtaaaaattattgaaggttaat

SEQ ID NO: 81965 - DNA, 1907 bp, Homo sapiens
gaagaaacttgatgtcagtaccaaagaaatatatttctcttatttttatgtttcagtatataataaagaatcactttgggggaaaaattgggaaattattgtttaacccccccgccccacaaagtagacttcaattttaatgcaaagtgaatttcaatagtgaagctattttataacaaataagaagatgaaagtatgtaataaaatttataatgggcattgatatgtaatctttgcagtctagtctatctttaccactcagtttggccacaaccatgctggaaacactgattcacaaattatgttttatcaaatggtatcagtgttcccatgaccagaattactaacttatacaaagctagttacagaaacctaagacaaacaaatgtggtttaaacaaaacagaggcttacttttttctcatttatatcatcaatatcacacacttctgtctttcgtcttcaccatccttaacatgtgactcatagtgataatatcattgcacaagaaagataaatgaagaggaaaaagtaaaagtttaattactgctgcttatacctcattgtctatttttgtctgggatgaagcctgagaagtgaagtctttctatgagggggtaggaggtcatatttctacctccaatagtatagataatttaagaaataaggagaatttatattgagtagaaaattaagcagtccctactggagaagaaacccttcaatcgaggcacaaaattataacaatctatatgcattcatgatgtattctataatttcttttactcacaagtcagtgaaaaggagtttaataagttctgttagtgttccctcctcagtaagaatgtaacaattaattcatatcccactaagttgtagtaaagacgaattctctgcaaatccagtaaattatctgagtggtagagaacttcatgttttattctcatcacataaattaaaaaatacttaaaaggaggatgagtcaaggctgtagttctgatgatgacaaagactttcttcgtgttagacaagactgctgcaataatatatataaaaaaaatagtgcagcacttgccaatgtggaaattagagagtcacaatttttgtgacgctcttgaccagaatagcaaataagatgtatggccaggcgttgtacatttcacttatattgtaactctaagctttctttttcagacagagctaattggtaaaggggttttccaaacaattaaaggcacaaaatatatttttaatcatcaggaagctactgaaaaattagtaattcgcctatttaatggcattaatacgcacacaacaggaaaagcagaatcttatagccttgagggaaggcagaatttcattctaattgcatactgattggaaatgggatagctgccattttcttcaaaatattcatttcaaaatactgaaagataactttggtatttctagatcagataatgtaatttggtagcagaaatggcttcaattttcttcccttgctctaaggctcaaaccaactcaagcatttcyaaggcacatgtccaaattagttatctgttttctgaacagatgcttatgtggtttcatctgctgcaaattaataataaataatttatcacatatgtgttatctaattttcgaatacattactacttgttttttttttcaataagatactgaagagttaagggtgaaatatctcagaccaaactaacgttttgctctttccagtttctatttactcagattaatatggtaattcgattcattgaaattaaccacaatgttcctggttagagtctgttaaaacttctcttcaaaagttaatttactaatttgaggttcttttaagataaggtttatttcaagttgctttaaatgggttcactttgaaattcagtattt

SEQ ID NO: 81966 - DNA, 1907 bp, Homo sapiens
gaagaaacttgatgtcagtaccaaagaaatatatttctcttatttttatgtttcagtatataataaagaatcactttgggggaaaaattgggaaattattgtttaacccccccgccccacaaagtagacttcaattttaatgcaaagtgaatttcaatagtgaagctattttataacaaataagaagatgaaagtatgtaataaaatttataatgggcattgatatgtaatctttgcagtctagtctatctttaccactcagtttggccacaaccatgctggaaacactgattcacaaattatgttttatcaaatggtatcagtgttcccatgaccagaattactaacttatacaaagctagttacagaaacctaagacaaacaaatgtggtttaaacaaaacagaggcttacttttttctcatttatatcatcaatatcacacacttctgtctttcgtcttcaccatccttaacatgtgactcatagtgataatatcattgcacaagaaagataaatgaagaggaaaaagtaaaagtttaattactgctgcttatacctcattgtctatttttgtctgggatgaagcctgagaagtgaagtctttctatgagggggtaggaggtcatatttctacctccaatagtatagataatttaagaaataaggagaatttatattgagtagaaaattaagcagtccctactggagaagaaacccttcaatcgaggcacaaaattataacaatctatatgcattcatgatgtattctataatttcttttactcacaagtcagtgaaaaggagtttaataagttctgttagtgttccctcctcagtaagaatgtaacaattaattcatatcccactaagttgtagtaaagacgaattctctgcaaatccagtaaattatctgagtggtagagaacttcatgttttattctcatcacataaattaaaaaatacttaaaaggaggatgagtcaaggctgtagttctgatgatgacaaagactttcttcgtgttagacaagactgctgcaataatatatataaaaaaaatagtgcagcacttgccaatgtggaaattagagagtcacaatttttgtgacgctcttgaccagaatagcaaataagatgtatggccaggcgttgtacatttcacttatattgtaactctaagctttctttttcagacagagctaattggtaaaggggttttccaaacaattaaaggcacaaaatatatttttaatcatcaggaagctactgaaaaattagtaattcgcctatttaatggcattaatacgcacacaacaggaaaagcagaatcttatagccttgagggaaggcagaatttcattctaattgcatactgattggaaatgggatagctgccattttcttcaaaatattcatttcaaaatactgaaagataactttggtatttctagatcagataatgtaatttggtagcagaaatggcttcaattttcttcccttgctctaaggctcaaaccaactcaagcatttctaaggcacatgtccaaattagttatctgttttctgaacagatgcttatgtggtttcatctgctgcaaattaataataaataatttatcacatatgtgttatctaattttcgaatacattactacttgttttttttttcaataagatactgaagagttaagsgtgaaatatctcagaccaaactaacgttttgctctttccagtttctatttactcagattaatatggtaattcgattcattgaaattaaccacaatgttcctggttagagtctgttaaaacttctcttcaaaagttaatttactaatttgaggttcttttaagataaggtttatttcaagttgctttaaatgggttcactttgaaattcagtattt

SEQ ID NO: 81967 - DNA, 1068 bp, Homo sapiens
aaggtctcttgggattgaatagattcaggtatggagaaaacaggggcaggggaaggtacacaggctaaggagtccatgaaatataaattcagatctggaaagtcaagaaccttataaaggtctatttttgaaggtagaacatataatattatatttaacatttataacttcatatatatatcataaacactttgatatgaggtatattggtttctatgtattctctagtcctgaacccaccaaatgttaagtgtaggctggttatacatttatatcacaatatatagaaaataatttaaagaagactattacatagtaactattaaatatctattctgatattgatatgactatcaggatgcacttgtagagcttaaaaaatggaaacacgtgagacggatttgaatagatgaactgtgttgtgtcattacagtttggttttcttttaatttgtccttttgaataattttgtatgaatgaaacagtatggacttaaaggtaaaaacagtgatgataaaatcaaaattagaaatttaaaacttcatgtcagttgatgatagcactcagggcggggtggggrtgggaatcaccttttagatgttaagataaaaacatattatttagccatgaacccactaactataatctgattcttactgttctaaatagcaggctataactatgcttcatatataggcatacacatatttaaaaattacttgaactaaacatttaagatctgtgcactttatagtaggttatgcgtcaaaaaaccttttgaaactaatatttgcttgattattcagattattcagggttgggtacttttgtgttgttttctcttcactgaagggtgtacgttttaaacctagctaaccacataaaggaagacagaattctccaaagtttcaacgtctatatacttcccagataatataaaacattataagtctttaaatagtttaattttgttttgacatattattatacatccattgaccaaagatagtaattagagttaattttagagcaaattttaaacatttggtagttttttcatttaaagat

SEQ ID NO: 81968 - DNA, 675 bp, Homo sapiens
tgtggaagtgttttgcaggccagctctcatttgcttccctggatcttagacaaaagctagcttttgtaaaactcattctgatgccctcaccctgctccccaggtgccccatttctgccaatttcctatctctggtctttgctcactgttaatgagaattagttcagctttatgtgttctctcaccccaagctcctggccaccaactgcacatgtcaaaagcaatttccatcaaaawtagcaggtagcggagtgtgaagtgcttaaacagcgtcaagagaggtttcctctggagatgccaggggaaggtgtagaagtcagtcatcagatttccactgggcaccctggtctttgcagaaacccaaagacatctggctgggtgtggctgaataggaggatctagttccgaaggtggatgggcacgtggatgaggggagggacagcttggccaacacattgcccaggaaaagcaataggcagagaagtgcctgggaccctggctcctgggctggcctgaccccagatgcacacacatcctcattttgtcttcccaaggcccttcccccaggaacccatggctccttgaagcctagtctcctcttagagctgccctgggcagaggaggccttgctgcatcctgactgtgaggcccacagggtgcatgggcagcggttctg

SEQ ID NO: 81969 - DNA, 675 bp, Homo sapiens
tgtggaagtgttttgcaggccagctctcatttgcttccctggatcttagacaaaagctagcttttgtaaaactcattctgatgccctcaccctgctccccaggtgccccatttctgccaatttcctatctctggtctttgctcactgttaatgagaattagttcagctttatgtgttctctcaccccaagctcctggccaccaactgcacatgtcaaaagcaatttccatcaaaattagcaggtagcggagtgtgaagtgcttaaacagcgtcaagagaggtttcctctggagatgccaggggaaggtgtagaagtcagtcatcagatttccactgggcaccctggtctttgcagaaacccaaagacatctggctgggtgtggctgartaggaggatctagttccgaaggtggatgggcacgtggatgaggggagggacagcttggccaacacattgcccaggaaaagcaataggcagagaagtgcctgggaccctggctcctgggctggcctgaccccagatgcacacacatcctcattttgtcttcccaaggcccttcccccaggaacccatggctccttgaagcctagtctcctcttagagctgccctgggcagaggaggccttgctgcatcctgactgtgaggcccacagggtgcatgggcagcggttctg

SEQ ID NO: 81970 - DNA, 688 bp, Homo sapiens
tggatccctgcaggcactggtagtttttggtttgggtgctcatataaaactccttacaagtctgttaacacaatcttatcttactgtcattatttgcatgttagttccttaataggtcctatttctttctgtcttcctgatgacccttccaagagctcctttaggtttggaaaaggcagagtagatcctctggccttccccaatgaggacctgggtgggtggtggtggtagtagggggtcggtagacaaagccatctttaaggaggtgccttctgcatcaccctccattgtgagattccaggcaggtgccttaaaatagctctgccactagctgatcactcaatcccattyacaagggcaaaccttcttctgtcagggagaaaaggtttaaacatacagagggaggtaactgttgcagtaagtagccttaaagcaagcagaggggcgctaaatcatctctaaacttccaggtctatgattctaagatcttaattatcctaactgggaaggagagaagaaaagaaaaaaaaaataggtggcttagaaagtgagcagagagtgtaaagcttggagatttttctatttgagatttggctgcatttagagccagtttttaagcattgccaggttcacctttgtaaaaggcgtttagaaatctgccactatcagatttaaatcaatctggcta

SEQ ID NO: 81971 - DNA, 1231 bp, Homo sapiens
tggggcttctcttctttcaactaaaaattgagtgatttaaactaggttagccatgtgatgacttctagaaaaaaaaaatgtaaaatcctgtgctgactcagacaaggttgaccccatgaaagaagaagaatatcatagaacaaaaatataacacaatataacacatagtgcttggccttgaaaaatggattgaatttagatagattggtgtataaatataaaattatgtgactagaaggtcagagaagaaatcaaacatctgtaccaatagatagtgtaattatgtaaaggaaagctctatatcatcttgtatgtagctccttgagacatgctactgccaaaaggaacactccaggtatgttcctatttgatgagacttaaaatttattccatcttaaagactgccctttcccctgactacctctgcattctgagattataaagtgtggaacctcttctattacatttttagaaaattactccaatcctcgccttgtccctaaataggacttaaaactagtttttgcctcagtggcaaatccatatagcacaatcaaaaactatgtctctacacatcaaagaatatcctatcagttttgcaaaattcagtatggcttcccacacaatcagcttcactctacaaatcactggagatggtgaagattttacaaatcactggagatggtgaagattctataataaaaccatgaaccagaaataaaatcaaagaacaagagctctttgctcactatgtgatggcacagccttagagtcctagagcatcacttaaaaataaaaaataaaaaaaagcttcgattcagccacctcgaagaataagcacgtgtttctcrttattatttgcctttgcatttcttgttgttattacttgtctttgcctttggagatcaatttaggataaagctgttttcaaaaggttacaaagtgacccagggattttcctggaagtttaattctgtatgccactgctcctcagctgcagactctccttgggagagtagaatctttccaaatgtctaaactttgcagtgtcagtgggatatgtagagacgttatttgacagaggctttgtgtatgctcttcaatgcaggcctatgaaaaataaataagggaacagaatagtaacaactgcacaaatgtcataactagagcacaaaggaataattccttgtttctcatgactctatcatttagttttcaaattcttaattca

SEQ ID NO: 81972 - DNA, 1231 bp, Homo sapiens
tggggcttctcttctttcaactaaaaattgagtgatttaaactaggttagccatgtgatgacttctagaaaaaaaaaatgtaaaatcctgtgctgactcagacaaggttgaccccatgaaagaagaagaatatcatagaacaaaaatataacacaatataacacatagtgcttggccttgaaaaatggattgaatttagatagattggtgtataaatataaaattatgtgactagaaggtcagagaagaaatcaaacatctgtaccaatagatagtgtaattatgtaaaggaaagctctatatcatcttgtatgtagctccttgagacatgctactgccaaaaggaacactccaggtatgttcctatttgatgagacttaaaatttattccatcttaaagactgccctttcccctgactacctctgcattctgagattataaagtgtggaacctcttctattacatttttagaaaattactccaatcctcgccttgtccctaaataggacttaaaactagtttttgcctcagtggcaaatccatatagcacaatcaaaaactatgtctctacacatcaaagaatatcctatcagttttgcaaaattcagtatggcttcccacacaatcagcttcactctacaaatcactggagatggtgaagattttacaaatcactggagatggtgaagattctataataaaaccatgaaccagaaataaaatcaaagaacaagagctctttgctcactatgtgatggcacagccttagagtcctagagcatcacttaaaaataaaaaataaaaaaaagcttcgattcagccacctcgaagaataagcacgtgtttctcattattatttgcctttgcatttcttgttgttattacttgtctttgcctttggagatcaatttaggataaagctgttttcaaaaggttacaaagtgacccagggattttcctggaagtttaattctgtatgccactgctcctcagctgcagactctccttgggasagtagaatctttccaaatgtctaaactttgcagtgtcagtgggatatgtagagacgttatttgacagaggctttgtgtatgctcttcaatgcaggcctatgaaaaataaataagggaacagaatagtaacaactgcacaaatgtcataactagagcacaaaggaataattccttgtttctcatgactctatcatttagttttcaaattcttaattca

SEQ ID NO: 81973 - DNA, 851 bp, Homo sapiens
ctctaaaataacatttctggcctggtgtgatggctcatgcctcttaccctagcactttgagagactgacgtaggaggatcattttagcccaagagtttgagaccagcccgggcaacacagtgagaccccatctctaccaaaaaaaataaataattttttttttaattagccatttgtgatggcatgtacctgtagtcacagctactctggaggatgaggtgggaggatcacgtgagcccgagaggttgaggctgcagtgaaccgtgatcatgccactgcactccggtctgagtgacagaataagattctgtctcaaaaataaaaataaaataaaaatcgtttctttttcaaatatatttgtaaaggtgccccgccccgccctgccgtttatatttttttacattaaggaaccgccaaaaatccttgcatgtgtgtgctatgaattgccttgttgtgtaaggcacttagaggtccgtaagaacagccatttgaaatgtgatttcatacatcaaaacaatctattcccacggaggaagctatgaatatctctcaacatcttttggccacccgtgaacatctcagcatcaccaactatggaaaaggaaagattagtaatacataacacatttttcataccaaatctcacttttctttaagtactttttctttgcagggatgtaaactgaccctgacaatgaataaaaaawaaataaataaataaaagcactaacttcatatttcaaaatgtcctgtcagctggtgtaaatgtctacctatcaagttaagatcaaaaaagtgaatgttagtggggctagttagctattaacagtgttgatttggttccggtttat

SEQ ID NO: 81974 - DNA, 570 bp, Homo sapiens
aaagtgctttcaggtatacaaagaattttcaagtttatttaatcctcacaatgaccattacgagagatgtgcacatgttgtggtgattatatagtgaaaccagactcaaacccagggctacagctgccttcacttcagcctaatttaaaagagaaaacttcccaagtccaaatgctgttgtgttaactaatagctaaaatcattcacatattttcaaaatagccatggaggaaaaaaggttattgcagtaggatgtaacacacccttgggtatatctaaaatatttttaaaacttttccatatttttagatttagcctacttctcttcctaccattaggcrttctaaaagtaaaataggaggaaacactactttttgctatttaactaaaaaacactatgtcttttctggtagtggtgatcattttcaattcagaagatttttatagacagttgatgaaaaaatagaaaataaaaagagtatagaaattttttaagctttgctttttactagaattttaaacattcttagtaggttatttactaccataatttacttggtcagttttcta

SEQ ID NO: 81975 - DNA, 737 bp, Homo sapiens
ctcaggaggctgaggcagaaggatggcttcagcccaggaggtcaaggctgcagtaaaccatgaccacatcaccgcactccagcctgaacaacagagcaagaccctatcttaaaaaaaaaaaaaaaaatcacacaacaagtaaagagatgagggaagaagctgggggtccgsgagagctgaccctcttgttaagagtcgcagagttaacaagtaacaaagcaaatgcacagacccatgtaactccatcccgctcccttccttggctgtctctcacacgcccagccccgccactggagttctgtgtaagatctttttcttggaatacagaattggctctgttgctaaatatacaacaaacaaacaaatatttgtaaaacctctgataggttttagacacttctagattccagcccctaaatggatggcaggcatcatatagggattctataatgtattgctgaaatgtatgggcagaagcattctttgacaagaactgcagtaacagaaaatgactttagcaagtattttatgctacagtggcagggggatggaatctgtatttggttaaatgtccatgttaattccttacaatttgcctgttgctacagtatatgactcactgagcatattttcgttttcaatcctaagcatagtaacgtattatatagtttaaagttgaagtttttaaagacagagtcaaaattaaaaccattttcataaaaggcagaaaattatta

SEQ ID NO: 81976 - DNA, 737 bp, Homo sapiens
ctcaggaggctgaggcagaaggatggcttcagcccaggaggtcaaggctgcagtaaaccatgaccacatcaccgcactccagcctgaacaacagagcaagaccctatcttaaaaaaaaaaaaaaaaatcacacaacaagtaaagagatgagggaagaagctgggggtccgcgagagctgaccctcttgttaagagtcgcagagttaacaagtaacaaagcaaatgcacagacccatgtaacyccatcccgctcccttccttggctgtctctcacacgcccagccccgccactggagttctgtgtaagatctttttcttggaatacagaattggctctgttgctaaatatacaacaaacaaacaaatatttgtaaaacctctgataggttttagacacttctagattccagcccctaaatggatggcaggcatcatatagggattctataatgtattgctgaaatgtatgggcagaagcattctttgacaagaactgcagtaacagaaaatgactttagcaagtattttatgctacagtggcagggggatggaatctgtatttggttaaatgtccatgttaattccttacaatttgcctgttgctacagtatatgactcactgagcatattttcgttttcaatcctaagcatagtaacgtattatatagtttaaagttgaagtttttaaagacagagtcaaaattaaaaccattttcataaaaggcagaaaattatta

SEQ ID NO: 81977 - DNA, 845 bp, Homo sapiens
catgtccttatttgaaggggtggcctgcccctccacacctgtgggtatttctcgtcaggtgggatgagagactgagaaaagaaataagacacagagacaaagtatagagaaagaacagtgggcccaggagaccggcgctcagcatacggaggacctgcaccggcaccagtctctgagttccctcaatatttattgattgctatttccactatctcagcaaggggaatgcggcaggagaacggggtgatagtggggagaaggtcagcaagaaaacatgtgagcaaaggaatctgtgtcacaaataagttcaagggaaggtactatgcctggatgtgcaggtagaccagattcatgcttctctccacccaaacatctcagtgtagtaaagagtaacagagcagcattgccaccagcatatctcacctccagccacagggcagttttctcctatcttagaatagaacgaatgtacgatcgggttttataacaagacattacgttcccaggggcatgcaggagacagaggccttcctcttatatcaaccgcaagaggccttcctcttttactaatcctcctcagcacagaccctttacgggtgtcgggctgggggatggtcaggtstttcccttcccacgaggccatatctcaggctgtctcagtggggagaacccttggacaatacccaggctttcttgggcagaggtccctgcggctttccacagtgcattgtgcccctggttaatcgagaatggagaacggtgatgacttttaccaagcatactgcctgtaaacatattgttaacaaggtacatcctgcacagccctagatcccttaaaccttgat

SEQ ID NO: 81978 - DNA, 845 bp, Homo sapiens
catgtccttatttgaaggggtggcctgcccctccacacctgtgggtatttctcgtcaggtgggatgagagactgagaaaagaaataagacacagagacaaagtatagagaaagaacagtgggcccaggagaccggcgctcagcatacggaggacctgcaccggcaccagtctctgagttccctcaatatttattgattgctatttccactatctcagcaaggggaatgcggcaggagaacggggtgatagtggggagaaggtcagcaagaaaacatgtgagcaaaggaatctgtgtcacaaataagttcaagggaaggtactatgcctggatgtgcaggtagaccagattcatgcttctctccacccaaacatctcagtgtagtaaagagtaacagagcagcattgccaccagcatatctcacctccagccacagggcagttttctcctatcttagaatagaacgaatgtacgatcgggttttataacaagacattacgttcccaggggcatgcaggagacagaggccttcctcttatatcaaccgcaagaggccttcctcttttactaatcctcctcagcacagaccctttacgggtgtcgggctgggggatggtcaggtctttcccttcccacgaggccatatctcaggctgtstcagtggggagaacccttggacaatacccaggctttcttgggcagaggtccctgcggctttccacagtgcattgtgcccctggttaatcgagaatggagaacggtgatgacttttaccaagcatactgcctgtaaacatattgttaacaaggtacatcctgcacagccctagatcccttaaaccttgat

SEQ ID NO: 81979 - DNA, 513 bp, Homo sapiens
ctccagactacgacaaactcagaatattttcctacaataattgtaatatgttgagtaaatgcatctggttcatatttagctataacttcttatttaacaaaatcaaaaatagtcattggagaggatatttttcgcctttcaattgatagtcaccatgtcctttggattatgtagctaaaaaacaaaactattaaaatcacagccatcatagttacttcagaattgttgtggctctgagtggataatagtaataactattgagcaataactattgaataataacaatgaacaattatttcaagcctgtcactcatcatagtgagaggatgaccaaaagaaaaaatggtttctgctaratgatcttacagtcaagttcagagaccaagaatagcaggaaacaattagaaaacaaagctggaaatttgtggcattcactacaagttaaagtacatagaagtgaaaggatagcatgagatggagaatttaataagggcttcatgaaggaagtatgcc

SEQ ID NO: 81980 - DNA, 328 bp, Homo sapiens
aaacaccgtacaatccaaaaaaccctactgagaataaaactaaataggcttatgataagaaatacagatattcscatgtatttacaaatatcatagacacacaaatttggtcaaatactgtaaagaaagaagaagtacctgtacctctacctctacctctacctcctctacctcctctacctcctctacctcctctacctcctctacctcctcttcctctacctctacctctacctctacctctacccacggtctccctttccctctctttccacggtctccctctgatgccgagccgaagctggactgtactgctgccatctcggct

SEQ ID NO: 81981 - DNA, 328 bp, Homo sapiens
aaacaccgtacaatccaaaaaaccctactgagaataaaactaaataggcttatgataagaaatacagatattcccatgtatttacaaatatcatagacacacaaatttggtcaaatactgtaaagaaagaagaagtacctgtacctctacctctacctctacctcctctacctcctctacctcctctacctcctctacctcctctacctcctcttcctctacctctacctctacctctacctctacccacggtctccctttccctctctttccacggtctccctctgatgcsgagccgaagctggactgtactgctgccatctcggct

SEQ ID NO: 81982 - DNA, 665 bp, Homo sapiens
tgtcacttttcactcatcagaatggcaaaaagaaaaaaaagttggataatgataagggttggcaaagatgaggagagacttgagccctcctcactgctgctgggatttcgaaccggtataactttgtggagagcaacttagcagggctcagtgaaattaggtatgcgcttaccttgagattcagcgattccagccctaggtcaacagagaaactcttacctgtatccataagaaaatctgaatgaagatatattttgaaaagttttatttattattattattattwttttttttgagatgaagtctcactcactctgtcattcaggctggagtgctgtggtgcaatctccactcactgcaacctctgcctccctggctcaagtgattctcttgcctcagcctcccaagtagctgggactacaggcacgtgccactatgcccggctgattctttgcatttttactacagacagggttttgccatgttggccaagctggtctcaaactaatgaccgcaggtgatccacccacctcagcctcccagagtgctgggattagaggcatgagccacccctcctggctatcaaaagttttaaggttttacttttcacttttaagtctttcattcatctggaattaatttttattaatttgggtataaggcag

SEQ ID NO: 81983 - DNA, 665 bp, Homo sapiens
tgtcacttttcactcatcagaatggcaaaaagaaaaaaaagttggataatgataagggttggcaaagatgaggagagacttgagccctcctcactgctgctgggatttcgaaccggtataactttgtggagagcaacttagcagggctcagtgaaattaggtatgcgcttaccttgagattcagcgattccagccctaggtcaacagagaaactcttacctgtatccataagaaaatctgaatgaagatatattttgaaaagttttatttattattattattatttttwtttttgagatgaagtctcactcactctgtcattcaggctggagtgctgtggtgcaatctccactcactgcaacctctgcctccctggctcaagtgattctcttgcctcagcctcccaagtagctgggactacaggcacgtgccactatgcccggctgattctttgcatttttactacagacagggttttgccatgttggccaagctggtctcaaactaatgaccgcaggtgatccacccacctcagcctcccagagtgctgggattagaggcatgagccacccctcctggctatcaaaagttttaaggttttacttttcacttttaagtctttcattcatctggaattaatttttattaatttgggtataaggcag

SEQ ID NO: 81984 - DNA, 719 bp, Homo sapiens
aagagaaagccctcaaaataagcttcctataaaatattcttccgcccttccagggcgcatcttagagggaatctcttccgtgggatattcactgtttacacttgttttctgcctgaaagatctattctttcaagattcagtgtcgccacccctactccaaacacccaaactagtagtcactattagacatacctggtgcttgtgatgtcagtaggtgttctgaggcctgggaaggagtaaattgtttttaaacttggaacaaagaaaatgagcaggaaatcaaagaggaaggaggcagagtaaggagaaggaagtacgaatcataaggagaggcgggtgtcagcagccatcgactttgctcacctttcctccttgttctgccctttctccaggtggcatccactcatatgctaaggcttatcaatagttgtctccaacttcagaccacccccaacactgtgcagtccccaggacaagagtacaaacagaggcctgcttaccatgtgtccaaatatttagaaattgttcatcaatccaaatacgctgttaagtatgttctgtccagagcagagacacaaacacacaaacacaatgaacacagagctgcgtctgtgactgggtgtctggygcacggtgctggcatagggatgcattaactcggctccatctgctctctggacccacactgccaggcctgggtgaagactcccccacatccc

SEQ ID NO: 81985 - DNA, 360 bp, Homo sapiens
ccctcaaactttggcaaaccggcacaaagctgtgtgtttaatcacgcctgccttgtcctagtggtttctatgaatctgctacttttccgtaatattgcatcattaattgttcctgaaaaaccctgagttatcctcttatagaattgtataagtaatgattgcaatatagataattttgaaaggagaaaccacctttccttggaaatgtttatcttttgcagagtgacatttgtgagaccagctaatttgattaaaattctcttggaatcagctttgctagtatcatacctgtgccagatttcatcatgggaaacagctgttacaacatagtagcyactctgttgctggtcctcaactttg

SEQ ID NO: 81986 - DNA, 629 bp, Homo sapiens
tggatccaaggtatttaattatgtattgggcattgtgtgattgagtgtgaaaaatctttctctaaatcctatttatccatatagttcacttctgttttctccacatactatttctttaaccattagttattgtgttggttgagtctggtggatctaatgtttttggttttcactcaatttgatgattctcggttgcctgtttacatttacatatgaagacctagattagaaaatgtttttagctggaattcatattttctgtacatgtgaaaaatccttgttcccttggcaattaatgcagaatctgattgccctatctcttgtttattgtacgtggaaagagagaaaagccagtatttccccttcatggtggatggttagcttgtcttctgattccatgtagcagtcagacattccatgaggtattgccctgttctttggccctgattcccaatatgatagccttcagtgtcagaattcttcctttagaagtcttcgtcttggagcaaacatcatttatagaggaagaattcatgtaactattcctcattcctttaatgaaatatactatctatcatcctattgtcaagtccctttycctccttactacctctgaccttggggttatt

SEQ ID NO: 81987 - DNA, 768 bp, Homo sapiens
gtttttattagtgggcctgggcagcgggcccggcaggctggtatttgacacgcagacaaggatgttcccgggcgctgcgcggctgactcacttcaaagtccagccctgctggcttggtttacacctgagccaattagctccggagatcagaagaggcctgaaaacggagccgagcccttattctcgggatggagaaagtcacttgatcccaggtaaatgatacagaaagaacaatggaggggaggggggcgccggcaggaggctgtacccctcccgaggagccgaggcgcagggactgggcgttggtgggcacggtctctcacggtgtttgttgggcttttattggcaacaaaggggcaaattgaaatgaagccgtctgcagtctgtttgctgcacatcaaatatgctgtaagatatgctgattcgcgcttctcctgaattattgaacactgaggcttccagaaatcaggcagtggggggaggcccaggaggagggaccctgatagagcagccctgccttctgcacgttccgctgcgtctgcggaaaaaatggargcctccagtgccccctgcaccctcgtcaactccccgtcagttgtgaacttgctgaacggccctggggcctcaaggcggatgaggcttgctgccgttttttggttcacgttggtcaaggctgcggctgggcgagcctcctacacagagcggctgtctgtcagtaagtcaggtgggatgtttacacctcccacaggtggagtaggccaaagaata

SEQ ID NO: 81988 - DNA, 719 bp, Homo sapiens
tgtaacagatgaaatgcagaagcagatctctgactccagctgccttctgtgaagccagacattaaaagggatttacagaaaactgtaagaggtgctgttctcgcaaaaatcctttttgttttggaaagcagctctttttttttttttacataaaaatttatttcaattgattgtggattttttcttattttaagtgaattggatagtttaaaaatttctcaatttctaaaatagtaaatatagataagtataactgacataaagattctttgagcttctccaattttaaaagtgcaagggggtcctaaaactaaaaagctgagacctagtgatatacattccctaaaatcagatttttaagggtgtcctgttagcctagtgtttcagaatttgatgaatctctaatgtatttctgtttaaagttaaaatctgtggataatacgagatgttattacattattgcttgcygtttactatcatatttactacgtaggctctgcagagatcagtgatttcctgaagtttgtttataaaactggctggctagtccaaaggtagcgtccacagtcagttacagatcagatccctcgttctcctctttcctcccttctcactactgcacttgactagtcttaaagaaaaagaaaaactgtggttctcccggatactctggagtccagcgggttcatcattcacatcagtttggaagataggacctt

SEQ ID NO: 81989 - DNA, 1100 bp, Homo sapiens
cacacacacacacacacacacccctaatggagacagtccctgatttgagtactaacaggttgtcctgtcccatacctgcctagaagagttgtgccatctggtgttttgtaaatgcctgaaggcccctgggagaaagggccctggccaggctggatggaygcctccacaataaccagtgaggatgctaaattcccagggcaaacttgggaggcgctaaggtgcctttctcttatgattatagttatctcgtcacctcgcgtagatgatcagcccctgatattgaaactcgggaaatgaaactgcgcccatccttggtccctgggtcccaaatggagtccactttagcacaggggtttcaaaccagggtctatgagttggcttcgggtccttgttaattcgttgagaagtgtgtgccaacaataatttttttggtggaaagggtacatagctttgttggattctcaaaagaatctgtgatctcctgaaccttaagaacaagtagatcaggttaatacgttctaaggtagaaggaattttggtcaattgtgcaaataaactgaaagatattcttggccaatagtttcagagaaagtcggtgtgaagccaattctaggcacttgattaacatgattgttactttccctgtaattcctggcctgaaagcctcccttggtaccacttttcccagccaagtggtgctttcttccaaatgccttgaggtgcctctcagattttggagggcggccagtgccatgactttaggacacgtttaactttctaggcctccaaagcgccaggcaagtggccccttttctttttgtttgtcccctcatccccttctcgtctccttattgtttcatggattttaaaagatttttatattttattttgttctcgatctcatttccacaaaggatatgaagcgtctgattttctcaagatgtagggtgtgtgaattctttgtgtatcttacaaatgtcctttcaccagaatgtttaaggagggcccggatactcaagaatcagttaataaaatcatcgcattcactgaagattgaccgcagaagcgtttccatttgcgtcgtcactgacaaggcacga

SEQ ID NO: 81990 - DNA, 1100 bp, Homo sapiens
cacacacacacacacacacacccctaatggagacagtccctgatttgagtactaacaggttgtcctgtcccatacctgcctagaagagttgtgccatctggtgttttgtaaatgcctgaaggcccctgggagaaagggccctggccaggctggatggatgcctccacaataaccagtgaggatgctaaattcccagggcaaacttgggaggcgctaaggtgcctttctcttatgattatagttatctcgtcacctcgcgtagatgatcagcccctgatattgaaactcgggaaatgaaactgcgcccatccttggtccctgggtcccaaatggagyccactttagcacaggggtttcaaaccagggtctatgagttggcttcgggtccttgttaattcgttgagaagtgtgtgccaacaataatttttttggtggaaagggtacatagctttgttggattctcaaaagaatctgtgatctcctgaaccttaagaacaagtagatcaggttaatacgttctaaggtagaaggaattttggtcaattgtgcaaataaactgaaagatattcttggccaatagtttcagagaaagtcggtgtgaagccaattctaggcacttgattaacatgattgttactttccctgtaattcctggcctgaaagcctcccttggtaccacttttcccagccaagtggtgctttcttccaaatgccttgaggtgcctctcagattttggagggcggccagtgccatgactttaggacacgtttaactttctaggcctccaaagcgccaggcaagtggccccttttctttttgtttgtcccctcatccccttctcgtctccttattgtttcatggattttaaaagatttttatattttattttgttctcgatctcatttccacaaaggatatgaagcgtctgattttctcaagatgtagggtgtgtgaattctttgtgtatcttacaaatgtcctttcaccagaatgtttaaggagggcccggatactcaagaatcagttaataaaatcatcgcattcactgaagattgaccgcagaagcgtttccatttgcgtcgtcactgacaaggcacga

SEQ ID NO: 81991 - DNA, 1100 bp, Homo sapiens
cacacacacacacacacacacccctaatggagacagtccctgatttgagtactaacaggttgtcctgtcccatacctgcctagaagagttgtgccatctggtgttttgtaaatgcctgaaggcccctgggagaaagggccctggccaggctggatggatgcctccacaataaccagtgaggatgctaaattcccagggcaaacttgggaggcgctaaggtgcctttctcttatgattatagttatctcgtcacctcgcgtagatgatcagcccctgatattgaaactcgggaaatgaaactgcgcccatccttggtccctgggtcccaaatggagtccactttagcacaggggtttcaaaccagggtctatgagttggcttcgggtccttgttaattcgttgagaagtgtgtgccaacaataatttttttggtggaaagggtacatagctttgttggattctcaaaagaatctgtgatctcctgaaccttaagaacaagtagatcaggttaatacgttctaaggtagaaggaattttggtcaattgtgcaaataaactgaaagatattcttggccaatagtttcagagaaagtcggtgtgaagccaattctaggcacttgattaacatgattgttactttccctgtaattcctggcctgaaagcctcccttggtaccacttttcccagccaagtggtgctttcttccaaatgccttgaggtgcctctcagattttggagggcrgccagtgccatgactttaggacacgtttaactttctaggcctccaaagcgccaggcaagtggccccttttctttttgtttgtcccctcatccccttctcgtctccttattgtttcatggattttaaaagatttttatattttattttgttctcgatctcatttccacaaaggatatgaagcgtctgattttctcaagatgtagggtgtgtgaattctttgtgtatcttacaaatgtcctttcaccagaatgtttaaggagggcccggatactcaagaatcagttaataaaatcatcgcattcactgaagattgaccgcagaagcgtttccatttgcgtcgtcactgacaaggcacga

SEQ ID NO: 81992 - DNA, 1100 bp, Homo sapiens
cacacacacacacacacacacccctaatggagacagtccctgatttgagtactaacaggttgtcctgtcccatacctgcctagaagagttgtgccatctggtgttttgtaaatgcctgaaggcccctgggagaaagggccctggccaggctggatggatgcctccacaataaccagtgaggatgctaaattcccagggcaaacttgggaggcgctaaggtgcctttctcttatgattatagttatctcgtcacctcgcgtagatgatcagcccctgatattgaaactcgggaaatgaaactgcgcccatccttggtccctgggtcccaaatggagtccactttagcacaggggtttcaaaccagggtctatgagttggcttcgggtccttgttaattcgttgagaagtgtgtgccaacaataatttttttggtggaaagggtacatagctttgttggattctcaaaagaatctgtgatctcctgaaccttaagaacaagtagatcaggttaatacgttctaaggtagaaggaattttggtcaattgtgcaaataaactgaaagatattcttggccaatagtttcagagaaagtcggtgtgaagccaattctaggcacttgattaacatgattgttactttccctgtaattcctggcctgaaagcctcccttggtaccacttttcccagccaagtggtgctttcttccaaatgccttgaggtgcctctcagattttggagggcggccagtgccatgactttaggacacgtttaactttctaggcctccaaagcgccaggcaagtggccccttttctttttgtttgtcccctcatccccttctcgtctccttattgtttcatggattttaaaagatttttatattttattttgttctcgatctcatttccacaaaggatatgaagcgtctgattttctcaagatgtagggtgtgtgaattctttgtgtatcttacaaatgtcctttcaccagaatgtttaaggagggcccggatactcaagaatcagttaataaaatcatcgcattcactgaagattgaccgcagaagcgtttccatttgcgtcgtcactgacraggcacga

SEQ ID NO: 81993 - DNA, 594 bp, Homo sapiens
  misc_feature (1)...(594): n = A,T,C or G
gnnnnnnnnnnnnnnnnnnnnnnnnnnnnnnnnnnnnnnnnnnnnnnnnnnnnnnnnnnnnnnnnnnnnnnnnnnnnnnnnnnnnnnnnnnnnnnnnnnnnttgttttgttttaaatcacaagaagcagaaaatcatagcctttaagagtggttagtggcaagaatttttaaaacggagggacttggggactatgttccaattcccctgtttttcagagaaggaagctgatcccagcgggttgtggggagtgttaaacatcttgtcaaagtttataaggcaagtcagacactagatcagaagcccattagctgctagctatcatcccattctactgattcaacagcgcctctgacacaggcacagtkgggggatctttgggatgatgtacaggagacacctgatcccagtgtggcaaaacattaatcagctcaaaggacaacggacagatatgtttttcctattttaagtaaaaatgataaactaaatagacttccagttttagttccaacatgtaaagagcttggaaatcatcactcccattcttacaagacaaaaaacctgaacaaactcaaagtcaatgacttttcatgga

SEQ ID NO: 81994 - DNA, 1335 bp, Homo sapiens
gggaaactgataaagcttgagtcaactaaatctgccttcatactttatcaaggggaaccaagcctgctgtgcttacatcagcatctggaagactttcctctcctctaatctgtgtacacatytccaagcaaggaagaaaaaacaaactctgctcagacgcctatgaaacacctgaatgaactttgatgaagtacagtctgagttaccatcatgcacaagtagaactgctcttggacttgttttcctgttgtttgtggaacctacgcgtttgaatggcttgaacgttgcatcttttaaagttattttttaaggtttcttggcatttatcctagttgtccgtgtttggcaatgtgctgttaaagtaatagacttttaatctttatgtattttttgttttctctggagtacttggacagatgttatagtggtttcttttaggaaaatctgtcattaaaaaagttatagccttgcaaataaccactcacagtatttgagtcacagtttattttagtgagacgtaaagagtgctgacttcatttatttttctacctatatacctagtggaaaaggggaagactaatgttttcaaataaacaaacagaaacctaacagaacttaacttatgggttggcaaatttttggtgcttatgtgtaagggtggatgtatttgcttatggtcacaattggactctttaggaaatatgactcaaagctgtcaaattctattacattgatttgtagcctgttagcttagtaatggataatgttataaaaatgctggtatggggaaagagaattctatatccagttaggtgggaaggcagttccaagtatatccagttaggtaggaaggcagttccaagtttggctaaaagcatgatcacacaaatacaaatagtcctccttccaagttaaagacacgtctctctgtgcatgagaagttttataggctagagtctgctgactgcaagtttgtctagtccagcaatggcaccaaccacactgtctgttgtgttttcttgtcatccactccagcttccttgtttatggcccagtgagagacattggtgggggatggtccacacacaacaggctcttttcttgaaggaacccatgttttctaattccctacacaaaaccctacattagatctgagcaggtacagttgttaacctgacccaatgcaggagtataatgagatgagagtccccgacaggacgtacgccacacagatgatgtagtgtgaggcttgaaaataaattggaaatgataataatagttctcatttttgagcccttcttgggtactggtcatgtgtatacaaggcattttaaa

SEQ ID NO: 81995 - DNA, 549 bp, Homo sapiens
ggatccagccttagcggtttctctctgggcggcggmggcggcggctcggttgacgcctcctccgccagctgagcccgcgggagcccaggacgccgcttccccgcccatccccgctccccgaggccggccgcctggtcatggcgcacgggcccggcttcccagcctgacggtgaggcgcccaccatggcaggcgcggcgggcggcctgcccggcgtcggcgtcgcgggaggatttcggggcgggcaggcggcggcaagggcgcgcgcaggccccgggggtgacccgcctgggcgaggcgggtcgcgcgggctgcgccgaagggcggccgggccccccggctgccgtcgctggggagggggcgggaggcgcgggtgcagcgcttgcgggagggcagagggaagagcgtggggaggctgctgggtagcgtggggtagtgtggggagggagcggttctgggtagcgggggaccggcacgtgggttctgcccgtgggggaggatggaaatcgggaacatgtgctatattcgttaaagaaaaaaaatcttagctt

SEQ ID NO: 81996 - DNA, 1945 bp, Homo sapiens
taacaattacagaaattgtcatatgcatctgttttttgaactcagtgaagtcccagaaatctttttagtgctctgataccttgtaataaaggacctctagaggttactgaaatgaaagcatgcagagttactgtagcggtatgttgttacaggggaaaagaaaaccagcagccattcactgtacagcctacattgctgtaaccggtgttgcccagtaaactatctggcatgcaaaatgctaagtattcaaagtacctggcattcatgatcattgtgatagcaaactgttgacatttggtttatttcccaaagccggaccattcgtacttctcttaaatattttggctttagagctttgttgttgatacagataatgtatctccttgttgccctgtttcccttcttgctgccctgcatttagctgcaatttgctttaatggagtcatccccatgatcatggagaaattgttcagtattttgatgtttagctttcatctcattttggatcgtttatcttgataattaacattattgcatgaagacccagttgagaaaaaatattctgtaggaaattcattctttaatagttaatataagccttcacatgctgagtgtcaaaacctgcaattcctcttgatccttaaaaggcttgtaaataaagacagttcagttgaagaaactatactgttaaagtcaaatatttttggaaatcagctttgagtcttggggatttagaaatttacgtaaatgatctgactctcagcaagctctaaataaacaataactatttgatggggtaattgaaagagagcctcccatcaagtgatcactatctgcaaaagtgataattcactaaaaacttatgcctcactttgtaataacaatatcacagtgggaatttttaatcaataaactggaatataatcagattggggaatatgtaaatctatatcagtccagtgaaacctaccagcagggagagaaaagataaaaatgtaaaaatcagattgaattttgggggaaagcttaaaagaaatgcagttatgcctcggctgccatactcagcatgggacataaagagccccaccacagggcttgaatttacaggagtctgtccagcacagctttatccgacactgaagcttcctaacaaacagaaagaaatcttacactcttgcttgttagtatttaatacatgcattatgtgctttttaattttttggtcctactaaggagtagctgatagcgctgttttgaaggcatatctactgtgcctctgactagcaataggaaaccggttaagttattcaacctctctacatttcagtttcaggaaatgaagtggacaaagaagatcatcattaggcaatatgtacctccaatattctgtattatgtggagatatcaagtccrtatgtgattacacaaatcatagtccaaaagagttcagaatgagacatatagaattgaaagtcctatttatacagatactggttaaagcccagggattagatgggtttaaaatgctttacctctatatagaaaggagtacaggaccaggaaagggcccaggggcataccatgattgagccgaggagacagtaagagagtttcagtgacaaaggagatgcaaggagacgatggggtttctgaaaccaggagaagaaagccttcatcatagaagcaagtgataaacttcactgaacacttctaagacattttggacaagaatagaagagcgacctttggatttcactgcacgtagcttaacaaacgttcataaaggcagtgaaaacggaagctcagttagggtggtcttaggagagaatccaggtgatgacgtagagaatgcgactatagatggctctttctagaagttttacttttaagggtagcagagaactagagtagagctgcagacatagttccccctcctccctctcct

SEQ ID NO: 81997 - DNA, 1945 bp, Homo sapiens
taacaattacagaaattgtcatatgcatctgttttttgaactcagtgaagtcccagaaatctttttagtgctctgataccttgtaataaaggacctctagaggttactgaaatgaaagcatgcagagttactgtagcggtatgttgttacaggggaaaagaaaaccagcagccattcactgtacagcctacattgctgtaaccggtgttgcccagtaaactatctggcatgcaaaatgctaagtattcaaagtacctggcattcatgatcattgtgatagcaaactgttgacatttggtttatttcccaaagccggaccattcgtacttctcttaaatattttggctttagagctttgttgttgatacagataatgtatctccttgttgccctgtttcccttcttgctgccctgcatttagctgcaatttgctttaatggagtcatccccatgatcatggagaaattgttcagtattttgatgtttagctttcatctcattttggatcgtttatcttgataattaacattattgcatgaagacccagttgagaaaaaatattctgtaggaaattcattctttaatagttaatataagccttcacatgctgagtgtcaaaacctgcaattcctcttgatccttaaaaggcttgtaaataaagacagttcagttgaagaaactatactgttaaagtcaaatatttttggaaatcagctttgagtcttggggatttagaaatttacgtaaatgatctgactctcagcaagctctaaataaacaataactatttgatggggtaattgaaagagagcctcccatcaagtgatcactatctgcaaaagtgataattcactaaaaacttatgcctcactttgtaataacaatatcacagtgggaatttttaatcaataaactggaatataatcagattggggaatatgtaaatctatatcagtccagtgaaacctaccagcagggagagaaaagataaaaatgtaaaaatcagattgaattttgggggaaagcttaaaagaaatgcagttatgcctcggctgccatactcagcatgggacataaagagccccaccacagggcttgaatttacaggagtctgtccagcacagctttatccgacactgaagcttcctaacaaacagaaagaaatcttacactcttgcttgttagtatttaatacatgcattatgtgctttttaattttttggtcctactaaggagtagctgatagcgctgttttgaaggcatatctactgtgcctctgactagcaataggaaaccggttaagttattcaacctctctacatttcagtttcaggaaatgaagtggacaaagaagatcatcattaggcaatatgtacctccaatattctgtattatgtggagatatcaagtccgtatgtgattacacaaatcatagtccaaaagagttcagaatgagacatatagaattgaaagtcctatttatacagatactggttaaagcccagggattagatgggtttaaaatgctttacctctatatagaaaggagtacaggaccaggaaagggcccaggggcataccatgattgagccgaggagacagtaagagagtttcagtgacaaaggagatgcaaggagacgatggggtttctgaaaccaggagaagaaagccttcatcatagaagcaagtgataaacttcactgaacacttctaagacatttyggacaagaatagaagagcgacctttggatttcactgcacgtagcttaacaaacgttcataaaggcagtgaaaacggaagctcagttagggtggtcttaggagagaatccaggtgatgacgtagagaatgcgactatagatggctctttctagaagttttacttttaagggtagcagagaactagagtagagctgcagacatagttccccctcctccctctcct

SEQ ID NO: 81998 - DNA, 970 bp, Homo sapiens
ctacacatattcgtagtcatgcactgccctgtctcgtttttcctctttagcgagaatgcagttagatcctcctctatcttaggatctctcgtttccaagcaaaaattccataggtctattaaaatgataatcctgttaatttttcttcttgaaaatgtcttcattcaaactcaactgtcacgttacacttaaagccatctcagttatcacattatttttgggaacagtgtttaatttgtccctcagaaagtccaagttgtgtgacggtggttttctttctcttattaaatatataaatccaaagagatgttattgcaagtattaatagctttcctagccatatcctctagtccataactgtaatacatgataaattcatattcttcccatttaagaaacattggttatattttggataattgatatgataatcatcaaatattattatttgcaactaacagaccttaatgttctaaggtcaaagctgacctcttggctgttttagaatattcaatggtagatctagtttctttcaccagagtaggcaatctatttaaattaactacatatttcaggacacagagatgaagaattgtacattattaacatcttcccttgttttgattgttgatcactgttatttatggatgacatcttttattctaaactgatttcaacataacattttatttatactgaaccaaggagattgccaatgacatgtattacatatgaagttaacattttagtcatatctgtagaatcttgtcatatatagtttatatttggctgagtaagagyagggttctgagagcttaaaagcaggtctagggacttgtcctatttataaatagccacacagacatctgtaaaagttactctccctaaatttaaacttaacaatattgagcatctttcatgccttgtaaagccactcaaattatatgttgtacaagcccataggaaatgt

SEQ ID NO: 81999 - DNA, 1757 bp, Homo sapiens
agtttccttttgtcatgattgactgcattttgcacattctacagcagaagtaggaaacagccagctgttcagacagtgtaaaggctcttgtatcccaaaacttagaggaactaacatttatgtaccagaaaccatgctgtattagtgtgttctcatgctgctaataaagacatacctgagactggataacttctaaaggaaagaggtttaagtgactcacagttcagcatggctggtgagacctcaggaaacttacaattatggtgaaagggaaagcaaacacacaaacacatccttcttcacatggcagcagcaaggagaaggacagagcgaaggaagggaaaagccccttataaaaccatcagatcttgtgagaactcactcactatcacgagaacagtatgagggtaaccgctcccatgattaaattacctcccattggctccctcccacggcatgtggggattatgagaactaaaattcagcatgagatttgggtggggacacagccaaaccatatcatgtgctaagggctttatataaatcatcatgttttatacgtgccacaacactaagaaagaggtagtaatatctccatttttacagctgaaaaaaaatcaagactcagaaaaagttaaaagaacctgttcaaagttaaaaagcaaaggattcaaattcagttttgttccactacaaaattatgcttctcactcattcttattttagtaatgcataaggcagtcatgaaaatatgcggcacacacctctgcaggacatagcttactgaccttctggtccctctgccagcctctggaatctgtctcatgttgacggggttatcctctaaggggcaattctggggctcatgggtgttctctcagggcttggccaaaactttcttggaactgcactgcaatctcctttcctttctctctccttccataggtgccagacctgctgcatagtccrgaaacaactccacctctttccactccttcttttaataaatctcttgtatgaataatcctgtctgtgcctgccttctgagagacatagactaacagaaagtgtactaggagtggtccagggagatagtctatgagctcaggatgtgggacaagctcactcccagcccactgggtgcagaggatgccagcctgaccagttggtgtggtcccactagttcctggcataagttagtggcttaattattaaacatttcactggtggtattcagggaaaaagtcatgtgcaggggactgtctttgtaggtgagatgattcaggtttggggaaaacatgaagcgcaacgccacaaagacattttatctggctgggtactaggaaagctcttgaagggaaaggaggatggacttgcataagcaagaatctattaatataaagaaactttcttggggcatgaaatttgatatcctggcgaggatgaggggaatgggaagactcactgtgatggaggctcttagaagcttataaaaggcggtggccaatgctgagcaaagggaaatgcccaaggtaccctgtcaggtggtagggtaaggactaaaaagctcaggtggagataggggttggttggatattttatgtgaagctataagacttaccaggggattacactccacaaaaggactcagaggacatttttcactaaggccatagggaatgtactggtgagaatggcaccaccatcactgagaagctcagtggtggctcttctgcaccaggcaagacagtaggaga

SEQ ID NO: 82000 - DNA, 640 bp, Homo sapiens
ttcacgataaaaaaaaaaacaaaactgtaaatgtgggtttcatatagtttgcttygctttttctgaggcttatatcccttctagtttatgcctgctttcagtgattctccagtgcctttgatattttgtccagagcaagagggcgagtctgatataagttactctgcaattatttttaatgatgaaaattggaaatataaaggggcctttcagaatttcatacataccacttggtaaatatctaacgtagtgtttgtaaaacagcagaaagtcactgtgagttgtatacattcctgtagatgggtgcttgcatttgagaatgtccactttttgctaaagtgctgatctaaaaactacactttaaggtaaattattataaatataaagtgttataaaatataactttgtgtcacattttgtctaaaacttgtctgctagctgtaataaacattaaacattaacagctaacaattttccttgccaggattaggcagtcatgttggtggtccagatttcctgaatccatccaagaaaaactagagccattgccttctttgtcttcttggtaaatgtctgtatagtaagtagagagtagagacactcataatcccttagaacttagctttttatggaggatgca

SEQ ID NO: 82001 - DNA, 640 bp, Homo sapiens
ttcacgataaaaaaaaaaacaaaactgtaaatgtgggtttcatatagtttgctttrctttttctgaggcttatatcccttctagtttatgcctgctttcagtgattctccagtgcctttgatattttgtccagagcaagagggcgagtctgatataagttactctgcaattatttttaatgatgaaaattggaaatataaaggggcctttcagaatttcatacataccacttggtaaatatctaacgtagtgtttgtaaaacagcagaaagtcactgtgagttgtatacattcctgtagatgggtgcttgcatttgagaatgtccactttttgctaaagtgctgatctaaaaactacactttaaggtaaattattataaatataaagtgttataaaatataactttgtgtcacattttgtctaaaacttgtctgctagctgtaataaacattaaacattaacagctaacaattttccttgccaggattaggcagtcatgttggtggtccagatttcctgaatccatccaagaaaaactagagccattgccttctttgtcttcttggtaaatgtctgtatagtaagtagagagtagagacactcataatcccttagaacttagctttttatggaggatgca

SEQ ID NO: 82002 - DNA, 640 bp, Homo sapiens
ttcacgataaaaaaaaaaacaaaactgtaaatgtgggtttcatatagtttgctttgctttttctgaggcttatatcccttctagtttatgcctgctttcagtgattctccagtgcctttgatattttgtccagagcaagagggckagtctgatataagttactctgcaattatttttaatgatgaaaattggaaatataaaggggcctttcagaatttcatacataccacttggtaaatatctaacgtagtgtttgtaaaacagcagaaagtcactgtgagttgtatacattcctgtagatgggtgcttgcatttgagaatgtccactttttgctaaagtgctgatctaaaaactacactttaaggtaaattattataaatataaagtgttataaaatataactttgtgtcacattttgtctaaaacttgtctgctagctgtaataaacattaaacattaacagctaacaattttccttgccaggattaggcagtcatgttggtggtccagatttcctgaatccatccaagaaaaactagagccattgccttctttgtcttcttggtaaatgtctgtatagtaagtagagagtagagacactcataatcccttagaacttagctttttatggaggatgca

SEQ ID NO: 82003 - DNA, 640 bp, Homo sapiens
ttcacgataaaaaaaaaaacaaaactgtaaatgtgggtttcatatagtttgctttgctttttctgaggcttatatcccttctagtttatgcctgctttcagtgattctccagtgcctttgatattttgtccagagcaagagggcgagtctgatataagttactctgcaattatttttaatgatgaaaattggaaatataaaggggcctttcagaatttcatacataccacttggtaaatatctaacrtagtgtttgtaaaacagcagaaagtcactgtgagttgtatacattcctgtagatgggtgcttgcatttgagaatgtccactttttgctaaagtgctgatctaaaaactacactttaaggtaaattattataaatataaagtgttataaaatataactttgtgtcacattttgtctaaaacttgtctgctagctgtaataaacattaaacattaacagctaacaattttccttgccaggattaggcagtcatgttggtggtccagatttcctgaatccatccaagaaaaactagagccattgccttctttgtcttcttggtaaatgtctgtatagtaagtagagagtagagacactcataatcccttagaacttagctttttatggaggatgca

SEQ ID NO: 82004 - DNA, 1046 bp, Homo sapiens
gcttttccttgtattaggacttgagatctggaccctttaacagtaccattcctaagtgattcttattaatacttatgtcctattaaaatcctttatcaaatatgatgtttccctaaggggtcttttgtaaaggaagtcttggttactagcatctccatctgtggcccaggcttgagtgcagtagagcaatcatggatcactgcagcctccacctcctaggctcaagcagtccatcctcctgcctcagtctccgatttttaaaactttttatagagacacggtctcacatgttgctcaggctggtctcraattcctgggctcaagtgatcctcccacttctgcctcccaaagggctggaattacaggcctgaaccactgtgcctggccagttagtagcttcttaacacatagcaacataatttccatactattttcaactaatttttattctttcagttgggacctttatatatttcagtgttcagtgaagaagtaggagaatctggttcttaggctctgcctatatccttttacctgtcttgggtaactgccaagaaattaaatcaacaaattttggcctgcagtctggcattaatagatgtgaatttagctaggtttctttcaacacagtctccaggtcaatcgtaatcttatgtgaagtttcttattcaggcatgtctcattagcaccattaatttcacacaggaattctttttttctccctttttttgtgactaagcaaaatgagaaatatttctctttcaggatatggagaggcttaattaaattctttaattttgtctacatctgcccttatgaatgatagcaaaggaatgggggatatcagaatatgagaaaaagtaatcatctaaaaatttccaagcactttaaaatttgttaagctagcataaatatgtgggtgtgatagaggttttcattaggcctcctctcaacatacagtagttaggaatgaagtttagtgtctctccgtcctcctgtcatatgtgtgtatgcacacatgtgtgcacatgcgactgtgttatgca

SEQ ID NO: 82005 - DNA, 1046 bp, Homo sapiens
gcttttccttgtattaggacttgagatctggaccctttaacagtaccattcctaagtgattcttattaatacttatgtcctattaaaatcctttatcaaatatgatgtttccctaaggggtcttttgtaaaggaagtcttggttactagcatctccatctgtggcccaggcttgagtgcagtagagcaatcatggatcactgcagcctccacctcctaggctcaagcagtccatcctcctgcctcagtctccgatttttaaaactttttatagagacacggtctcacatgttgctcaggctggtctcgaattcctgggctcaagtgatcctcccacttctgcctcccaaagggctggaattacaggcctgaaccactgtgcctggccagttagtagcttcttaacacatagcaacataatttccatactattttcaactaatttttattctttcagttgggacctttatatatttcagtgttcagtgaagaagtaggagaatctggttcttaggctctgcctatatccttttacctgtcttgrgtaactgccaagaaattaaatcaacaaattttggcctgcagtctggcattaatagatgtgaatttagctaggtttctttcaacacagtctccaggtcaatcgtaatcttatgtgaagtttcttattcaggcatgtctcattagcaccattaatttcacacaggaattctttttttctccctttttttgtgactaagcaaaatgagaaatatttctctttcaggatatggagaggcttaattaaattctttaattttgtctacatctgcccttatgaatgatagcaaaggaatgggggatatcagaatatgagaaaaagtaatcatctaaaaatttccaagcactttaaaatttgttaagctagcataaatatgtgggtgtgatagaggttttcattaggcctcctctcaacatacagtagttaggaatgaagtttagtgtctctccgtcctcctgtcatatgtgtgtatgcacacatgtgtgcacatgcgactgtgttatgca

SEQ ID NO: 82006 - DNA, 1046 bp, Homo sapiens
gcttttccttgtattaggacttgagatctggaccctttaacagtaccattcctaagtgattcttattaatacttatgtcctattaaaatcctttatcaaatatgatgtttccctaaggggtcttttgtaaaggaagtcttggttactagcatctccatctgtggcccaggcttgagtgcagtagagcaatcatggatcactgcagcctccacctcctaggctcaagcagtccatcctcctgcctcagtctccgatttttaaaactttttatagagacacggtctcacatgttgctcaggctggtctcgaattcctgggctcaagtgatcctcccacttctgcctcccaaagggctggaattacaggcctgaaccactgtgcctggccagttagtagcttcttaacacatagcaacataatttccatactattttcaactaatttttattctttcagttgggacctttatatatttcagtgttcagtgaagaagtaggagaatctggttcttaggctctgcctatatccttttacctgtcttgggtaactgccaagaaattaaatcaacaaattttggcctgcagtctggcattaatagatgtgaatttagctaggtttctttcaacacagtctccaggtcaatcgtaatcttatgtgaagtttcttattcaggcatgtctcattagcaccattaatttcacacaggaattcttttyttctccctttttttgtgactaagcaaaatgagaaatatttctctttcaggatatggagaggcttaattaaattctttaattttgtctacatctgcccttatgaatgatagcaaaggaatgggggatatcagaatatgagaaaaagtaatcatctaaaaatttccaagcactttaaaatttgttaagctagcataaatatgtgggtgtgatagaggttttcattaggcctcctctcaacatacagtagttaggaatgaagtttagtgtctctccgtcctcctgtcatatgtgtgtatgcacacatgtgtgcacatgcgactgtgttatgca

SEQ ID NO: 82007 - DNA, 831 bp, Homo sapiens
tgcatagaaaatgcccaggatagtagataatatttgttgaatgaatggatcagtttctctatagtttggttcctagggtagcctaccaacattttaaaaatcaataataaggccgggcgcggtggctcacgcctgtaatcccagcactttgggaggccgaggtgggtggatcacaaggtcaggagttcaagaccagctggaaaaaaaaaattagctggacatggtggcaggcacctgtaatctcagccactcgggaggctgaggccgagaattgcttgaaccaggaggtaggggttgcagtaagcagagatcaagccactgcacttcagcctgggcaacagagtgaggctcgtctcaaaaataaataaataaataataaaataaagatcaataatagtcataggagcctggactatcaattttaggtctagagagccatattttctgtccacccccaccccagtgcccagccaaacacacccctccttatacccttctcttgaagcagcaagccttatgtttagaccctaattgcctctccctacctcaaccctcccctaaaacctaagtacttaattactcctaaattgcctcttctctctcctcrtctttttccctctcatctcacatataaaaacctatggtgaaagagtttttaactgaatttcacttaactgaaccccagttaactgcctggcaggattagccagtgttctcattcacactgtaaaacatattgattaatgtccacagcccactgattgcttttagctaaacgttcacagctggtagactactctctagtaagcctcttttccttcctccagttaa

SEQ ID NO: 82008 - DNA, 1323 bp, Homo sapiens
ttttttgtatttttagtagagacacggtttcgccacattggccaggttgctctcaaacacctgacctcaggtgacccgcccacctcagcctcccaaagtgctgggattacaggcgtgagccccgtgcccggcctgttttgatatacttttaatttcaagaaataccaacattaatcaaaggcaatagaaagtccaggagaatttcttaattcttgacattctatagatatctaaagaacagcttggacrtaaaaatttaggaggtaaatgatcaagttagggttctattgaaataattaaatttccatactcagattcaaccatattgaccatgtctttttctgtttgttttttacaattcaggtatctgcccaaactggaacttatgctgtagacatttctttgtggtttatctaaaaaccaaaggtgagataatttatgaattcatttgccttttaatatatattttataatgagaaagaattgtttttgaaaaaatttaaggcaatatcaaatatcttttcctctgagtgttttaataggaaagttataaaactacatatagagtatgcttacttttaagcatgtttataagacatttgaaataaatgaaacttgttctagtgataaaatacttttgagtgaattttttctatatctttaatactcaaagacgaaattcatactactgttctctgatatacttgagaatatattggcattataatctaatatttttgaagacaagtcttccattagttaaatcatagattaaaacaactgctattttaatgggccattattaagagctttctaccactctactctcttggacttgatgactttctgtagttccctgtttgggagcctctgtaataaggatataggttaatagttgccttctatagaaagcttcccttttacagaaagcttctatagatagcattccactctaaaggtaggatcatagccttttcccgtttcttacctgtcttggctcaagtcctcttcttgttaaaatttttccaaatacatcgttgtaagtctctccaccttgagtctgactgctctgtcagccatttttatcattgtcaacagattatttttttctttaaaaaaatgtcagcctgtccgtctactactctgagtccttcagtatctacattccttaaggattattttacaaactcatttacagagcaatagtggtctagatatgatatgaacactaacatcatgtattcatattatatctttactgagaaataatttccatgccataaattccacccatttaaagtgtaaaattcaatagtttttatt

SEQ ID NO: 82009 - DNA, 724 bp, Homo sapiens
atctagaggcagttcaagggaaaaggcagataaaggaaaagcagtgcatgttcatgttgaaggtggtaggtgacttttggcagttaaggagacttgagtgccccaggcatcggcagcagtgggaaggggaattactattcactgcaggcccctttgtactatgtgcaaactcttacagttttaaaaaaataaacaatagcaacaaaattaaagctccctaatatttggattaaacctcttcgtttttgtatttggtaatatcgacatttaaaaaaaaaagttaaaataaggtatgtaatttggtgcctcctcaaaggaaatatcaaaatgtccttgataatattgcatgcttatgtgtaagcactttcttttcttttttatttttcctttttttttttttttttttgagatggagtcttgctctgtggccaggctggagcgcagtggcacgatctcggctcactgccacctccrccttccaggttcaagcgattcctctgtcagcctcccgagtagctgggactacaggtgcatgccatcatgcccagctaatttttatattttagtagagacagggtttcaccacgttgtcgaggatggtcttgatctcctgacctcgtgatctgcccgtctcagcttcccaaaatgctgggattataggcgtgagccactgtgcctggcctgtgtaagcactttcaaagccatgaactgagcatgaaagtga

SEQ ID NO: 82010 - DNA, 545 bp, Homo sapiens
tacagtgaaggtcctctgtgtgatatcacagtggtagaaatagtgaagctcctctgtatgatatcacagtggtagatatagtgaagctcctctgtgtgatatcacagtggtagatacagtgaagctgctctgtatgatatcacagtggtagatatagtgaagttcctctgtgtaatatcacactggtagatacagtgaagctgctctgtatgatatcacagtggtagatatagtgaagctcctctgtgtgatatcacacttgtagatacagtgaagctgctctgtatgatatcacagtggtagatattgtgaagttcctctgtgtgagatcagastggtagatacagtgaagctcgtctgtgtgatatcacagtggtagatatagtgaagctgctctgtatgatataacagtggtagatacagtgaagatcccctgtatgatatcacagtggtagatacactgaggctgctctgtatgatatcgcagtggtagatatagcacagctcctctgtgtgatatcacagtggtagatacaatgaagctc

SEQ ID NO: 82011 - DNA, 773 bp, Homo sapiens
agactctttgctggcttgatgaagtcaaaagccacgttgagaaagcccacatgccaaggtactataagtggccactggaaactgatggccacctccaggaagtcatgctagccaggaagctaaaggcttagtagctgagggctcaacaaatcagggctctcagccctccaaccacaaggaaattaattctgccaataaactgaatgagcttgaatgaaagttctttcccagttggcctacgatatggtaatgcagcctagctgacaccttaattacagcttgtgagaccctaagcagagggtccagttaagttgttttcagactcccgacccacagaaactgtgagaaaataatgtgtgttattttaaaccactgagtttatagaaaactaataataatcataaaatgagttaagatagtgtcaaagcattttgtaaactgaaaagccctatatatgtgttagatgttatcctcaaagtataccaaatgcttcatggagactttaaatgttgcrtaatcaaaaaagttacttctatgctttgaagagtccacaagtcattttttaaccaagtctttacataagcttccccaattttccttaaaattatagcatctccttttttattctgaccttgaagttctgacagctgtgtcactgattgcttttggtctgtgatatgcataacttctatattgccaccaacaaagacaaaatctggaatttaactgttcctccttagagaactatgaaaatcccagactgttttaactat

SEQ ID NO: 82012 - DNA, 1052 bp, Homo sapiens
gtgagagcaaaaaaatttgattctcctgaaaatgttaaaaaagcatcatcttcaagcaatgcacagagattctgtttgtgaagttgcttcagtgaaattgtataatcactgttgaccaaagatttaactccagaaggtggaaatgagacaagactttaatccggttgtttaactagagtggaagggcaacatcactaccagcaatagcctattctgattagagttggcaaaaaaaaaaaatcttcctctttttctaacttcagttgaaactgagggtctacttggctttttaaatatgtagtacactaaccataagggcaatctgataatcaacagagctgagaacttactatttctgtactatgatgtcaactttaagcatttaagaagcaatattttaaggaatcaagttgaagtgatgattcaatttattttgtggagaaaatttcagatttttcctagtctcaaaaaatttgttacgtgatggtgacctttagctttggttttgacctcctcatgaagattgaattcaagcttggccctttagcaatgggccaatgcgacatttctattaactcttgagtaaatrcaaacgaatgctcatgaaatatatgtaaggcataagtaatcaaaatacaagaaacatcaattacctaccatccaatttaagaaaaagaacaacacaccattattaagtccctttcttgcattccctcccttgtcccatccttttatcctagagatatcgtctcttctgtactttatattcaccagttcttttacattctttatagtcatatgacctagtgtgtttgaattgctggacaatatatttttagttttcaattttgtataaagagaatcatacttttgtttttctgtaactgaattttttaatattatgtttctcagatttaactatattgtagcattcaatcttattgcactatagtattttattgtataaacattccacagtttactgattcactctactcattataaatgtgttgtttcaattttttaaactgtactattacacatagcatatg

SEQ ID NO: 82013 - DNA, 1368 bp, Homo sapiens
taaatcagaagatttaggggtgagactcaggaatcaattattttctaacattttattttgtaaaaataccaagcctacagaaagtctataggaataataaatcaacgctcacactccttgctctacctcactgtttatatacgtattaatatattttttattctgaaacatttgagaacaacttactctcaaattatacaattttatactcaaatatttctgcatgtaactcctaagaacaaaggcatttttccatatgaatacaaaccaagctgggcgcagtggttcacttggagaggccgaggcgagccgattaattgaggtcaggagtccaagacccgtctggccaacatggtgaaaccccgtctctactttaaaaatacaaaaattagccgggcgtggtgatgcatgcctgtaatcccagctactcgggaggcagaggcaccagaattccttaaacccagaaagtggaggttacagtgagcctcagtgagctgcggtgagcaagattgtgccactgcactccagactggaagatagagccagactccatctcaaaagaaaaaaaaaatcaaactaaggaaatttaacttaacaataacatcacaattatataatgcacagataatatatatcttttttcaaaattctccactcacttcaattacatccttcatagctgctcttttaaaatcaggatccagtcaaagattcacacttacatttttttgccttgtctcttttttcttttccttttttttaaataaaaatttatcatctttgatttgatttcaacggaatgccataattcatatcatgtgatgtaagtatactcataattgtaaatatcatttataaagtacttttgtttttattgattttgtttactctattaatttttaataggcaaaaattgtacatatttattatatacaacatgatattttgaaatatgcatatattgtgcaatagctcaatagagctaattaacataagcattacctcacatacatataattttttataaggagaacatttaaaatctattctttcagcaattttcaagaatataatagttactaaccacagtcactgtgttttacmataaattgcttgaacatactccttctacctaactgaaattttgtcctttgaccaacatttccccaactccacccttctccctcaccctcagcccctgataaacaccactttcttctttatttctatgaatttgacatttttagatcctacatgtaagtgagatcgtgtggtgtttgtctttctgtgcctagcttatttcacataacataatgttgtccaggttcatcaatgttgtcccaaatggcaagatttcctttttgtttt

SEQ ID NO: 82014 - DNA, 746 bp, Homo sapiens
tggacatattaaaagttgttccccttctctgacagttctttcagcaaaatgattgtgatgactcatcttagctgtgattcaaatctgccccttcctaagagttaaagtgttatctggagacagaaagattacactgagtacagtactctcattctcttcctagtgcaggtttttggtctttgttttagctatacacaaactataattttcaaattttaggataagattactgtgaattcatgaacaccaggtgattcctactgtaacaggttctttttcatgtcttatttattaagtgagataatcatagcagggtctccaaggagtacaataggatagattcaattgcccaaaaaatagtacttgagcacccactatgcctctagcactgagttgagtgcctttgtggggaytgaaagttagttctagttcaataattgccatttggcttgtgccaaacagtgctttacgtatattattattccttaacaacaattttgttaagtaggtataatgattcccattttacagaagaagaaactaagttgtggaatgtcaggcaccttagtagtgagacaacacgactgagcaagtagcaaagtcaggattgactatcatggctgtctagcaccacatacatcgtgccttgtcacataaaccatttcatttttaactatttatttattttcgagacaaagtctcactctaacacccaggctggagtgcaatggcatgatcacaactca

SEQ ID NO: 82015 - DNA, 509 bp, Homo sapiens
aaacagcctcttccccactcacctctgatccaggatattcctaccctggctgccctgtgtaaattcacctttcttcaggaggcagcctcagctgatgcttgcctcatccctcctctcaccagccctggaaactaactgggcatacctttcatgccttcgagagtggtggktttttttttaattcttcatttacttttcttcttaattagcactgctagagatttaattgttagtaatcttttcaaagaacaggatatttgattttgttggctgtttctttttaaaatatttattttactcaatgtattgctactgaaaatttcttggctaagatcaaatgtcatctccatcaaggatctgttgccagtgactctttttcttcctgttttaccaaaacatctcacacaactgcctgttccttcactttctggttttgtttttgagccattatggacatgctggaaaatgcacaaatctcaaatgttcagttagatgaataattacaatgt

SEQ ID NO: 82016 - DNA, 2210 bp, Homo sapiens
aatatagtcacacgggtctttaaaagtagagaaccagagagatggcagcatgagaaggatttgatccactgttgctggctttgaagatggcagaaggaggctacaagccaaggaatgtggaaagcctccagaaggagaaaagaagataattgatttttccctagcccctccataaagaaatgcagcctggtgattccttgattttagctcagtgagatccatgtcaacttttgacttacacaactctacaataataaattcagtagaagaatccattattagtttgatttatgtcttaaacyatgtttaaaccaaaaattagagtgtaagtaacttacctaagtttctcagttataaatggcacaagtagtattcaaagcctcggctatctgacaccctctcagttttcaaaactcattttctaaacagtcttcacatgactatccattcaccactactttcaatttgagtcatctacacccaaaagcctgcatgcatgctgatgtgccaaactgaatgttaacaggttgtcacttgtgcatgcttattccttgcacataaaggtattttattgttgtgtttccgcacaggaaacttcttgagacctttgaaaacactttctctaccaagttgggcaaattgtagggctgtgactcttttcccattagtctcagaaactatttgggaatagtcacatatttttattcttatggttgaaagaatgttactcttataagaaaaataaagttactatagtggtaccatgtaaattctgtgccagagcttagtacatgaaaatgaaactagtgtgtgtactggttaaagcaccaatacacacactggcacactacgtcaaaatatggctcttctcactgccctattctcatgccagcctagcagaacagtagctggtaatttaactaaactttctgaaaatttgagttcaatgttcctccatgaaatcatacagcaacacatcttattaatacattaatattaactccattgagtccaggaaacatatcatagtctgtgatgtcatttgacttcatattaatgtttctgaaacttggtaatccaaacaggaagtaccaaattggacataggaaaactctgcactaggaacttgaagtaagtcttatttattgactgtcaacatttactacggtaaacagtaaaatattcttggctatcaaatcagcaaatgttttttaaaacacataatacatagtgttgtgttgctgtgttacagtggactaagcattgttttacaatgtttgcatgaactttctggaagcatattttccagtatattgttgtcttaaaatgtccataatattccatttctaagaatttattgaaaggaagatatcagagatgcaggccatattttatgtacaggaaaatttattgccccattatttacagtggtaaaaaatatagataaaaattctcaatgatacagaatatataaagcatttatatcgagtcctgggatgttatgcaacctttaaaatttgtgcatataccagctcaagtggatggtcatgcttgatcaggaaatagaaaaacaagtttcagggctaagactagcacaaggagcaaacagtttaagatataaaagaaacagggtttgatacaggagcaagaggccagaggccaaacaggtaatccagggttaatgcattgaaattgtagaaataaacttaaaagagaacaaacaataacaacagcaacgaaaacgggttgctgtgtgttactgtttgaatatgtctcccatgttggaaatttaattcccaaagtcatatcttgattagatatgaagactttgggagataagttggatcagataaggtcatcatgatgggactggtggatttataagaagaaaaagagatctgggctgacacaaatgcccttgcccttttgccatgtgatgccctccaccatgtaatggcagcacaaaacctctctccagaggctggcaccatgcttttgaatttcctagcctccagaactgtgagctaaatatacttctttccttcacaaattacctagtatttggtattctgttatagcaagaggaaatagattaagacactaagtcaaaaaccattttgtttatactactgttcagaaaaattattagaactccatatggcctactagccctccatggtctgatgaaagcctcactcacctcttttcct

SEQ ID NO: 82017 - DNA, 1138 bp, Homo sapiens
  misc_feature (1)...(1138): n = A,T,C or G
tccaaattcatcaaggcctctggcctcaggccgactccaacagaatacccgagaggtcaggccagcttcttgcccgtagtatattccagagtgaagtcgttttttgataagtartcattcccaattctaaagtgatagcctccaaggagtcattgctttgaagaactcctttcatctccagctggactcttttccaaacaaccantgcatgcctagtcagggttctgacacacagggttctgccatgagagcaaattggcagcagcagacaggcccccgaggcaatggaattcagttctcagaacatactcaccatgggtctctttcatgttgtgtggaattctttccactgggcagccgcataggtgtagggaaaatgtcctgccccattggataaaagtcaagagaagatactatgtggaatcttgtcactttttaattgctgatccgtgttaagatgtttttcttaagcagcatttgccactgactagacattagtagagtttctttttctttgtgcatgtgacatggatcactaacactgcatgtgatggtcagaggaggcctgccttagtgctggagatctgaccatttctccaggacagtggagcctggtgaaggctctctgacttctgatcccagttggagcaatgtgttcagagaagaatttctgagccttcgtgaatctcagttatttgcatgtctttttgtaagcaaacagcaacttgtaggcaggcttaaaactttctttttctgctcatgaaagtacagattttgctatagacaaatcaattgaatataaaactgtaatgtggaataatatttcaggctttaaaaatggagggatgggttaaaaagttctgcaataaatctgcaaatgtggaatctaagggaaatgatcccatctggaaaaccctgctagtggtgctatggctggtttgtggagcagtgcagactgtggagtgaaaaaagaccctgtagtcttgaaagatgacaagctccttaattgatgtccatttcagctggtgctgtgccagcttatgttggcctcggtccagcgttcctgtaatttgggagccaggtgtgaagcatttttgttccatcttgttccccagcatctacagaagcctcacccatc

SEQ ID NO: 82018 - DNA, 1414 bp, Homo sapiens
tggagggcatcgtaggccactgtgaaaactttggcctctaagtgagaggagcaaccatcagaaggttttgaactaagaaatgacatgatctcactgatattttaaaaatagactgaagagtagaagggggaaggaaccagagcaaccagtcagaaggcatttcagagaactgaaccagggtgcagtgggaagacagaattgtatctgtgtgtgttttgaaggtaaagaagacattacctgctgatggattagatatggaagtgtgacaaagaagtgccaagaataaccccaagcattttgacacaagcagcccaaaaatcaaggctgccatttaccaagatggggaagggtaaaggaagaccaggttggcgggcagcgggtggggcaggattcaggagtttggatttggacatgttaggtttgacatacctatttcacagtcgttgaagtggagacctaccttagtctcactgagccgccactgccccctaggtagcctgtggatcactacataggctgagggctggtctgctggctctgtgttctcctcgagccaaaacacatacgtggtatctgacactagagctgagagagctgatgaagatggggcgtaggaagagtctgaagctcgttaggactcttctactcagcacctgtcccacactaaaagacagcttcaatagcgaactccccaaagcatcctctggaatcaagaccaccttgtgatcaccaaagaaaagtatggggatcctctggcccaagccatgtcatccagtctctcttctaactcaacatcttccacatgtataaaacaacttgttagctgtcctcagcctcacatactacaaatccccattattttcccattctgagactagaagagcagaatttcactctacgtttttgttggaaaggcaaaaagtaagtattcctcttgggaaagaagggttctctgattcccaagatgtagtagccattaagtgcatccaaagagtatgagtttttgatatatcaatgtctagaaccttaatctacttacagcaatttaaccaaagggaatatatgctcaaattctgctacaagaaattgatacactattcataactgtaaaaaaattgggaacattctcttggttcaataaagcaaagattggttaaagaaatcttggaatataaaagaattctgggtaactataaaaatgattccatataagaatatattaaaaatgttaggaaaaaagcagattacaaacagtatatacagctgggcatgttagcrcagacctataatcccagcactttgggagactgaggcaggtaaatcacttgagttcagtagtttgagaccagcctggcaacatggtgaaaccccatctctataaaaaatacaaaaattagctaggtatgaaggtggg

SEQ ID NO: 82019 - DNA, 960 bp, Homo sapiens
tgcattaatagggcagggaccatgattgtgtcattcactattgatccccatcacctagtgtagtgtctggcacataatatgtactctataaatatttaatgaataaacagatgttgtctttgtaggatatcaccattctagctggcctgcaggagcagagaacatactttaggaataatggggaattagtttgggtatgtagggcaggacccatgaaaaccagggagaagaaagtcatcattttaaagcaccaacatactagaggtggattattcctttagagggtttgaaaggcatttaaggaacatgcctccatgactcgctcccttccttccttttttgtccactagatctccagtcttcctatgaaactgggttgaaaaatacataaaattaacttgacaatctacttgtgccatctgaatttgccttagtttcatctggaaagaggaggtattgatgggctttcagaatccaggacaagcgatcagcctgagagtcatgtctctcttgtcatggcttctgaaatctacagactgtctgtggctttcttttgcctcccctctcttcgctgagccaagctggacaagaactggcagctttaccaggacaattggatacattcgggctttattttcttggcacactgaagacattaaccagcttccaaatgataagaaacgggaatttttagtaccaaatccaagttccttctcacagaaggggtgtttccattgtttgaaaagaggggtgctagctgctgagtgacatgttctttatccatgatgacagtccctgttggcacatcacaagcrttgtttcaataataaaattatcctagctgccagcggggccagcttctttacaaaatgaagtaacaatagcatgtttcatacgattgtcacttcttgttgatcaattaattctaaatagtacttaacaaagatttttaataaaaaa

SEQ ID NO: 82020 - DNA, 900 bp, Homo sapiens
tcgtttaaggcccaggtcagactgtatgacctcagtgaagccttcttggactctaacaggtagaaatccattctcttcttgcattcttagtatagacatgatcacttcataatttgcaagactgtgtttatatacaggtctcctctaacctaccccacagtaagctctttgatttctaggatcttaatcatgtcttcgctgttcatgtcaccagtatgccttatacaaagtaggtgctcagtaactatttgttaaatgaataagctttcatctgggtgggatttcctcacagttatttatttttattcattaaagaaaacatgaagaagtattaatcatttgatttgwgaaacatagcatattttccagtaattttctccccttactcttatgctatgccaacgcaggtgtcttttgaggaactctgtatctattgatttattcagaacttatatcccaccttctttcaaagggatgtgaaagaacatactaaattaaacctaatgtgaaataggacaattatggctaaaaagaaaacagagaccatctcaaagaagcagggagcagatgttaccaggcacctgggatgagctaattactatacttggtaactgaatttggctctgcatttcttggcagctagagctgaaaggaaacacattgggttattcattcagcaaacgtttgttgactatctttgataaatggggcactgtgctaaccctggggattctaaagtgaataagcctgggtccctggcttcagcacatcacttagcctgagttaagtgactggagataggtatgaggggcaatggaaatacagggaaaggacattgactctgtttgtaaggggagccagggaatgctcagggaagagcagatgatttcaccaaacagt

SEQ ID NO: 82021 - DNA, 900 bp, Homo sapiens
tcgtttaaggcccaggtcagactgtatgacctcagtgaagccttcttggactctaacaggtagaaatccattctcttcttgcattcttagtatagacatgatcacttcataatttgcaagactgtgtttatatacaggtctcctctaacctaccccacagtaagctctttgatttctaggatcttaatcatgtcttcgctgttcatgtcaccagtatgccttatacaaagtaggtgctcagtaactatttgttaaatgaataagctttcatctgggtgggatttcctcacagttatttatttttattcattaaagaaaacatgaagaagtattaatcatttgatttgtgaaacatagcatattttccagtaattttctccccttactcttatgctatgccaacgcaggtgtcttttgaggaactctgtatctattgatttattcagaacttatatcccaccttctttcaaagggatgtgaaagaacatactaaattaaacctaatgtgaaataggacaattatggctaaaaagaraacagagaccatctcaaagaagcagggagcagatgttaccaggcacctgggatgagctaattactatacttggtaactgaatttggctctgcatttcttggcagctagagctgaaaggaaacacattgggttattcattcagcaaacgtttgttgactatctttgataaatggggcactgtgctaaccctggggattctaaagtgaataagcctgggtccctggcttcagcacatcacttagcctgagttaagtgactggagataggtatgaggggcaatggaaatacagggaaaggacattgactctgtttgtaaggggagccagggaatgctcagggaagagcagatgatttcaccaaacagt

SEQ ID NO: 82022 - DNA, 898 bp, Homo sapiens
ggcattcaagaagggtagcttgttccctttcctgatgagactgtaccagaactaggtaaactgcagccctttgagcttaaaagtgagtatatcacgtaaaggtgcatttcctggaagctcagaggatctcaataatactgtaaatatcttctgctatgttcacaaatatttagagtgaatgggcacttatcacaggctcctaaaactgtgactttaaatttggtctctagaggccttgtgaaattgccttcctgagtttcacagcctctaatgttaaacatcgtcttaattaaaactttcattctgagagaaagaatctaaaatagggaaaagccagagtgggtcccctggctgctgaaactatccagagcataaaataaaaacctcaaggtcaaggactatttaaccaagcttagcagagatattttcagactcttatgcaaattaaaaccacaagattaaacataattctgggcatagtattcagacaggtcaattcagccaattcaggcctcttttccctgctgaatacctataatttgtcatatgtacttaaatgtcccttttaggcagcttgaactctacaattaatgggagaatmaatcatatgataatttgttggctctgtctacaaatatcgccacctttggttttcaaggtttttcaaggtcagagtcccattttttagttttatctttattatcttaaaggtcaattacctccacttcttacaaataccaatagccctgccaagtgagtgatttctttttttttctttttcagagacagggcctccctctattgcccaattggctgtcaaagctcactgcagcctcaaactcctgggctcaagagatcctcccatctcagcctcccaagtagctgggattacagatgc

SEQ ID NO: 82023 - DNA, 898 bp, Homo sapiens
ggcattcaagaagggtagcttgttccctttcctgatgagactgtaccagaactaggtaaactgcagccctttgagcttaaaagtgagtatatcacgtaaaggtgcatttcctggaagctcagaggatctcaataatactgtaaatatcttctgctatgttcacaaatatttagagtgaatgggcacttatcacaggctcctaaaactgtgactttaaatttggtctctagaggccttgtgaaattgccttcctgagtttcacagcctctaatgttaaacatcgtcttaattaaaactttcattctgagagaaagaatctaaaatagggaaaagccagagtgggtcccctggctgctgaaactatccagagcataaaataaaaacctcaaggtcaaggactatttaaccaagcttagcagagatattttcagactcttatgcaaattaaaaccacaagattaaacataattctgggcatagtattcagacaggtcaattcagccaattcaggcctcttttccctgctgaatacctataatttgtcatatgtacttaaatgtcccttttaggcagcttgaactctacaattaatgggagaatcaatcatatgataatttgttggctctgtctacaaatatcgccacctttggttttcaaggtttttcaaggtcagagtcccattttttagttttatctttattatcttaaaggtcaattacctccacttcttacaaataccaatagccctgccaagtgagtgatttctttttttttctttttcagagacagggcctccctctattgcccaattggctgtcaaarctcactgcagcctcaaactcctgggctcaagagatcctcccatctcagcctcccaagtagctgggattacagatgc

SEQ ID NO: 82024 - DNA, 898 bp, Homo sapiens
ggcattcaagaagggtagcttgttccctttcctgatgagactgtaccagaactaggtaaactgcagccctttgagcttaaaagtgagtatatcacgtaaaggtgcatttcctggaagctcagaggatctcaataatactgtaaatatcttctgctatgttcacaaatatttagagtgaatgggcacttatcacaggctcctaaaactgtgactttaaatttggtctctagaggccttgtgaaattgccttcctgagtttcacagcctctaatgttaaacatcgtcttaattaaaactttcattctgagagaaagaatctaaaatagggaaaagccagagtgggtcccctggctgctgaaactatccagagcataaaataaaaacctcaaggtcaaggactatttaaccaagcttagcagagatattttcagactcttatgcaaattaaaaccacaagattaaacataattctgggcatagtattcagacaggtcaattcagccaattcaggcctcttttccctgctgaatacctataatttgtcatatgtacttaaatgtcccttttaggcagcttgaactctacaattaatgggagaatcaatcatatgataatttgttggctctgtctacaaatatcgccacctttggttttcaaggtttttcaaggtcagagtcccattttttagttttatctttattatcttaaaggtcaattacctccacttcttacaaataccaatagccctgccaagtgagtgatttctttttttttctttttcagagacagggcctccctctattgcccaattggctgtcaaagctcactgcagcctcaaactcctgggctcaagagakcctcccatctcagcctcccaagtagctgggattacagatgc

SEQ ID NO: 82025 - DNA, 1115 bp, Homo sapiens
gactaacacaacaaacattagttctgaccccagtatcggaactatacacgtgtcactttttgatcacaaagcatctagtaacaaaaatacgaggattgtctcttcttagagtgaccacgaatttatttctaaatgaatctatggaacataaaaataaatagctaaagattaagtccaggccaggcacggtggcacacgcatgtaatcccagcactttgggaggctgaggcaggcagatcacctgaggtcaggaattcaagaccagcctggccaacatggtgacaccctgtctctacgaaaattagctgggcatgatggtgggtacctgtaatcccagctactcgggaggctgaggcgggagaatcactcgaacctgggaggtagaatttgcagtgaggtgagatcgtgccactgcactccagtctgggcgacagagcaagactcaaagaatgaaaacgtgaagattaagtccaaagaaatacttgatatcacgtaaagtttttaaaacttcacttaaaactggtttcattcaaactgatttatatgtatatagacagaaccaatgttgtaaaatacatacaaagatagacaggtagacagatagacagatagatagtagatgatagataaatagaagtcatccacagaatgttattttcacatcgttcttttctttgcattctgcagtatactgggaaagcaggaaacagtcagggcacaatcagactttcaacaacagtaacaagagacaggataatgtagtagtttagagcactgtttctcaaagtgtagtctgaggaacacccatatcacaagcatatagggcacatgttaatagyagaaatacctagggccctctatgacaaattaaattcaaatttctgagagtgtggcctgggattctgcattttaacatacttttctagtgcttctacttcacattaaaactcggaaaccccagatcacaagcacagactctggagccatactccctgggtccaaaactctactagatggctattttactatgagtttgtctctctgcatcagtttcttcatctgcaaactggaaatgatgatattaatagtatctacctaccttacaggactgtaaa

SEQ ID NO: 82026 - DNA, 482 bp, Homo sapiens
gaaataaagtttcattaaatctcacacctaatggtatcatatcttttacaggttcacygatttggcagtacaaacaatacaccatacaatcaaaagtaagacaggtatttttctattaattccagtagcggacatattgcacagtaactgccagaatacctaattcctttgaaaatcagccttcattgcctctggcgcaattttagttttgttaaaactgacaattatgtaattaaaaataaactatattaaaatttaaaatatcagattagcatcaccaatagaataggtagtgattttaaaatgtaattgcttttaaaggacaagtttatatgttgtaattatgtatgaacatcaacttttttttaattccacatcaaaagtatcatcagataagccgatgaagtaaagaagaagagtaacacattcaaattaggagcctgagagagggctaaacagaccccctctgttcatgtatgcct

SEQ ID NO: 82027 - DNA, 530 bp, Homo sapiens
atatgaagacactcatccaaatgttaacctgggttacctttaggttatgagattgagaatatgtgaggagaggctacagtttacttttaaacctccgtactacttgaacttataagaataaaatgtatgttattttattttaaattttaaatgaaaatagatttggggttaagttgaagttactttatgtaaaacattggtcacttagctttaaaatgtgccatcctaattctaccttaccatttctgctccattattcccacctgttaaatcggaatatagcagaatgggccccgakaatccatattttaacagggcttccctgtttttttatgcacacgaaattagagagtcactactttagagaatagtttcagtacagatctaggagcaaaaataaaattggagtaagaaaacaggtaaataaaagatgcaactattgaggcagaaagtaaagtgctatatggagaaattttgaaggaaatgggaaatagataaggaattgctattatgctggtaactaaattgca

SEQ ID NO: 82028 - DNA, 1513 bp, Homo sapiens
  misc_feature (1)...(1513): n = A,T,C or G
tcccccttaagcctgagatgaggaacacacctcagagatctggtcaacaaggcagataaaaacatcaaacatcttacaggttcagtgcaaaaaactgactgatgaactgagtccgctannnnnnnnnnnnnnnnnnnnnnnnnnnnnnnnnnnnnnnnnnnnnnnnnnnnnnnnnnnnnnnnnnnnnnnnnnnnnnnnnnnnnnnnnnnnnnnnnnnntggagtccgaggggggggatcccctgaggtcaggaagttcgagaccagcctagccaagatggtgaaaccccgtctctaccttaaatttaaaaaattagctgggcatggtgtgggcacctgtagtcccaratacttgggaagctgaggcaggagaatcacttgaacctgggaggcgaagactgcagtgagccaagattgcaccactgcactccagcctgggtgacagagtgagactcagtctcaaaaaaaaaaaaaaaaaaattaaaaaaaaaaaaaagctgacatttacatagaacggtcgtctgacccggatcacttcatcattaagtcagtattcatttatcagcatttaactgtttaccttctttcactgacggcatttttcacatcactctttccttagttttttcagcttctaacaaggtgtgggttttataatttattgaaatcacactgtatcacaatgagatatctggtgttataagtttaaagctccataaatactggtaaccaggacaggtatcactttctattggcatggacgtctattttcagtgatttttttccactaaaattaagattcacataagcactgcgaaatctaataccttccattcattgtgagaaaatgcataaaatcaaaatgaaattaattttatcttagcttcactacaaagttggcaaatttacatatgaatttctaaacatgccaagacaaaaaatatcaatcatttgagaacaaagagtctatggctgagttagtgaaagacttcctaagtgtctatgtggtgggaaaaggggaataacaaattgatttcagtcaaagcaaattttgacacatacacaaaactcagctgcatcttgcagcgatgcaataaatcattgccatcactgcacttaccatatatacacactaataatcacaagaaaataaagcaaggttgataactgaccagataggggctccaaagaggctgctgggtggcagtgccatctcactcttcaactaaatggaatgacagttgcttactcaatacgatcagtgtgtttgtttttgtttattctatgattggagaaaaatgacatatcttccagaaagaactacacagtgctccatataaaattaaaacttctttgggaggataataatttagctcttaatgtaggtattcaaaatcattttcaatagctttcacattatacttacacctgattctttttctcatacctggtgacatatctcatgaacaatgaccatggtgacatccagcaaataagaaatagatgaaacactg

SEQ ID NO: 82029 - DNA, 498 bp, Homo sapiens
cccactgtggcatgctatagcacctatcacccctcagggagggcctttaccacacagatggtcctctccctctttgtctagawagggaaattggggcctggggtccctgaggaagtcagggcaaagctgcagagaagtaaagtgagcagtaggtttttttcctccaaaggcaggcaggttccctgaggtctacttgtaggcaggggctcggacggggtgacttcccaagggctcttcgcaagaactggagagcagtgagccaatcttgccgcagatcctgctcagcgttcacgtacccctttctctgcaatttccccactgcccttctccccactctcccaccatagcctggacatcatggggaggacgtaaggacagagtctggcaggcacaggggaaggggaaaggctgcctttgctggatgctagcaacgctcctatttcgtcaaagctggtctgaggccgggtgcccgaatcctctgggaaggcgctgtgttgt

SEQ ID NO: 82030 - DNA, 1549 bp, Homo sapiens
ccaagcccctttcacctctctcgcctttatcttaggctaggtgctccacacgggaacctgcattggtggccccagctgtgtttccacagagggactttgcctttttctccttatttacttattttcagaatgtggtgtgttgagcacccccaccatctcccacccctgcaagcatgaccaggtggcagctgtagttccttatcctcctccaggctttggggcagcaggactgcagcctccataacctgcagcagcttggggaggtggggcctgggctgcaggcccagatctggaggctagatgctgagaktcagaccagggacctggacagctcctcaccacactcagttttccttgggcttatgggtgggcctaccccacaggatggtctgtgccactttttacaaatgccaagttgtgaggaggagaggagggtgcctgagcttgaggctggttcaactctcaaagagctagcaaggctgggccgagggcggtggctcacgcctgtaatcccagcactttgggaggccaaggcgggtggatcacgaggtcaggagatcgagactatcctggttaacacggtgaaaccccgtctctactaaaaatacaaaaaattagctgggtgtggtggcaggcacctgtcgtcccagctactcaggaggctgaggcaggagaatggcatgaacctgggaggcggagcttgcagtgagccgagatcgcaccacttcactctagcctgggcgacagcaccatctcaaaaacaaaacaaaacaaaaacaaaaaacaaaaaaagagctagcaaggctgagattgagcacagactggtcaagccacagataacgcacttgttcttgctggttggcaggaagaacaatggcttggctgatcatcttttgctacctattaaaattggttttattttggccgggtacagtggctcatgcctgtaatcccagcactttgggaggccaaggcgggcagatcacaaggtcaggagatcaagaccatcctggctaacacagtgaaaccccgtctctgctaaaaatacaaaaaaattagctggcgtggtggcaggcacctgtagtcccagtgactcgggaggctgaggcaggagaatggcgtgaacccgggaggcggagcttgcagtgagccgagatagtgccactgcactccagcctgggtgacagagcgagactccgtcttaaaaaaaaaagttagttttattttctagggaaggccctgctggggtggagggagacatcctggggcaaagtgggtgctaggtgaggaagtcagcctgtgacacagctgggatcagttccacccagcaagacttgctgtgtgctcctgagcaaagtgtagctcctcttggaacccttgactcctaatctgcaaaatgggaggacttgaattctatatgtggttttaaaccttttttttttttaagctgtggagtcattttccacaaaaggattccacaaaatctaagcaaaatcttacggaaaagcctaagagaaagaaaagcaaaactttgcctgaaatgaggtag

SEQ ID NO: 82031 - DNA, 1549 bp, Homo sapiens
ccaagcccctttcacctctctcgcctttatcttaggctaggtgctccacacgggaacctgcattggtggccccagctgtgtttccacagagggactttgcctttttctccttatttacttattttcagaatgtggtgtgttgagcacccccaccatctcccacccctgcaagcatgaccaggtggcagctgtagttccttatcctcctccaggctttggggcagcaggactgcagcctccataacctgcagcagcttggggaggtggggcctgggctgcaggcccagatctggaggctagatgctgagattcagaccagggacctggacagctcctcaccacactcagttttccttgggcttatgggtgggcctamcccacaggatggtctgtgccactttttacaaatgccaagttgtgaggaggagaggagggtgcctgagcttgaggctggttcaactctcaaagagctagcaaggctgggccgagggcggtggctcacgcctgtaatcccagcactttgggaggccaaggcgggtggatcacgaggtcaggagatcgagactatcctggttaacacggtgaaaccccgtctctactaaaaatacaaaaaattagctgggtgtggtggcaggcacctgtcgtcccagctactcaggaggctgaggcaggagaatggcatgaacctgggaggcggagcttgcagtgagccgagatcgcaccacttcactctagcctgggcgacagcaccatctcaaaaacaaaacaaaacaaaaacaaaaaacaaaaaaagagctagcaaggctgagattgagcacagactggtcaagccacagataacgcacttgttcttgctggttggcaggaagaacaatggcttggctgatcatcttttgctacctattaaaattggttttattttggccgggtacagtggctcatgcctgtaatcccagcactttgggaggccaaggcgggcagatcacaaggtcaggagatcaagaccatcctggctaacacagtgaaaccccgtctctgctaaaaatacaaaaaaattagctggcgtggtggcaggcacctgtagtcccagtgactcgggaggctgaggcaggagaatggcgtgaacccgggaggcggagcttgcagtgagccgagatagtgccactgcactccagcctgggtgacagagcgagactccgtcttaaaaaaaaaagttagttttattttctagggaaggccctgctggggtggagggagacatcctggggcaaagtgggtgctaggtgaggaagtcagcctgtgacacagctgggatcagttccacccagcaagacttgctgtgtgctcctgagcaaagtgtagctcctcttggaacccttgactcctaatctgcaaaatgggaggacttgaattctatatgtggttttaaaccttttttttttttaagctgtggagtcattttccacaaaaggattccacaaaatctaagcaaaatcttacggaaaagcctaagagaaagaaaagcaaaactttgcctgaaatgaggtag

SEQ ID NO: 82032 - DNA, 1549 bp, Homo sapiens
ccaagcccctttcacctctctcgcctttatcttaggctaggtgctccacacgggaacctgcattggtggccccagctgtgtttccacagagggactttgcctttttctccttatttacttattttcagaatgtggtgtgttgagcacccccaccatctcccacccctgcaagcatgaccaggtggcagctgtagttccttatcctcctccaggctttggggcagcaggactgcagcctccataacctgcagcagcttggggaggtggggcctgggctgcaggcccagatctggaggctagatgctgagattcagaccagggacctggacagctcctcaccacactcagttttccttgggcttatgggtgggcctaccccacaggatggtctgtgccactttttacaaatgccaagttgtgaggaggagaggagggtgcctgagcttgaggctggttcaactctcaaagagctagcaaggctgggccgagggcggtggctcacgcctgtaatcccagcactttgggaggccaaggcgggtggatcacgaggtcaggagatcgagactatcctggttaacacggtgaaaccccgtctctactaaaaatacaaaaaattagctgggtgtggtggcaggcacctgtcgtcccagctactcaggaggctgaggcaggagaatggcatgaacctgggaggcggagcttgcagtgagccgagatcgcaccacttcactctagcctgggcgacagcaccatctcaaaaacaaaacaaaacaaaaacaaaaaacaaaaaaagagctagcaaggctgagattgagcacagactggtcaagccacagataacgcacttgttcttgctggttggcaggaagaacaatggcttggctgatcatcttttgctacctattaaaattggttttattttggccgggtacagtggctcatgcctgtaatcccagcactttgggaggccaaggcgggcagatcacaaggtcaggagatcaagaccatcctggctaacacagtgaaaccccgtctctgctaaaaatacaaaaaaattagctggcgtggtggcaggcacctgtagtcccagtgactcgggaggctgaggcaggagaatggcgtgaacccgggaggcggagcttgcagtgagccgagatagtgccactgcactccagcctgggygacagagcgagactccgtcttaaaaaaaaaagttagttttattttctagggaaggccctgctggggtggagggagacatcctggggcaaagtgggtgctaggtgaggaagtcagcctgtgacacagctgggatcagttccacccagcaagacttgctgtgtgctcctgagcaaagtgtagctcctcttggaacccttgactcctaatctgcaaaatgggaggacttgaattctatatgtggttttaaaccttttttttttttaagctgtggagtcattttccacaaaaggattccacaaaatctaagcaaaatcttacggaaaagcctaagagaaagaaaagcaaaactttgcctgaaatgaggtag

SEQ ID NO: 82033 - DNA, 602 bp, Homo sapiens
caagggatgtaaaataacacatattatttttaaaaaccaaaaaaattataagaaaggtgaaactaagtgtactaacttcttaagtattacttggaaaaagagttacaacttgaagctctcaaatcaactgggataaacccaagtacatttatgaacacagtgattggcattaagataatacttgtaactaaaatcaaatgatacaggaaaagggaagagacagtttagtattgtttatggcaggaaacaaaggtagtatataaagaacttttaagatatataaatgcatttgattaaaaataacaaaacaaaaatcaaaccttccaaaatactaattaaaaaaaaaaaagatttaggaggaatcaagcacactagtgcctaggcagcaagcttcatctgcccactgacattggtcttggcagcagacctgaaagttaccctgtaaattggctccamcccttctgctacccagccatgggcccagtttattactgcttgcacaaggacccagaagaagatttacccatatcccacaacccaggaatgatttgtctgtctgagcctccttgaaggacctgtcagcctttgtcccaaagcaggtc

SEQ ID NO: 82034 - DNA, 541 bp, Homo sapiens
tataaactgcaacattattggtgtgttaatgtttttacttgtccctcctgtatgtctttgctttgactaataagaacatatatagtgaccacattataaaaagctgactgcaaaggagttggctttgacacattggtcattgtttgccttcgtcacattcacagtccttacgcaagtatctatcmggatgattgatctcaacttggctgcctcagtggtaataggtcctaaaagaagcacctattcctaatgtctcatagtttgtctctgttgtcaactgctgcttccatagttgacattgaatacttaacttcaggctaacttttggtagtatatctttgcttcaattgtaaacatttggcaagaactttttgaaaacaaatgctactttgtttctaaaatttgagatgttaactttttcaggaagctcataaaatggtgagagaagcaaatatcaagcaggcaacagcagaaaaacagctaaaagaagcacaaggaaaagtgagtttttgcagctcttaatagtataaaataaatttgt

SEQ ID NO: 82035 - DNA, 1940 bp, Homo sapiens
atacttttcagctacttggaaagtgatagagaataaaataatgtccctgctttaatagcttttgcattctaatggaagagacagtcaatacagacataaatatataacataatgtcaagtaataatatgtgctatgaagaaaaataaagcaggactcattacttcatgagaactttatcacatagccaaacatggctataagggaagacagaaaatttggtctgtatgtcagcagtcatctgctcaggaagaaagaactagcagtctgccacaaaaaaaaaaaaaattaaaaaataataaaaattaaaatgaaaaaagtacgagtagaaacagggaagaagttacactttgatgtatctaacacatccacaaattaacgaacaattcatcttttgtttaaattaaccttaaggtagtatttgcctgattattcacataaacacatagataatttgtatttcttgggttactttgggggagtcttgtctctcagtgtttgcccaattttgatgctgtcattcatcagttatttattgtgtgtcattagtgggctaggtaatattcaattaaacagatgacagaatatttccgagatagaaaaagtttctgtattctccaaggaaaatattcttgcctcagtacccccactattgctgcatattttatctcagccagtggttttttattttttaaagtgacagataaaattgtatgtatttactgtgtaccctcagccagtcttatttataaaaacaatatctactctatttcctatactaagcgttctcacataaatacccatgcccttgtaagtcattcagttaattattgagtggctactaggtacaatatccagctggtgaaccactagcatcagaatcacctgagmtacttagttaactcaggctttatgaatcagaaactttaagaattgggccctatctgaaatttttcaacaaactttagaagcaatttttatgacactttaggaatcaacagtaaagaatgcatggtacgaagtaaagcagaaaattctccaaactacaatctagttgggttaacataatatatacataaaacagtgattttaaaaatgtatccagagagtaaagatagcatcctctattcttccacctcccagaaatcactcagtaacaaggataatgacaataatacaaaattcattttcattgaaaacagtagatacctgaaaccctgaactacaatatatgtgaaatacagtgaatggcagaaatactttgataaaagatgtaaatgcctaccgactgcagaagacaacatcaacaaagcacacttcacaaaagtaagtgacttatcttagagacaaaaccaacaatctttcatttgaaataaaggaatcaagtatgtggacaggcagcagtgtcttccctcaacctggtttatcataaaagagaaggtggtagggcgccattggaagaagaatcattcagacataccacatatgcaggaagcattgtgtttgtgaggcaaaatggaaaaaatatatatagactgtgatgtgagcagccctgtgattgccaatttctcttagttaaaagtagaagctaaaggaactcatctacacaacctctgtattataagcagaattcctattaggctgaaacatggtccaggcctctcagcacaaaccttctgcaagcagcatttcttggaaaacctctcctccaaacatgagcaatcaatcaaaaagtaatcagtcatccaggcacggtggtgcaggcctgtagttccagctacttgggaggctgaggttggggatctcttgagcccaggagttcgaggctagcttgggcaacatagtaagattctctctaaaatattttttttaattttaaaagtgcgtatataaaaactatacacattttacaaaaatatatgcaaacaaaaagatacatatt

SEQ ID NO: 82036 - DNA, 518 bp, Homo sapiens
agccaccctttgcctctgggagcttttccttttttaacagtactttgttgagagatgattcacatataataaaatttaccaacctttagattcagctcagtgacatcttaccgatgtctgcccatttgtgatcaccaccaaatcggcacatagggcatttccataccccaggatgtgttcacatgctcttagcctgctggtgcctgccacccagggtaactgctgttctgactcccatcaccctgaagtggtgttgcctatcctttaacttaatataaatgcagtcatacagcstatacacttttgctaaaaatggggattttgagattttccctggagcttataaatatacaagctgtctgccagaaggcagcaaactgctgcttgggggctctgcaccacagcctttaccaggagtgttttgaggagagggtgggccagagaggaggacaaagtccataaggaaagatgctcaaccgctgtgctgctgccccggccatattcttacacagccagtc

SEQ ID NO: 82037 - DNA, 518 bp, Homo sapiens
agccaccctttgcctctgggagcttttccttttttaacagtactttgttgagagatgattcacatataataaaatttaccaacctttagattcagctcagtgacatcttaccgatgtctgcccatttgtgatcaccaccaaatcggcacatagggcatttccataccccaggatgtgttcacatgctcttagcctgctggtgcctgccacccagggtaactgctgttctgactcccatcaccctgaagtggtgttgcctatcctttaacttaatataaatgcagtcatacagcctatacacttttgctaaaaatggggattttgagattttccctggagcttataaatatacaagctgtctgccagaaggcagcaaactgctgcttgggggctctgcaccacagcctttaccaggagtgttttgaggagagggtgggccagagaggaggacaaagtccataaggaaagatgctcaacygctgtgctgctgccccggccatattcttacacagccagtc

SEQ ID NO: 82038 - DNA, 683 bp, Homo sapiens
tggtttcaaatccttgtggtctattatttgtaacctgggtagtgaatggcaagaaaaatgcagtgagaaagaaaaagaggcctggaaatgcaaataacatgatataaaaaataaatttagataatttgatgacattgacctaaaaaagaaaaatcaaractatttctttttgaaataatcagattgttttgtctacaactgagtttgggtgtaactcctttgcacatgttcattttccattactttgagttgttacacaaatccattaacgttcatggcagaataaaaaaaaaagtaagatgttcaaattaaaaaatcgatttcatcccaaatagaatatcggctgttcagacatgattaagtttcaaagtagaaatgtatttttgtgctaatgaggaaagatctccatgtgcacatttgataaagtagtataaattttaattagggagaagcaggttacattcaggtagaaataccttccttatgtcaagataatattatttttttccccaagtgagaattcatgctttattcttaattttagaagatgatagtaatttttttcattgcgcttctttaccttctccaagttttcagcgttgaccatagggtgatttcccaatttgagtgagatatattaatttttgaaataacccagaagtgttacatatgaatgtatttgt

SEQ ID NO: 82039 - DNA, 683 bp, Homo sapiens
tggtttcaaatccttgtggtctattatttgtaacctgggtagtgaatggcaagaaaaatgcagtgagaaagaaaaagaggcctggaaatgcaaataacatgatataaaaaataaatttagataatttgatgacattgacctaaaaaagaaaaatcaagactatttctttttgaaataatcagattgttttgtctacaactgagtttgggtgtaactcctttgcacatgttcattttccattactttgagttgttacacaaatccattaacgttcatggcagaataaaaaaaaaagtaagatgttcaaattaaaaaatcgatttcatcccaaatagaatatcggctgttcagacatgattaagtttcaaagtagaaatgtatttttgtgctaatgaggaaagatctccatgtgcacatttgataaagtagtataaattttaattagggagaagcaggttacattcaggtagaaataccttccttatgtcaagataatattatttttttccccaagtgagaattcatgctttattcttaattttagaagatgatagtaatttttttcattgygcttctttaccttctccaagttttcagcgttgaccatagggtgatttcccaatttgagtgagatatattaatttttgaaataacccagaagtgttacatatgaatgtatttgt

SEQ ID NO: 82040 - DNA, 659 bp, Homo sapiens
tgggctccagtgggtatgtttatgggggttctgagatctccctcccaggggggagcaactttgggaacaggagccagtttcaagagagagaaaatgaatgggactgtgaggctggctccaatgtcttccctcagccctgtggcgctcccatgttggacatggtggccagtgagagatggatctatcaagaagtatctctgcggggccgggccctgcaccccagtcacttcatgtccaatttacccaagaccctgcctcaaagtggggtaattgaggccacaaatgccaactctggctggagaacttcctgcaggagcattaaatgctggacagaggccaaggtcctggtacaaaggtgtacagcagccagagctaacgttggccttcgatgccagttccctgaccattaaatctgtgtacacaggaacaggaggatggggaagggtggcgtctgtgcaggtggtggtgttattacagcctagatgttcacagcttctgggaagcttgatgggtcactgtatgggctccaggtttgaatcctggcatgccacttaatatcttgggcracttaacctccctgaggctctgttctctcatctacaaaacagggggataaaaataagtaacccagagaatcgttgggaagattcaatgaggtg

SEQ ID NO: 82041 - DNA, 1243 bp, Homo sapiens
  misc_feature (1)...(1243): n = A,T,C or G
tcagtctgtgtttctgtgtctccgtcatctatgtctctgtctccatgtctcagtctctatgtctccatgtccatatctctgtctctgtgtcttctctgtgtctctgtctctgtgtcttggtctctgtgtctgtgtccctggcttcctgtgtgtctctgcccgcctcacccttgyggttccctgcccctggctctgtgcatggcctcctgtctgctcctttgctttctgttgtccctgcttccatctgtttccttcttggtccctgtctctctgtcctcagtctttcctgagtttgcaatgaactcacatctttgctctcctctccctccctccctgtctgcttctcctcatccttgccctcttaggagaggggcctcctctcaccttggcggtaatcagggaggcccggctggtgggggcggggaagggcagctggctggtcctgctcgcccaacaatgcctcaagtccaccttctgcctgttggggggccctgagtctgagctcatcctgctggttgagccctgcaggatccccattgcctccaacacagaagacccctcattccttacctccactttgccccgtcattgttagcaagagttcgtgtccacaactgagaaatcccaagtcaattgtgaagccacagacatacttatgaattaataactacagctaagatttactacttgcacatggcctgctgtgtattctgtgcatgcaactcatttccaccaaaatcctgcaacactgatatcatcatccccatttttcaggtgaggatgagagagagggtcagagaggttaagaaacctgcccaaggtcacacagctagcaaatgatagaggcagaattcaagcccaatctaggtgggcgtgaggatcatgccctttccactgagtctttcagcactgtgctatccaatgagatagctgctggccacccgaggctatttaaattaattaaaatgaaataaaattaaaaattgaatctctttgtcacactggccacatttcaagtactcaggagtcacatgtggttggagatgccctactgaatatnacagacatagaacatttccatgaatgcagaaagttctactggacagcaatgttttcgataaacattggaggagtctttgtgggagaaccaaagaaaacacaatgatatcaaaatagccctgggtcgctccctggtcccagccctggccatgtgtgaagtttcctagaagcctctggactgaaa

SEQ ID NO: 82042 - DNA, 1315 bp, Homo sapiens
gcatgttaattataaggcaaaagatctgtaaaatactagataaaacagggaagtatgggtggctagcagtgtctctgatacacagtgagaacttaataagtattaaccaaagaatggcaagttgagcaaatgattaaataaaggtctatataccataccccacccagagcaactactcttgacattttagtgtgtacatttccagatgttttcctatatatatggttatacacttttttattcttttacaaaagcaaggtcatattgtacataattatttgtaaatcactttttattcccactcacctatttattgtggtcatcttttcatttattgcagtcatcttttcttggtagcaactatggtagaaagactatactgtgattttgaattctccagtgttgactatatcagagtagacccaaggaaaagagatgtttttaattcacagagttattaactgtctagttaaaaatgagactataaaatttaagttttaaaaacctcaaagaagcatatatcagtgattatttggtggtacttgaattaagatacagataacacacacacacacacacacacacacacacacacacacaatggktattaacatctttgaatatctgcatgctgtttgaataaatggatgtgctgtattatactgaattcctgcttgatggatacttaggttatttcaaaagtgtgaccaatttgattgacaagcctcaagtcattgaggtaaaaccagaaaaatgtattcttttccaatagctgctgttaactctgccctttcaaatttttcctatcctgttacctagcaggcttcctcaaggaaatcactagtgtggttcagacagatacatcctagtattaaaagtctctgtttgagcttggttctgaagattcagtcttgatcattggacaatgtcaatttcacacgctatttagagtgccctttcccctcatccatcttccattccacttgcaaagctgggacttgaaagaaagtggtccttgtctcctatcagccttgtggtcagtctgcaccattattgtgtcccaatgccttcttaattagctcaggaagcactaaactggtcagcaagcagagagagagagtctggcagccccttcttataaatgcctcccaacttagtgagctatttgctttgtgcatccctcattttgcaacgaggagtagaacctctggggaagtaagcggaagtagggagaatctctctgcaccaacgctgcgcctctccaaaggataacttcactctccctccctgacttatatgtgctgtggagcatgca

SEQ ID NO: 82043 - DNA, 668 bp, Homo sapiens
aaactttgatccagtcaatcatgcagaatgctaagcacatattcagaaactcctttattcctctacttctaaccctatatttgcattttcttagttccccccactagttctgcattcttcgcttcaaaaaacagttgaaactccttggaatgcaatgctctccctaaccccatatgcatttacaagaccagttctcttgcaagaatgaaactatgaagctcacccactttgacccagcagcatcctgttatctgggatggaggaaataatgttatattctaggtgccaaagaattttatttttatcagaaaaaaaaaagaaatttagatataggcttgggaatttggaggggttcaggagttgttttgacaggattagtttgtaaagtactaccagatcactagggtgaatgacttagagaatgctaaatattctctttataggtgaacttctaagaacttttaattagctgaggagaatcgagaatcttcaagaaggaaatgaaatgcartgcaagtatgcaatgttacttaactctgtcccatcagtgaacacactctaggtaaaacatagatgtagacaatatgcctagatattgtgacccttcctaaactcttccctgtgcgtggtgctgggaagttttctgatgagcatgtgttctgaaatat

SEQ ID NO: 82044 - DNA, 1314 bp, Homo sapiens
ggaaggcattattattctcattctactgatgcagaaactgaggcccagagaaattaaataaaatttacctgaagtctcatagctagtaagtagaggcagtatctcagcccaggcagactgatttctgagccaagttattaaggctgtgatatcccagaggcttgyctcaggggttctaccgtatgggaaggaagggagtttacagaaacagtttaggaatcagacgtaccaccttgccatttactagctgtgtgctcttaagcaggtgccttaagcccactccgtttctccaacgttcatatgggagtgatattttctatctcacacggataatatgtaggagtaacatggtgcccaagacaacacgaaataactgttagttcctctttctctatcactatgtaagtcaggagagaaatgaagaatggtcgttggaaatgacctaacctcccatctcctcgccatgagagaatgttcttggaataatgccaagctaaaagctgaaatgcaatgtaacatgactgtgtggaaagaaaatacccttccagtatgcttgtttttctttaatagatgagatcatattgggtataaagttttgcagtttgctcttctcactaaataatgtgacataagcatttccctgtgataatgacaatctctttgtaatcatcattaaatgctgggtaatgtttcattatatctatcatgatttacttacttccataatgtttctaaatttctcactattatagaaacactaaaatgaccatgattttagccataaaaactttattcgaatttcaagccatttccctaaggcatggacatttaaaaattcttctgataggcactgccaaattgctttcccaaaatgtttaaccgagttatacccccaccaagagaataggatttttcatcgcactcatgctaacaatgagaattatgagatctagaatctttgttaatttgattattaatcaattttcatctcattatttaaatttacggttctttgatccaaaatattgttgattattgattcaaattacctcatggtttaaatttttctttatgtctgtattttttgtttttcagttttattttgacacatatcaaaataaatatgtgtacgtataatttaaataataattagtaaatattaatctatgtaccactcagctaaggaaatagagcacttctgtaccttagaaatctcctggatatctctcttaactattttcctcccgccttctggtgtagctacagttctgacatttgtggtcattgttttcttgattttttagttttaataca

SEQ ID NO: 82045 - DNA, 1314 bp, Homo sapiens
ggaaggcattattattctcattctactgatgcagaaactgaggcccagagaaattaaataaaatttacctgaagtctcatagctagtaagtagaggcagtatctcagcccaggcagactgatttctgagccaagttattaaggctgtgatatcccagaggcttgcctcaggggttctaccgtatgggaaggaagggagtttacagaaacagtttaggaatcagacgtaccaccttgccatttactagctgtgtgctcttaagcaggtgccttaagcccactccgtttctccaacrttcatatgggagtgatattttctatctcacacggataatatgtaggagtaacatggtgcccaagacaacacgaaataactgttagttcctctttctctatcactatgtaagtcaggagagaaatgaagaatggtcgttggaaatgacctaacctcccatctcctcgccatgagagaatgttcttggaataatgccaagctaaaagctgaaatgcaatgtaacatgactgtgtggaaagaaaatacccttccagtatgcttgtttttctttaatagatgagatcatattgggtataaagttttgcagtttgctcttctcactaaataatgtgacataagcatttccctgtgataatgacaatctctttgtaatcatcattaaatgctgggtaatgtttcattatatctatcatgatttacttacttccataatgtttctaaatttctcactattatagaaacactaaaatgaccatgattttagccataaaaactttattcgaatttcaagccatttccctaaggcatggacatttaaaaattcttctgataggcactgccaaattgctttcccaaaatgtttaaccgagttatacccccaccaagagaataggatttttcatcgcactcatgctaacaatgagaattatgagatctagaatctttgttaatttgattattaatcaattttcatctcattatttaaatttacggttctttgatccaaaatattgttgattattgattcaaattacctcatggtttaaatttttctttatgtctgtattttttgtttttcagttttattttgacacatatcaaaataaatatgtgtacgtataatttaaataataattagtaaatattaatctatgtaccactcagctaaggaaatagagcacttctgtaccttagaaatctcctggatatctctcttaactattttcctcccgccttctggtgtagctacagttctgacatttgtggtcattgttttcttgattttttagttttaataca

SEQ ID NO: 82046 - DNA, 882 bp, Homo sapiens
tcctgcctgagcctcccaaagtgctggggttcaggcacctggcctgaaaatccctttatgttagtccagagaggcgaggctgcgctgcagtaacaaattcgccgtaaaatcttcggaaatgatcrcaaggctttatttcttgctcacgcagttcttggtgagggtcagctgcctctccagggtaggtgacttccctgtgacaagtgatccaggctgtcctggttttgtgacatggcctcccaagggttggcctccaggtccccacagtgggagaagggagagtggacgactctcacccactcttctgtgtctgaaaccggaactgacgcagttaatcccactcacagcccattggccaaaatgagtcacatggccccaacccaaccactgcgggagctgggaaatggagcggtgcctgtggaagagaaggatttctccctttcctaactgatgtggttctggagttttggatagcggagtagtcagactagtgtgttcggtttctaacttcgaactgggtgagtctgggcagtaaggaatgtctgtatttggggagcacaccatttctgccacacctaaaaccatgcaccaagtacatgtgcagatagaacgttctagcactgccattgttccctcaagctttcctgtcccctgattgaaattgttggcttgcactagggactgtggtgtacaaaggtgctcagggaagagccggcgaggtggtgaccattagaatgagtagtagtgtctgggtgcagtgactcatgccccattgaaactgttggcttgcattagggactgcagagtgtgaaggtgcctagtgaaaagccagtaaggtcataaccattagaataggtagtatcagccagccgggcatggtgg

SEQ ID NO: 82047 - DNA, 884 bp, Homo sapiens
ctgggccttgctcctggtactgcagcagttggcagtgcgagcaatgctgagagagacagaaagcctggaggtcttatttcatcttgttgttgttgttggaaatgcagattctctggctccaatcaaccattgatcctgaacgctgacagtgggacccaaaaatctgctccagccctcgggtaggggcgggggtggattctgaaacaagcacaagtgtgagaacgtatccaagcaccaaggcttccgcctgccggaaagaacaatgagcttaattgtgttcgcttaccaaactcgcccccgctcacggcgattttagaggaattctgaaatggtcgcttcatcttaaagtctcctcrcttctctttgagatggatgcaaagttattgctccttagtctttagcagggcacaaagctctttgagaattgagaagttgtggatctttcctccaaagggggaaaatgcgtcctggttcagacagggaggccggccatccccggtttgcctagggctgaggggattcctgtgtcctgtgctgacatcagcccctgcaggtccacggccttctgcctgcaactccagggcctcccagatacccgggaccccgctttgggctaaggaaccccgccctcatccgtttagtttatttattgaagaagatgaagacatgttagcacagagtttttagaaagtggccttcagttactcggtaaatgaatcctggaaagcaggaaatccacttttcaggtctttgatatgaatgtgtgttttggctccacttttctcttttgttttttatttttctgaataggcttatgattgttaatgtgggaatgttggatcccttcttttttttttttttttttttttgagatgggatctgga

SEQ ID NO: 82048 - DNA, 701 bp, Homo sapiens
gctgaagttgggttatctggaaactctaataatagaatgtatctatttgcactttcccatgatgggctggaacttacttctgagaaaccgagcactatggtctgagtgtgtccccaaaattttgtatgtggaaactcaactgccagtgtggtagcattgagaggggggcctttaggaggcagtgaaatcatgagagcagaactcygagataggattagggcccttataaaggagactgaaggagtgggttcatcttcttctatttcctctgtcacatgaggacatggtgcttaaggccccatcttggaagcagagtcctggtcctcaccagacatggaacctgccagcaccttgatcttcaacttagtcatagaaataaataagacatttctattattccatttttttctattattattgtgttagaaatcagtccttttaaattattataaattacccagtcttggggtattttgttacagtggcacatccagattaagacactcaacacatgaaaaaagggacatttaactgatccgctggcttctcagagtctgacattttggttcagcttttacacagtaattttgatttctgctccaataccctgatgtccattagatggctgacagcttcaggtcttcatgtccagaattcaaacgggggagacactgttttatagcaattaacagtgatgcttt

SEQ ID NO: 82049 - DNA, 1104 bp, Homo sapiens
aaggcatagatttgaatatccttgccacaaaaaaatgttaagtggccaatgtgawagagtcattaattaccttgattgcatctttctacagcatatacataggtcaaaacagcacattgtaccacacaaatgtacataattattatttgtcaattaaagataaattaattaacctcaaaaatccagcctccagagatgtgtctgctgttatcagtctctacccctcaaggaaaggcctagaaatcagttgtcaggggctgcagcggttataagagggggcttttctaggtgactttttttttttttttttttttttttgtcttgagcctggacagtcaagacaagaaaaccacatcaggtactctgcaaaatatgaaaagagcattttgctcccaccagctctgtgatgtttggggcttgcagaagaaaggggcatgaagggtaataaatgatattttctaaaagcccaaagggctatctgtctggacataacatatctaacacccctgggacaatcttggcccacgcactcctgcaggcagcagcctggggcaagggaaggtgcccaggctttagcattcagtaccggtattcagacactaactctgtgtaatactgggaaaattagtctacttttctgagcctcccttttctcatctatagactgggataatgaatgttaatctcacaagtttgtactgagagttagatgtgatgatttatgtaaacagcatcgcaccattccaaacagaggttattcctaatattttacagtgagaaacgctggtgcaattgaaaggcaaaacatcttctggataattggggttcctcatgccactcaaccaacaagcaaagaagagtgctactgaattggtcccaggaaggggtcccgattaccaaggcgaactgggggagtgggcaaagaggattatatttgtaactccggatatttgcagggacacgtcttactcttaatactcccttcccaaagtcctagtaaatccaactgtggcaacccaataaaaacaagtctaccgaggattcacacctcatagaaataaaggcttggttctcccccaaggtaaagaagctcccccaagcaga

SEQ ID NO: 82050 - DNA, 1104 bp, Homo sapiens
aaggcatagatttgaatatccttgccacaaaaaaatgttaagtggccaatgtgaaagagtcattaattaccttgattgcatctttctacagcatatacataggtcaaaacagcacattgtaccacacaaatgtacataattattatttgtcaattaaagataaattaattaacctcaaaaatccagcctccagagatgtgtctgctgttatcagtctctacccctcaaggaaaggcctagaaatcagttgtcaggggctgcagcggttataagagggggcttttctaggtgactttttttttttttttttttttttttgkcttgagcctggacagtcaagacaagaaaaccacatcaggtactctgcaaaatatgaaaagagcattttgctcccaccagctctgtgatgtttggggcttgcagaagaaaggggcatgaagggtaataaatgatattttctaaaagcccaaagggctatctgtctggacataacatatctaacacccctgggacaatcttggcccacgcactcctgcaggcagcagcctggggcaagggaaggtgcccaggctttagcattcagtaccggtattcagacactaactctgtgtaatactgggaaaattagtctacttttctgagcctcccttttctcatctatagactgggataatgaatgttaatctcacaagtttgtactgagagttagatgtgatgatttatgtaaacagcatcgcaccattccaaacagaggttattcctaatattttacagtgagaaacgctggtgcaattgaaaggcaaaacatcttctggataattggggttcctcatgccactcaaccaacaagcaaagaagagtgctactgaattggtcccaggaaggggtcccgattaccaaggcgaactgggggagtgggcaaagaggattatatttgtaactccggatatttgcagggacacgtcttactcttaatactcccttcccaaagtcctagtaaatccaactgtggcaacccaataaaaacaagtctaccgaggattcacacctcatagaaataaaggcttggttctcccccaaggtaaagaagctcccccaagcaga

SEQ ID NO: 82051 - DNA, 1104 bp, Homo sapiens
aaggcatagatttgaatatccttgccacaaaaaaatgttaagtggccaatgtgaaagagtcattaattaccttgattgcatctttctacagcatatacataggtcaaaacagcacattgtaccacacaaatgtacataattattatttgtcaattaaagataaattaattaacctcaaaaatccagcctccagagatgtgtctgctgttatcagtctctacccctcaaggaaaggcctagaaatcagttgtcaggggctgcagcggttataagagggggcttttctaggtgactttttttttttttttttttttttttgtcttgagcctggacagtcaagacaagaaaaccacatcaggtactctgcaaaatatgraaagagcattttgctcccaccagctctgtgatgtttggggcttgcagaagaaaggggcatgaagggtaataaatgatattttctaaaagcccaaagggctatctgtctggacataacatatctaacacccctgggacaatcttggcccacgcactcctgcaggcagcagcctggggcaagggaaggtgcccaggctttagcattcagtaccggtattcagacactaactctgtgtaatactgggaaaattagtctacttttctgagcctcccttttctcatctatagactgggataatgaatgttaatctcacaagtttgtactgagagttagatgtgatgatttatgtaaacagcatcgcaccattccaaacagaggttattcctaatattttacagtgagaaacgctggtgcaattgaaaggcaaaacatcttctggataattggggttcctcatgccactcaaccaacaagcaaagaagagtgctactgaattggtcccaggaaggggtcccgattaccaaggcgaactgggggagtgggcaaagaggattatatttgtaactccggatatttgcagggacacgtcttactcttaatactcccttcccaaagtcctagtaaatccaactgtggcaacccaataaaaacaagtctaccgaggattcacacctcatagaaataaaggcttggttctcccccaaggtaaagaagctcccccaagcaga

SEQ ID NO: 82052 - DNA, 783 bp, Homo sapiens
tttagcagggatactaggagagcctggggaaggggaaaggagggcactgcatatgtaggatcacaggcctgttcgttctattgatgcccctgcacacagaaaatggacctttctgcagcaaagctgtcacagagcaacatttataggttacatttagacgggaaaattattagcgtaaatatgtttggtgtcccaaaacacaagtactgattagctagtgaggacagcattaggagactcattaagaaatatgtttttgtctttgccctggcctgagcatcacaattaccatccacacccacacaaaatgcaaatatagttgtaaaacaaattttgaaaattgagtccctcaagcttcctggtttccatgccaatcgtgtacatctgaygtcagttggattctgactgcatgaaaaacatatgttgttctagcccttccacagcttcctaaaacatgtggctgacactttttagggtgtgtgtaaaaataaggctgcattgttaaagcccctttcctgagacatttcactatttggagctgaaagcacctgtgctgttctttcaatgacttttgccttttgtgggatctccctttcagtagaacttttctttcctgctggtttaagtttcagcctaaaaaccaactacaaccctttttcatcccactttctttcaacctaccacttcttttcacttccaaacttctttgtgtgtgtgttccagtaacactttattcacagacactaatatttaaatttcatatcattttcacatgtcacaaaa

SEQ ID NO: 82053 - DNA, 660 bp, Homo sapiens
agaactattagaccgttcctgatgcaaatccacctcatccaacagcttcttcttgacttttcttccagcagcttgcgctaaatgaattcatcaagtgactgaagacaaccagtgatggacggggtgaatgatagctccttgcagggctttgttctgatgrgcatatcggaccatccccagctggagatgatcttttttatagccatcctcttctcctatttgctgaccctacttgggaactcaaccatcatcttgctttcccgcctggaggcccggctccatacacccatgtacttcttcctcagcaacctctcctccttggaccttgctttcgctactagttcagtcccccaaatgctgatcaatttatggggaccaggcaagaccatcagctatggtggctgcataacccagctctatgtcttcctttggctgggggccaccgagtgcatcctgctggtggtgatggcatttgaccgctacgtggcagtgtgccggcccctccgctacaccgccatcatgaacccccagctctgctggctgctggctgtgattgcctggctgggtggcttgggcaactctgtgatccagtcaacattcactctgcagctcccattgtgtgggcaccggagggtggagggattcctctgcgaggtgcct

SEQ ID NO: 82054 - DNA, 679 bp, Homo sapiens
tccaaaacactagaaatagatctagaccatcctggctaactgcctttgcaaaaaccattaacagtgagaagattatgacactaaaagagataggatctaaccaactccatcttgcttttaacctccaaactgccgttggtcattcctgggtgtgggccaagctagctttgggagaaatttagtttatagtttgaatgataataacccttcccaaaactaaactgcctttgtaaaactaattaaagacaactaggttaggaggatgagaggggcctgaattctgctaagatgcaggcataatgaaatgattatccagaggtcacaagatttgcaacttccccaattaaataacatcacgattgtagaacctaagattggccttttgagatgcctyttcaggcctctgctttctgacaaccagatggctccacctagaccagggactcctctgtggctcccacccaaaatcgcactcagcacacaaaaaccgttttccacagccctatgaatgcatccccaaccagtcagcattccctgttccctacccaactgcgtgccaaagccctagcctctgaatttccggggaggctgacttgagtaataaaactttagtctcccatttagccggttctgtgcgtattaaactctttctctattgcagttcccctgtcttgacaaa

SEQ ID NO: 82055 - DNA, 541 bp, Homo sapiens
ttttttgagacagtctcactctgtagccagactggggtgcagtggcacaatcctgactcactgcaacytctgcctccggggttcaaatgattctcctgcctaagcctcctgagtagctgggactacaggtgcccgccaccacgtccggctaattttttttttttgtatttttagtagagatggggtttcatcatgttggccaggatggtctcgatctcgtgacctcatgatccacctcggcttcccaaagtgctgggattacaagcgtgagccaccgcgccccgcctatttaatgctattcttacatcagcactgtctcattgtggtctgagattctccttatctggatttgtggctctttcaccaagaacaagagactcccgtggctctcttctttaaatcctgttgccataattacaaagaaataaacacagtttccaatgctttgaaatgaagcatgtggtattaactcagtggattaccagagagagagggatatacctgaaatgggagaggaaaaaatcttccctagactatcttt

SEQ ID NO: 82056 - DNA, 939 bp, Homo sapiens
aatggattggaagaggactgttgggagggcaytgcagttgttcaggccagagatgagataggggagaccagcatagtggagggggagattcaagacatcgaaggaattacaaggtcttgggaagagtctatcacaggtcccaggtgagagtgacaaaggtgacaaggatgggtctcatttctggcttgcatgcctggaggaatggggaaactattcaatgaggtaacatctctgaaaagcgtcaggtttcggacagggtgggtggtgagacacacagagttaagtttttaaaatgttgagttttagcggcccttgagatttaaagatgtaagattagaataggatctcagagaaaaggtttgggctgaagatatcaaaatgtggcatgactcacacagctaagtctcagggttgaagcttacaaagaaagtctgaagtgagaagacaacaggtctcaggatcagcctggagggactccagtacctgtgactcgtgtagcagaagtgcaataaaatttttttataataacatgaagaagaaagaagagaaggagggaaaaggatgaaaaaataagagtgaaagagactgtattggattcaaggtctggctctgccatctcaacaagtttcttattcctccaagcctcagttccctgtctgtaaaatggaaagaaggtggttcatatctcatgtatgtactatgcggattaaataatgtaatatttgacacttagcaaatgctcagtgaacttagcaattattactctgtggatggcacaaggctggctcttaatgttatttatgggagtcatgaatgaataaatcattggttgaataaatggtaactatctcctttctcatataattattttttctgaaatcccatttgtattaagagtaatggagtcagggcggagtagacggcgtacgtgtgagttat

SEQ ID NO: 82057 - DNA, 939 bp, Homo sapiens
aatggattggaagaggactgttgggagggcattgcagttgttcaggccagagatgagataggggagaccagcatagtggagggggagattcaagacatcgaaggaattacaaggtcttgggaagagtctatcacaggtcccaggtgagagtgacaaaggtgacaaggatgggtctcatttctggcttgcatgcctggaggaatggggaaactattcaatgaggtaacatctctgaaaagcgtcaggtttcggacagggtgggtggtgagacacacagagttaagtttttaaaatgttgagttttagcggcccttgagatttaaagaygtaagattagaataggatctcagagaaaaggtttgggctgaagatatcaaaatgtggcatgactcacacagctaagtctcagggttgaagcttacaaagaaagtctgaagtgagaagacaacaggtctcaggatcagcctggagggactccagtacctgtgactcgtgtagcagaagtgcaataaaatttttttataataacatgaagaagaaagaagagaaggagggaaaaggatgaaaaaataagagtgaaagagactgtattggattcaaggtctggctctgccatctcaacaagtttcttattcctccaagcctcagttccctgtctgtaaaatggaaagaaggtggttcatatctcatgtatgtactatgcggattaaataatgtaatatttgacacttagcaaatgctcagtgaacttagcaattattactctgtggatggcacaaggctggctcttaatgttatttatgggagtcatgaatgaataaatcattggttgaataaatggtaactatctcctttctcatataattattttttctgaaatcccatttgtattaagagtaatggagtcagggcggagtagacggcgtacgtgtgagttat

SEQ ID NO: 82058 - DNA, 939 bp, Homo sapiens
aatggattggaagaggactgttgggagggcattgcagttgttcaggccagagatgagataggggagaccagcatagtggagggggagattcaagacatcgaaggaattacaaggtcttgggaagagtctatcacaggtcccaggtgagagtgacaaaggtgacaaggatgggtctcatttctggcttgcatgcctggaggaatggggaaactattcaatgaggtaacatctctgaaaagcgtcaggtttcggacagggtgggtggtgagacacacagagttaagtttttaaaatgttgagttttagcggcccttgagatttaaagatgtaagattagaataggatctcagagaaaaggtttgggctgaagatatcaaaatgtggcatgactcacacagctaagtctcagggttgaagcttacaaagaaagtctgaagtgagaagacaacaggtctcaggatcagcctggagggactccagtacctgtgactcgtgtagcagaagtgcaataaaatttttttataataacatgaagaagaaagaagagaaggagggaaaaggatgaaaaaataagagtgaaagagactgtattggattcaaggtctggctctgccatctcaacaagtttcttattcctccaagcctcagttccctgtctgtaaaatggaaagaaggtggttcatatctcatgtatgtactatgcggattaaataatgtaatatttgacacttagcaaatgctcagtgaacttagcaattattactctgtggatggcacaaggcwggctcttaatgttatttatgggagtcatgaatgaataaatcattggttgaataaatggtaactatctcctttctcatataattattttttctgaaatcccatttgtattaagagtaatggagtcagggcggagtagacggcgtacgtgtgagttat

SEQ ID NO: 82059 - DNA, 939 bp, Homo sapiens
aatggattggaagaggactgttgggagggcattgcagttgttcaggccagagatgagataggggagaccagcatagtggagggggagattcaagacatcgaaggaattacaaggtcttgggaagagtctatcacaggtcccaggtgagagtgacaaaggtgacaaggatgggtctcatttctggcttgcatgcctggaggaatggggaaactattcaatgaggtaacatctctgaaaagcgtcaggtttcggacagggtgggtggtgagacacacagagttaagtttttaaaatgttgagttttagcggcccttgagatttaaagatgtaagattagaataggatctcagagaaaaggtttgggctgaagatatcaaaatgtggcatgactcacacagctaagtctcagggttgaagcttacaaagaaagtctgaagtgagaagacaacaggtctcaggatcagcctggagggactccagtacctgtgactcgtgtagcagaagtgcaataaaatttttttataataacatgaagaagaaagaagagaaggagggaaaaggatgaaaaaataagagtgaaagagactgtattggattcaaggtctggctctgccatctcaacaagtttcttattcctccaagcctcagttccctgtctgtaaaatggaaagaaggtggttcatatctcatgtatgtactatgcggattaaataatgtaatatttgacacttagcaaatgctcagtgaacttagcaattattactctgtggatggcacaaggctggctcttaatgttatttatgggagtcatgaatgaataaatcattggttgaataaatggtaactatctcctttctcatataattattttttctgaaatcccatttgtwttaagagtaatggagtcagggcggagtagacggcgtacgtgtgagttat

SEQ ID NO: 82060 - DNA, 741 bp, Homo sapiens
ggttagttttacattttgtataaacaaccctaatgccactgtagagaacaaggagaacaaggaaagccagacagacagaggtatttgtgaggagactattgcagtaggtcaagaaagagatgttgagaatctgatccataagggcagggatgatagaagatggattttggagatgtataagagcaagaataaacaggatttgggaatccccttaaggtgtgtgtagcagggagggaatagataaatgacgggggtaaaattaggataaccctagttttcaatgttgggtgtataacaataccaatatctaagttagcaagcaaagaaagagaataccattagtaaaactctgtaaaactcaatttgtgatatattgactttgatatgctagtgagacatcaaaattgtaattgtagtaggaaattaaataaatgattctgaagctttgggaaaagatgtgagccaaagataaatattagagtgttataagcttacacatgctagttcaacgattggaattaaggagagtgttcaaggatagtgtggagagagaaggaaacaatggacagaggacagaactccaggataaccctatatgatgkcacaagatgcaaaagcgagttcaaatgtgactaagaaacaatagttgagagagaaaaggagtaagaggaaataccatggaaggcgagtgtcaacagtatcatgtgcagctaaaagtgcttgtaaaattcaggacctaag

SEQ ID NO: 82061 - DNA, 675 bp, Homo sapiens
agggtcataaaattaaggccagtggaccaaatttagcctgcctcccattattgtaaataaagttttattggaacacaaccatgctcatttattacatgctgcttatagttgttttcacgcaataacagtagaattgagtgagtagatacaasaaagatgatatggcccacaaaaccaaaaatatttattatctggtcctttatagaaaatgtttgtctagaggattatattatagattatagctctccaccactactgtatgccaggtactttacttggctcccttgtgcattatctttaatgttctcaataaccttcccagttgttatgatcatgatattgcaggggaagagtgttagacaggtcaagggatctgtttaaagcagacatccggaattcaaacagtactttgtttatgttttctgactgcgagtcttttatgagctgtgctagggatataatcaccatgttacacttttaatgggaaaagttgttcttagtgccaaaacatgaccctaaaaaaatgtgctatgggaaagcagtccatatgcaatttggggaactgactctcagtccccaaagagtctttcctgataatctggctaccccaacattgtgtaccctatttcatttttattccagtaattataagtgcttgaaattattttatttatt

SEQ ID NO: 82062 - DNA, 1867 bp, Homo sapiens
agctccttgaaacgcaattccttccttctcttttgccctctttcagctcaagttcagccagcactttcagcctcccgccctggagagcttccccgagcaggcacactcacccagcagatgggcggcttgcctgtccagctgccatccgccttgcaggtgcggtgctcggagccacccttgagggagaagccctcctggcaggagtagatgagcgtgtagcccatggagggcaaatccagggccccgacgttggcatgcgttggcgtctctggctgcctgcagtggtgggctggatgagaggaaagaccctgttggactggaggagattaggggcttcaggggccctttcgaccattcccctgttcctagatagaatatcctcttcctttcccttccagtccctttcatgccaagcatccccctccctaatcctccaccctaacccaagctctgtgtctagaggaatggccaagatggagatcatgtggatatcggcttggttgactctgagttgggggaacttaagcctgcagcacttcctgaggggtaaaggagtaactgggtcaaaagcttgatatctccatcctgaggcctggccttgcagttgttagtttttgctgctgccactggatagtttttctttgctaaggcatagggattgccttccaatatcagaaaggcttttgtgtggaagtcttctgtgaggccccaaagtgtaaggactacaaagagaccgatgtcggttcgcatggggagttgtgaactccctgtcattcagagcattcaaacatgacccagatgcccagctggggcaagaggaattttcttgggatgtgggtgaagtctgcactcacggacacagtcaggtggggttccactccaggtcaggtttgggaggcaggtcctggtggtggagccctgaagcaggtagcctttttgacaacggaagaggactgtgcttccaacctgcggcaagatacaaagtcccatcagccccttcctttcagcggtgcttcctacgtctgtcccttgaccactttcacatggcccaactcctcccgcactgttgcctgcaaaactctttttctgattctccgcctggttaaattttcttcttcctttgaggcagttgataggatgcctcctccacaaggcctcatctaataccctgaacaaagttgtaatattacactctgttgtggacacggtggctgattcagagtcagaagaccctggatccgagttctggcttctgcatttactcaggacaggctgcatggaactctgtaaaccttagtcttcctaaggatacagtggggatgaccatccttgccacaatcacactggaatgttgtgacactcaaatgtgatggcggatttgacarcattttacaaaatgtgaagaagagtgcaaattaaatattgtgtgtgtgttcctttcctcaatgaaattgcaaattctttaaggatgggagacttgtctttacagatatggcccccatagaatctgttgaacgaactgccaccctccctccctgctctgctcagttatgttccctaccttaaccctccaccagcccctcactgtacaactcgacaccccgcaaccacgggctccatctctccctacccaatccacttggtgtaatgcggctagatctgtttcctatactgcaactcggattatactacttcccagttcaaacacttatgtgtccctattacctactggagcatgtgcaaatgcaatgtgtaactcttaaattccactcccttcttccatgctgaacacttttttgtcttggatttcatcatttgacttagcaaatggcacctttatccatgcagttgtgcaaataaaaaacct

SEQ ID NO: 82063 - DNA, 1867 bp, Homo sapiens
agctccttgaaacgcaattccttccttctcttttgccctctttcagctcaagttcagccagcactttcagcctcccgccctggagagcttccccgagcaggcacactcacccagcagatgggcggcttgcctgtccagctgccatccgccttgcaggtgcggtgctcggagccacccttgagggagaagccctcctggcaggagtagatgagcgtgtagcccatggagggcaaatccagggccccgacgttggcatgcgttggcgtctctggctgcctgcagtggtgggctggatgagaggaaagaccctgttggactggaggagattaggggcttcaggggccctttcgaccattcccctgttcctagatagaatatcctcttcctttcccttccagtccctttcatgccaagcatccccctccctaatcctccaccctaacccaagctctgtgtctagaggaatggccaagatggagatcatgtggatatcggcttggttgactctgagttgggggaacttaagcctgcagcacttcctgaggggtaaaggagtaactgggtcaaaagcttgatatctccatcctgaggcctggccttgcagttgttagtttttgctgctgccactggatagtttttctttgctaaggcatagggattgccttccaatatcagaaaggcttttgtgtggaagtcttctgtgaggccccaaagtgtaaggactacaaagagaccgatgtcggttcgcatggggagttgtgaactccctgtcattcagagcattcaaacatgacccagatgcccagctggggcaagaggaattttcttgggatgtgggtgaagtctgcactcacggacacagtcaggtggggttccactccaggtcaggtttgggaggcaggtcctggtggtggagccctgaagcaggtagcctttttgacaacggaagaggactgtgcttccaacctgcggcaagatacaaagtcccatcagccccttcctttcagcggtgcttcctacgtctgtcccttgaccactttcacatggcccaactcctcccgcactgttgcctgcaaaactctttttctgattctccgcctggttaaattttcttcttcctttgaggcagttgataggatgcctcctccacaaggcctcatctaataccctgaacaaagttgtaatattacactctgttgtggacacggtggctgattcagagtcagaagaccctggatccgagttctggcttctgcatttactcaggacaggctgcatggaactctgtaaaccttagtcttcctaaggatacagtggggatgaccatccttgccacaatcacactggaatgttgtgacactcaaatgtgatggcggatttgacagcattttacaaaatgtgaagaagagtgcaaattaaatattgtgtgtgtgttcctttcctcaatgaaattgcaaattctttaaggatgggagacttgtctttacagatatggcccccatagaatctgttgaacgaactgccaccctccctccctgctctgctcagttatgttccctaccttaaccctccaccagcccctcactgtacaactcgacaccccgcaaccacgggctccatctctccctacccaatccacttggtgkaatgcggctagatctgtttcctatactgcaactcggattatactacttcccagttcaaacacttatgtgtccctattacctactggagcatgtgcaaatgcaatgtgtaactcttaaattccactcccttcttccatgctgaacacttttttgtcttggatttcatcatttgacttagcaaatggcacctttatccatgcagttgtgcaaataaaaaacct

SEQ ID NO: 82064 - DNA, 859 bp, Homo sapiens
ttttcccccacagctcctggctgtttcttcacactcccagcatcactattactgctagcatgtctttagcatcattttgccctccctctgactttcagcaagcctgcacttacctccaaataaatgcatgttttcggggggcaaaggcaggttccttccttaccttattgttgcttcccccaccccatgctgcagctgagtgggtgacctttctcctcacctccgtgtgccgcatctctcacctagtctctgttaggaaccctacaggagcctgcaccccagtaaccccattttatgctgcttggaggaagagacagagagtttgagaggtcttttcagtgtgtgtttggttcccccacttctcaaagctgagagcttctttgttttaagagccacttggttaagtcaagagcattagaagagtaaaaagaagaatmcaattagataattttacctaaacatgctatagtcgactagggagtcacatagacattgattttctaatgagggcgctgttggtgattctctctgtgtgtaaagatgcttctgatcatgcctgctattacatgatacttatttctaaagtcacttttttttttttttttacattttcattgtagaaaaatatcccataaaaattgtgccccctagagggcgagggccacgggaagggggatcaggaaaacaagaatcagtctctaagctggtcctggagcagcatgacagatgtatctgagcccaagcaggagaggagccacaggcccaggctggcagagttgtgactactagaatctcgagtcactggggctcagggagccctaacttggtggcaggtgacaaatgtggcacaaaggagaaa

SEQ ID NO: 82065 - DNA, 859 bp, Homo sapiens
ttttcccccacagctcctggctgtttcttcacactcccagcatcactattactgctagcatgtctttagcatcattttgccctccctctgactttcagcaagcctgcacttacctccaaataaatgcatgttttcggggggcaaaggcaggttccttccttaccttattgttgcttcccccaccccatgctgcagctgagtgggtgacctttctcctcacctccgtgtgccgcatctctcacctagtctctgttaggaaccctacaggagcctgcaccccagtaaccccattttatgctgcttggaggaagagacagagagtttgagaggtcttttcagtgtgtgtttggttcccccacttctcaaagctgagagcttctttgttttaagagccacttggttaagtcaagagcattagaagagtaaaaagaagaatccaattagataattttacctaaacatgctatagtcgactagggagtcacatagacattgattttctaatgagggcgctgttggtgattctytctgtgtgtaaagatgcttctgatcatgcctgctattacatgatacttatttctaaagtcacttttttttttttttttacattttcattgtagaaaaatatcccataaaaattgtgccccctagagggcgagggccacgggaagggggatcaggaaaacaagaatcagtctctaagctggtcctggagcagcatgacagatgtatctgagcccaagcaggagaggagccacaggcccaggctggcagagttgtgactactagaatctcgagtcactggggctcagggagccctaacttggtggcaggtgacaaatgtggcacaaaggagaaa

SEQ ID NO: 82066 - DNA, 859 bp, Homo sapiens
ttttcccccacagctcctggctgtttcttcacactcccagcatcactattactgctagcatgtctttagcatcattttgccctccctctgactttcagcaagcctgcacttacctccaaataaatgcatgttttcggggggcaaaggcaggttccttccttaccttattgttgcttcccccaccccatgctgcagctgagtgggtgacctttctcctcacctccgtgtgccgcatctctcacctagtctctgttaggaaccctacaggagcctgcaccccagtaaccccattttatgctgcttggaggaagagacagagagtttgagaggtcttttcagtgtgtgtttggttcccccacttctcaaagctgagagcttctttgttttaagagccacttggttaagtcaagagcattagaagagtaaaaagaagaatccaattagataattttacctaaacatgctatagtcgactagggagtcacatagacattgattttctaatgagggcgctgttggtgattctctytgtgtgtaaagatgcttctgatcatgcctgctattacatgatacttatttctaaagtcacttttttttttttttttacattttcattgtagaaaaatatcccataaaaattgtgccccctagagggcgagggccacgggaagggggatcaggaaaacaagaatcagtctctaagctggtcctggagcagcatgacagatgtatctgagcccaagcaggagaggagccacaggcccaggctggcagagttgtgactactagaatctcgagtcactggggctcagggagccctaacttggtggcaggtgacaaatgtggcacaaaggagaaa

SEQ ID NO: 82067 - DNA, 607 bp, Homo sapiens
ctcatagctttccaccttctgttctgttctcctcctacgtgtgtttggtactacawacataattcaacacatgcataccactctatttttatgtattttttaatgtctatcatacttactcagaccactccataacacacacatggcttttctcctaaaactgttaatggcagttccctgggactaaaacctcggaactgttttcaagtcatctctctcgtcattaccttccactaacagtcaccaccactttccccgaatgtccagctgctctctaccccttctttttcactcctatcacactgctgaacccaacttccttggcatacctcatctgtttataacaagagcctctaacttggaccctctgcagatcacagcctatccactctctcttacagagaaattgctttcatcctattcctgtaaccttgaataggcctgggcccatccccttgactgtaaaatgaagaactggtctcaacattctccatcctcactgtgctttgaagtcagatgtcactgggcatgaatcctggtccagccactctgccaaacttagacaagtatgtctgctcaaaattccatctcactatgcataaaatgg

SEQ ID NO: 82068 - DNA, 1451 bp, Homo sapiens
agtgcatgtaagtttcactaaaagtaaatcatatgatattacttgtaacttgtttttcccacttattctgatagaaattctgtaccatttaatagtcttgtatgctttcatttttaatgactgatcaataatccattttaataaattcccttgaagcacttaagtcacctcttatttttgattatatatgtaatgctgagaaagatatccttcactataccatcaagtatttgcctgggataaggtcaaggtcaaatgtacagaaaatgtgaggatctgatattgttaatttgccctacacaatgtttgacccagtggcacatgacaatacccactcctccacaccccctctaacaatgggtaatgttattttttaaattgtattgtatagatttaatttttaaattttgattagcatatctttggggttgaacacttcgcacctttttacactcttgttcatgttctctatttttctactactgtgttcatcttattgatctggaataccttttcatatatccaagatattaatttcatatatccaggatattaataaaggaagtatatgttaatatatattactatatcatggatttatatatttatatattaatattaatccatatatccttgataatggagagaaaacagtatatttattgaaacttttgcctacaaggaacaaaatcaactgaagcatattagagccataaaggatctttatataaggatactgagggatccttcatagaaggatactaatattaagctttgtcatgtgtattacaattcgtttccccagcgtattttatttctaaaatggaaacatcactacttcactaatctattttgaagattaaagaacatgcaggtraagtcatgagtggaagtaatcatcataaaaacaaaagcaaaattgctgctacttactgaggacttaataaggtcccgtatcctctcagtccttatgatgaacctactaggcaggcatttccattcctcttttacagataaaatgtaacagatacccatagacaataaagtgatagttagattttaatttttacaaataagctctgtattgatcctaaaaaagacttggtaacagaattattcccagctgtgtttgtagtaaaatttcctccttagaagtaatcccagggactactcccatttctgccagccacaaaccaagttactaggttctgcaccaaccagtcttttaagtttctctagtaaattctcttcttccccttcctctatgacatatctttactattaagtgtcattctgatatcaaaaaaaatatttttggctaggagccaaggctacattatcagtcactacaagtttaatctgatgacagatactttgctaacattacaaatacattaaaggttcttcaccggcttatatgttagtgacgtctatagtaacagtgtacatct

SEQ ID NO: 82069 - DNA, 836 bp, Homo sapiens
ttaacccattaccaagcaagtgcactaatgaaggaatggttcatagctagtaacctatgtattttcttagttcaacatcattgacttccatcagtggatcacagatcaaaatggtattcagaataaaggacacttttaaaacagatttacgagaaggctcttgtatcatgcaagcatttcacaaagaatttccagtctcacttgccaccaatgccatgtaaagggtctgtttaagataggcattgagaggtgacaacgtgctgtcagcccttgcctgctctcggcgccccctctggccgtgcttgaggagcccttcagcccgccgctgcactgtgggagcccctctctgggctggccgaggccggagccggctccctctgcttgcggggagatgtggagggaaagccgtgggtgggaactggggctgcacacaacgctcgcgggccaggagttctgggtaggccaggagttctgggtaggtgtgggctcggcgggccccacacttggagcggccggcccctgggcagtgaggggcttagcactccagccagcagctgyggagggtgcgctgggttccctagcagtgtcagcctgccagcgctgcgctccaattctcaccaggcctcagctgcctccccgtggggcaaggctcgggacctgcagcccaccatgccggagcctcccccaaatgccgtgggctccagcgcagcccaagcctccccaacgagcaccgccccctgctccgcggcgcccaatcccattgactacccaagggctcaggagtgcgggcgcacagcgcgggactggcaggcagctccgcctgcggccccggtgcg

SEQ ID NO: 82070 - DNA, 743 bp, Homo sapiens
tacataagatatacatgctctatcaagtgaaaaaagtgattactaaatagtatatgatatccattttatgtgtgtttacaaagcaaaaattcttaattgattgaaatagaaaaacatatccttcttatgtctacccataaattccaatcctgcccccctgaagttgagaattaactttgctctcctttccaccccgatagcctttcaactattcctggtagggcatagtttctagtccatttatttccctggcttaccctcttaaaatgtagaacttgtttgaaaacaagccctcggaggtagcctaacgaagtcagaaaacaacgggatgattatctccttaattctgagtactgtgccattaaagctgccagagaaggccacccatatcaaatggttggctgaaaccttcaatctttttaacaagagctgctactgatccaggtctcccattctataaacatgcaactttcccccgactctaggaagctgcattcagtagagcttaattgtgtatttgttcatgttgattgccttcaactttttgcagcsttttttttttctatcctgatgtctgacatccagttggttagcttccctcccaacaatgggatagacacaaatttgatccacctttcttgatcaaagaccactcttctcaaactagaatatcatgacattgggaaagggctactcaaacattttatctggtgataatttaaagtattttaaaacaaacatgg

SEQ ID NO: 82071 - DNA, 754 bp, Homo sapiens
caaaacaatatatcttttcacttataagaacatcagtgtgcatttataactaatgaataaatttttttttttttttttttccttttgagacatggtcttgctctgtcacacaggctgaagtgcactggcgcaatttcatctcactgcaggctcaacctctcaggctcatgtgatcctcctgccttggcctctcaaagtactaggattgcaggcatgagccactacactcgcccagaaatttgtttttagagtaactaccatgccattaacaaacctaacaaaattaacaatttcttatcttcaagaactcaattcatattcaaatttttatcatctcaaagctggtttgttcaaacaggagtccaaagtccccatactgcatgtcattactgagaccatactgggactaaggcagggaggaatgagccctaagtgagtctgtaacaagcgagaaagaagctcattcaactaaaagaattaaattggaggtctggcccaagaaagtggaaaaataaacaaagaaaactaaaactattcaggaacatcatgaagcagggcaagagctagagagaaagtaccaaaggggctagsaatttgagtaaggagagtaactggacaaatgacagaattatcttaatggaacaaggactttagctttaaaaatctcactttggatcaatgaagtaatgagaaacagttactaaaaagcaaaaccgcatagtcattgtatctaattcctcaaattttagtttca

SEQ ID NO: 82072 - DNA, 754 bp, Homo sapiens
caaaacaatatatcttttcacttataagaacatcagtgtgcatttataactaatgaataaatttttttttttttttttttccttttgagacatggtcttgctctgtcacacaggctgaagtgcactggcgcaatttcatctcactgcaggctcaacctctcaggctcatgtgatcctcctgccttggcctctcaaagtactaggattgcaggcatgagccactacactcgcccagaaatttgtttttagagtaactaccatgccattaacaaacctaacaaaattaacaatttcttatcttcaagaactcaattcatattcaaatttttatcatctcaaagctggtttgttcaaacaggagtccaaagtccccatactgcatgtcattactgagaccatactgggactaaggcagggaggaatgagccctaagtgagtctgtaacaagcgagaaagaagctcattcaactaaaagaattaaattggaggtctggcccaagaaagtggaaaaataaacaaagaaaactaaaactattcaggaacatcatgaagcagggcaagagctagagagaaagtaccaaaggggctagcaatttgagtaaggagagtaactggacaaatgacagaattatcttaatsgaacaaggactttagctttaaaaatctcactttggatcaatgaagtaatgagaaacagttactaaaaagcaaaaccgcatagtcattgtatctaattcctcaaattttagtttca

SEQ ID NO: 82073 - DNA, 524 bp, Homo sapiens
attattcaaacttagaaaggaatgaaatttggacacatgttacaacatagatgacccttgaggacattacactgggtaaaataagccagccacaaaaagacagacagcgtgtgattccacttatgaggtacctagaatagtmaaaattacagagacagaaagtagaatggctgccaggggaagaggggggtggggagttgttgtataacagatatagcgcttttgttttgaaagatgaaaaagagttttagagactggttgcgcaataatgtgaatgtaaacaacattactgaattgtgcaattaaaaaaacagttaagatagtaaattatgtgttatgcctaacacaaaactttaaaaaaatttaaggtaattttttttgcctcagcaattcttattaccttaaagacttacatggacatacgttgatgtgggtataaaattgttaactgttgcattatttatactataaaacaccaacaccacactaaatgatcattaaaataaagccttaaacaaagtaca

SEQ ID NO: 82074 - DNA, 740 bp, Homo sapiens
tttttgagttaaatatagtcttccattatgttagattatattgttttcaattattcgctaacctccctgaaagaggattatatcccccattgtcacgtgacttatagcatctccagatggaagaattaaccacacttctctaccacattgctggcaggcctggccatatgactttcttcagccaagtgaaggcgagtagaagtgacacacaagcagaagtgttaataactatgaatgaactggtcacttcctttttaatttttatttatttttttgagacagggtctcactctaccaagcaggctggagtgcagtggtatgatcacagctcactacagccttaacctccccaggctgaggtgatcctcccacctccacctcccaggtagccgggactacaggkgcgtgctaccacacacggctaatttttgtattttttgtagagatggggttttgccatgttgcccagactagtcttgaattcctgggctcaagcgatctatccacctcagcctcccaaagtgctgggattacaggtgtgagccaccgcacccggctatggtcatttcttttcttaccctctgccataagtatgtcccagagtggagtggctcattaagtctagaaattaaaatgtattgttttaagtcactgagcataactagactaatatgagtaatgaaaccacttcatttttaaagctgttttaatgatcaatggaatggaatgaatgatcatta

SEQ ID NO: 82075 - DNA, 1914 bp, Homo sapiens
tagttccttgcagagagcagaatcagggactaattaataaatattcttatcccaagataaggaacttcatattacttgttgagtgagatgtgagaacctgtgattactgtatcacccccattcttcccttttctgggaatgtctttcagctagtgtttccatgttccaccattacacattgggggtatatagagcagattttttgtcttatacttagtgcatagttccaaagacaaacataaacatacatggtgaagagacaagggcaaacttttctactttccaggaattttgaactctaactgtataggatttaggtctcccatagggagcaagtgagtgtgctcaatgtgtcagaaagaaatcaaaccaaataatttctcgtgaaaataatggactgtgttagacattaatggttattgtcaaatattcagttcttctcacttctgaaagtgctgccaaatttagcaacttattaaatttaaatttcaaaaaaatccacaaagtgtagtttttttgatatatcatactgttatactaaaactatgtttttctgtaaaattaaaatttaactgtgcatcctatattttacccaacaattccactctgtgccacatgacagactctgcttccaaggctcaagtacarttaagaaaagtcacttggctagttttactaaaggcttttgaagaaagataatgcatgtcacctctagataaaagtatttaattgccgctatgcaactcttttcacattcttctatctctaggatccaagagatagatccaagagatcttctatctctaggatcaattatacttgaattaaagtagactttaattcaaaagagattatacttgaattaaagtagactttaattcaagatgctggaataagatggaagcaacccgtattgcttattcagtgggctctaaatgagtaacaataaatatgggctggttgatacaaccaatatcaaatcatcactatgacattcagatttttatctttttccttttcttttaccacagcctcctaccatttaatattatcttactgaatctcttacctcacttgctctccaactatcctgtacttttgctactgcatgtatacagactcataggccagaggcacagtctcaagatttaaaaaaaatgaataaataaacaaaaacagctatggtatctttgaggaaagaatggaattatactgagttttagtactagtcgaatttctatgctcaagctctctttcagctcaaataaaatgatcgcttcttatgagaaaattagctgcagatctagaaaagatttattctttttgaagaacattagtgtactgcaagatgaagaaattagagagattatctcattatagtaatctctatttttctagagacaaaatatctctctttatcttgttcatctagataggctaaatttattggcaatgggatcaaagataccttgtgtcaacatgtcagaaagaaataaaagcagcacagtccttcagcactaggttgagaagataggattttaatcaatgttgacattggggaaattctgaataggcatagaagaagtcataataaagacaataaatatgagtaggtaaaacaataaattgagcatctttgggggaagagaaatcacaagaaagacaacaatgttcattttatcaaaagctcttttttgttggttttgtttgaaactgggttgctaattaggggtgtagacagagtaatttttcatatcgaaaagttccagggaaaagctactccatgtcagtaattccttgaaacaagagaaagttaccttaccaactgtgagaacccataagagaaagcagctaggttggcttctctggtacagtagaagcagagaaatggtcaaaaacattccctaacaagaa

SEQ ID NO: 82076 - DNA, 578 bp, Homo sapiens
ataaataacatgcagtcggctaacgaataatatggacactaaagaggtgtacatactatccactcaaggaaaccaccagtcatacaaacgtgcgactcctgtgtgtttctggcctaattgccgatttctcctcagtggtgtgttggtggaatgcatagactggcagctttgggaggatacttctccccagaactttttctcttattatctgatcccaggtcatccactaatccagtttctgtccctgagcagactgctcatccactaatccaggctcctcacctttttgtaccagttccttatgcttatcaaggagagaaaagacacccttcagcatggtaggcagggctcttcacaatctagcaacccctgttcagcatctsccctctccagccactcccacacctaagacatggtgttccagcccactcatctctaagtcctccaaacgtgccacacttgctctcctcccagcctttgcccaggctgttactctgcccaggacattcttcccaatccccactctccacccttcatacctctgcttggctgtcacctccttttaacaaactttgctg

SEQ ID NO: 82077 - DNA, 1337 bp, Homo sapiens
atcctcccttgactcagcagcagtcccaggtgggtggcttcctgtcttgctcttctstgttccccatggaccttattgcttccttgatgaatcccagtgtgtcctcctgaaccatctagttgaagagctagtgtctactggctgctctatctcctctctgtgagagtggtgctcactagctgcttctagtcagccacattggtactcactctcctcttttacttaaagtcaactgattctacatattaatcacatctacaaaatattttcaccacaacatctagaccagtgactgatcaggcaactgggctccatagacaagttaacacataaaatttaaccattacagcaaacaaaataaacccatggagggtagagttgccaagctaacacctacccatgaaacccttaaatttctaacaagtcattgtgcaaatgctatagtaaccttatcatcagtgtctattattctatgaatatacagtgcaggtagatgaggctttacagaaaagtctgccattataaatacactggtattctgaaacaccaccatcttcgaatggaccaagactataagtgataaaagcatagtagttcttcagattaatggatatgaaataatttcccttgcagtttacttaaaatattttattgttaattaggatacagagtgaaactgcctgctaaactctgctaagaaatttatgaacctttaaaaagcatgtatgcatttttcactaggttaagtcaaacattggtagcattacagcttacataaaatacaatctgacacagctctatgtccttatatctacaggtctaaaaaccatatcctttgcctatcagtttatataccttatatgataatatctgtctcctaatcaattactttaaaaggaggaatagtccaacctgataatttcaagggtttaaatatactgattccactcctgattagcatgctgcatgatcatttgaatttctctgtaacccagtttattgccctaggcttattgttttatctttatctgcaacaggttgaatttttggccaagtgcagtggctcacgcctgtaatcccaccagtttgggaggccgaggcgggtggatcacctgaggtggggagttcgagaccagcctgaccaacatggagaaaccctgtctctactaaaaatgtaaaattagccaggtgtggtggtgcatgctggtaatcccagctacttgggagggtaatcccagctactctcctgaggcaggagaatcgctcgaagccaggaggcagaggttgtggtgagcagagattgtgccattgcactccagcctgggcagcaagagtga

SEQ ID NO: 82078 - DNA, 1337 bp, Homo sapiens
atcctcccttgactcagcagcagtcccaggtgggtggcttcctgtcttgctcttctctgttccccatggaccttattgcttccttgatgaatcccagtgtgtcctcctgaaccatctagttgaagagctagtgtctactggctgctctmtctcctctctgtgagagtggtgctcactagctgcttctagtcagccacattggtactcactctcctcttttacttaaagtcaactgattctacatattaatcacatctacaaaatattttcaccacaacatctagaccagtgactgatcaggcaactgggctccatagacaagttaacacataaaatttaaccattacagcaaacaaaataaacccatggagggtagagttgccaagctaacacctacccatgaaacccttaaatttctaacaagtcattgtgcaaatgctatagtaaccttatcatcagtgtctattattctatgaatatacagtgcaggtagatgaggctttacagaaaagtctgccattataaatacactggtattctgaaacaccaccatcttcgaatggaccaagactataagtgataaaagcatagtagttcttcagattaatggatatgaaataatttcccttgcagtttacttaaaatattttattgttaattaggatacagagtgaaactgcctgctaaactctgctaagaaatttatgaacctttaaaaagcatgtatgcatttttcactaggttaagtcaaacattggtagcattacagcttacataaaatacaatctgacacagctctatgtccttatatctacaggtctaaaaaccatatcctttgcctatcagtttatataccttatatgataatatctgtctcctaatcaattactttaaaaggaggaatagtccaacctgataatttcaagggtttaaatatactgattccactcctgattagcatgctgcatgatcatttgaatttctctgtaacccagtttattgccctaggcttattgttttatctttatctgcaacaggttgaatttttggccaagtgcagtggctcacgcctgtaatcccaccagtttgggaggccgaggcgggtggatcacctgaggtggggagttcgagaccagcctgaccaacatggagaaaccctgtctctactaaaaatgtaaaattagccaggtgtggtggtgcatgctggtaatcccagctacttgggagggtaatcccagctactctcctgaggcaggagaatcgctcgaagccaggaggcagaggttgtggtgagcagagattgtgccattgcactccagcctgggcagcaagagtga

SEQ ID NO: 82079 - DNA, 749 bp, Homo sapiens
gagcatttcagattatgaacaaaactattcatgggatagtgaatagttgggatcccatgggtgggatggatgttgagggagggcctcatggaggagggggcatttcaatcgtgacctaaatgtcaaagatctaaatgtagagtgttcccaggagagggaagagtgcatacaaagacccagaggtggaaatgaatgtttgattggaaggcagtgaatagatggcatagtgcaaccagtgggcctggtaatgtggagcccttcttggattttattttgagtagtttagaaagccattgggatgctttaaccagagtgtgacataatgtactttacatgtttagatcatyattctggccactgggtggtagatggactgtagtggggcaagagtgaaaactgagggaccagttgggctcttgcaggaatctcagtgatgacggtggcttggatctaggttgggaatggaggacatggagccaacatgacttgctgctgggttggaagtagggaagaagaaaaactgaggcttgctttagacttctggtttgagcagctggtaggtcagatagtgtcatcataatgagttgagaaagattggaagaaagactaggttttcttttcttttttttttttataagaggggatctggttaaaaaaaaaagaactatttttgggctgtttaaaatgttagatgtttctaaccagattttaaatgagatttttcctattgttttgggattttaactgaa

SEQ ID NO: 82080 - DNA, 733 bp, Homo sapiens
cccaaaccagtcacttaaggtgtcctgcctccagccttgccatgccaacaacctccaaccagagcatttctgattgatagatcatataaagcctttctactccgctgcctacctttgaatctctgccaatcacaagtgatggtagctgactcccttgctatcgcaagccctgaataagtaacctctgtgtgtcctcatttaggtgatcttcatttattttcagaagacatagtgctctcctttttttcttttcttactgattattctagtgcagtgttttgctactgagggtaattttcccctccttctaagaacctgggacattgcagtgtctgcagataatttggttgtcacaagtggggtatgctactggcatctagagggtagaggccagcaaaggtgctaaacatcctaaaatgtacagaacagsctccaacaacaaagatttatctgtactagaatgctaatagtgctgacattgagtaatcctgctctagtggtagaaatttctggcctccatgcagtagggaggtgtgtgtggaggggtctttttatgcaagtaggacagtagtactaacataagacaaaggtgactagcaatctagctacacaattcactctgactaggctcattcttgcagtaaatatagtctttgcttctgcttccaaaatagaatatgacctcctttgtcctgaacaaatagcaaaggctaacatttcattttgtgcctct

SEQ ID NO: 82081 - DNA, 772 bp, Homo sapiens
attatttttatttattcttttttcctctcacttgaatattggttcaattatgcaaagctttcaagaggaaagcttcatattgaaaacttctgacctctgtgcatttttactaaccaaacattcataattttttttcctctccctgacttgctacaatgtggtaggtggcgacctctactggttrtcagataatgtagccaaagccgcattgacaatttcagcaaataacctcttctctaagatgcgtaggagaaaataaccagaatgcattgaaaattaaatgtttaagaaaaataacaaactcttgctggttttaacgcggtttgaaggtctacatttaataatttctttagttcaagaaatgtgttttggtttttaccctcatctgtatttattttttgagaataaaatcatggttgctatagagtcatcagaacacgtatttcagatttcaaaagcaatgcctgaagttgcagttatgcaaagtaaatgaattctagagaccttcggtatatcatagtgcctatagttaacaatatggtattgtgtacttaaaaatctaagagggtacatctcatagtaagtattcatttcacagtaaaataaaaataaacaatgtttggtaggattttacttataatcaaaagaaacacaaacctgttgtaaaaacattcaaatactccagaagtgatatcagttaaaaaaaaaagtgattttctccatcagcacttcccctagtctaactttacaggattcagattaatttaacatg

SEQ ID NO: 82082 - DNA, 2108 bp, Homo sapiens
tttcctgcctcctctgtatccgtctggagaaattctgtgcatttccaagcatatatctcacatggtgatttttttttttttttaatagagagacaaggtcttgctttgtcacccagcctggagtgcagtggcatgatcatagctcactgcagcctcgaactcctgggctcaggcaatcctcccacctcagcctccccagtagctaggactacaggtgcaaaccaccacacctggatatttttaaactttttgtagaaacaggctctcactatgttccaggctggtcttgaactcctggcctcaagtgatccttccaccttggcctctcaaagtgctaggataacagatgtgaactgccaagcccagccacatatggtgaaatttaagggtgactaattttagacattaaaatggtccagaaaaatccatggcacaagtctagaggaggaaaaatttcaacagcagcacatgtgagcaaaactcaggtttttgttaacagtaacctcaataggagtcaactgtgaagtggctgccagaaaagatcaggcaaccttgggttgcatttgtagacttcagtgtctgaagcaacaactgcaaacaacagatgtctcctgactagctgcttgtatgtgccggcctctgtgctggggcactggggacactgcagtgactgaatcasccacagtccaggccctcatagaccctaccttctgggggacaagggaagtgatttttgacatctcatcctgctctgcactgtccagaccctaccgaatcctgtgtcctgccctagccagctccctttaataaagaggaacattaaccaactagaattggtgcaggtgggtgtgagcagaagagtgaggaaacctgataccatgtcatgtgagggaaggtggcagaaattggataggattatttagccttagagaaggtaagagatgaaaggacttagggaagacataatggctgtctaacctaacagctgtgagggattgtcatttagaagacaggtttcatttcttttcttttcttcctgaaacagctttttgtaaaacaagaaagcagaattgcaacacaatttaaatgtctgtctaggtcacaaaagggatgcaaaatgtttgtaatatgattagtatgtattcatatagtgagtcattcttacacctatacataagattattccatgattaaaggtagcccagctctaataaccataagctatattagtggatcccttttcctattataacattttagtattacttctgatattgattcccttaacaaatggagtctacaaactgaattttaaaaaattgttaaaagtgactaaaactctgtaaacagaggagttgagtttacaaaaaattctgggagaacaagcaggataaaactgagcaagattatcaataagtgtacatctgaaactcccatttttcacagttctgatactaatacattcttaaggaattttgcaaaagttaatctgctgagtagaaatataccttgagaccaaactctttgtaactgttctcttccagatgtggtacataagattagtcaaagttggccagatgcggtagctcacgcctgtaatcccagcactttgggaggctgaggtgggcaaatcgctagagctcacaagttcgagaccagcctaggcaacatggcaaaacctcatatctacaaaaaaatacacacaaaaaaattagccgggcatgatggtacacgcctgtagtcccagctacttgggaggctgaggtgggaggttggcttgagcctgagccgtggaggttgcagggagccaagatcatgccactgcactccagcttgggtgacagagccaggccttgtcccctccccccgtccccccgccaaaaaacaggttagtcgagcttaatctactctcatatatttcccaaaagatctactctgtgccagagataacaaaaatctggagtgaaaatatttggagttggttactagtattttcccaagtacttttccatcctatttctattttcccttaagcttttctattttaaacacacacgaccataatttatatcttttcagatacaaagtaggtaattttgtaaaaaaaa

SEQ ID NO: 82083 - DNA, 583 bp, Homo sapiens
taaaaatatgtgccaaggaaatagcccaaaagaagaaaaatggcaatatgagtgggcaatttaaaatttcaaaggattggaaacaacctgcaggctcaccaacagggtaggagttaagtcagtcgtggcatactcttggtagtcagtagaatgccagcatttctacatggtaggggcttgggatacactcttttgtaagagggaggaccagggacttaaatctgcatttagatagagtatatgctctttttacttaratggaatatttatttggggttgcttgtgggtaatgaagaacgggactggagggcattaaaacctgccacaaccatctctctattggcaaactattacacagtgaataaaataactaccaggaagtatttgggtttttttaagtttttaattttggggggtacattgtaggtttatgtatttataggttacttgagatattttgatacaggcatgcaatgcttaataatcttatcagggtaaatggggtatcaatcacttcaagcatttatcctttgtgtcacagacagtccaattatacgctttaggtatttttaagtttataatt

SEQ ID NO: 82084 - DNA, 619 bp, Homo sapiens
ttaaggacttggggaaatggggtttccctggaccaagtttctggtataaaaatactcaaagcatgttacaaagtttgcttggaagagatagtagctcgaaagatagactatgtttgggggggggcgttatgggttgggcgttgaggggggtgatattgatcccaaggtgagaattggttcctgtggacaaaaaaaaaaaaaaaaaaatctggtaatacagtggtttgtgcccctccaaagcttaaccccacccgagaaaatattattccttagtatttcatttttctggttggrttttcttgggtatagcatgtgcagcactgacattgagttcacgaaaaatacacaacatggacgccacagcagtgctacaaaactatggcaagtgattgggctttctccttttaaagcaggaatcccaaatactgcacaacttcattaaccaagggctttctcttgatcgattgttccacctcagcgggggaatatgtgtgcctattggctgccattggctgccttgcagacgttgtttgtgtttgatctttagtgcttttgtgttcacttggacttggagaattaaacgaaaatagattatattttattatttaatcctacaaaa

SEQ ID NO: 82085 - DNA, 1217 bp, Homo sapiens
aaaatttaatgaaattacgctctagtgatagaataccaggtagcaggtaaattgtccacattcatgttctgctgaattctgggaactttcagaatcacttccaagctcgcagaagtgggcacaaaaaagaagtaaaaaatgaagctcaatgttaacaatatccagtctacacccactcagacttgcctgccccttgctgcaaagccacccattctctggtccccagtttcccatctgctcccatccwagggagtggcttcttggtagccaagatgacagtcctgctaagcactacaccctacccatgagagtgctgggctcacaatcctaagacactacttgacatcccaccccatcccaaaccctgtaccaccatccaggacacgtcccggatacttgttgctgttctgatcataccatgtagatgttatcccatcccaggcttttcacttaggctcaagctgttcctggaaccaagtcaggtccaggggcattttctcgaggcccaataatgagaagcagacaaactaggaaagaagggaatttattgctataaccggatacaggaagaaggccagagataattccaccagaccaactcaaagtgttacaattttcttagtgcttacgtaggttggagttatgtgcctacttgcagtatagcatttgcctaagtctattggtaactagttttgtctcaactagaaggtcagaggcaaaggatgcttgtgaagtctgattaaaagggccccagtaccttcaaggcctgtctactgtggtaccagagtgatagttccccagtaccttcaaggcctgtctactgtggtaccggagtgatagtttctatcttatctcctttacagcttggtctgggcctgtctactgtggtaccggaatgatagtttctatcttatctcctttacagcttggtccagagagctgccttagactctccaatgaatctattcaaacagctgcctatgttcccttgacttgtctcagattccgttgacctgaggcaggtcctgacactagaaatgtaaggctgtctctattattttggcttgctccaggttaggagaagcctatgcaagtcccctactaacattatgtttcatttctagctttgatgtctgggcactgacttccctagatttaactatttacccaatgttaaggcagtgctgtggaaatctgtctgtgtaattggagtgcta

SEQ ID NO: 82086 - DNA, 1217 bp, Homo sapiens
aaaatttaatgaaattacgctctagtgatagaataccaggtagcaggtaaattgtccacattcatgttctgctgaattctgggaactttcagaatcacttccaagctcgcagaagtgggcacaaaaaagaagtaaaaaatgaagctcaatgttaacaatatccagtctacacccactcagacttgcctgccccttgctgcaaagccacccattctctggtccccagtttcccatctgctcccatccaagggagtggcttcttggtagccaagatgacagtcctgctaagcactacaccctacccrtgagagtgctgggctcacaatcctaagacactacttgacatcccaccccatcccaaaccctgtaccaccatccaggacacgtcccggatacttgttgctgttctgatcataccatgtagatgttatcccatcccaggcttttcacttaggctcaagctgttcctggaaccaagtcaggtccaggggcattttctcgaggcccaataatgagaagcagacaaactaggaaagaagggaatttattgctataaccggatacaggaagaaggccagagataattccaccagaccaactcaaagtgttacaattttcttagtgcttacgtaggttggagttatgtgcctacttgcagtatagcatttgcctaagtctattggtaactagttttgtctcaactagaaggtcagaggcaaaggatgcttgtgaagtctgattaaaagggccccagtaccttcaaggcctgtctactgtggtaccagagtgatagttccccagtaccttcaaggcctgtctactgtggtaccggagtgatagtttctatcttatctcctttacagcttggtctgggcctgtctactgtggtaccggaatgatagtttctatcttatctcctttacagcttggtccagagagctgccttagactctccaatgaatctattcaaacagctgcctatgttcccttgacttgtctcagattccgttgacctgaggcaggtcctgacactagaaatgtaaggctgtctctattattttggcttgctccaggttaggagaagcctatgcaagtcccctactaacattatgtttcatttctagctttgatgtctgggcactgacttccctagatttaactatttacccaatgttaaggcagtgctgtggaaatctgtctgtgtaattggagtgcta

SEQ ID NO: 82087 - DNA, 1217 bp, Homo sapiens
aaaatttaatgaaattacgctctagtgatagaataccaggtagcaggtaaattgtccacattcatgttctgctgaattctgggaactttcagaatcacttccaagctcgcagaagtgggcacaaaaaagaagtaaaaaatgaagctcaatgttaacaatatccagtctacacccactcagacttgcctgccccttgctgcaaagccacccattctctggtccccagtttcccatctgctcccatccaagggagtggcttcttggtagccaagatgacagtcctgctaagcactacaccctacccatgagagtgctgggctcacaatcctaagacactacttgacatcccaccccatcccaaaccctgtaccaccatccaggacacgtcccggatacttgttgctgttctgatcataccatgtagatgttatcccatcccaggcttttcacttaggctcaagctgttcctggaaccaagtcaggtccaggggcattttctcgaggcccaataatgagaagcagacaaactaggaaagaagggaatttattgctataaccggatacaggaagaaggccagagataattccaccagaccaactcaaagtgttacaattttcttagtgcttacgtaggttggagttatgtgcctacttgcagtatagcatttgcctaagtctattggtaactagttttgtctcaactagaaggtcagaggcaaaggatgcttgtgaagtctgattaaaagggccccagtaccttcaaggcctgtctactgtggtaccagagtgatagttccccagtaccttcaaggcctgtctactgtggtaccggagtgatagtttctatcttatctcctttacagcttggtctgggcctgtctactgtggtaccggartgatagtttctatcttatctcctttacagcttggtccagagagctgccttagactctccaatgaatctattcaaacagctgcctatgttcccttgacttgtctcagattccgttgacctgaggcaggtcctgacactagaaatgtaaggctgtctctattattttggcttgctccaggttaggagaagcctatgcaagtcccctactaacattatgtttcatttctagctttgatgtctgggcactgacttccctagatttaactatttacccaatgttaaggcagtgctgtggaaatctgtctgtgtaattggagtgcta

SEQ ID NO: 82088 - DNA, 557 bp, Homo sapiens
cccaagatttcattagtaatatcagagaacaagaagagatagtacatccttaaaacagactacataagaatcttttttgaaaaaaggaatatatggagaacaaatacattttgagaaaaatagctctgggaaattaattatatgggagtggaaarttcaaaaattcaacaggagagttgggagacagtgtagaaaacccagcagaaggtggaacagaagagtcccgggctcgccacgccccgtttccatggagacaagccacgtttccactgatgcatttccacagcttatagtccaaacactctggcaaggggctgacaaggaacatggtctaggtaatcggggtctagaccattgcaccagcttcagccagtgcaagaatcatgaggccactcaggaatcaagttcaggtgaacttgatctgccatttccctcctttccttccccttccccttccctctttccttccccttcctcttccccttcccctcctctcctctccttccctccttcctgaataaagggtctgaaattattgagtaggtagtctaggacaa

SEQ ID NO: 82089 - DNA, 562 bp, Homo sapiens
aaacaaaaataatatataaataaaataagtaagtacatatataaataaaataaaaatattaccatttattgttattagctaagcttctgctagccaaaagatcaactcmcaggtacttacccccttttctctcctctccagaggctcagctggtccattctctggaaactcgcagtaaatttcctgagtaatctgacacactggcccttgcctctgtgtcaaatgtggctcaaagcccaggtgccccgcctgctcccttaattaagaacagcacgaaaatacacatacctcaatctttttgaagcctgcatctacccagtaaagcagctggctgaggggttcaaaagccaaagcttctactgtctccaggccagaattgatgatcacctcttgccctgtgcttccattcaaacagaggcgcttaagagagaaaagtaataataaatgctaggaactgttcaaacgaccccctgccaagtcagtcccatgaagggtaaccctttattcaactggcaggactggcaagggatgagatgttttacgttagtaaactttccagaca

SEQ ID NO: 82090 - DNA, 669 bp, Homo sapiens
tggatccccaagaacatcaggacaccaacataccagcccaagacagcctacctccaggcagcaagggggagaaaactaaactcctgacttggttaagcaatttttatttctagtctattaccagcaacctaatatagttctaaactgacagaggyaatttaatttttcacatataatttggatcatgatataaatgctgttgtattacttaactttttccattaacagtgtatcttactgtcccacaatttaaaattttatcattggcaatgtatcttagacatctttccacttaacagctattggtgggcactttagttatttccagaaacattcttaaacacacacacatataaataagcatgtatttattactttttcagaactgcacaataccattggtaggatgcagtcttagaagaattattaagtcaaaatttgtatttttgatagctatcatgaaatagccctcctgaaaggttgtaccaactaatacatccacaaatgcacaaacttcatcaactagtagaaatgatttaaatatttgaatctaattcaatcttatagagtctgagaatttataagaagattttttttaattttgtgttttcatttctgataactaaaaataaattctgctgggtgcagtggctcatacctgtaatccca

SEQ ID NO: 82091 - DNA, 1262 bp, Homo sapiens
tgttggagtattctgaaacctgtaagtcactcatcaatcctctttttagtttcaagggccctagcctcagaaaactgcatcaatgtcttctgaacggccatcaagctcaaagccctgctcgtttcttcaggaaagcttattaacaaatacattcagcacagcttgcaggaagcarcaagtttcatgtagagtaccacggcgtcatcatgcaagtgtctgtctgagcatggccagtaagagaactggtggtttcggtccatgaaagagctggggttcctggaagtttttggaatgcctggccacgacattggttggagtctgactgggccccatgcagaaaatgccacactctgctgagctgacatctttgtgttctgctaggaggcccaggaattcataaaagaaaagaactaaggcacttgaaaatttcgaaggtaaaactgtcacccgtgcaaatcaaatcaaaattaataatgtttttctgactcaatgcaaaaggcgaaaacaccaatttagttgttgctgcggctgcttttcatgcagtgctttagagttacagatcccacatgtggttgaaaaccggttactttcctgttggcttaaactcaaaggcatttgtatgtgtgctaaaaacatttcttactatgcactgtgttggaagttccttattcatttctgctcttctatttaattgaaatctgaggttaaagtgggaaaattgaagcaagaccctgagaggaagcttactaatacaaatgagttctttatgatatgaaaacattaccttttgtttgattgatgttttttgacactcagtgtttggggacattttagtttttgaatcactttgactgtggtcaggactgtgcttgttacccagaccagtgaaagtaaccatattggtttaaacactaacaagataaactagtgaaagcagccataatggttttaaagactaacaggataatggcgtttcttgtttagcggcataaattgtgaatgtgttccattaaatttccatatggcatcatgacaatgtaaacacagaccatcaagaaggtccatagactggccactgagagaactctgggggcccattgtgatgctctctggctagtccatcggggtctacatgaaagaacccgagtatctccagggagtttctgtgggctcagtgatcaggggacgatgtagtgttcagggctgggcacatagtatgtgttcaatagatacttatttggatgattgagggtgaccccacc

SEQ ID NO: 82092 - DNA, 2009 bp, Homo sapiens
tttttaacaaaggagctgcttaatcgctttctggagtgtatacccccgtccccatgttgcttttgagatgggtctctcttctgtttccattcgactcacaatctgtgtttagagtaaatcaagaatgaaaagaaaatttaccttcacaatgaaactgcaatttatttcttgagagctttgccggcttcacagactttcaatctgtttaaccacagcttcgtctcgctcctcggcataatacatctttccacctaagcacccagtatatagcaagcatttcgctcagcatcgagagggaatattcattttcaactgcagaacgtcagcttctaatggatttggaaccacagcagcatgaggattcaaaagtctctgcttaagttctgggctgagcagagagctcagttgaagattgagcacaacaggcttactgtgggccgcgaaggttgtggcagtgtgcacgatggccgtggtctacacgcttcccaacaagaggtgtgcagccatggtcggcatatctgaaaagtcagtccttggacggactaggggaggaaccaagacattatgtgtatgataaaagcaatgtgttgcccaaaacaaaaagcactgtttcttcactctgacagtgtattttttctcataaataatacacgatgcatggtagagtgatgttatactctgaaaatcatcttgcctctcagcaaatcacagtagggacactgaaatggttcccgcagtggggtgacagaggcagctcacagcccacggccggaggatggctatgcctggctgtgcacagtaaatgccaggggcctttcctgcaagtctcccatccacttagtggggagcacagattccatttcatttaatgatttagaaaaaggctcctaaacaacaattgataccttgtaaatagctagtacattgaatgtctttattactattcttcctaagcattcaactaataaaacagatgaataaataaaagtgtattcagtgaggttcaaataaccagtgttgaaatattacatacgtgctgatatattgaatttgagaggttttgcatgtcgagttacgtggtgtaggacctgacttgtaattaattcaaagcctcattaaggttgggaagttattgcctcatctgtaccagctgtagtcatgattgataacctaggaaaggtgaaygggtgcaagcatcaaccttactcacaaagtcaatagaaagagctaattggctaaaccgaattcataggctttacacagtggaatttagctactgtttcaaagtgcacggtaacctgtgacaaccactgactgtcaagcagcagtcccctatcagcctgcgtcagtgtggtcacagactggccttctgtttctccacacagaacatgttgcccagggggccttggctgcaggcagactgcgtgctgctcttttccctgataccaccctctactccctgggaatttgaataaaagatcagagaaacctcagaggtcagggatccacagggaagaacatgggatgggggaatgaagaggacacagcccagaaggcagagcagggcgcatcaggtctctgaggacccagacctgccaggataatgttgttgattgaagtcagcacagcttcctctaagaagctcccagactccgaacgttggttcatcctgactctgaggttgctgtggagtagctgcatttcaaggtcacaggtggaaaaaactgtatatggggatcgcattctccagccttgacatccaggtggggatcccactctccagccttgacatccaggtggggatcccactctccagccttgacatccaggtggggatcccactctccagccttgacctccaggtggggatcccactctccagccttgacctccaggtggggatcccactctccagccttgacatccaggtggggatcccactctccagccttgacctccaggtggggatcccactctccagccttgacctttaggtggtgatcccactc

SEQ ID NO: 82093 - DNA, 2009 bp, Homo sapiens
tttttaacaaaggagctgcttaatcgctttctggagtgtatacccccgtccccatgttgcttttgagatgggtctctcttctgtttccattcgactcacaatctgtgtttagagtaaatcaagaatgaaaagaaaatttaccttcacaatgaaactgcaatttatttcttgagagctttgccggcttcacagactttcaatctgtttaaccacagcttcgtctcgctcctcggcataatacatctttccacctaagcacccagtatatagcaagcatttcgctcagcatcgagagggaatattcattttcaactgcagaacgtcagcttctaatggatttggaaccacagcagcatgaggattcaaaagtctctgcttaagttctgggctgagcagagagctcagttgaagattgagcacaacaggcttactgtgggccgcgaaggttgtggcagtgtgcacgatggccgtggtctacacgcttcccaacaagaggtgtgcagccatggtcggcatatctgaaaagtcagtccttggacggactaggggaggaaccaagacattatgtgtatgataaaagcaatgtgttgcccaaaacaaaaagcactgtttcttcactctgacagtgtattttttctcataaataatacacgatgcatggtagagtgatgttatactctgaaaatcatcttgcctctcagcaaatcacagtagggacactgaaatggttcccgcagtggggtgacagaggcagctcacagcccacggccggaggatggctatgcctggctgtgcacagtaaatgccaggggcctttcctgcaagtctcccatccacttagtggggagcacagattccatttcatttaatgatttagaaaaaggctcctaaacaacaattgataccttgtaaatagctagtacattgaatgtctttattactattcttcctaagcattcaactaataaaacagatgaataaataaaagtgtattcagtgaggttcaaataaccagtgttgaaatattacatacgtgctgatatattgaatttgagaggttttgcatgtcgagttacgtggtgtaggacctgacttgtaattaattcaaagcctcattaaggttgggaagttattgcctcatctgtaccagctgtagtcatgattgataacctaggaaaggtgaatgggtgcaagcatcaaccttactcacaaagtcaatagaaagagctaattggctaaaccgaattcataggctttacacagtggaatttagctactgtttcaaagtgcacggtaacctgtgacaaccactgactgtcaagcagcagtcccctatcagcctgcgtcagtgtggtcacagactggccttctgtttctccacacagaacatgttgcccagggggccttggctgcaggcagactgcrtgctgctcttttccctgataccaccctctactccctgggaatttgaataaaagatcagagaaacctcagaggtcagggatccacagggaagaacatgggatgggggaatgaagaggacacagcccagaaggcagagcagggcgcatcaggtctctgaggacccagacctgccaggataatgttgttgattgaagtcagcacagcttcctctaagaagctcccagactccgaacgttggttcatcctgactctgaggttgctgtggagtagctgcatttcaaggtcacaggtggaaaaaactgtatatggggatcgcattctccagccttgacatccaggtggggatcccactctccagccttgacatccaggtggggatcccactctccagccttgacatccaggtggggatcccactctccagccttgacctccaggtggggatcccactctccagccttgacctccaggtggggatcccactctccagccttgacatccaggtggggatcccactctccagccttgacctccaggtggggatcccactctccagccttgacctttaggtggtgatcccactc

SEQ ID NO: 82094 - DNA, 2009 bp, Homo sapiens
tttttaacaaaggagctgcttaatcgctttctggagtgtatacccccgtccccatgttgcttttgagatgggtctctcttctgtttccattcgactcacaatctgtgtttagagtaaatcaagaatgaaaagaaaatttaccttcacaatgaaactgcaatttatttcttgagagctttgccggcttcacagactttcaatctgtttaaccacagcttcgtctcgctcctcggcataatacatctttccacctaagcacccagtatatagcaagcatttcgctcagcatcgagagggaatattcattttcaactgcagaacgtcagcttctaatggatttggaaccacagcagcatgaggattcaaaagtctctgcttaagttctgggctgagcagagagctcagttgaagattgagcacaacaggcttactgtgggccgcgaaggttgtggcagtgtgcacgatggccgtggtctacacgcttcccaacaagaggtgtgcagccatggtcggcatatctgaaaagtcagtccttggacggactaggggaggaaccaagacattatgtgtatgataaaagcaatgtgttgcccaaaacaaaaagcactgtttcttcactctgacagtgtattttttctcataaataatacacgatgcatggtagagtgatgttatactctgaaaatcatcttgcctctcagcaaatcacagtagggacactgaaatggttcccgcagtggggtgacagaggcagctcacagcccacggccggaggatggctatgcctggctgtgcacagtaaatgccaggggcctttcctgcaagtctcccatccacttagtggggagcacagattccatttcatttaatgatttagaaaaaggctcctaaacaacaattgataccttgtaaatagctagtacattgaatgtctttattactattcttcctaagcattcaactaataaaacagatgaataaataaaagtgtattcagtgaggttcaaataaccagtgttgaaatattacatacgtgctgatatattgaatttgagaggttttgcatgtcgagttacgtggtgtaggacctgacttgtaattaattcaaagcctcattaaggttgggaagttattgcctcatctgtaccagctgtagtcatgattgataacctaggaaaggtgaatgggtgcaagcatcaaccttactcacaaagtcaatagaaagagctaattggctaaaccgaattcataggctttacacagtggaatttagctactgtttcaaagtgcacggtaacctgtgacaaccactgactgtcaagcagcagtcccctatcagcctgcgtcagtgtggtcacagactggccttctgtttctccacacagaacatgttgcccagggggccttggctgcaggcagactgcgtgctgctcttttccctgataccmccctctactccctgggaatttgaataaaagatcagagaaacctcagaggtcagggatccacagggaagaacatgggatgggggaatgaagaggacacagcccagaaggcagagcagggcgcatcaggtctctgaggacccagacctgccaggataatgttgttgattgaagtcagcacagcttcctctaagaagctcccagactccgaacgttggttcatcctgactctgaggttgctgtggagtagctgcatttcaaggtcacaggtggaaaaaactgtatatggggatcgcattctccagccttgacatccaggtggggatcccactctccagccttgacatccaggtggggatcccactctccagccttgacatccaggtggggatcccactctccagccttgacctccaggtggggatcccactctccagccttgacctccaggtggggatcccactctccagccttgacatccaggtggggatcccactctccagccttgacctccaggtggggatcccactctccagccttgacctttaggtggtgatcccactc

SEQ ID NO: 82095 - DNA, 1144 bp, Homo sapiens
aggagatttaaataacaaaagacttctaaaaggagtcctgaaaataaaatttagagtgaaacattttttgtttgagagtaggtaaaatgagagtaggttatttgatttaatagtggtctctttggatctctaaaaatctttgcatgtgcattcaaaaagtaaatagaaatagtaaatgccagttgattgaaaatcatgatacttttgagatgatactaaatttttacaatatgatataaatcagaatagtgtagacagccaatttacataattcaaccccagaaaattaactacatacattcactatgtaatgacttaattcacttaagttgagccaagtgtcataaatttgcaatgaacatttttactttttaaaaratgagctaattttagatttgtcacagaaaactactattcattgacatcgcaaattggaattattaacagaaaagctcatttcaaatatggagaacataagagagtgtagtgattgggatgtgttctcaacatcaaaatgtaagaagaaaatttaatagccagaacttgagaaaaatataatgggctacccgatgaatcacttggcaggaatattatcaatggaattaaataatggcctactgtcagtttaattcaatcatctctttagttagtatatcaaatttcattcgtatattatgagaggtgatgccatcattttatctgcctgtctcattctgactatagaatttgagcaacttcaccattcttcgttcttgttttgatggtcaaagttgctgaataattgcttctttcctcctttgtgtgtcttaggacaaatacagcacaatctcagagttaacttaacatccaaactgttattacattctctgtcctcagttagttggtagaattataatcagttaaaaacagatttaaaaaaaaacagcttttactgaacatagatatatagcagtgctactttataaaataatagtgtggctaatataatggcatttatttaaacaattattgagattatttttctcatctctcctcattttctgacctgagaaatacagttccaagttcacgagtgaatgtaaatgaagaaacagggaaagcattttagaatttcttgaaatctggcaccaggactgattgtaca

SEQ ID NO: 82096 - DNA, 664 bp, Homo sapiens
tagtgggggtgtataagttcaatcattagttctgccattgtggaaagcagagtggcaattcctcaaagagctaaaaacagaactactgtttgacccagcaatcctgttatgggtatatacctaaaggaatataaatcattctaccataaagacacatgcacgcatatgttcactgcagcaccattcacaatagcaaagacatggaatcaacctaaatgcccatcaatgacaggttagataaagaaaatgtggtacatacacaccatggaatactatgtagccataggaaagaatgagatcatgtcctttgcrggaacatggatggagttggaggccattatccttagcaaactaatacaggaacagaaaaccaaataccacatgttctcacttataattgggagctaaatgatgagaactcctggatgcaaagagggaaacaacagacactggggtctacttgaagatggagggtgggagaagggagagggtcagaaaaaacaactactgggtacctggcttaaaacctaggtgatgaaatagtctgcacaacaaacctcatgacatgagttaacctatataacaaacctgcacatgtacccctgaacctaaaagttattttaaaacgtactagtttaacttaaacaacaaataccacctatgc

SEQ ID NO: 82097 - DNA, 554 bp, Homo sapiens
catttttacactattgtcaaacagtcctttgcaacaacctcctctctgtttatatatactctctacagcctcagtactatctgttttgacatatagagtcttctatcctctgtgaagatttagaactttatttattattcctatgtatggttgattgtatgataattggtcaacaaatgttttcttctcctttcctcacccagcctccaaaggagtatacttctctaattgacgttgagtttgatcatatgggatgatgtacaaatgggatgttacaagacgtgacatgatcagagacccgaataactgtatgatcagagacttgcatgactgcgtttgccctctggaattcctatatttttcctctggtagtgactagctatatctgacaaagcaatacaaaacagagataaacycagaaaataattggctggtttacaagaagaatttaaagagaatatagagaatccatagatttcagtgttgaaaactggagtggtttctcactacataaaatgtataacctttatggacagcctcagaattcaggtact

SEQ ID NO: 82098 - DNA, 1177 bp, Homo sapiens
gttaaagcatgaataaacatgaagttaaaatgttttaattatttctataataacttattctacattgatattctattctgataatataatatattgatatattatcattaacatayatgataatatatatcattctgtaatacattataatatataatgctatatataatattctattatagaataatatagaataataattctataatatataattatataatgacagaattataatattcaatattattattcaattattattattactttcttcagcatggaagctactggataatctagtagtcttgttttgaatacagagtggttcatttacagaggttcttgaaggtgctaaaaggcataagaaatatcaaagtctaggcaggagtagccatgggaggaatatggagatggcttggctaagaaaccatgtttcttggagaactccacctttcttttactgcttagcatgagccaacacgatgggtaaaagtccatcattcccataatcccctcaacattttggaaaaagtaatcttttattatactgaagggaagcaaaatatctcatctcaataaaacctattaaggttttatttaggtttagaattcaagaactccagatagtggttcaagctaactgcagagaccccaagcagttacatatttttcaagtcccaaattaacaagaccaaattaaagataaaagggagacctttaataatagattttaattaaaatacaaaaggtttatcgaatactatctttctacattgcaatgtgatggtgacataggtgacattttacagtatcagagaacatgctgcttcatcagtcttcatcttacataaattccgagaagatgctaatctcaaaattttcaagaaattgagggaaaaatcctaactataatttaatgagctcttcctacctgtgccagtttccctgtgtattatataatttaatcttcttaacaacattttaggtaggatattacccaagcagacagaagaaaattatgactcagaaaaatgaaatcctttgctcaaggtcattcagctgataaatagggccaggatttaaatgcatcagtctgaatctagaccggtgtttttttcttcattatctccttccctaagaaatgatatagagcttttcttttattccagaataa

SEQ ID NO: 82099 - DNA, 1177 bp, Homo sapiens
gttaaagcatgaataaacatgaagttaaaatgttttaattatttctataataacttattctacattgatattctattctgataatataatatattgatatattatcattaacatacatgataatatatatcattctrtaatacattataatatataatgctatatataatattctattatagaataatatagaataataattctataatatataattatataatgacagaattataatattcaatattattattcaattattattattactttcttcagcatggaagctactggataatctagtagtcttgttttgaatacagagtggttcatttacagaggttcttgaaggtgctaaaaggcataagaaatatcaaagtctaggcaggagtagccatgggaggaatatggagatggcttggctaagaaaccatgtttcttggagaactccacctttcttttactgcttagcatgagccaacacgatgggtaaaagtccatcattcccataatcccctcaacattttggaaaaagtaatcttttattatactgaagggaagcaaaatatctcatctcaataaaacctattaaggttttatttaggtttagaattcaagaactccagatagtggttcaagctaactgcagagaccccaagcagttacatatttttcaagtcccaaattaacaagaccaaattaaagataaaagggagacctttaataatagattttaattaaaatacaaaaggtttatcgaatactatctttctacattgcaatgtgatggtgacataggtgacattttacagtatcagagaacatgctgcttcatcagtcttcatcttacataaattccgagaagatgctaatctcaaaattttcaagaaattgagggaaaaatcctaactataatttaatgagctcttcctacctgtgccagtttccctgtgtattatataatttaatcttcttaacaacattttaggtaggatattacccaagcagacagaagaaaattatgactcagaaaaatgaaatcctttgctcaaggtcattcagctgataaatagggccaggatttaaatgcatcagtctgaatctagaccggtgtttttttcttcattatctccttccctaagaaatgatatagagcttttcttttattccagaataa

SEQ ID NO: 82100 - DNA, 1177 bp, Homo sapiens
gttaaagcatgaataaacatgaagttaaaatgttttaattatttctataataacttattctacattgatattctattctgataatataatatattgatatattatcattaacatacatgataatatatatcattctgtaatacattataatatataatgctatatataatattctattatagaataatatagaataataattctataatatataattatataatgacagaattataatattcaatattattattcaattattattattactttcttcagcatggaagctactggataatctagtagtcttgttttgaatacagagtggttcatttacagaggttcttgaaggtgctaaaaggcataagaaatatcaaagtctaggcaggagtagccatgggaggaatatggagatggcttggctaagaaaccatgtttcttggagaactccacctttcttttactgcttagcatgagccaacacgatgggtaaaagtccatcattcccataatcccctcaacattttggaaaragtaatcttttattatactgaagggaagcaaaatatctcatctcaataaaacctattaaggttttatttaggtttagaattcaagaactccagatagtggttcaagctaactgcagagaccccaagcagttacatatttttcaagtcccaaattaacaagaccaaattaaagataaaagggagacctttaataatagattttaattaaaatacaaaaggtttatcgaatactatctttctacattgcaatgtgatggtgacataggtgacattttacagtatcagagaacatgctgcttcatcagtcttcatcttacataaattccgagaagatgctaatctcaaaattttcaagaaattgagggaaaaatcctaactataatttaatgagctcttcctacctgtgccagtttccctgtgtattatataatttaatcttcttaacaacattttaggtaggatattacccaagcagacagaagaaaattatgactcagaaaaatgaaatcctttgctcaaggtcattcagctgataaatagggccaggatttaaatgcatcagtctgaatctagaccggtgtttttttcttcattatctccttccctaagaaatgatatagagcttttcttttattccagaataa

SEQ ID NO: 82101 - DNA, 590 bp, Homo sapiens
tatatatacacacattctagagtgtatatatatatatatatacacattctagagtgtatatatatatatatatatatatgtcttaacactggttttttggaacgaaaatgatatttattgcaagagttttagattattcacaaaccactctcttttccctaatattgccattgtatcataaaatattaccttcaaagcaagatttgcaaaataatcaaatccacaatggtggagagaacgtatacatggtataagaaaaatatttggtctttgtccctagttcctgacatagatagcctaaagcctttggaatttcctgagtaataaggtaataggagtgtcatttgttctaatgagatagccattgacaggtgcctgtataactttaggatggaactggtctccagaaagaccaagccttgattagaagcttggaactttargctctacccagtgacctctgggctggagattgagctctattaaatttcttgagcaggagattcaggagcttctgtattggctaacacatccacatgcctggagggtgacacaccccaactccatagacacagaggctcctgctctta

SEQ ID NO: 82102 - DNA, 2709 bp, Homo sapiens
tgcattaaagccttataataaaagggttattgtaatttaagttaaatttcttactgaaatgttgtttaatatagctctaacagtcattatgagtaatgtttatgctaatgaactcatccattaatattcacagaagaggatctgaagaggagggaggaaagcagtagttattccaggcagtgaaaattagatgaatctttgtagggacaatataaaaacctagttagaatgataatgaaaaaattgcgcatgtctttgggaaacaatgagtccaaccatgtacagagggccttgaaagctaggcagaagaattcaaatttgatctgataggcagggaaaaaaaccactgttaaattcatcatcttaggacccatgtaataaaaacaatgtttaagaatgactaggctattagtgacacttaatttgcctcaaatagagagtgagtcaggaagcctactttattacttgaatgatggctatattgagacattaggctacaagagtaagacatgcttgttatataaataaatgattgagcaagtgaactgtgttaaagggcaagcagacaatggcttggtcatttttcagtcaaagaggatgaaggaccaggttgaaatagatggtcccacaattttatgtgtgggtgacggggagaatggtggcatgaagagagagacctatagggaaaatttgttcattgatattctaaagtgatataaaaattaaaatattcagtagaaattttagacatgaaattagattttgaagaacttgcctttatatgtcatatatattttttacatatatacatatatacattttttttgagacaaggtcttgctctgttgcccaggctggagtgcagtagcgtgatcttggctcactgcaacctctgcctccctcccaggctcagaaggtcctcttgcttcagcctcccaagtagctgggactacaggcgtgtaccaccatgcctgtaaaaatataatttttatattttttgtgcaggcagggtttggtcatattgcccaggctggtctcaaactcatgagcttgaacgatccacttgccttggcctcgcaaagtactgggattacagggatgagccaccgtgcccaactgacatattttctttttacatagatatgcaaagtaaattacattaaatatgtagtatatcctgggacatgtttttccccaagtagaattactttttaaattatattgrtctaggctgtacttaaaatctactttagtgttcaacaatgagaacacatggacacagggagaacatcacacaccagggcctgtcaggtggggggcaaggggagggagagcattaggacaaataactcatgcatgcggggcttaaaaactagatgatgggttgataggtgcagcaaaccaccatggcaaatgtatacctatgtaacaaacctgcacgttctgcacatgtatcccagaacttaaactaaaaaaaaaaaaaaaaatccactttaatgacagtcaccccagaagccggtagactggattaaaatgatcttattaaatgtaattcatatataaatgtctgtgaatttaagtattataattcccatttcatagataacaaaaaaatatacgacagatttttaaagggatcagctgaggaccaatagatttttttcttttatttttttttaagacagggtctcactctgtttcccaggctagcatgcagtggcttattgtagcctctaactcctgggctcaggcaatcctcctgcctcagcctcctgaggacatacctgggactacaggtgtgtgccaccacatctggctaatttttgaattttttatagagatgggggtctcactatgttgccctggcctcaaacccctaacctcaagcgaccctcctacctaggcctcccaaagcactgggattgcagtcatgagccactgtgcccaccccagattttaatgaactgaatggataagcaatgttgaaacccagctgtctctaatttatccacaaaaattgacaaaagaaacaacaaaacaatatacaatagctgataatcccaatgtaaataataaacaaaatctgaaatatattttgccacattaatcttaagtcaggtatacctgactctcaaactagtagttcatgataagattaagaaagattacttttcagaaatgtattctgcctgttgagacctgggaatgtaattttcactgtgagcaacaacttggggttggaggcagaatggttgggatgggaggacagacctcttgaatctgagccctaagacttctaatagtacctaagactaagaggatacgaagatttgatattatcatgaaacagtatatctaattcttaccattaataactggcgtgtaaacaacaatcccaaccaagtttgggtctgatacagttgtgtccagaataaggcccccaatgctgaaagagataaaattatataatttagagaagagggaagagaacatacttgaagttattctgtacatacagacacccctcctttttaaaataaaatattcacacattttaaaaatagagcaaaaataaaaatattcaaagtaaaaatcaatgtcaacagtaaaatgttgaaaataaaacacggcataagctctagccccaaatttcagaattctgatgtctaagatatgctacttgtgaaaagaaaaagcatacgctttaaa

SEQ ID NO: 82103 - DNA, 459 bp, Homo sapiens
ggcccactatttgaaaacctcacattcggagcaggccactttatatgcgggagggatcccaagctaactgaccaacagaaaagatgctaaaaaaatgtgtcctatcatgtgcctgctccaactgatgggtaatgtctgcctttaagccccagaatggattctccaggcacagtgtggaagagtgctgtggttgattagcaatgtctgccttgggtgaggaaaggggaacactcctcaagtgcctcctactgtcatctccattcagcctagcaccacatccccatgtagaagtgttgtcttctactgcttgccacgtacaagtgtgaaatgccaaggtgagactcgtacacttggggatttgcaatggtttttacccctcatgaaggtcagaggtggactatttgtacacatacacacrtgcacaccctctcacgtcctccagaggctgaaagactatca

SEQ ID NO: 82104 - DNA, 459 bp, Homo sapiens
ggcccactatttgaaaacctcacattcggagcaggccactttatatgcgggagggatcccaagctaactgaccaacagaaaagatgctaaaaaaatgtgtcctatcatgtgcctgctccaactgatgggtaatgtctgcctttaagccccagaatggattctccaggcacagtgtggaagagtgctgtggttgattagcaatgtctgccttgggtgaggaaaggggaacactcctcaagtgcctcctactgtcatctccattcagcctagcaccacatccccatgtagaagtgttgtcttctactgcttgccacgtacaagtgtgaaatgccaaggtgagactcgtacacttggggatttgcaatggtttttacccctcatgaaggtcagaggtggactatttgtacacatacacacatgcacaccctctcacgtcctccagaggctgaaagacyatca

SEQ ID NO: 82105 - DNA, 1052 bp, Homo sapiens
cccttgggaaagaagtgatgcaagtcagtagctagagagatggagaaaagttgagggtttggaacagtggctcccaaccaggaatgattttgccttcctatggatagatccccacaacaaaaacttgctcagttcacaatgtcagtaatgctgagactggaaagccctacattggagaaatattaatttgggatagaacctatgkcttttagtaactgaatggaaatgtaggtgaggaagagggaaataagaagggaaggaggattgccacgaattgagtttgagcaaccatagctggatagtggggccattattggagatcagttaattaggagcagaaacaggttttggggaaggctctcagttaactatgagacatgctgaattaaggttcaggtaaaacatccaggagaagttggagtggttctagagccttactactcaaagtgtgatttgtagaccagcaacatggaaattacctgggagcttgctagaaacccagtgtttcaggccccacaccagccttcctgcattttagcaatctccccaggtgattcacatgcttcacatttgagaagcccctgtctaagcacaagagagagcctgaggagaagctgtggctttgggagatggggtcatgtttcattactgtttactcttccagcaaccctgagatgtgtatgatcaggtccactgtgtctggttgtgcaggctgtgcactgcacaaaggtaggcccaagatggggttgacatttgtcatttactctgaaggactggatgcctttttcttaccccacttgccaagttatgggcccaaaagctgtacccacccagaaaatgaattgtcaaatttgcacaaaagctctgtgacttagcagtggcccaaatataatgatttcacatccctttatctgcagttctgaaatccacaaaactctgaaaacgaaatgttttttcatagatttgcagcaagctcacttggcagagaaacctgaccttagctagcatgagactaattatagtctttatttatcccacttactgtgaatatt

SEQ ID NO: 82106 - DNA, 1227 bp, Homo sapiens
  misc_feature (1)...(1227): n = A,T,C or G
ggtgtcacccgttaaaagcttatcgtagcgcctggctatggtaagtgcaccgtgtatcacaaacattaaaaacaaaatggtaggccgggcactggagtttgtgcctgtaatcccagcactttgggaggccaaggcaggtggcttccttgagcccacgtgttcgaaaccatcctaggcaacatggcgaaaccccatctctacaaaaagtacgaaaattagctggccgtggtggcatgcgcttgtagtcccagctaccggagaggctgaggcasgaagattacttgaacctgggaggtagaggctgcagtgagtcgagatcacagcactgcactccagcctgggcaacacagcgagactccgtctcaaacaaaaaaagaaacaaagacaagtgcggcatggttccacctatgtgaggcatctgatgtcagactcaagagacagcagctggggagggaatggggagcaatggtttcatgggtatggagtacggcctcgggagcatgagaaagctctggagctgttacacaacagtgtgagtgtacttcacacgactgagcactgcactcagaaacgattaagatgatacattttgggtgtgtgtgtgtgtgtgtattttgagacagagtctcgctctgtcacccaagctggagtgtagtggtgtgatctcggctcactgcaacctctgcctcccgggttcaagcgattctcctgcttcatcctcctgagtagctgggactacaggcgcccccgccaccatgcctggctaattttttgtatttttagtagagacggggtttcaccatgttagccggcatggtctcgatctcctgatctcgtgatccacccacctaggcctcccaaagtgttgggattacaggtgtgaaccactatgcccggcctgtgtgtgtgtgtttttaaccacaattagatttacaatgacaaaacaaaaccaaaaagccacccaccaaaacaaacaaacaaaaatctagttatgccaaaaaaggatggacgactcccatgtccaccaaaggaacttcctgaaatcaggcacagcctaaggaaaggagatgggtgaggcgggcagaggagcctgctgttattcctgacactaatttccagaannnnnnnnnnnnnnnnnnnnnnnnnnnnnnnnnnnnnnnnnnnnnnnnnnnnnnnnnnnnnnnnnnnnnnnnnnnnnnnnnnnnnnnnnnnnnnnnnnnntccacc

SEQ ID NO: 82107 - DNA, 1227 bp, Homo sapiens
  misc_feature (1)...(1227): n = A,T,C or G
ggtgtcacccgttaaaagcttatcgtagcgcctggctatggtaagtgcaccgtgtatcacaaacattaaaaacaaaatggtaggccgggcactggagtttgtgcctgtaatcccagcactttgggaggccaaggcaggtggcttccttgagcccacgtgttcgaaaccatcctaggcaacatggcgaaaccccatctctacaaaaagtacgaaaattagctggccgtggtggcatgcgcttgtagtcccagctaccggagaggctgaggcacgargattacttgaacctgggaggtagaggctgcagtgagtcgagatcacagcactgcactccagcctgggcaacacagcgagactccgtctcaaacaaaaaaagaaacaaagacaagtgcggcatggttccacctatgtgaggcatctgatgtcagactcaagagacagcagctggggagggaatggggagcaatggtttcatgggtatggagtacggcctcgggagcatgagaaagctctggagctgttacacaacagtgtgagtgtacttcacacgactgagcactgcactcagaaacgattaagatgatacattttgggtgtgtgtgtgtgtgtgtattttgagacagagtctcgctctgtcacccaagctggagtgtagtggtgtgatctcggctcactgcaacctctgcctcccgggttcaagcgattctcctgcttcatcctcctgagtagctgggactacaggcgcccccgccaccatgcctggctaattttttgtatttttagtagagacggggtttcaccatgttagccggcatggtctcgatctcctgatctcgtgatccacccacctaggcctcccaaagtgttgggattacaggtgtgaaccactatgcccggcctgtgtgtgtgtgtttttaaccacaattagatttacaatgacaaaacaaaaccaaaaagccacccaccaaaacaaacaaacaaaaatctagttatgccaaaaaaggatggacgactcccatgtccaccaaaggaacttcctgaaatcaggcacagcctaaggaaaggagatgggtgaggcgggcagaggagcctgctgttattcctgacactaatttccagaannnnnnnnnnnnnnnnnnnnnnnnnnnnnnnnnnnnnnnnnnnnnnnnnnnnnnnnnnnnnnnnnnnnnnnnnnnnnnnnnnnnnnnnnnnnnnnnnnnntccacc

SEQ ID NO: 82108 - DNA, 1227 bp, Homo sapiens
  misc_feature (1)...(1227): n = A,T,C or G
ggtgtcacccgttaaaagcttatcgtagcgcctggctatggtaagtgcaccgtgtatcacaaacattaaaaacaaaatggtaggccgggcactggagtttgtgcctgtaatcccagcactttgggaggccaaggcaggtggcttccttgagcccacgtgttcgaaaccatcctaggcaacatggcgaaaccccatctctacaaaaagtacgaaaattagctggccgtggtggcatgcgcttgtagtcccagctaccggagaggctgaggcacgaagatyacttgaacctgggaggtagaggctgcagtgagtcgagatcacagcactgcactccagcctgggcaacacagcgagactccgtctcaaacaaaaaaagaaacaaagacaagtgcggcatggttccacctatgtgaggcatctgatgtcagactcaagagacagcagctggggagggaatggggagcaatggtttcatgggtatggagtacggcctcgggagcatgagaaagctctggagctgttacacaacagtgtgagtgtacttcacacgactgagcactgcactcagaaacgattaagatgatacattttgggtgtgtgtgtgtgtgtgtattttgagacagagtctcgctctgtcacccaagctggagtgtagtggtgtgatctcggctcactgcaacctctgcctcccgggttcaagcgattctcctgcttcatcctcctgagtagctgggactacaggcgcccccgccaccatgcctggctaattttttgtatttttagtagagacggggtttcaccatgttagccggcatggtctcgatctcctgatctcgtgatccacccacctaggcctcccaaagtgttgggattacaggtgtgaaccactatgcccggcctgtgtgtgtgtgtttttaaccacaattagatttacaatgacaaaacaaaaccaaaaagccacccaccaaaacaaacaaacaaaaatctagttatgccaaaaaaggatggacgactcccatgtccaccaaaggaacttcctgaaatcaggcacagcctaaggaaaggagatgggtgaggcgggcagaggagcctgctgttattcctgacactaatttccagaannnnnnnnnnnnnnnnnnnnnnnnnnnnnnnnnnnnnnnnnnnnnnnnnnnnnnnnnnnnnnnnnnnnnnnnnnnnnnnnnnnnnnnnnnnnnnnnnnnntccacc

SEQ ID NO: 82109 - DNA, 3335 bp, Homo sapiens
cccctccactccaccctagactgggctggataccccccttttacctccagtgcatctctggtggattgtattttctaaatatgcccacaattatgtctcacatcccacatgttcttcttacagtgtaattccgagactcttcccggtgagaggtgggagctagttcccttcccttggaattgaggctaggtcatatgattcagcttcctcttggttctcttgggatgctgtgaggaagcccaaactgccctgtgtagaggcccatgtggagaaaaactgatagcattgagagctatgtgagacagccatcttgaaagtggatcctccagctccccacagtccacccctttgggagtagaagtgagctgtccctgctgagccctacccatattgcagattcattggcaaaatacagcagtggtaggtaactagaatagcatcctatgtttgacatgcagggaggcggtatgttagttggatgggctatgactaccttggtactcattagttgtatgacttttggcaagttacttaatctctctctgcttcagtgttgtttttcagtataaataaaaatcgtacctatgccttaagtttgttgggaggattaatgttggtaaatgcagctctacaggtaatacagatgagtcatgtgagcatctcctcagacatgcctctgatcattcagccatcgctctcgtgattctgtgtgtctttatagtactttcactctattcataatatgtttatatataggtatgtgtatgtacaggttgagcatccctaatcaaacacccaaaatgctcctaaatcggaaacttttacatgcctacatgataccacaagtagaaaattctacacacaagtacctaacacaaactttgcttcatgcacataatttttttttttttttttgagatggagtctcactctgttgcccaggctggagtgcagtggcgtgatcttggctcactgcagcctccgcctcctggtttgaagccattttgcctcagcctcccgagtagctgagattataggcacttgccaccacacctggctaatttttgtatttttagtaaagacagggtttcactgtgttggccaggcttatcttgaactcctggcctcaagtgatccttctgcctcccaaagtgctgggattacaggcgtgagctgccacacccagtccaggcacacaattatttaaaatattggccaggcacggggactcatacttataatcccaacactttgggaggcctaggcaggaggattgcttgaggcgaggagtttgagaccggcttgggcaacataggaagaccctgtctctacaaaaaaataaagaattagccaggtatgggggtgctactctgaggcaggagcattgtctgagctcgggagtttgaggttacagtgagctatgatcacaccactgcacttaagcctttactcccattcccactttgatggattcgcttcacttattcattcaccagctttttgggtttttctttttagtgcttccggtgtgcctagaatacctagtacttggggtgcatatccatttgtatttttgaatccttaatctttggcttccaggataaagatcagtcaggtttctaattctgtgtgcattcttmcagccaaaccgtgtactctactgacccatgatcaagtggctgttctcccaacagcagcccatccatgtggcctccctaaacttagctgtggtgctggatgcattaaccttatcgtgatgtatgattggatgttatagtatcaagaccaaatgatggatccctttactcagctccaaggtacagccagattaacatttggtacagtagtaaaacacttgagactcgtcataaatttagccccaaaggttagagctttaggaatttctgccatgggttgccatggttctgccacaggctgaggcagaccattgagacagatgccagaatattgggaccacattgtattataacttttgatattttacttttgaggctgtttaaagtattgttgtgtatgtgtgtgtgtgcgtgctatttcaggagtaggagtagggggttgggctatttggagaatctgatggaaattatagcaccattttccaaaaataatacacatccacagacacacacacacagagtatttagaaacagtttcaggatggccaggttagtaatccacctgtgacttgctgtaagggtagaaacttttctataccataacttaagcctttatcatgtactatgttcatttatcttttcatgtgtgcatgctttatcccagtgagcaggcaagcttcctacaaggaacatatgcctctttatgacccccagtaatgtgggcatgtagggacctcacctgtgggaaatcttgccagttgagtcctttgaagctgctgtgattcactgaggacggcagccttcccttcagcattccatccttcacccaccaccctttaacacaaaagagattaccacaagaggacttggaccctacactcatgttctgtttgctttctgggttttaggctaaagcattatttacatactcctcatgcaaatatccacttggctatttagagaacaaaggcagtgcctactggaaagattttttttaagtattaataagtgaatgcattctattattttaaaaatttgtgatgtctttatccctttgtcagctccatactttgccccatacactcccatacctgtaatcaggacctcctttttgttctagcccatgaattcctaactgcactcctttcctgccatgtgcttgtgagagaaaaaaaagcaggcataaacctaatgctaatagaacggtggccatgtggtttttccttgttttcttgtccttccctcccccttataaatctccaagggccaccttcccatcctaactttggaagggttttccctccaggcttgtctccctgactctataggtaattacagccacctggtggccatatggggaaatgacagatggattggcccccaaaaatctggtgagaccctcttttttttttttaacttttttttttttttttttagatggagtttcgttcttgttgcccaggctggagtgcaatggcactatctcagctcaatgcaacctccatctcccgggttcaagcgattctcctgcctcagcctcccaagtagctgggattataggtgtgtgccaccacgcccggctaattttttggatttttagtagaaacaggcttttgccaggttggccaggctggtcttgaactcctgacctcaggtgatccccatgcctcggcctcccaaagttctgggattacaggc

SEQ ID NO: 82110 - DNA, 622 bp, Homo sapiens
agttcctgggaaggggtttggagaggctgtaaattccgtgcacagacacagcctccaggtactggcttcccaacacgcatccactcactttctaagaacctaaaatgccccatccccttgctcctgtatctccttgtccaaattctgttcctgcagagctagttcagcagagcatttagaaacagcttctggcatcagaaaaacctggttctacactttcgaggtgtggatctccagcaagtatctaagctctttgaatgccagtttcctcgtctctaaaatgggaataataatacatgctgaataggatggttgggggattcagtgaggtgtcacacgtgaaaagctcagcgtagcgcctggctatggtaagtaccccgtgtatcccaaacattaaaaacaaaatggtaggccgggcactggagtttgtgcctgtaatcccagcactttgggaggccaaggcaggtggcttccttgagcccacgtgttcgaaaccatcctaggcaacatggcgaaaccccatctttacaaaaagtacgaaaattagctggccgtggtggcatgcgcttgtagtcccagctmccggagaggctgaggcaggaggatcacttgagcctgggag

SEQ ID NO: 82111 - DNA, 727 bp, Homo sapiens
aacgaaggcttcctcagccttgctcccacccctactttgttcccagcctgacactgccttccccaggccattctcctctttattccccgatctcaccccagttccctgcycacagagtcttctctgaccggctggttgatgcggcagacacagaagccttcatgggcatcataagcgacaagctcggctccttctttgacctcacatttcatcatctctgtcccagcaagcgtcctcctatctttggtgagccaggagctgtgatgaccttgggcttgacactcttagaacatcggggctagaaggagtcagggcatggggtctgaagtgtggagccctgtggggggaggcaaaccaggcatttgtgactctgatcccctcttcccatggctcaggggatttcctgaaggagcccaaggtgtatgaagacctcacggatctgacagtgctgaagacagtcatggagacagctctaaatgagtataacctgtcaccctctgtcgtgcccatgcagctagtgctcttccgagaggctattgaacacagtgagcacctgccacgcctatccccttccccatcatctcagtgatggggtatgtctaaggaaataggggtcccttcccaggtctcccaaatcaagttccagaagctgcctttctccctggccccagatgccctgtggcagtgtgtgtttaacagagaaggtggaggttaaaagttgaattgc

SEQ ID NO: 82112 - DNA, 556 bp, Homo sapiens
catgttggagcattttgctcgttttcctgtttcttttgaacaattgtctaccgggaagttttaactctaatactgtcttattcctataactttstatggagggtgcttttttgggggttcaggattattcatgttaggatttcctacaccagaaatagccacttctcctgtggatgggactagggattttggtggcatcctacatttcttcacttaaaagtgccacctcaaacccatatctttggcatctcaagttcctttgagcacattcttccttctgaaggctcatacacgtcccgtatcatcctgccaccaggggccagctagtctcttacccagaagagctaggccctccactggctgcacgcagccatgctgagtgaccacaagcccagtttcctgatctccttccacccacagatgcaggtgaaaagccacatctataggtacgggctctggcatcctaagtgggtactgaaggggctggatgatgtaacccaggagtgaggaggtgaacccccatggggcgagtgccgaccagtggttaacaggagac

SEQ ID NO: 82113 - DNA, 583 bp, Homo sapiens
caggcacccgggaaaggacacccagttgtaatacctgtggggagaaatcagaaggtgctgaggaacgcgctgcagcaaccctcctcgaacttctctccactgtccctgtgccccctcttctcctggaaaggaccccccgcctggggcaggagtatggatgggcctgggcctgagtgctggcaggggctcctccgtgtgcctggcctcagatgtctaccccacagccccagcagcaccctgggctgtgtttcctcccgagtccactgctgagctctgtgatgggaagtgagggggcatccagccccgtgtggcatggagctcctccyggggatgggctaccctgggccagccaggcagccctggggctgcaagccgccgactgccctgcccgtacgtgggtgcactaaggcacacgttgaggggtttgtggaaggagcctggcagaatccagctaactgttgttgtcccccaggcctagccctgccgtatgctagggcagagggacaggacgcagagcctgcatctcagcaacactgctgtgaatggggccagcacagccatcctgagtgtgaaatgccaggga

SEQ ID NO: 82114 - DNA, 523 bp, Homo sapiens
aaaattctggaaaagattatacaatcttcttcccatgagcttctttactaatgatagtgattatttatgtactttcttcatgtttcattaaaaaatatattggaaagtatgcataccaattcacaataaggcagttgacttctagtctttatatggagtgtaattttggcccacattacatgtggaacataaatttagaaataaatgcaaatatagatatgtatagatatgtactatgcaggtagatacatagttagaaacatcatcattttgttgttgttgttgtttagagactgrgtctctctctgtcatccagggtggagtgcagtggtacaatcataactcactgcagcctcaaattactggcctcaagcgatccttacacctcagcctcataaatagctgggattacaggcatgagccaccatgcctggctatcatcagaatttttattttagtgcaggatttttatactgaaaagcaaacagatggtttatgcaatatcacagaaattaataagata

SEQ ID NO: 82115 - DNA, 523 bp, Homo sapiens
aaaattctggaaaagattatacaatcttcttcccatgagcttctttactaatgatagtgattatttatgtactttcttcatgtttcattaaaaaatatattggaaagtatgcataccaattcacaataaggcagttgacttctagtctttatatggagtgtaattttggcccacattacatgtggaacataaatttagaaataaatgcaaatatagatatgtatagatatgtactatgcaggtagatacatagttagaaacatcatcattttgttgttgttgttgtttagagactgggtctctctctgtcatccagggtggagtgcagtggtacaatcataactcactgcagcctcaaattactggcctcaagcgatccttacacctcagcctcataaatagctgggattacaggcatgagccaccatgcctggctatcatcagaatttttattttartgcaggatttttatactgaaaagcaaacagatggtttatgcaatatcacagaaattaataagata

SEQ ID NO: 82116 - DNA, 650 bp, Homo sapiens
tgcatatccatcacaataatcagtccagttaaaatttctagtcattccttcactttttgttcttttctaacaaatcttgtaagttttatataaagcatactgtatagacttttttcttggtgaatgtcctgaaatcacttcaaatatttacacgttatgtactcaatcagatgttaaattcttcaatgtaaatgctctgtcatgccatcctacctcctgtstcccccaccccctcacacacacctaaaagcactctgggcacagtagttacacaataaacgctaaaagcctgatttaacaactgtgtataaacaaactacttttatgtgactactatacctctgggcatggtattaacctatcccaaccagagtactgattgaataaaaatgtatctcaaagtcctttaaatgttgagctgcaatccacacagccagacttttgcataggcagtcacatgaaaggtcttatacgccattaaatttccaagacaataacttgatccataaactacactgaccccatggacctatcaagattatcaggttcgccttaaaaaaaaaaaaaaaaaaaaaactgtgctcatccataaattcagatacatagtgatgtcgatttaaatatatagttcctccattttgaacaccgtc

SEQ ID NO: 82117 - DNA, 650 bp, Homo sapiens
tgcatatccatcacaataatcagtccagttaaaatttctagtcattccttcactttttgttcttttctaacaaatcttgtaagttttatataaagcatactgtatagacttttttcttggtgaatgtcctgaaatcacttcaaatatttacacgttatgtactcaatcagatgttaaattcttcaatgtaaatgctctgtcatgccatcctacctcctgtgtcccccaccccctcacacacacctaaaagcactctgggcacagtagttacacaataaacgctaaaagcctgatttaacaactgtrtataaacaaactacttttatgtgactactatacctctgggcatggtattaacctatcccaaccagagtactgattgaataaaaatgtatctcaaagtcctttaaatgttgagctgcaatccacacagccagacttttgcataggcagtcacatgaaaggtcttatacgccattaaatttccaagacaataacttgatccataaactacactgaccccatggacctatcaagattatcaggttcgccttaaaaaaaaaaaaaaaaaaaaaactgtgctcatccataaattcagatacatagtgatgtcgatttaaatatatagttcctccattttgaacaccgtc

SEQ ID NO: 82118 - DNA, 614 bp, Homo sapiens
ttgtccttgtagtaccttgtatggtggcccccaaaatgatacacccttatccaaatatgtgggaatgtgaatgttccttttttttttttttttacttaaagttccgggatacatgtgcaaaacatgccggtttgttacagaggtatacatgtgccatagtggtttgttgcatctatcaacccatcatctaggttttaagccccacaagcattagctatttgtcctgatgctctccttcctctcgccccaccaaccccccgacaggccccggtgtgtgttgttcccctccctgtgtccatgtgttctcattgttcaactcccacttatgagtgagaacatgcagtgtttggttttctgttcctgtgttagtttcctgaggatgacggcttccagcttcatccatgtccctgtaaaggacmtgatctcatcctttttacagttgcatagtatcctatggtgtatatgtgccacattttctttaaaaataatctttgcagattaagttaagggccttgaggtaagatcatactgaattgctgtgttggccctaaatccaatgacaagtgtccttggataagacagaagaggaaaaggcacactgaggagcaggtggt

SEQ ID NO: 82119 - DNA, 967 bp, Homo sapiens
gtatatatgttaaagaagcaaatgaaatggtgatattgttccagttctttagaagagtgacatttgtttgtggataagagtcatacaacaaggtaaatcacgacaatagaagtactaaattaaagttcaagaacaatgatgtacaagacagaacaagatggaacaagtgataagggaatatcactggtatgtactgtgcctaccatatcacaggtgtaactttgaaagtttggtgaagaagtgagaacttgatctacaatcttaacagagtttattgtgggagaaatggaaagccatgtatgggtgttaatcagaggaaatcagacaatagaaatgttgtagaaagtaatattatgcagtagcatggagaacagattggaagagggagagattctctgataaaccttatatttaagcattatatttagatagaaattaatttggtgagcaattgtacttttaggtttaacccaacagaaattggtatttataataatacacttatttcctaacaacactattatattactgtaattcttttcagttattttatttcccaagagaattcttaattgcataaattaaatacattaattaattcctttcagaaatgaggagagtgcttcaaaaattagatatatgatgctaatggrgaataaaagcaaatgtacagaagtccacagggaaggcaaatagtcagataatggagtgaggacaaggttggcaatcttagcaaaaatgaaacaacagatggggcataatttttgtgagttctcacacagatggttcaccagatggattctgccgggttcatacagcttatgtgtatttttcagctgcttatcatgataggcaaggccacttctgtgcaggcaaaatctttccttggtttaggttgttgaaatataacactgcaataaattggtagttggtgacataataccaagtatttttattaactgctatt

SEQ ID NO: 82120 - DNA, 583 bp, Homo sapiens
taaagataattttaagcagggagttagattagatttggaagatcgactagggaaattgaaggcagggagaatggctaagaaactgttgtagatatcctcaaaaagggtgataaagacctgaactaagctagaatcagtgaaattagaaatgaagggacaaattcctaagactcagtcaayaaggagaggtagaagacaaggaaaattaaagaatctaagatgacacccaaaattctggcttatatgactaaagaggtgcatcattttcaccaaaataggaagtgcagattcaggaaacgataatttccccaatttgactttgcagggttcatatccagcaaaaattacactcagagcacagaagagatatatgttgtcacaaagatagaaagtaattggaactgacagaacatgaagtaattagtgaataagtcacttggggaaaacactatagattagggaaactctactatagagtaagggaaaaaactcacaacaaattattgatgacttttgccacggcaggaaggaatagatatcagcctcagaggatttgaggcgtaaacacaaagtaagaaaatgg

SEQ ID NO: 82121 - DNA, 606 bp, Homo sapiens
tcaaaatcacttgatgcataaaatttaccctcctatagtaaataaaaggacattgagaaacagagagaacygactataaagtatgaattttagttttcatctcaacaaaaatcagaacctaaaggaatattccatctgccagacttcagtttctttcggtttattcagttgcaaagtcttggagattttgaagagatcttaaacaaattttatgcgaagggctcgtggataatgactatgctttgaatataaacctgtcccattctccctcatcacatgcataagcatgagaccttctttctcaaaaacaggtagttataagaataacttttataaattaggttttcttgagctatggttctatgctcaaatttcttctacttcataaagcttttaagtgacactcagaaaccattataattagaaaaaaatagatttttttaatacactaaaaacaaatcgttggcaccaacgtctatggtaactatggttcacaaacaatgactatttttcttaaatgtgttaattacctattagagtactattgtgcttttccaaaaattatccaaatacacatccttaagaagcattgctgcctagtaaaca

SEQ ID NO: 82122 - DNA, 561 bp, Homo sapiens
cctcatagtctgtgccgattatttctgaagacggccactttggaagaaacctacctagctatgggagatrcctccatagagggaaggcagagccagcagccaggaccatgaacctggaggtggatgacctgagatgggatgggaggagcaattgtgtccaggtgccgggtgctcattcctttgactccgtttgacacacctgttattcctcaaatgccttgaataaaacaaccaagtcaaattctcttcttcctaaaggggatcatgatagacctcagcaggttttggactcagccaacaaagaatagacatttttcatatttagaaaataggctcaccagccgggtgtggtggctcacacttataattccagcactttggaaggctgaggcaggtggattgcttgagcacagaagttcgagaccagcctggccaacatggtaaaacctcatctctaaaaaaaaaaagaaaataaaatatactcacctgtggctcgcctatgatataatggacatgagcatcatcctagtgacaactgagaaaactcatttcatccatttc

SEQ ID NO: 82123 - DNA, 160 bp, Homo sapiens
cctcccaaagtgctgggattacaggtgtgagccactgtgcccagccacactttatcttgtcacctgtgatttggtaaaagatcagagtgtttgatgattcactgctcagcaagtgygtgggtgagaaggagcctcaaacctggaggctaggagctgaaat

SEQ ID NO: 82124 - DNA, 513 bp, Homo sapiens
cgggacgagaccactccgggcccggaaacggggggcgccggaccactccaccgyctcggggacgggggagggcggacgagaccactccaagccagggggcttctccgagacaaagttgcgcccccgaccccagaccctcgcgcggcgggcctcaccgtcagcgccagccggtggatgcgcccggagcagccacccaacagcagcaccagaagtagccgctgcccccactccgcggggctcccgcggccgagccccctcctctcgctcactgccatctctggagccacctcctccccgactccgcctctggcgcccaagcccgcccaccgatgagccaatcgccgcacggcggggcccggcctttcggagtttccagtccgccaaccaatcagcaattgcctctccgcaagcccgcctgcttgcgtcaccgacggacagcaccggttccgaatgggagagccgataacgcttaacccccagctcactctcaccaatcgctataaagattgtccg

SEQ ID NO: 82125 - DNA, 624 bp, Homo sapiens
ataaaccacaaaccacatgtccacgcatctgagcccacatgtgtcttctcagcgtcatgatgatgttgaggtctgtgccctgtggcaggtgctatatcccaagggtggtgtccatgtgtccagccatctcgctgtctgcatttttttttttttgagacaaggtttctctcccatagcccaggctgtagtgtagtggtgcagtcttggctcactacaaccccacctccyaggttcaagtgattcccttgtctcagcctcctgagcagtagctgggatcacaggcatccgccaccgtgcctggctaatttgtgtatttttagtacagacggggtttcgccatgttggccagacttgtctcgaactcctgacctcaagtgatccacctgcctcagcctcccaaagtgctgggattacaggtgtgagccaccacgcctggccttgtccctgtatttttaaatattacttatttatttaattaattacatatttatttatcttagagactgtgtctcactctgcttcccaggctagagtggagtggcacgatcatagctcactgcagccttgaactcctgggctcaagcaagcctcctgtcccagcttcatgagtagctgggactacag

SEQ ID NO: 82126 - DNA, 624 bp, Homo sapiens
ataaaccacaaaccacatgtccacgcatctgagcccacatgtgtcttctcagcgtcatgatgatgttgaggtctgtgccctgtggcaggtgctatatcccaagggtggtgtccatgtgtccagccatctcgctgtctgcatttttttttttttgagacaaggtttctctcccatagcccaggctgtagtgtagtggtgcagtcttggctcactacaaccccacctcccaggttcaagtgattcccttgtctcagcctcctgagcagtagctgggatcacaggcatccgccaccgtgcctggctaatttgtgtatttttagtacagacggggtttcrccatgttggccagacttgtctcgaactcctgacctcaagtgatccacctgcctcagcctcccaaagtgctgggattacaggtgtgagccaccacgcctggccttgtccctgtatttttaaatattacttatttatttaattaattacatatttatttatcttagagactgtgtctcactctgcttcccaggctagagtggagtggcacgatcatagctcactgcagccttgaactcctgggctcaagcaagcctcctgtcccagcttcatgagtagctgggactacag

SEQ ID NO: 82127 - DNA, 291 bp, Homo sapiens
aaaaccataaaggtagagaacaaaggagagaatggtgcctagaaagtcaagggaagtaaaattttcaaggaagaaggtgatcaayagtgccaagtgatcaagattggaaagaggccattggattttgaaattagtcactcactggaaatctttttgagaactgtaatagagttgtaaaaggtattttagaaaacatagaaaacaaatatggattattctagaggcatggactttaaaatgaaaagaagagacaagaggctagttagaaggttaagtcagatcaaaagaagc

SEQ ID NO: 82128 - DNA, 1989 bp, Homo sapiens
atcaacattgttttaatgtcttatgctaagttgcacatacaaacacatcttttaatttatggaagttacttacatttctacataaaatctcagctgtttgtacatgtcccagactatactggattctggtttgctcagttattccttccttattctgagagtttagcaaagggaaaatgtcaacctcaccctagagaaagtagagagctaagcagtagaaaaagctatttgtgccaggcttggaagaccccagtctttccatttctgcctttcaaagaagctctttctaggggcatagtactaaagattgagccagggcttttgttctggttattcattgcacaagggtgccttgctgatggtttgattaggggctgaaatttgacacgggttctacttgtcaagctgtgtagccacaggcctatttccaactagagtgcgcatttccgattttcacaacagtatcatatagtctggagacagcccaggcaggccatagtatagacagccactgcacctggctcttattcttcatagctccctcaaagtgttttctgcaatacttcctgctctgtgctcctctaccctgttttttaaatttttttttcgaaaaagttttgtttgttttttattgatacgtaatagttacgcatattttgggggctacatctgatactttgatacctgtatacagtatatagtgatcaaataaaggtaattgggatctttctttttcttctgagccttttctttgctgagaggaagctaataccactaagggtgcttaattatttatctttgttggaataaggtaaatgttaccttgaagagttatatttgctatcattatcaatatcactggagtctggaatatatcttagtactttctctcttttctcagtaaccccttccttcaaaatgcagcatcttaaatggtagtttgtgtactttctgacttctcagtgaatgatgtaattttgttcattaaaaaaaaattcaatttaaataaacttgcaggtggaaggtggaaaataaatcatgataatggctcacacatagcatttactctgtgctaagcattgttgtaattgtcttacatgcatcaactcattttatcttctcaataatcctttgaggttacttattattagtccctctttttttttttttgagatgaagtttcgctcttgttacccaggctggagtgcaatggcacgatctcagctcactgcaacctctgcctcccaggttcaagtgattctcctgcctcagcctcccaagtagctgggattacagatgcacgccaacatgtctcgctaaatttttttgtattttttgtagagaaggggtttctctatgttggccaggctggtctcaaactcctgacctcaggtgatccacctgcctcgccctcccaaagtgctgggattacaggcatgagccaccgtgcctggcctattagtcccattttatacctgaggaaaataaggcaaagagaaattacataacttgcccaagataacacagataataaatggggacatagtgattgaaaccaaggtatcctgttttatggtsttttttttttttttttttttactatgttataatttatgaatttgctaattgcttcaatattattttctctttaacttttcatcaagctttacagtaaatcattgcttatttgttttcctgctattcattgaggataaagtagcatcacatcagtagctttaagaggtttgccgtttaatctgtattgcttttagaggttagcacgttataaaagccccatttccataatggatgactggaaaaaccaggttgctgtatatatgtgaacacatatataactaacagtttgttttctctgtctctaagcttgtggggtggtataaacaaacttcagtgtactttaagtgcagttactgtgcttcaactcataagcatttctttagaaagaacatatactctgaaatatctagc

SEQ ID NO: 82129 - DNA, 600 bp, Homo sapiens
tccgcttctctgggaaatggagtctgggatgtctgaaacaagactcatgaaaagtggttgcctattaagggcyattatgttagagacataaatagcggattgatttttagtttttactaatccagcatttaccaattcaaattacgttctagggggccgggcatggtggctcacgcctgtaatcccagcactttgggaggctgaggcgggcagatcacctgaggtcaggagttggagaacagctggccaacatggtgaaaccctgtctctactaaaaatacaaaaattagccaggggtagcacgtgcctgtagtcccagctacttgggaggctgaggcagaagaatcgcttgaactcaggagaccgaggttgcagtgagccggatcgcgccactgcactccagcctgggcgacagagcaagactttgtctccaaacaaaacaaaaccgaaaatagtccctacggaattctctataatagagtggggaaggaaaataaaaccttgggatccccaaactcactatgccaaagggaaagtgaagcttaggaactgagtcacataaaactgccttccttttgctcccaaaaagatagctgtgac

SEQ ID NO: 82130 - DNA, 709 bp, Homo sapiens
acctggaragcaatggccaatccaaaagccccagttgaggactgaggccctactttcaccaaaggtgcttcatgtcatctgtttcacatgatggactattttgaaagatttaatttgaaagccactgtatgaaataaatttagtgcttggcaggtgataggtccttaatacatatttattggccaagggtagattacttgaaccacaaatgcctcttctggactagttatttttgattcttagttaaaataacaaatgaaatagtattaaaaacattaatatgtttttataaaagatgaaaccatgacactattaagttggttcaggctagaagaataaggataccagactaccattgcctcacatacacctcgggttaaggggatcttttgggagccagaagaagcatatgagttgtcattctatccaaaatacttaactcacactttcaactttggattattagacccttggattgcttttttcaatttaaaaccaatgatccttgaagtcctttctattctgagacagaacaggggtatcgtaaaacatctggaaagccatctttactatgtaatcattctccaggggcctcaaatccacacatggcagcagaagtaacttgctcagtctatttagttgaccctgagatgatgagatacaggacaagtaagatgcctttgtgggggaatatggtgctgatgagcaa

SEQ ID NO: 82131 - DNA, 842 bp, Homo sapiens
cttcatacatatttgttgaatgaataaatgaatgattgaatggtaagtagtttaagttagatcacacagttactgcacagttgagccaggtcctaaacctaggtttgcctgcctctgttcttgggaaagtaaactcatagaaggggagtgctaagcgtatcagaattcaagacaggatgatgccaagtagtagagcttttcctattgcatagtttggcttgggctagggcagtccagtctaaaactgtgtttctcagaggaaaagacccagctcacttrtatcagaatcactgggaaagctattaaaaggcttattgggctctgtcccacacctactgaattagactctggaggtgcttccagaggggctgatattgtaaacaaggtctccagaggtttctgatggactgtaattttgagaaccacaggcttgaaagaaatttgctcctgaccacacaacatttatttagacgtctgaagtttcttaaacatacatcactctcacatattcgttaatttccccagggtaggcacatatttctcaggtcaactcactcttttggagcagagaagagacaatgctgccctgggttaggtatcacaacccttcatctgtggcacagcctcctccttttaaaccctccaccctttagaatttacaatcagagataaaagtgtttacctcttgttctgcagatctgcatggaacttggtccttttaggactatgaatctggttaatgaaaaagtaatttcaatttagaagcttcaaaagcctagatgaacttctggaaagttattattcaagatttctttattacacttgagagcatgtaggatccc

SEQ ID NO: 82132 - DNA, 854 bp, Homo sapiens
tatttccttcgcttgcctgtgcagacctaagggcactaattcttagagcgatgtggctcttaaagtgttgtcctcagaccagcagcatcagcatcacctggaaacttcttagaaatgcaaattcaggagacccacctcatatccgttggatgagaaatttaaaacatgagatctgataatctgtgtttccataagcacttcaggtgataaatttgagaacaactgccctagaggaaattgctgggcctgaccccaaaactctctgattcagtaggctaggaggtggacccaaccatttgcattttgaacccttcctagatgaagacttggctcttcccaaaactagactttgagaactacagctctagatcagctgccaagcagcccctcctccctgctaggaaaaagcaagcctttttttccacttaaaaacctttaagtgagttaacckggagcagatgctggctcaggtaatgccaattcttctcaagacccacttccccaatcccctaaatgcacaatgcctatgggctcgtaaggagggttcaatccctgtgtggtttagaagaaatgcaaggtttgctcctgaagaagacgcagctcactcagcaaaggaactatgaaatcttgcacattttttattagcagtgctggggctgccataacaaataccaccctggatggcttaaatgacagaaatctatcagtcacattggattgaggcccacccttatgacctcattttcccttatctctttaaaggccttatttccaaatacaattatactgagatactggagttaggactttaacatacaagcagggagtgggcacaattcggtccacaacaagca

SEQ ID NO: 82133 - DNA, 699 bp, Homo sapiens
gattacatgaaatctatagagtaaatttatatatcatcttaccaatattaattcttcttatccatgaacatgggctgtctttcaatttatttataccatctttaatttttaaacattttataattttttacagtacatcttgtacttcttttattaaattatttcgtgagaattttattttaatactattttatatgaaattatttttttaatttcattttcacattgtttattgctagtgtatagaagcacaatagacttttatacattgattttatatcctgcttamacattgatttggtatccttgcttaattaatctattagttctaatagactttttgtggattatttaggctatccaagatcatgtcatatgtgagtcgtaatagcttcacttcttcctttccagtctggatacttttaattctgttctttgcttttttttttttttttttaatagctacttggtttgataagaatctccagtacaagcataaaaataagtggcaagagcaggcatccatgtctcattcctgattgcagtgggagaaaagattctgttttttactgttaaacatgttagatgtgagtttttaaaaaaatgcccacgctatttatcaagtacccgtatttgtgcacccttgtcaagagtcaattgtccataaatgtaatggtttgttttgggactcttaatttc

SEQ ID NO: 82134 - DNA, 699 bp, Homo sapiens
gattacatgaaatctatagagtaaatttatatatcatcttaccaatattaattcttcttatccatgaacatgggctgtctttcaatttatttataccatctttaatttttaaacattttataattttttacagtacatcttgtacttcttttattaaattatttcgtgagaattttattttaatactattttatatgaaattatttttttaatttcattttcacattgtttattgctagtgtatagaagcacaatagacttttatacattgattttatatcctgcttaaacattgatttggtatccttgcttaattaatctattagttctaatagactttttgtggattatttaggctatccaagatcatgtcatatgtgagtcgtaatagcttcacttcttcctttccagtctggatacttttaattctgttctttgcttttttttttttttttttaatagctacttggtttgataagaatctccagtacaagcataaaaataagtggcaagagcaggcatccatgtctcattcctgattgcagtgggagaaaagattctgttttttactgttaaacatgttagatgtgagtttttaaaaaaatgcccacrctatttatcaagtacccgtatttgtgcacccttgtcaagagtcaattgtccataaatgtaatggtttgttttgggactcttaatttc

SEQ ID NO: 82135 - DNA, 632 bp, Homo sapiens
  misc_feature (1)...(632): n = A,T,C or G
atatnnnnnnnnnnnnnnnnnnnnnnnnnnnnnnnnnnnnnnnnnnnnnnnnnnnnnnnnnnnnnnnnnnnnnnnnnnnnnnnnnnnnnnnnnnnnnnnnnnnnaagctggtatcaattagttttttttataaatatatatttttatactttaagttctagggtacatgtgcacagcgtgaattatatattttcaatttgttaacttttacatttctgccacaaccttcttgaaacagtaacaaaaccgaaaaagtcatcaataaccatcacaaataatagaatgttatctttaaagccgtgaataagaatgttttttgctcacttatgtacgtgatttttaaatttcaatggagtttatttgagatattgtggcaatatcataaataaaatcaagttwatggtgagcagtagtaaatcctgctctgcaatataacatcactgacatcaacaggctctttctttatctcagccagaagcagaccttttgagttaaagtaccaagtcaggtaatggaggtataaaatggcaagttcaaaaaaaaaaaatgaactagtgtttagcagtgttttgacaatgagggtctcaacaaaggggaatcctggcataacatggcctggggaagttaaaatg

SEQ ID NO: 82136 - DNA, 770 bp, Homo sapiens
ttttttttttttttttttttttttgagagtgggtctcactctgtcactcaggctggagtgcagtggtacaatcatagctcattgcagcatccatctcccaggctcatgcaatcctcctgcttcagccttctgagtagctgcatttatagcrtcatgccaccatgcctggctaattttttcccaactttcagtagagatgagttctcactatgttccccaggctggtctcaaactcccgagctcaagcaatcctcccacctcagcctcccaaagctctgagattacaagtgtgagccaccatcgcccagccaccttattttctaatgctggctcctcttatgttttcaaaatggcagttgccattctagtcacatcagaagcagacatccatgcctagagacagaataagtcatgtctgtgtcttgtgtaccctgttaatagcaaggaaaaccttcctagaagcactccagcagacttttcctcctgtgtcattgtccagaattgtccaagcctaaaccattcctttaataagaaaaatgaggctagaccaatcaagatttattccctaagacgggggagtgtctcagtctcccctgatggacatagccacttggaagaggtcaacaaaattgtggttctgatagtaaggacagagaaaagagggtagttattgggcccaagggccaaagtgatcatcatggcttccactttcccataacccttaactcatacctcatctggtggggtcacccaaccttagtctcagagga

SEQ ID NO: 82137 - DNA, 682 bp, Homo sapiens
gatcctcccgcctcagtttcccaaagtgctgggattactggcatgagccactgtgcctggcctggtttctttaaaaaccctatttctcaccattgtttaggcttttctrtagttaaatgtattcaatgattaccacctgttcacttacagttacttctccaatcctgagtttcaaattttgactaatctcttggtttgtcaaaatcaaatctaatctctttgttctcaaagtaggtcttctcagaaggtcccaaaatgctgtatttccctgaattttcatgtcccattgcttttcttttttcactgaatcttctgcctttatcaccttcgtaatttgttctaacacagatttcttaaatctcatcttttcctaggtagcttccttttagagtcctctaaaggccaatttcactccggattgattggcttccaggcttgctatacaaccatgatactgagactaaaattactttcctgagttagattcactatttcttgagtccctatttttctgtttttgttttgtcctttgtgtgagtttattctctcattttttaaaaacttatcttctaaagtaacttactagaataggatacatgaaaagtatactttctgagtccctttatttccaaaaaatgtctttattctttcatttttgattgacatttggattttgattcac

SEQ ID NO: 82138 - DNA, 682 bp, Homo sapiens
gatcctcccgcctcagtttcccaaagtgctgggattactggcatgagccactgtgcctggcctggtttctttaaaaaccctatttctcaccattgtttaggcttttctatagttaaatgtattcaatgattaccacctgttcacttacagttacttctccaatcctgagtttcaaattttgactaatctcttggtttgtcaaaatcaaatctaatctctttgttctcaaagtaggtcttctcagaaggtcccaaaatgctgtatttccctgaattttcatgtcccattgcttttcttttttcactgaatcttctgcctttatcaccttcgtaatttgttctaacacagatttcttaaatctcatcttttcctaggtagcttccttttagagtcctctaaaggccaatttcactcyggattgattggcttccaggcttgctatacaaccatgatactgagactaaaattactttcctgagttagattcactatttcttgagtccctatttttctgtttttgttttgtcctttgtgtgagtttattctctcattttttaaaaacttatcttctaaagtaacttactagaataggatacatgaaaagtatactttctgagtccctttatttccaaaaaatgtctttattctttcatttttgattgacatttggattttgattcac

SEQ ID NO: 82139 - DNA, 717 bp, Homo sapiens
aaacaaaaaagcaaacacttgtgagtgtgctatttgagggatcagggcctactacccggacgctgctctatgagatttagttctttggtttgtaggatatacaaatgtcagaatgctaaaatttttatcatagggccatttaatttatccaaaaacagaacctgaatatcccttttcaagggaataggtgcctaacacctgaaattctatgggggtgtacgtctaactttcaattaatggctcttctcrgctccacgttagtgtcctatcttccttaattaaaccaggtgcacgtgatcccaagcctcgcctcggcctttggcaatatgtgcttccatgagcatcttaggctgtgaactaaaatacttcatcctgcttcattgtctcttgatctcctcccacctcttgcaaccctatcactcttcatcttctagacatttattaatgtcacatctactgatctgatggcctattttgtgttctcataataattataagtttattctctctatattctttcactgtcaattaactggggttccaggagggagaggagatatatttatgtggccagtctccacatggaatgggacatttccatttttttcttaattttttacattctggctctactgaagaagttctgtttaaacttcttccttgaaactatttcaaatagatgtattaaattcaatttttaacacaatctacctgata

SEQ ID NO: 82140 - DNA, 1291 bp, Homo sapiens
  misc_feature (1)...(1291): n = A,T,C or G
cagtttcaatgtgggctcccaatcatcatctctaatccactgagggcagccacagaagaatctttcgaggatatctgttctccctcattcaatgccttgaaaagagtaaattgtatgggccctcctgggcatggtwtgaatagagtttgactaagcagaatgactataacagagcaaatccaacatcccatctccctaaaccttgagattctttcttctacagtatgccagggaaattctggcatctcagcacatagattgtaagctattattgagaacaagcttctagtaacccacttagaaggacttccagatgctcaagtcaacagagcaaatctgaatcccaggtaagtatttagcaagatcctacaacttcttcattgtataagctctcctccaagagcattctgtgtacttccccattagggctatactgaaactctttcttctaactcatgtttaaagttctaagcctcattcatatctgctcaaatgcccccatcccatgtcataggttctaggccatctccaccagtgcccttactttagcataacagaactgggtctcacgtttaattaacattgcaactccaaagcctttatagtcaggccctggacttggtcctcagccatatcttccccttagctatgagagataatggatttcttcaaagctgtcaaggaagttttctgattttctattcatgcctggtatttggaacccaaagctatttgtcttgttttcatgtactctcacagaagcagtcagaagagccaaatgacacaataattttagtaaacctcactgttacagcagctaagtgctagagattgatctttcaatgttgtgccctacactgacactccatttcatgtcactgctgatagtttgagtaattgtgatgccactccatgctacaggataccactgttccattttccttggcaagtagtttatacaagtaatcatcagatatgtgagtgatatcatcctagaaagccattttgagagtctcttttctgagactaattctaatccctataactttatcaatcgggtttctgggaagaaaaagcacagaaagagaatataataaaaggaccatttataaaaataaaagctgggcacagtggtgcgcacccatagtcccagctacttgggaggctgaggtaggtcgattgcttgaggcnnnnnnnnnnnnnnnnnnnnnnnnnnnnnnnnnnnnnnnnnnnnnnnnnnnnnnnnnnnnnnnnnnnnnnnnnnnnnnnnnnnnnnnnnnnnnnnnnnnna

SEQ ID NO: 82141 - DNA, 668 bp, Homo sapiens
tgtgcagaaatatcgtactttgcctccgtgtttctttgggcagttttgaaagtctgctatctacattatttttctgtcccacgctgaatcttacaatttggtgtgatttctatccaggatgtcttgtcagctgactgtgatgttctccagagggctggcatctcactggttgcctctagtgaagaaaagtctccgaataaacaattatgcaaaagttgttctttgataatagtttctcatatactctttcacacacagaaataactttctagctcattatcaatagtaaccattgttataataactatttgttcatggtccctcaaagtattgcaattattattgtcttacctatttctagtgttattaaaaactgataataatatgattaaatttaactactgttaatttaagaacttcccaaaaggaaatgaaaaagattaaaggtactgaatcacattcatttatgcttcattcaaccagcttttatygggtgcttactgaatacctaccctagcacagcagatacaattttttaaataacaaggagttatccttttttttcttttgaggttgctctgcgttatagtaccatatgtagaatgagcaggtagccacattataagatgtggagctgcttccttagcagctgcagttagacttgagaa

SEQ ID NO: 82142 - DNA, 725 bp, Homo sapiens
ggccccctgatatggcagacattttcctgtgctgaggtctctaattagactgtagccttgcagaaacaatgagctttggaaagcaaagatgaaaagatttagaaatgcagaatctgtgaattattccccctttcccctccctctatggctactataagtgcatctgttctgccctcatgggctggctgcagctataacacacaccagacactctcatcacctccacgctttgtgcttgtgcattcgtgccagtgctatccattctgagcagctgtgactgtgcccacattgaagctgtgtgcctgggtcagtgctgtggtgcacacgttgttgcttggtgtgtatggatttgaatctgcagatccaattgtttgtgagtactcccaaggtctacagcacatagctccgtgcactcattctgaagcttggtgttcaccagtcactgagctgtgcctgagccagcacactgctcagtcccacccgtctgccagtcttgctgagaggtgaggccagctagacttcctgggtggagtggggacttggagaaattttcttacaagaggattgtaaaatgcaccaatcagcactctgtaaaaatgtaccaatcagcactctgtagctagcaaaaggattgtaaaatgcaccaatcagtgccctrtaaaacgcaccaatcagcgctctgtaaaatgtaccaatcagcactctgtaaaatgcaccaatcagca

SEQ ID NO: 82143 - DNA, 1203 bp, Homo sapiens
ttcaacctagaattctagatccacccaaacatttagagagtagactactgacatttttggcactgtaaggaatacaaaatttaaactttcaagtatccctgtttaggaagcaactagaagatgtaatattcctgaaacaaattgaaggaatatatgaataaacaaggaaggaaaataatatgggacccaggaattagctgattcaacactgaagaatgacaagagaaattctccatgtgacaactacaaatctagtccagaagtaatcagaacacatttgacagaagggcagatggctgaagaagaaaggtctccaagggaaaggagcggggattgagattgacagagtatatgttattttgagcactaggaaaattgctgctaggtgtatgacaagtctgttaggatatctaaaaatagtcagacattgttacataaaaaacaaaygaaaatacaactactgtgttaattgttgggagggtattaaaaaaataaatgtaatcaaagtatactacctgactcagcagtgtacaatatttaatatttctagtaatattatcactgactattcatttaatcaaaaactgtatcaggaggagaagtaaaagtggcagggtaagagaaatgaattatcaattaccctaataggaaagaataaacagaaacggcctaaagtgctaaactgattaatctataaccaacagagtaaacctgttagttagaatgtggcctgcataccagaggaacacctaaaacagttcaaagaggctgcctctcaagggcaggactgggatatgggtggaaaagggtgggcaaggactgttatttttctgttcaaagccttttagtattgagggttttcttttccagctttattcaggtatagctgatgtatgataaactgaacatgtataaagtgtacaatttgataagttttgaaatgattatcacaatcaaggtaataaatgtatccctcaccaccagaagtttcctctggctcccttgtcatccctcctgctcttccatcctcctcaccccctcagtaactctcacgcctgacaacaactgatctgccttctgtcactgcggagtggtattttctataattttacgtaagtggaatcatatagtgtgttttcttttttgtctggcttctttcacttagcatcattgttttgtgattcagtcatgttgtctgatgca

SEQ ID NO: 82144 - DNA, 659 bp, Homo sapiens
tgaataagtaacttgcctaggattgcaccacaagtggtatagttgggatttggacccaggcattatggcaaattttttatttattagtagaatactatatgaagtaataattctctagtgacatttctatttatttcctcttggatccaagagagctggtatgtaaaaagattaaatttgatgtttctataggccgkaaagtggccacttattttcctaccttctactatttttccaataattaatccaataataatggacaagaattctaaaattcttatctagggtgcaagttaaatttgattttttttgtttttaaaaatagcttaataagggaatactctaaataatgaagagagacagaaaatgatgaaaggagatgagtcgaagctactgtagaaacaataggattcataatatagaaacaattcagctgtgttgatttttttcatggtgtatgaaatttgcattcatgaaaactaaggttgcttttcaggctcttagaagagctctgtaaaatgttgtcttaagacttgtgactccagacttcctggtaggccaatattattatataacaagggattgtcagaaatggacctgaccataagtgacactgagggcaaaacctgaaacacaggcagtatcaactttcctggcac

SEQ ID NO: 82145 - DNA, 707 bp, Homo sapiens
ctgtttcaatgtaaagaagaaaagtataatacttcacatataaaattattttcactaaataaaaatacatatataacaaataatgaagtgaaatatacccccaaatatggtggtaaataattaattctgagtagtgaaatcataggtttttttttgttgtttgcttgtttcttttgcctcttatacgtttctgttttctccaagaagtgttaattacctttattataaaattgttatatgtaaaggtttaacactttgctaatagtattttttagacttgcttctgaattacagaattggctctttagtgattgatctgggtaatcacagtacaaatcaggctctgcctttatattttcttgcctcactcctacacatatttcatgcactgctacctttctgttgtgctattttgtgacacaatattttgagagaaaacaattacttacacgcagatactaagtgacattagtttatctccaactaggcaatgtaaytgcaacaaaacccccagctaaccaaaacccaataataacttctgctcacataaaatgaaatgtcaatttcactaatcacatgctgtctggaatgtccgttctccatggtaactacctggctttcctggataagcatttctgattcaagtacacaactggcaggcctgccccagcttaactgacctagtttggtgaaagttctgcagcctg

SEQ ID NO: 82146 - DNA, 616 bp, Homo sapiens
tgcccatttaagttgtatatcgtgatgtctttatatacacatacattgtaaaatgattaccaaaatcattaattaattaacatattcattacttaacatagttatgagtatgtatctctgtgttgggggtcaggggtgagaacacttaaggtcaattcttagcaaatttcaagtatacattgcaacattattaactagagtcaccatgcttacattagattactgaatctttgtgtattttgacgagcatctctccttttccgccaccttccagcccctgggaaccaccattctactctgctttttagattccatatgtaagtgagatcatacttttattctrccttctcgttttcaagggacaaagtgacgttttcttcaaatcaggttaaactattgggtactatgctcactacctgagtgctgggatcagttgtaccccaaacttcagcatcacacaatatacccatgaaacaaatttgcacatggacccccaaatcaaataaaagttgaatttataaaaataaataagtaaaagtgtttcattcaaatcatctgcctttttctacttcctttcgacactaatgtctgctttcctttcagagtggtagattga

SEQ ID NO: 82147 - DNA, 1919 bp, Homo sapiens
caggtctgttggtgggcaggggacttccaatgcctgatggagacggtgggaagtcttcataagtgacaccaatggtctttccctgcagtactgcagaggaagatgaagaaaaatcagtagacacacataagaaggagtcttccagagaactatccactgagaatattgaacaaagtttatgtgctttcctctaacagttaacgtttaatgaacacttatcattacaacaccctatgagataagtaatattactacctttatttaaagatgacaaaattgagacacaagtgcatatttttactgccccactacaatctgtagcaggagtcagcaaatttttttccgtaaagtcaaataataactatatttcgtattggaggacacataccatctctgtctcaactattcaactctgctgttataatgtgaaagcagatctagacaatatatatatatatgaacagacatggccatgttccaataaactttctttacaaagtaaagaaaagctgaattgcagatttggccctagaaccatagttcgcagacctctcattgacatttctgggaccgcagacaacttggtcagagtacagaaatgcatcttgtagataatattattcactttctgtccggcattttggtcttttaatttgcatcactgaggcaatttgctttagttttgcaatgtctccaatgaacataactgcaactcacaaggagccaataagrctctgcctttaaaaagagtcaagaagagtggatcccaaacaaacccacctcaggatagggaaggaagtctggcatctttagacttgttctgagactcctccccccaaattataaagacagaaaccatcagaatcaaccatcctaagaacagtgttgctacagaggatacagtcgtgcactacataaggacatttcagtcaacaatgaaccacatatacaatggtggtcaaataatattataatggagctggagatgatgtgtaataggctataccacctaggtttttgtaagttcatgctataatgcttgcaaaacaacaaaattagtcaatgacacaattctcagaatgtattcccatcattaagtgattcatgactatatttgagacaaaggacgagaagcatttttatattttttataattctattttagaaatttcagcataggcagcatgtgaattaattttctcctaaatactatgttctgacagttacatttgaattgccctaatcaggaatgtgcaccccagatgtgattagttagcatctgaaggatcccatctcagccatctcagaagccctcactccaaaggtctctactacaagccttccagatacagctttctaaatttgcaccacgaagttggttagttagcatgaggatttatggttgtctagaaagagttaacctcaagacttttctgaagaaaattggataatctggaaagaccagcaactttacacattagaagtagcaccctaattctagaactctgttccttgtgatctatatgctgctgctgtatgaggaattctgtcacctgagcctactaacatgattactgaccctgccttcataatattgtatctttgtcccacaaaaaacctttcatgctaagtgctttgcctaaatgcctaggattcccaaagggacagagactaggaaccatttacagaaataggttatgcaacagtgtttgtgcctgctcattaataagtgttcacctatgtaccagaatgtggcaagagacttgctttcattataacataccacctggtagcaaggttatagaggggagacatatagctctcatgtacctctaattttctaaagttgctgatatgtaccccaaaactctgacaactgtttgaccagtaaattgacttagattaggttgcagagatgc

SEQ ID NO: 82148 - DNA, 1919 bp, Homo sapiens
caggtctgttggtgggcaggggacttccaatgcctgatggagacggtgggaagtcttcataagtgacaccaatggtctttccctgcagtactgcagaggaagatgaagaaaaatcagtagacacacataagaaggagtcttccagagaactatccactgagaatattgaacaaagtttatgtgctttcctctaacagttaacgtttaatgaacacttatcattacaacaccctatgagataagtaatattactacctttatttaaagatgacaaaattgagacacaagtgcatatttttactgccccactacaatctgtagcaggagtcagcaaatttttttccgtaaagtcaaataataactatatttcgtattggaggacacataccatctctgtctcaactattcaactctgctgttataatgtgaaagcagatctagacaatatatatatatatgaacagacatggccatgttccaataaactttctttacaaagtaaagaaaagctgaattgcagatttggccctagaaccatagttcgcagacctctcattgacatttctgggaccgcagacaacttggtcagagtacagaaatgcatcttgtagataatattattcactttctgtccggcattttggtcttttaatttgcatcactgaggcaatttgctttagttttgcaatgtctccaatgaacataactgcaactcacaaggagccaataagactctgcctttaaaaagagtcaagaagagtggatcccaaacaaacccacctcaggatagggaaggaagtctggcatctttagacttgttctgagactcctccccccaaattataaagacagaarccatcagaatcaaccatcctaagaacagtgttgctacagaggatacagtcgtgcactacataaggacatttcagtcaacaatgaaccacatatacaatggtggtcaaataatattataatggagctggagatgatgtgtaataggctataccacctaggtttttgtaagttcatgctataatgcttgcaaaacaacaaaattagtcaatgacacaattctcagaatgtattcccatcattaagtgattcatgactatatttgagacaaaggacgagaagcatttttatattttttataattctattttagaaatttcagcataggcagcatgtgaattaattttctcctaaatactatgttctgacagttacatttgaattgccctaatcaggaatgtgcaccccagatgtgattagttagcatctgaaggatcccatctcagccatctcagaagccctcactccaaaggtctctactacaagccttccagatacagctttctaaatttgcaccacgaagttggttagttagcatgaggatttatggttgtctagaaagagttaacctcaagacttttctgaagaaaattggataatctggaaagaccagcaactttacacattagaagtagcaccctaattctagaactctgttccttgtgatctatatgctgctgctgtatgaggaattctgtcacctgagcctactaacatgattactgaccctgccttcataatattgtatctttgtcccacaaaaaacctttcatgctaagtgctttgcctaaatgcctaggattcccaaagggacagagactaggaaccatttacagaaataggttatgcaacagtgtttgtgcctgctcattaataagtgttcacctatgtaccagaatgtggcaagagacttgctttcattataacataccacctggtagcaaggttatagaggggagacatatagctctcatgtacctctaattttctaaagttgctgatatgtaccccaaaactctgacaactgtttgaccagtaaattgacttagattaggttgcagagatgc

SEQ ID NO: 82149 - DNA, 726 bp, Homo sapiens
agaagtaggcagcgaataaacaatcccaggacgattcattccttggcttaaagggagccaggcctttgggaaggcaggttagcaaagatagcttggttggttgagtgctccctgtgtaggggccaatgaatctgcatataatatctcatctcatcattcacagttttctttgaagcaagtactgctcttttcgttatatagatgaggaaatgaaggcggagataggttaactgcccggagccacatagaaagtggacgggctggatttagattcaggtctgccttgctacaaagctgttgccctttccctctatgctacactagcaaatgccaaagtgggctgaatttgggatgcccaggcactgaaaacaagatggggaatctaaacttatgaggaatagaaattggggttttaagtggaggaggaaataagaagcacctggtaccctcacacatgcctagaccaggggattggatatatgtagagaggggtcctgtgctgagagacagcctatgttcctycagagcaggtgggagctacacctccatgggcttgattgccttggcagtcctggcgtgcttgctgttcctcctcattgtgggctttacctcccggtttaagaggcaaacgtaagtctcccctttccctttcctcaacctctctccccttcattcctggcttcccttttccttaatggtctttccctttctattctctcacagttc

SEQ ID NO: 82150 - DNA, 602 bp, Homo sapiens
acacacacaaacttgcagacatatatattaccatcatacgtgcatataaataacaatgacatttgtakgtgtgtgtttgtggtggtattccaaatatgtgcttataaatcacactaaaatgtgattaaaaggtgacgacgtggagatacttcggtgtttggaatcatacacagctgagagccaagctgcagccctacacctagtctttaaaaattagacttatgtccttcttaggggaccccactcctcagttcctcactgagctatcaggattacatgaagttgataaaagatatcggagaggctgtacaaatgagaaaaataagttttgtacctccaaggagctgacagtctagtagaaaatatgtacagctaataattaatggccatatattataataggtgctaataaaaaggcaggcccatgtatacacaggccccaagaaaggaacggcctggcaatatcatcacaggcatgcacccagacaccttttgtggtatcaagtctggtggcagcagaaagcaaactggaagaaatagttctcatcatatgactttaaaatgtaaaactataaatgaagagcaatgagtttgttaaaaaa

SEQ ID NO: 82151 - DNA, 652 bp, Homo sapiens
taggtcaattacaagccaaaataaaaaaaccacacaaataactcataagaatacaatataacaattattcatatggcatgtatattgtattagtaatctggaaatggtttatagtatgagggaggatgtggataggttatatgcaaacactgggccgtttgacataagggatttgagcattcctggagtttcatatggagcagggtcctggaactaatcttctgcggataccaaaggataattgtataagaatcttggcagcaaaattgtggcagttcagaactataaaaaaaagtcaaagacaatgggaaaaaaagactcagtcaggtgtccttattctctgcttttgatggggcactgagacattgcctgtgaggatttgaggattgattatttccttgtgctaagtgttttcctgaactatgtgttttacctgaacattgaaaacctaccaccmcatctgagggaagaactgttgttatttacctatctttcatgaggcaactgacacaagtagatattaactaacttgactgttagttgctgctactaaagggcagagatgattcagagtgaggcagctgcactccagggttccagctctcaaccgctgtgctgcactgcctcccaggaaatactgaagtgctaagca

SEQ ID NO: 82152 - DNA, 683 bp, Homo sapiens
aggggggtttcttccggagaaatacctgacagcagggtgccctcctctggtggctgaggcagaagagaaacctttggacctttgtctttgtacaacccgccaccagcttcccctgataacctacgttgcatttgaacatttagtcaaccgcggcaacttgcggatcatcttaaacttagtgcaagactcaggagttagtaaatgcctaatggaatgggaatgaaagatttaatttatgattaaaaataccatgctttttcaagcatccccttgatggagtttgttccattttgagaatttccttctgggacaartagggaagttaccactgcccactaatgtccaaatcctccctctctggaaatatcatttgcagacaggggacaccggtggagccctgtgatttcatggccacctgcttgctttggagcctcacatctatgcctaaatccaggctgtttccaaggcaccttcaccctttattttaatcatctgtatctatcaaagcccagtgactcatgccatagtttaaaatgcttaatttactgtgaaaccttcattaatccaaaaaactaaataactggtgtccatgctagccctggaaccttgccatctcttaggaagaactccattaactactcacaaatcatatttggcattttaccggttactcagggccagtg

SEQ ID NO: 82153 - DNA, 553 bp, Homo sapiens
cttctctccctttccctatctcccaacttttccaaccctgctcaatgctgctattaaatacataatagcaacaatagctaacattatttgtttgccataacttccagtatttgagagcrttacttcttcctcatcccacctctttggttcagttgagggttgccaggactgtaccctagctcccctaaaagcagggaagcatgtgacctcctccctttggatatgataattgggccaaagattgagatgaaacccacattagatcttcaagcatccttttctgggatttttctaagtgtagctgatagggaagatttcattctacttaagagaatgaaagagtgccagtcttgagtagcctctggtcatgttccctgctgtgctgaaaaattccatttgatgtgttatgtaataggagaaaatggcatgaatacagaaaaacaagattcagagagaaattgagagtcctgagaatatccaggtttcttgtttgattgtcactgattctacagtggtattctgtcatttggttttatgaagtaaaaaacctccc

SEQ ID NO: 82154 - DNA, 553 bp, Homo sapiens
cttctctccctttccctatctcccaacttttccaaccctgctcaatgctgctattaaatacataatagcaacaatagctaacattatttgtttgccataacttccagtatttgagagcattacttcttcctcatcccacctctttggttcagttgagggttgccaggactgtaccctagctcccctaaaagcagggaagcatgtgacctcctccctttggatatgataattgggccaaagattgagatgaaacccacattagatcttcaagcatccttttctgggatttttctaagtgtagctgwtagggaagatttcattctacttaagagaatgaaagagtgccagtcttgagtagcctctggtcatgttccctgctgtgctgaaaaattccatttgatgtgttatgtaataggagaaaatggcatgaatacagaaaaacaagattcagagagaaattgagagtcctgagaatatccaggtttcttgtttgattgtcactgattctacagtggtattctgtcatttggttttatgaagtaaaaaacctccc

SEQ ID NO: 82155 - DNA, 768 bp, Homo sapiens
tttgtctattttgttaggagactgtattctatttaaatctttaactctagcaatgagtcactatgtttaggtgtagcactcaactgttggcctatttttgttagctgtgattctgaggacagattaattttcaaagcctttgtggtgctattatggtttgctttgtttatcttatacatctggggttcccagtgtccctgcttgttctgcctgagagtatgaaaagagtctcccaaatgacacatctttatttctctaggtggtgtaagagattctccaggcaagtcctctggaactgaatgctttaatttgggcagtttgttgtgggaaccctctttatagaagasacagaaaaaacttctaaaccgttgttatggcagaatgcacttttttggagccaacttgctgcctggtgtctcagtggtaaaaaagaatttcaggagcaataggaggggggagagctttcctgtcccaggttgctgttttggtcaaattatctttgctgataatcctagcttgatagagttgaccaaaccaaaacattgcttaggtgagaattttcctaaaaaaataaatatttcatgaataaattatattaaattataacaaagtatttagaatgattaaacatttttaagagtctgcaattacaaataaatcactgtagataaagagaggccaattctttgaaatgtgaaatattccaggttaaaaatgccctgagtgactgaagccatgaagcattgtttcttcatggaaatagaacta

SEQ ID NO: 82156 - DNA, 2114 bp, Homo sapiens
ttttttttaagggacaaggtcttaccctgttgcccaggctggagtgagtgcagtagctccatcacagctcattttagccttgaactcctggcctcaagccatcgttcacctcagcctctccagtagctaggactactggcatgtgcctagctaatttttttatttttgtagagacactgtatttcccaagctggtctcgagctcctgggctgaagcaatcctcctacctcagcctcctaaagcatgggcagtttacaggcgtgagccattccatccagctggtaaattcttgaagtcagaagcaaatctacttacctagtttctaactaaattaaatacattaagacctcatacattctgattttgctgactcagaattgcagatctttcggagaaaggtcacgrtgaaacttacttttgactgttcatgataaaagagggttactataaattaatattataataattgattatagaggaaacacaccctatattgcaggacgtattacttttaagtttacacaattactgaggaagtctcattcacagaaaacagtcagtaagctgattgtgcaggattgttctctgtttgctaaggacattaaacaccagcacccttataagctaactggtttaaatttgctaaagctctaagcacgaagaaaagttcctgtaactttgaaagcatttagtaaattggttcttttccatttcttttgagttgcagttatatacaaaaagataaatgccacttattctcttaaaatactctccacatgggaattagatgagcaaagagaatctactttgagacttaggaagagtcgagctaacctgtagaatgaaaggagaaatttggagagtagataaaaggttttgttcccacccaattcaactgggctctcttttgctccttaaaaatacacttcaggccaggggcagtggctcccacctgtaattccagcactttgggaggccaaggcaggcagatcacctgaggtcaggagtttgagaccagcctggccaacatggtgaaaccccgtctctactaaaaatacaaaaattagctggacgtggtggcacatgcctgtaattccagctactcgggaggctgaggcagaagaattgcttgaacccgggaggtgggggttgcagtgaacttagatcataccattgcactccagcctgggagacaagagcgaaactccatctcaaaacaaaacaaaacaaaaatgcattcagaaatccaggcctttcccaacacacacacacacacacacacaccttctataagacaacagaaattgcctcactgactttattctcagaacttggcatcttggtcctaaggaggatcccagataacttcacagagttttctagtcacccaagtaaaagactgcttttcccatctagaaagccttatcatttgattttgtctttaaacctacccatatctttgggctccacaggggcaagcactacagtacatgactctgactggttggcaataagcaggtttttaatttcattaataaacccccatatttaagccacacaacaaaatgaggagggggattggggttggaaatagaggtgggcaatggtccactgagagctctgggacccttcccagctctccccaaaacattagctctggcctgattgacagaaagtaactagcactgcccttgaggtgctgcgtgctgagtcctctgtgctgaaaccaagtcgccttgtttttagaaggcagaatcccttctccttccataaagcctagactacagaaaatgggctctaagaacatgtttcctcccctacaacagttcatttctatgaggaaagaaagagcaaatgtgggaatagaggatacattcttttgtttaccttttttgttttttgcctttctacctagagccaggcacggggggatactacactgagtaatgacctcgtgctcatggagcttattgtctagctggatgttgacaaaggttctctgctgaccaaactttagtcaaactcttaaaccttctcctaggcccatctgtgcacttcctcgtaaaacccagttttagcaaagaactctgctaaatcactttagcaagatcccc

SEQ ID NO: 82157 - DNA, 1219 bp, Homo sapiens
gtagagtttgaggaataaaatgaacactcatgtaaccaccatgcaggaaaagaaatagaagagagttgcagaagctccaccctccccatatgtctcccctgtcacagcttccttcctctccccaagaagtaactcatgtcctggatttcgtgataatcatttccttgcttctctttatgactttattgcctatgtatggatccctaaccaatatagctttgtttttgaaccttatataaactgaaccatactgtattcatattcttgagactggcttgtgtctctcaagtttgtgaaattaatccatgttgttgaagatagctgtggttctttttcttttaattactatagtattccattatatgactatgtcacaatttatccatctrttgctaatggacatacaggatttttccagttggggaacgacaaacagtgcttccgttaatattgttgtatccattttctccactatctgaacatgcagcattctttttgttgatattgttgagaattcactctacctctggaagcagtgaaagccctaggggaagaaaaattcaaactagtttgcacaaagaagatttaaataggtagacaagagtctcaaagtgtgcttgtaaatgtgtgtttgaaaactttgtgtttctcaaagtgtgctccaagatggcccacaacaaaatcatgtggagaatttgttaaatatacagattaaagacccagcccaaacccaccaaccaagaccctctgcagttatggcctggaaagctgtgttttagcaagcttaccaccgcccgccccccacatgactcatgtagatcaccaaccctctaccttttttttttccttttttcgtttgttagcatttagttaagctccctccttgtggcttgaagccaccagaacacagcctccctacctccccccacatatacacccttaatcttctcccagctctcctgccgaagaacttggccttcgtgacagcaggctactttgggagtttcccttcctcagaattctgcagtagcccatagcactccatcaatgatgggagcagctccagcctgttttatttattattatttttttttgtcagcgtgtgattactcatgtctcctgactgaccaaggtccacatttgtcaaggtcaagagttgggcagaagctctggtttctctttaagaggtaatgcctcataaccaactttaccaaagtaa

SEQ ID NO: 82158 - DNA, 573 bp, Homo sapiens
gagtagctgttccagctttttctaagccatacccaagaccaaatttaagaaaatatgtatttaattttaaatattgratttctaaataaatacattcacatttcatttcaaaatgtaatactctctcccacctttgggggttacgtaattagaaatcctcatggtaggaaaaatttctagttagaaacttaagacttcacagggaacaatgaaattagagaataaacttatgaaagagcttagaaaagttttctattcacataagtaaaaatatctcataagaaaacagaaaataagtaaacaaattggtagattacacattttagtgatttccactgaaatcactaaatccactgaaatccaagaaaagatggtcaatcttttcttacttttctttcccctacagttttaacaaaaacgtgtaaattcacttaaatttcgactattaaaagaggcttttccttcttttgtatggtcctttattcaaatatttgattttaatattccttcttgtctcctgtatcttctcatagtcctaaagatgcagaaaaatctggatgcttgaaataaata

SEQ ID NO: 82159 - DNA, 1259 bp, Homo sapiens
attttgagagagacagtttgggattctgtgcctctctcctcctattctctcttgaacccatattaaccaggttttgccctcaatatttccgttaaaagttctcctgccaaagtgactgacatcctctataccgctaagtctgagtttcctcctctctcggtcgctccccctcatccctgaaacagcattttcttcactggtttcaaggactcaagcttctcctgggcctgctcaacagctgtgatgtctgggccttgtctacagactttgtcaattgagctttgcatttattctattttggatccataaatcttccctcttctggggtgagtggggtcagacggtcccgaggtaacggttacaacagcatccctgaggctacatctcaggagaaggtttcaaacagcaaggaagccctcacggggcctcacatttgaaccacagttttttggcaaaatcactacggatctgcttttggcactgcaaggacactgacaaggacagagtggcttcacagcacagcaaccgtgtttcacctctgcattttatcattgggaagggccaaattacatgcacactcagtgcatgtataagaagtcaaggagtaataggatttaattgccacagtgaagagaaacaagccttcagctctatgtggtccctaaggattaataaagcgagtrgctgctttgagatttatttattactagcggtgagatgtaatttcaatcctgcagtaaaagaaactgacatgctcaggttaattcactgatttaaagcactgagcaaaacatagtttttctattttacttccccccaaactcacacttttttcaagtataattattaaggtttctggaatgtttaaggaaaagtccatatttgtgttgattaaccattaagcctatcagtggtaaagagatctaattataactgatacaaggaaaagcggctgaaggcagaccttacggatccagtcctggtccaggttttcagcaggcagtctatagtggctatgccaaaacattgctcaataataattaacttacagctactttaatagaggttccgattttaccaggagcatgggtgtcagtggatacagacttactaaagggcagacgcgcctttgcattcctgtggaacaccaatgtgctgagacaactgtgctaatcaaggcttgggagctttgtgatgtggataagtattgaaaaaaagatgacttcatctcgggagaaagaaacaaccaacgtgcctat

SEQ ID NO: 82160 - DNA, 629 bp, Homo sapiens
aaatgatctgcctgccttggcctccgaaagtgctgggattacaggtgtgagccaccgcgcctggcctatcacaattcttgattgtttaaagtgcaattatttggagaaaataattttaaatgttctctgggaatttattgtagaaagcagttagacttttaccagtggtcacaacttcactgatgagaatgataacccattaataaaacagccctcttcttctgagacttgaytttgaatattctgatctagataggcagattctaaagctactcaacaccccgaaccctgtgaccacatctcccagagcagggtactgggactggtttccgttcccttggcatgtccctgaggcaatgcttgaagacacctgtaattgccacaagacacattttcctaacccccaggctgccagtcaattgctagttaccagcttctgaaaaccatacagggaagggattaagaagtgggctctggaattaagccacctcgttcagttcctggccctgccactcactaagggatattgagcaagttacttagcttctgtgcctggagtcttacccaaaacatgccggtgataatgacagtgcccgctgtgagggtgaggaccaaaggctctaacacgg

SEQ ID NO: 82161 - DNA, 629 bp, Homo sapiens
aaatgatctgcctgccttggcctccgaaagtgctgggattacaggtgtgagccaccgcgcctggcctatcacaattcttgattgtttaaagtgcaattatttggagaaaataattttaaatgttctctgggaatttattgtagaaagcagttagacttttaccagtggtcacaacttcactgatgagaatgataacccattaataaaacagccctcttcttctgagacttgattttgaatattctgatctagataggcagattctaaagctactcaacaccccgaaccctgtgaccacatctcccagagcagggtactgggactggtttccgttcccttggcatgtccctgaggcaatgcttgaagacacctgtaattgccacaagacacattttcctaacccycaggctgccagtcaattgctagttaccagcttctgaaaaccatacagggaagggattaagaagtgggctctggaattaagccacctcgttcagttcctggccctgccactcactaagggatattgagcaagttacttagcttctgtgcctggagtcttacccaaaacatgccggtgataatgacagtgcccgctgtgagggtgaggaccaaaggctctaacacgg

SEQ ID NO: 82162 - DNA, 650 bp, Homo sapiens
agtaaaataaacttatagcaagtcctatcttaggataccattaattccttaacacctctaagaaaattattctttcccagataaaatatccaatatttcttcccctgccctattcaaaataaaacaaacaatagccacaaaaatattaaagagccttttcaaaggacttaaatataatacaaataaagacttgcttaaatattgtttagcttactggttaaatatattcttttaacagctcttttaaagtttcctagatctcacaaaataaaacttaagtcaagtgtgtttactcttcaaagggctcatgcccatggcaaaattaacttttggccatactttctacaaatatctatttcaaataattcttcccacagaartgagccaatggtctaataaaacattcctgccacaggggagaaaattctgtaaggaacagcaaaattaaaaatgttaaattaggctggaggtttttcactgaagatcaacctccttcagctgttcactgattgccatgtctgatggtttttcattcacacatacaaatatacaaagttgcacttgagactttttaattttagtgcaaaagtacttcaggattatacatgttgtatagaaagagtaatactgaaacaggaatcaggaaactt

SEQ ID NO: 82163 - DNA, 611 bp, Homo sapiens
atgtaggtgcctccagttgaaagccacatctgaactctccagccaacaggttgcatcaatagccagacattttaatgagctattttttttgtaatccagtcaagccttcagatgactacagacttaatcaacatctgactataaatgcatgaaaaacccaagcaagaactgtccaggtgagcccagtcaaccaacagaaccaaaagatatagtaataaattattttaactttctaactttgtttcacagcaataaatattcagaacatctctcyttataaaaataaacaaaaaaccttactgcccataaagcagctagtgcccgttctctacaactgagaaccccgatcaatacatctatattcataacacagcaataaatatttagaacatctctccttataaaaataaacaaaaaaacttactgcctaaagtagctagagtgtctgttttctacaactgagaaccccaatcatctatattcataagtgcaactagcttctagtttcttttatctgtgctatgcttgtacaattttgatctgaaatatatagcttttagaaataaagtatttttgctccttaataggttgtaagaatttagttataacat

SEQ ID NO: 82164 - DNA, 886 bp, Homo sapiens
catgttttatataaatggtttcatattccatatataattcagtaactagataatctttccaccagtctacatattcctacttagagtatagagtaatttaycttacttatttataaataccttgtattaaaatgtattttaaaaccataaagggatattatggataaatatttagtggcataaatatttagcaggttacaaagcaatatactcaagataaattcatttttattaaaaaaattttttaaagaatctagaagtacccacatccatacccacacatcaacaataacactgagtcataggattacgggagattttctgtattttataatatttgtattatatgtatatgtgtgtgtatgtatgtcctttgtaaacaggtaaatacacacacacatatatatacacaaaacaagaacaacaaacacaaaccataaaataagatggtagtcattttttttttttttttttttttttgcgacggagtctcgctctactgcccaggctggagtgcagtggcgtgatctcggctcaccgcaagctccgcctcccaggttcacgccattctcgtgcctcagcctcccgtagctgggattacaggcgcccaccaccatgcctggctaattttttgtatttttggtagagacggtgtttcaccgtgttagccaggatggtcttgatcccctgacctcgtgattcacccacctcggcctcccaaagtgctgggattacaggcgtgagccactgcacccggctagcattttttaaagtgtctcccttataataaaacgaaaggttgaaattcttcaatttgaaaataaatattctcataatggataaaaaataaaaatcaaaattcagctatattatatttctaagaggc

SEQ ID NO: 82165 - DNA, 886 bp, Homo sapiens
catgttttatataaatggtttcatattccatatataattcagtaactagataatctttccaccagtctacatattcctacttagagtatagagtaatttaccttacttatttataaataccttgtattaaaatgtattttaaaaccataaagggatattatggataaatatttagtggcataaatatttagcaggttacaaagcaatatactcaagataaattcatttttattaaaaaaattttttaaagaatctagaagtacccacatccatacccacacatcaacaataacactgagtcataggattacgggagattttctgtattttataatatttgtattatatgtatatgtgtgtgtatgtatgtcctttgtaaacaggtaaatacacacacacatatatatacacaaaacaagaacaacaaacacaaaccataaaataagatggtagtcattttttttttttttttttttttttgcgacggagtctcgctctrctgcccaggctggagtgcagtggcgtgatctcggctcaccgcaagctccgcctcccaggttcacgccattctcgtgcctcagcctcccgtagctgggattacaggcgcccaccaccatgcctggctaattttttgtatttttggtagagacggtgtttcaccgtgttagccaggatggtcttgatcccctgacctcgtgattcacccacctcggcctcccaaagtgctgggattacaggcgtgagccactgcacccggctagcattttttaaagtgtctcccttataataaaacgaaaggttgaaattcttcaatttgaaaataaatattctcataatggataaaaaataaaaatcaaaattcagctatattatatttctaagaggc

SEQ ID NO: 82166 - DNA, 886 bp, Homo sapiens
catgttttatataaatggtttcatattccatatataattcagtaactagataatctttccaccagtctacatattcctacttagagtatagagtaatttaccttacttatttataaataccttgtattaaaatgtattttaaaaccataaagggatattatggataaatatttagtggcataaatatttagcaggttacaaagcaatatactcaagataaattcatttttattaaaaaaattttttaaagaatctagaagtacccacatccatacccacacatcaacaataacactgagtcataggattacgggagattttctgtattttataatatttgtattatatgtatatgtgtgtgtatgtatgtcctttgtaaacaggtaaatacacacacacatatatatacacaaaacaagaacaacaaacacaaaccataaaataagatggtagtcattttttttttttttttttttttttgcgacggagtctcgctctaytgcccaggctggagtgcagtggcgtgatctcggctcaccgcaagctccgcctcccaggttcacgccattctcgtgcctcagcctcccgtagctgggattacaggcgcccaccaccatgcctggctaattttttgtatttttggtagagacggtgtttcaccgtgttagccaggatggtcttgatcccctgacctcgtgattcacccacctcggcctcccaaagtgctgggattacaggcgtgagccactgcacccggctagcattttttaaagtgtctcccttataataaaacgaaaggttgaaattcttcaatttgaaaataaatattctcataatggataaaaaataaaaatcaaaattcagctatattatatttctaagaggc

SEQ ID NO: 82167 - DNA, 886 bp, Homo sapiens
catgttttatataaatggtttcatattccatatataattcagtaactagataatctttccaccagtctacatattcctacttagagtatagagtaatttaccttacttatttataaataccttgtattaaaatgtattttaaaaccataaagggatattatggataaatatttagtggcataaatatttagcaggttacaaagcaatatactcaagataaattcatttttattaaaaaaattttttaaagaatctagaagtacccacatccatacccacacatcaacaataacactgagtcataggattacgggagattttctgtattttataatatttgtattatatgtatatgtgtgtgtatgtatgtcctttgtaaacaggtaaatacacacacacatatatatacacaaaacaagaacaacaaacacaaaccataaaataagatggtagtcattttttttttttttttttttttttgcgacggagtctcgctctactgcccaggctggagtgcagtggcgtgatctcggctcaccgcaagctccgcctcccaggttcacgccattctcgtgcctcagcctcccgtagctgggattacaggcgcccaccaccatgcctggctaattttttgtatttttggtagagacggtgtttcaccgtgttagccaggatggtcttgatcccctgacctcgtgattcacccacctcggcctcccaaagtgctgggattacaggcgtgagccactgcaccyggctagcattttttaaagtgtctcccttataataaaacgaaaggttgaaattcttcaatttgaaaataaatattctcataatggataaaaaataaaaatcaaaattcagctatattatatttctaagaggc

SEQ ID NO: 82168 - DNA, 886 bp, Homo sapiens
catgttttatataaatggtttcatattccatatataattcagtaactagataatctttccaccagtctacatattcctacttagagtatagagtaatttaccttacttatttataaataccttgtattaaaatgtattttaaaaccataaagggatattatggataaatatttagtggcataaatatttagcaggttacaaagcaatatactcaagataaattcatttttattaaaaaaattttttaaagaatctagaagtacccacatccatacccacacatcaacaataacactgagtcataggattacgggagattttctgtattttataatatttgtattatatgtatatgtgtgtgtatgtatgtcctttgtaaacaggtaaatacacacacacatatatatacacaaaacaagaacaacaaacacaaaccataaaataagatggtagtcattttttttttttttttttttttttgcgacggagtctcgctctactgcccaggctggagtgcagtggcgtgatctcggctcaccgcaagctccgcctcccaggttcacgccattctcgtgcctcagcctcccgtagctgggattacaggcgcccaccaccatgcctggctaattttttgtatttttggtagagacggtgtttcaccgtgttagccaggatggtcttgatcccctgacctcgtgattcacccacctcggcctcccaaagtgctgggattacaggcgtgagccactgcacccggctagcattttttaaagtgtctcccttataataaaaygaaaggttgaaattcttcaatttgaaaataaatattctcataatggataaaaaataaaaatcaaaattcagctatattatatttctaagaggc

SEQ ID NO: 82169 - DNA, 566 bp, Homo sapiens
taaactcaaccatattaataattacattaaatataaatggtccaccactctgattaaaagctagagattatcatttaactgaaaagcttcatcattgtcagcttcattatcctatttaaagaaattcctaactgatacagatagataagtcagtagttctttctagaacaattagtttacctttcagaaacgaaaaatgaaattagatcccaccttggacattagagaaacataaacttgaaataaataaataagttgaatttaaaaagtaaaatcatgaattaactagatcaggatttatttgatattaggatacatttttttaagcagtgataaaaacagaaaccataagggcatacttttaatatagcaaaacttcaaatgttttgccactccaagcagacaatgcaacagagaagaaatamagatggctaaaaaacagggacaaaatatgcttcatcgagaagacaatttttaaatatctaattggaaaagatttttaaaagcatgacattattcaatactcatgagaacatatggaatcaggcattctcataaaccatgga

SEQ ID NO: 82170 - DNA, 1079 bp, Homo sapiens
tacatagagagtaagcttttttttttttttgacagggtctctggttgccaaggctggagtgcagcggcacaatctcagctccttacagcctcgacttcttgggctcaggtaattcttccacctcagcttcctgagtagctgggattatgggcatgtgccaccatgctggctaattttttgtgtctatagtagagacggggtttggctacgtaggccaggctggtctcgaactcctggactcaagaagtttgccctcttcagcctcccaaagtgctgggtttacaggcttgagccactcactgtgcgcagcctagtgtgaactttttgaaaatggcaggtgtattagtccattctcccattgctgtaaagaactacctgagactaggtcaattgtaaacaaaagaggtttaattggctcatggttccgcaggctgtacaggaagcatggttgrggaaacctcaggaaatttacaattatggcagaatgctaaggggaagccagcatgtcctacatggctggagcaggaggaagacagagagtgaaggggaaagtgccacacacttttaaacaaccagatctcatgagaactgtagcaggagatagcactaggggcatggtgctaacccattagaaaccaccctatcatccaataacctcccaccaagctccacctccaacactggggattacaattcaaaatgagattcgggtggaggcacagatccaacccatatcagcaggttttgaattttctttcataacttgagtgcttggctcatggtgggggcttaaaaatatatattaatttagtgatgttcatattttccataaatggtgcttttatagaaatcatctgcttttgtctttaccctggagggcttttgaggtaaatagttccctgctggattataaaaagaatctactaacgctttaatttttcattttgtctctgtggctaaaatcaagctaggctcccagtatattagaaaataaagtatgttttgcaacacttttcttccagttggattcagaactgaaagtgaaggtagtcatggtattgattgacatttcttttttc

SEQ ID NO: 82171 - DNA, 1079 bp, Homo sapiens
tacatagagagtaagcttttttttttttttgacagggtctctggttgccaaggctggagtgcagcggcacaatctcagctccttacagcctcgacttcttgggctcaggtaattcttccacctcagcttcctgagtagctgggattatgggcatgtgccaccatgctggctaattttttgtgtctatagtagagacggggtttggctacgtaggccaggctggtctcgaactcctggactcaagaagtttgccctcttcagcctcccaaagtgctgggtttacaggcttgagccactcactgtgcgcagcctagtgtgaactttttgaaaatggcaggtgtattagtccattctcccattgctgtaaagaactacctgagactaggtcaattgtaaacaaaagaggtttaattggctcatggttccgcaggctgtacaggaagcatggttggggaaacctcaggaaatttacaattatggcagaatgctaaggggaagccagcatgtcctacatggctggagcaggaggaagacagagagtgaaggggaaagtgccacacacttttaaacaaccagatctcatgagaactgtagcaggagatagcactaggggcatggtgctaacccattagaaaccaccctatcatccaatmacctcccaccaagctccacctccaacactggggattacaattcaaaatgagattcgggtggaggcacagatccaacccatatcagcaggttttgaattttctttcataacttgagtgcttggctcatggtgggggcttaaaaatatatattaatttagtgatgttcatattttccataaatggtgcttttatagaaatcatctgcttttgtctttaccctggagggcttttgaggtaaatagttccctgctggattataaaaagaatctactaacgctttaatttttcattttgtctctgtggctaaaatcaagctaggctcccagtatattagaaaataaagtatgttttgcaacacttttcttccagttggattcagaactgaaagtgaaggtagtcatggtattgattgacatttcttttttc

SEQ ID NO: 82172 - DNA, 618 bp, Homo sapiens
tcctgtgggaggagtactgcccactgccaagaacacaggacaggctaggctaggactggtgggaagaagtaggtggtatggaaggcatatggaccagaactccaggaaccacaagaatgagctggaatgcctcgtgaccctcttagaaaatggtggggaaggccaggcacggtggctcatgcctgtaatcccagcactttgggaggtagaggcgggcagatcacctgaggtcgggagttcaagaccagcctgaccaacacggtgaaaccccgtgtctactaaaaatacaaaattagccaggcatggtggcgggcacctgtagycccggctacttgggaggctgaggcaggagattcgcttgaacctgggagtcagaggttgcagtgagctgagatcacaccactgcactccagcctgggtgacacagcgagactgtctcaaaaaaataaataaataaataaaaggggccgggcgctgtggctcatgcctgtaatcccagcactttggaaggctgaggcgggcagatcacaaggtcagcagtttaagaccagcctggccaacatggtgaaaccccgtctctactaaaaatacaaaaatttgctgggcatggtggcaggc

SEQ ID NO: 82173 - DNA, 520 bp, Homo sapiens
caaggagcaagtgctgaggggaggctctcactctgccctctgctgacaagagaatgcagatttttggggtcacagggcttggccaccacagttcaacccttgctagragccctgcttcagggactgcagggagggtacagtatggggagagcacactgattgagagcccctttcaggcccaaggggagtttccaagagaagggtgagggagagagagctggaaggagcccctgaaggtgttgaggggagggcagggaagactcccttggccttgcttccttctcagctcttcacacccctagcagaggcacctctctgggatgcgattttccatttgaagtctgaagaaaggagtgaagaagctgaaggcctggcagttgtgggcttttcttctgcctctgacactagatggccatgtgaacttgagcaagtcacttcctcctccgggcctcagctgccccatctgtatgtaccatgagggctccctatgacatctcgggccatgagctctgagagtcta

SEQ ID NO: 82174 - DNA, 520 bp, Homo sapiens
caaggagcaagtgctgaggggaggctctcactctgccctctgctgacaagagaatgcagatttttggggtcacagggcttggccaccacagttcaacccttgctaggagccctgcttcagggactgcagggagggtacagtatggggagagcacactgattgagagcccctttcaggcccaaggggartttccaagagaagggtgagggagagagagctggaaggagcccctgaaggtgttgaggggagggcagggaagactcccttggccttgcttccttctcagctcttcacacccctagcagaggcacctctctgggatgcgattttccatttgaagtctgaagaaaggagtgaagaagctgaaggcctggcagttgtgggcttttcttctgcctctgacactagatggccatgtgaacttgagcaagtcacttcctcctccgggcctcagctgccccatctgtatgtaccatgagggctccctatgacatctcgggccatgagctctgagagtcta

SEQ ID NO: 82175 - DNA, 645 bp, Homo sapiens
cccaaagtatagttagtgaaattatatttctctccagatagattcattccacttatttagtaaacatttattgaatgcctaatatagttcatggcatgtgctagcatgagactataggggtaaataagttagacatggcacctgccctgaaggagttgacaaaccaataaacgcagatgtcattagctrtgtgcgagaatatgacagaggtctcacggctgagacctgaaggataagagatcagccaggtgaaaagggaaaggcgaggcaataaatagcacgttcaaaggcctggaggtgaaggagcatattgactttgaggagcaaaagaagttcagtgtggctggaggggagaaaggagaaggtgagtgtggggtagattatggaggaccttatacaggctgttaaacacgttttgcttcatccacggggagatataatcctaagggtttttgcttgataggaaaatgacagatttgttttcttgattgaaaaatttctgataattttacagttagttttgcattgcaacagagattctctctctctctctctttttttttttttttttttgagacaagagtctcgctctgtcacccaggctggagtgcaatggtgcgatcccagctcactgcaacctccgct

SEQ ID NO: 82176 - DNA, 581 bp, Homo sapiens
ctaatgaattgcccggagatcttgttacacagaaaactacattttgattatcaaggctatttgactatcatggtaggggaatcagagatgaccaagacaaggtccctgtcttcctttggcttaaaatccatacaaaacagcatgggggagaaggtgagcagtgcccaaagggtggtggaaagacaacagaggaagaatttcaccggtttcaataaaaaatgcatgattttggtagacacttgacagatttartgagtaaggccatttggtaagagagagagttgggctacaccaaaactcagagaagtgtagatgaagccagtgtccatgcaacccagaagaatacgctactgggatcctttctttttttcgctttattctgatggcaattgctgaaggggaagagacatggcccagtcttggcatgggcaatgtgggtgttttactgtaggcaaagaaggcccaggattggctgtggggcacctcggagaaataggccctgagtaccggttcaggtgtggactcttcttacaaagggcaatgcagagagggccgagcagcaagcaagagcatgactcatt

SEQ ID NO: 82177 - DNA, 581 bp, Homo sapiens
ctaatgaattgcccggagatcttgttacacagaaaactacattttgattatcaaggctatttgactatcatggtaggggaatcagagatgaccaagacaaggtccctgtcttcctttggcttaaaatccatacaaaacagcatgggggagaaggtgagcagtgcccaaagggtggtggaaagacaacagaggaagaatttcaccggtttcaataaaaaatgcatgattttggtagacacttgacagatttagtgagtaaggccatttggtaagagagagagttgggctacaccaaaactcagagaagtgtagatgaagccagtgtccatgcaacccagaagaatacgctactgggatcctttctttttttcgctttattctgatggcaattgctgaaggggaagagacatggcccagtcttggcatgggsaatgtgggtgttttactgtaggcaaagaaggcccaggattggctgtggggcacctcggagaaataggccctgagtaccggttcaggtgtggactcttcttacaaagggcaatgcagagagggccgagcagcaagcaagagcatgactcatt

SEQ ID NO: 82178 - DNA, 581 bp, Homo sapiens
ctaatgaattgcccggagatcttgttacacagaaaactacattttgattatcaaggctatttgactatcatggtaggggaatcagagatgaccaagacaaggtccctgtcttcctttggcttaaaatccatacaaaacagcatgggggagaaggtgagcagtgcccaaagggtggtggaaagacaacagaggaagaatttcaccggtttcaataaaaaatgcatgattttggtagacacttgacagatttagtgagtaaggccatttggtaagagagagagttgggctacaccaaaactcagagaagtgtagatgaagccagtgtccatgcaacccagaagaatacgctactgggatcctttctttttttcgctttattctgatggcaattgctgaaggggaagagacatggcccagtcttggcatgggcaaygtgggtgttttactgtaggcaaagaaggcccaggattggctgtggggcacctcggagaaataggccctgagtaccggttcaggtgtggactcttcttacaaagggcaatgcagagagggccgagcagcaagcaagagcatgactcatt

SEQ ID NO: 82179 - DNA, 604 bp, Homo sapiens
aataaacaatgccttatgaaagtgcccagcatgcccactatagtgttactatttgttttttgaactttgtggtggtaggaggtacttcttgaaattttcactctcaaacatttattccttgagttaacccaccaacactatgactgcagtcattcactgattcgccaaaaattgggtaaatgattattttttgttttcattaaatgttcttaagtgtacggatagctcacatttakttcaatatttagtattaaaaatgtttgtttcgagtctttattcagaagtttggtgacgtttttgtgaccagaaatatgccataggaacttaacttttgtttatgtcgatcagcctgtggtaaaattggttttgttacatgtcattttgattaaagtcatagtttccaagaagctgtctccaacgagttttcagtgctcatctagactgaagtcacatataactttcactctatttcaaagattagtgccaatgtgtctctctttttgttttaagtccagaggtaatgtctcttagaaatagtcttctatctaaccattgcagggctctgaattgcagaatacgtaatgggaattacctccaaaacgtt

SEQ ID NO: 82180 - DNA, 1392 bp, Homo sapiens
tgagattttattatatagcttttagatgattcaactctatagggaaaattaaaagtttgtttagataactgccaaaaataagctgtgatactaaaccagatgattcatggataatgcttgaaaaatatttttctaactgctggttatattggttgttgatttgattgcttttgttcgtttgtttttttgagacagagtcccactctgttgcccaggctggagtacagtggcactatctcggctmactgcaacctctgcctcccaggttcaagcgattctcctgcctcagcctcccaagtagctgggattacaggcatgcatcaccacgaccggctaatttttgtattttgggtagagatagggtttcaccatgttggcctggctggtctcgaacccctgacctgaggtgatccacccgcctcagcctcccaaagtgctaggattataggtgtgagccaccgtgtctggctggttgctgattttattttttaaagtcatctacatttaagttagcataatatagcagctagaagtattttacactaaaactgtgtattaaaaatatttcatgtttcatgctttcatatttcatgtttcatgaagtattaaaaatatttcatgtttcatgaacaaaaaaaaattttgttcagtgaatcatcccctttggcccacattaggataacttctcatcttttttcctattaatgataaaaattgggacacagcataatggaattattattaattttttaccagaagagagaaaaattacatgatgaagaagaaagaaaaagtgcctgggttagccaagagagacagagaacactggatagacttcgaacatttaaacaggtattaaaagtaatggtccatttattgtttttcttttttttttttttttaacagagctacatatacacctgtaggatttctttgtgggaaaaacttggttttcccttatttataaactattataaccatggaagtcctttttaaaattgttttaatggcatggctccatttcctctggtggttttccgaatttagtattcttgtgacctttgacccacagcttcagtagtataagaggaatgataagggcctctgggaaacctagattcctcttgagtttaaaaaattagttaaatcacaactgactatccagctcaagcatcagcatgttatttattccacatacatcagcctgtggtggtaatacatcaaatgaccattggcagaattagaggtggaggggagcagcatatttgagaaatgcttcagcagttctcttgccagggtaagccatgaccacacactgataccacagtatccacacatctcctcagaactgtgctgaagcctcacagttctcatttttaaagtactctggag

SEQ ID NO: 82181 - DNA, 1392 bp, Homo sapiens
tgagattttattatatagcttttagatgattcaactctatagggaaaattaaaagtttgtttagataactgccaaaaataagctgtgatactaaaccagatgattcatggataatgcttgaaaaatatttttctaactgctggttatattggttgttgatttgattgcttttgttcgtttgtttttttgagacagagtcccactctgttgcccaggctggagtacagtggcactatctcggctcactgcaacctctgcctcccaggttcaagcgattctcctgcctcagcctcccaagtagctgggattacaggcatgcatcaccacgaccggctaatttttgtattttgggtagagatagggtttcaccatgttggcctggctggtctcgaacccctgacctgaggtgatccacccgcctcagcctcccaaagtgctaggattataggtgtgagccaccgtgtctggctggttgctgattttattttttaaagtcatctacatttaagttagcataatatagcagctagaagtattttacactaaaactgtgtattaaaaatatttcatgtttcatgctttcatatttcatgtttcatgaagtattaaaaatatttcatgtttcatgaacaaaaaaaaattttgttcagtgaatcatcccctttggcccacattaggataacttctcatcttttttcctattaatgataaaaattgggacacagcataatggaattattattaattttttaccagaagagagaaaaattacatgatgaagaagaaagaaaaagtgcctgggttagccaagagagacagagaacactggatagacttcgaacatttaaacaggtattaaaagtaatggtccatttattgtttttcttttttttttttttttaacagagctacatatacacctgtaggatttctttgtgggaaaaacttggttttcccttatttataaactattataaccatggaagtcctttttaaaattgttttaatggcatggctccatttcctctggtggttttccgaatttagtattcttgtgacctttgacccacagcttcagtagtataagaggaatgataagggcctctgggaaacctagattcctcttgagtttaaaaaattagttaaatcacaactgactatccagctcaagcatcagcwtgttatttattccacatacatcagcctgtggtggtaatacatcaaatgaccattggcagaattagaggtggaggggagcagcatatttgagaaatgcttcagcagttctcttgccagggtaagccatgaccacacactgataccacagtatccacacatctcctcagaactgtgctgaagcctcacagttctcatttttaaagtactctggag

SEQ ID NO: 82182 - DNA, 1470 bp, Homo sapiens
taggaaacagaggtcactttagtaacagggtcttgcagaggagttataggatttggtcttctgttaggtggttttaacagaggttcaagaagtagaggttagctctggattggatgctttcagaaaattgggtaattctatattattttaatgaatttcatttaagaagtgggaaaaacactgaaattaaatctataattggtaaataagcagcattcactcatactagcaaggaaaaagagctcttttgtctttttcttttttttttttagacattgtctcctcaggcatgaagtctggctccaaccgggttataaggttattttctggtcttggtgttatatgaaattatttgcattcaataggagaagattatggccaacctgtgagtgtcagaacagttccacgttgttgggctgattctcttctcaaaatattgttcattgcagagccatattacttactgaaacctctaagtatagtctgggattgcttatggatctaagtaatcttagagctgagattacttaatttctactattattttcttgataatgtatccctaagtttaatcttgttatttccatctgagatttgtgcttgtctgttattaaatattcttaataaaaatttaaaaaacaaacaaaaaagatattgaatattcttatttttctgtttcttatatttctcttttattttacatttttagcttttcttctatgtcctgatgtctctcactttatgttttagtgatagggactatctttcctgctctttggatccaatgttgcacttcctgtaccattgaaaacagttatgttcctaaaatcaagaccaaatagagtcatcattttagactccattagttggctttaccatattttcaaaatctcaatcaataattcactttaccatmttttctaacctgaagccctctagctttctgcttccatctggactaaatgatctttaggtctgtacaaaactgtcatcttgtcttcatacctctcttggttgagtgcattatttaacagatcacttgtctccctttttattccctctctttgctacaatatatcctgaaatgtcttcctaaaggagagttcacaaaaaagccaatttctgtgtctctgcctaaaatgcatttagttttccttcatatttaattgatgatttggccagacacagaattattgcttggaaatttaaaatcattaatgtgttgattattgattcataatttttgataaaaattttatgccagtgtgattgttgatttttttatacccccatctctctctctctctctccatatttctgtagagaaaggaatcttctgtgtctccttccctcagaattttctctcttctttttagatgtcttgaatttcataatagtattataattttttcattcctttgactgaacactcaatgtacttatgattctaacaatttatacctttttatc

SEQ ID NO: 82183 - DNA, 741 bp, Homo sapiens
atggcagaaaaaaaggcaagagaattctctggaatcacttttacaaatgcactaatctcattcagggctgcttcttctctggaatcacttttataaatgcactaatctcattcagggctgcttcttcgtgacctaattaccactcaaagccctacttcctaccatcacgttgggggttaggatttcaacagtcacctagctaataagaggcagaagtagaatttgaatccaggcagcctgactccagagaaattgcttcatttttatgaaagaacttttttttttttttttagcgacaaggtcttgctatgttacccaggctggttttcaacttctcagctcaagtgatcctcttgccttggcctcttgagtagcaggcagatgctaccatgcccagctcagaaattgctgtttgtttgtttttacttttttctattttaaaatctatcaaaattcaaaagagtgtatacaacatatatgtacaataataataataaacaataataacatggtcactcatctacccattacccagcttaagaattagaaygatgccaagatgttatgcctccaccataacatctttcaaccctatgaaaaagaaccagttttctgaatttttacttaattgtttgttcttctttatatttgcaatagaaaagcatgtattcctaaatgacttaccatttagttgtatctgtctttgcaattgatacaaatgaatttatatagtatggatcc

SEQ ID NO: 82184 - DNA, 497 bp, Homo sapiens
attgaacactttactgtgttctggcactgtgattatgcacttttaacatacatgagtgcatttatcctcctaaccccctacaakttaggtgctacttttatctccattttacagatgaggaaacaagacttcaaagatttagttaccctccttaggcggtacagtggctgagctgggatttggatgctggccatctgacccacagtccaggtggctgtacacaactacagacttcaccttcactccctcttggattctgccctatctgcgagtgccccccatgcttttcagatccaaccacaagtgacctcctgtatttcccactgcctttcttctggcccctttttttgtcacttttctcccatatgaccccagagactctccctcttccttttcactttctcatcagcctcacttatttgaaaccactcttcttaattgcctttgacaccctgatatttgacagctcagtctctgctctgcttttcatcggatcc

SEQ ID NO: 82185 - DNA, 1040 bp, Homo sapiens
atttttgtacactgattttgtatcctgagacgttgctgaagttgcttatcagcttaaggagattttgggccgagacaatggggttttctagatatacaatcatgtcgtctgcaaacagggacaatttgacttcctcttttcctaattaagtaccctttatttccttctcctgcctaattgccctggccagaacttccaacactatgttgaataggagyggtgagagagggcatccctgtcttgtgccagttttcaaagggaatgcttccagtttttgcccattcagtatgatattggctgtgggtttgtcatagatagctcttattattttgagatatgtcccagattagagctcttttctgtatgtatgtgatagtgcaaacatttttttaaagagttagcctgatttttctctatgtgataaaggagtggtaaatatcttcatgtgtacccaaaagcccaaatccaaatttcagaaagtgtcatccaggtaaaaaacaaaaaggaggtcaggtttcaaatgagagattagattccatgtcttccaattctaacattctgtgattctatgatgtcaccttttgaaaattgatacagaacccaatggcccacagtcctggatttctggatctaaccatggttgttctgaaaagagtgaaaggagacagtagagactttctgatactgtttatgtgtctgtatctccatctccaatttctcctacaatgcaaataaactcctataagtacaaagggtttaaaagaactgggtatggtatttttaaagatgttgtgactttttaaaattcagaggcttctaatatcctcaagcattagaccagaaaacttaagacctggttttataataacaaaccaaagccctccatttcttgaaggcttcctgcataccaggcaccatgttaattttttttttacatattgtctcatttaatcctcataagaccctgtgagataggcatagacttcctcaacagtaaaaaaggtgagtcatgtcccatgtctgagcctcagattcaaatc

SEQ ID NO: 82186 - DNA, 1040 bp, Homo sapiens
atttttgtacactgattttgtatcctgagacgttgctgaagttgcttatcagcttaaggagattttgggccgagacaatggggttttctagatatacaatcatgtcgtctgcaaacagggacaatttgacttcctcttttcctaattaagtaccctttatttccttctcctgcctaattgccctggccagaacttccaacactatgttgaataggagcggtgagagagggcatccctgtcttgtgccagttttcaaagggaatgcttccagtttttgcccattcagtatgatattggctgtgggtttgtcatagatagctcttattattttgagatatgtcccagattagagctcttttctgtatgtatgtgatagtgcaaacatttttttaaagagttagcctgatttttctctatgtgataaaggagtggtaaatatcttcatgtgtacccaaaagcccaaatccaaatttcagaaagtgtcatccaggtaaaaaacaaaaaggaggtcaggttycaaatgagagattagattccatgtcttccaattctaacattctgtgattctatgatgtcaccttttgaaaattgatacagaacccaatggcccacagtcctggatttctggatctaaccatggttgttctgaaaagagtgaaaggagacagtagagactttctgatactgtttatgtgtctgtatctccatctccaatttctcctacaatgcaaataaactcctataagtacaaagggtttaaaagaactgggtatggtatttttaaagatgttgtgactttttaaaattcagaggcttctaatatcctcaagcattagaccagaaaacttaagacctggttttataataacaaaccaaagccctccatttcttgaaggcttcctgcataccaggcaccatgttaattttttttttacatattgtctcatttaatcctcataagaccctgtgagataggcatagacttcctcaacagtaaaaaaggtgagtcatgtcccatgtctgagcctcagattcaaatc

SEQ ID NO: 82187 - DNA, 1040 bp, Homo sapiens
atttttgtacactgattttgtatcctgagacgttgctgaagttgcttatcagcttaaggagattttgggccgagacaatggggttttctagatatacaatcatgtcgtctgcaaacagggacaatttgacttcctcttttcctaattaagtaccctttatttccttctcctgcctaattgccctggccagaacttccaacactatgttgaataggagcggtgagagagggcatccctgtcttgtgccagttttcaaagggaatgcttccagtttttgcccattcagtatgatattggctgtgggtttgtcatagatagctcttattattttgagatatgtcccagattagagctcttttctgtatgtatgtgatagtgcaaacatttttttaaagagttagcctgatttttctctatgtgataaaggagtggtaaatatcttcatgtgtacccaaaagcccaaatccaaatttcagaaagtgtcatccaggtaaaaaacaaaaaggaggtcaggtttcaaatgagagattagattccatgtcttccaattctaacattctgtgattctatgatgtcaccttttgaaaattgatacagaacccaatggcccacagtcctggatttctggatctaaccatggttgttctgaaaagagtgaaaggagacagtagagactttctgatactgtttatgtgtctgtatctccatctccaatttctcctacaatgcaaataaactcctataagtacaaagggtttaaaagaactgggtatggtatttttaaagatgttgtgactttttaaaattcagaggcttctaatawcctcaagcattagaccagaaaacttaagacctggttttataataacaaaccaaagccctccatttcttgaaggcttcctgcataccaggcaccatgttaattttttttttacatattgtctcatttaatcctcataagaccctgtgagataggcatagacttcctcaacagtaaaaaaggtgagtcatgtcccatgtctgagcctcagattcaaatc

SEQ ID NO: 82188 - DNA, 797 bp, Homo sapiens
acagaactctggctacagagttccagcttgggatgacaaaaaawgttctgaagacacacagttagtgaggattacacaaaataatgtgaacgtactaatgttactgaactgcaacttaaaatggttaagatgatacttttcatattatgtacattctatcacaacaaaaacttaaaaataaatccttttctacctcacttggcctaagaagtgcagaaattgaattaattgtcctaacatgtctgcatgtagtaaaggataatttgattccaaaggaaaaaagcaaatgctggtcccataagagtcaatgcatttttttccccaaaaagggcagaactggacacttgaaatattatagaataataagattcaatatttctggctggacacggtggctcacgcctgtaatcccagcactttgggagcccgagtcgggcagatcatttaaggtcaggagttggagaccagcctggccaatatggtgaaaccctgtctctactaaaaatacaaaaattagccgggcaaagtgatgggcacctgtactcccagcaactcgggaggctgaggcaggagaatcacttcaacacgggaggcagagaaaaaaaaaagatacgaggtttctgataccagaaagctcaccatcaggcagatacatataagttgttttctgggttttttttttttctttccttaattgcaataaatctgtattactcaaggccgtgattgtgtgctgtttagatcactgagacatctaagctatttgtagctctttggaaactcctatgcttggatcc

SEQ ID NO: 82189 - DNA, 1048 bp, Homo sapiens
cagcaaccataagaagctaggaagaggcaaggaagcattccctcctagagccttcagagagagcatggccctgttaacacctcagttttggacttctggcctctaaaactatgggagaataaatttctattgtttaaagccacttggtttgtagtcctttgtgatggcagccctagaaaactagtacagcctcctatcaaggtgtggtactaaagcctggggcataccattaaaatgatagaaagggratggtattcctctattctaagatgtgcattttacatttctgaaagaggagtggacgttacaattttactctattttaatgtgattgttgcagggataatcttatcccaaaccagttatgcccttatttttgtctatattcaaacttaatttttattttattcttattggaaaagtggaaacttgatcaagctgcctttatctctgccttctccctggagttatagctaaatttcaaagtacctgtgtagtaagtgccacagtgtagaaaggagtaagacttcatttgttctgtgttctgtagcatgcctccctgcaggggtacatcctcccctctagtcctcagtccttggtctctgttgttcaaagcttagatttcctgtttctttgtgcctggcccttcaggtccattggtcctctctgctaagtccaagccgtgctggggtaagttgatctctgggatattgtgtaaggtcctatctgcctacattcagtaaacagcctctctctgtgctcatcaattggctgcaatagttcatttatctgctttccattgtcacctccctcccatgtgatcatgagcacagcttggctgctctgagtgcaatgtatcaaaggagacagtggggaaatattggagggaaattaccagttttcaaaagtactgtatatctacatttcttatctagaaaaatagttactaaaagcttttaatcctacaaaagtactatttctttccctgatggcccttccacaccccttctacccacttgccccacccaccctactatgtttcggatct

SEQ ID NO: 82190 - DNA, 792 bp, Homo sapiens
ggacagaactacctagctggctggttgatgtgtaagcaatgatatatgatggttatgttaagctattgaattttgggaatgattggttatgtatcatttgtaaactgatacagtgatattactgaatcatgttatgtagaaacctgtttatgaagaaaaatgtttttttgttcttagaagataccagctgatgaataggtgtgaaatattacgaaatatgcactttcttttaaatggtatagcaaaaataaagtgtgtgtggtcttgtgtgtgtgcatgtatatatatatggagagaaagagagagagagagattgagaatmcagatatgatgaactgttatattgtgtttgttgaaaaggacatatttattgtactatttaaacttttttgtagctttgaatcttttcaaaataaaatgtttggagcatttcttaatattggcttacttggacatcatctccccaacctcaccttttttttcctttaaaagctgaatttgagatagagaaaaaaagggtcataaagattatagtttgttgcactctatgtaatcaagtttgtttatttggagatggagtctcgctctgtcgcccaggctggagtgcagtggcatgatctcagctcactacaacctccgcctcctgggttcaggcgattctgccacctcagcctcctgagtagctgggattacaggtgcccactgccacacctggctaatcttttttgtatttttaatggagacggggtttcaccatgttggccagtctggtctcgaactcctgacgtcaag

SEQ ID NO: 82191 - DNA, 1020 bp, Homo sapiens
cttaaaacctagataacgggttgataggtgcagccaactaccgtggcacacgtatacctgtataacaaacctgcatgttctgcacgtgtatcccagaacttaaaagtaaaaaaaaaaaaaaaaaaaaaaagatttgttatttatgcaaaacaatacagagccatctaaaccaatatgatgaggactagtatttgatcagtatttcccaaaatgtttaaagagaaaaattataaaagaactatatttaaagcattttatattaaccaaaacatacacatatctatttattttaacttgtaggtatagattcttttcttggaaaactaatctttaaatcagaatttttttctttcttgcatcatttatatccaggaagcaaaatggaaacttaaaatttgatatctttaaactgaaacaagaaatcaaggttacacatgaaacaattagagtacacaggcatatttagatgagttgtttccttttattttatattctcgaacccctaacctaaatagataacttttgcttagcgtcttcttttcatggagactttctataaaaaaatcacgcacgttttattagattacttaatgttgagaaatgaagggttttctatatacagtcttttcttctgttgtacgttttattgaacataggaatttgcctcaacacaattgattattagtaacattttgagcataaggcaaatttcacttttgcttgtgtgtaatttcatctttaagaatcacaagctgaacagagaaaattgcactcagcagaattaagccttctaaaaatacacaaatatgtacgcgcacacacactcacagatctaccagttatctcagtactataagccacgttctttcatatctgatgttataacttttcctgtcatttcagataatgcttacaacactgcttcataaaagctaacaagctgcatttcttctgacatccayttacaaacaaatttcaggtccttttcaaggtggagtgccatattgtactatttatgca

SEQ ID NO: 82192 - DNA, 1215 bp, Homo sapiens
actaatgatttttctgtattagttaagatatttttggtacaaaaactgaatatcttactatcaatggtttatggaataaagatactttttgattcaggtaatgagaagtttgaagtaggctgtttcagggctccaatacgtgactctgtggtaccatctcggaccactttccgtctctacactttgccctctggagattatttgttttcttcctcatggtggtttcaaccttgacacatggttcctgtacattccccacacattacatctttggtcaactgagggaagtgtcagactgtgcatgaattcgcctcacatctctctatttatcaaagagaaaaatattctccagaagttgatgtcaagagttctgtttttgtgtctcattgactagaattgttcaagcaaagctggaaagtgggtaactggtgttttcagactttttcataaaagagaaattatgttcataggaataaaagttggtgatttttctgtttaacaattatcaacatttgcataatcattgtaatgtgtttaatctcattaatatatgatttttaaatatttactgtttattttcattttatttatttatttatttatttttgagacaggttctcactctgttacccaggctggagtgggatcacatctcactgtatcctcaacctcctgggcttaagcgatcctcctgcttcagcctcctgagtaatggggatcacaggtgcatgccaccatgcctgcctaatttgtgtaattgcttttttcgtttgtttgttttttagagacacgttttgccatgttgctcaggctggtcttgaactcctgggctcaagcagtcctcctgccttggcctcccaaagtgctaggatwataggtgtgagccactgtgccagataattggtttattttataaagaatatttaccacttatatgtgtagattcagtaattaattgactgaaactacattttcactattaaaaatcagcaatgtttcaacataaagcacagaaaattttcattgtatatttgtatcttattcctgagtaacagcataaaattaaaaacaaaacaaaaaaagaaacaaattatttactgttcgcaaagaaaacctatagttttctgattgtgtctgattttctctcataatgaatttccaagttgcatattttggtcattaagcatgtacttttcatgaattatgttctaaaat

SEQ ID NO: 82193 - DNA, 1215 bp, Homo sapiens
actaatgatttttctgtattagttaagatatttttggtacaaaaactgaatatcttactatcaatggtttatggaataaagatactttttgattcaggtaatgagaagtttgaagtaggctgtttcagggctccaatacgtgactctgtggtaccatctcggaccactttccgtctctacactttgccctctggagattatttgttttcttcctcatggtggtttcaaccttgacacatggttcctgtacattccccacacattacatctttggtcaactgagggaagtgtcagactgtgcatgaattcgcctcacatctctctatttatcaaagagaaaaatattctccagaagttgatgtcaagagttctgtttttgtgtctcattgactagaattgttcaagcaaagctggaaagtgggtaactggtgttttcagactttttcataaaagagaaattatgttcataggaataaaagttggtgatttttctgtttaacaattatcaacatttgcataatcattgtaatgtgtttaatctcattaatatatgatttttaaatatttactgtttattttcattttatttatttatttatttatttttgagacaggttctcactctgttacccaggctggagtgggatcacatctcactgtatcctcaacctcctgggcttaagcgatcctcctgcttcagcctcctgagtaatggggatcacaggtgcatgccaccatgcctgcctaatttgtgtaattgcttttttcgtttgtttgttttttagagacacgttttgccatgttgctcaggctggtcttgaactcctgggctcaagcagtcctcctgccttggcctcccaaagtgctaggataataggtgtgagccactgtgccagataattggtttmttttataaagaatatttaccacttatatgtgtagattcagtaattaattgactgaaactacattttcactattaaaaatcagcaatgtttcaacataaagcacagaaaattttcattgtatatttgtatcttattcctgagtaacagcataaaattaaaaacaaaacaaaaaaagaaacaaattatttactgttcgcaaagaaaacctatagttttctgattgtgtctgattttctctcataatgaatttccaagttgcatattttggtcattaagcatgtacttttcatgaattatgttctaaaat

SEQ ID NO: 82194 - DNA, 1098 bp, Homo sapiens
ctgggtttggggcttcagcagccgaaaaggcaagaagtcccggtgcactcacagctctggcaggccccttgtatgctacctcctgtcggtcccttcctctcagtttttaccatccctgccttgctggcagcacttgccacctctcacctagattattacacagaatagtcccctctccgggcttcaccttgtccccacccctgacctctgggcatgttccataatgatactatctctctccatctgtcycagattaaaactcttccctgggttcccattgcctaaaggagaaagtctaagcttctaaatatggcctacaagtctttcaggacctgggccctgttcccttccccaccctcatctctcaacacccttttctccccactttaacacctccagaaagtactggctctattggtgctgggtcagaggtcactacttggcctatacttgcccttctgcctggaaaaccagtattctaccttattaacaccatccacgtggaaaacttgtattcatttttcaaaattcagctaaaatattagctttttatgctgattgtcaacatttaagaatgtactatgtatgataggcactgtgctaaatgtttgtttcatttattctctacaagaaccccatgaggtaggtaccctttttattctacatttactattgaggaaatggaaatggcagttagctaatttaggtaactttccaatggttgtacaatagtaagtggtagaaactggattcaaacccaggatgaacccagatcccaccttccaccggaccacttcacatttcttctctctgggagagcctttctggttgctcctgtctcccagatggctcatgtggtggactatactcttgtttataaacactcgctgcccctccctgggagaagatcaacattattatttcctgtcctattggtgtcaattttggccatgtgacttgctttatcccatgaactataggcagaaatatgggtattcttcctggatagacagtgtgggagccagggcatggttttgcttactcttaactctcttaagtgagcctgtccagagagaggttacttcagcatcctgggtc

SEQ ID NO: 82195 - DNA, 1098 bp, Homo sapiens
ctgggtttggggcttcagcagccgaaaaggcaagaagtcccggtgcactcacagctctggcaggccccttgtatgctacctcctgtcggtcccttcctctcagtttttaccatccctgccttgctggcagcacttgccacctctcacctagattattacacagaatagtcccctctccgggcttcaccttgtccccacccctgacctctgggcatgttccataatgatactatctctctccatctgtcccagattaaaactcttccctgggttyccattgcctaaaggagaaagtctaagcttctaaatatggcctacaagtctttcaggacctgggccctgttcccttccccaccctcatctctcaacacccttttctccccactttaacacctccagaaagtactggctctattggtgctgggtcagaggtcactacttggcctatacttgcccttctgcctggaaaaccagtattctaccttattaacaccatccacgtggaaaacttgtattcatttttcaaaattcagctaaaatattagctttttatgctgattgtcaacatttaagaatgtactatgtatgataggcactgtgctaaatgtttgtttcatttattctctacaagaaccccatgaggtaggtaccctttttattctacatttactattgaggaaatggaaatggcagttagctaatttaggtaactttccaatggttgtacaatagtaagtggtagaaactggattcaaacccaggatgaacccagatcccaccttccaccggaccacttcacatttcttctctctgggagagcctttctggttgctcctgtctcccagatggctcatgtggtggactatactcttgtttataaacactcgctgcccctccctgggagaagatcaacattattatttcctgtcctattggtgtcaattttggccatgtgacttgctttatcccatgaactataggcagaaatatgggtattcttcctggatagacagtgtgggagccagggcatggttttgcttactcttaactctcttaagtgagcctgtccagagagaggttacttcagcatcctgggtc

SEQ ID NO: 82196 - DNA, 1098 bp, Homo sapiens
ctgggtttggggcttcagcagccgaaaaggcaagaagtcccggtgcactcacagctctggcaggccccttgtatgctacctcctgtcggtcccttcctctcagtttttaccatccctgccttgctggcagcacttgccacctctcacctagattattacacagaatagtcccctctccgggcttcaccttgtccccacccctgacctctgggcatgttccataatgatactatctctctccatctgtcccagattaaaactcttccctgggttcccattgcctaaaggagaaagtctaagcttctaaatatggcctacaagtctttcaggacctgggccctgttcccttccccaccctcatctctcaacacccttttctccccactttaacacctccagaaagtactggctctattggtgctgggtcagaggtcactacttggcctatacttgcccttctgcctggaaaaccagtattctaccttattaacaccatccacgtggaaaacttgtaytcatttttcaaaattcagctaaaatattagctttttatgctgattgtcaacatttaagaatgtactatgtatgataggcactgtgctaaatgtttgtttcatttattctctacaagaaccccatgaggtaggtaccctttttattctacatttactattgaggaaatggaaatggcagttagctaatttaggtaactttccaatggttgtacaatagtaagtggtagaaactggattcaaacccaggatgaacccagatcccaccttccaccggaccacttcacatttcttctctctgggagagcctttctggttgctcctgtctcccagatggctcatgtggtggactatactcttgtttataaacactcgctgcccctccctgggagaagatcaacattattatttcctgtcctattggtgtcaattttggccatgtgacttgctttatcccatgaactataggcagaaatatgggtattcttcctggatagacagtgtgggagccagggcatggttttgcttactcttaactctcttaagtgagcctgtccagagagaggttacttcagcatcctgggtc

SEQ ID NO: 82197 - DNA, 1098 bp, Homo sapiens
ctgggtttggggcttcagcagccgaaaaggcaagaagtcccggtgcactcacagctctggcaggccccttgtatgctacctcctgtcggtcccttcctctcagtttttaccatccctgccttgctggcagcacttgccacctctcacctagattattacacagaatagtcccctctccgggcttcaccttgtccccacccctgacctctgggcatgttccataatgatactatctctctccatctgtcccagattaaaactcttccctgggttcccattgcctaaaggagaaagtctaagcttctaaatatggcctacaagtctttcaggacctgggccctgttcccttccccaccctcatctctcaacacccttttctccccactttaacacctccagaaagtactggctctattggtgctgggtcagaggtcactacttggcctatacttgcccttctgcctggaaaaccagtattctaccttattaacaccatccacgtggaaaacttgtattcatttttcaaaattcagctaaaatattagctttttatgctgattgtcaacatttaagaatgtactatgtatgataggcactgygctaaatgtttgtttcatttattctctacaagaaccccatgaggtaggtaccctttttattctacatttactattgaggaaatggaaatggcagttagctaatttaggtaactttccaatggttgtacaatagtaagtggtagaaactggattcaaacccaggatgaacccagatcccaccttccaccggaccacttcacatttcttctctctgggagagcctttctggttgctcctgtctcccagatggctcatgtggtggactatactcttgtttataaacactcgctgcccctccctgggagaagatcaacattattatttcctgtcctattggtgtcaattttggccatgtgacttgctttatcccatgaactataggcagaaatatgggtattcttcctggatagacagtgtgggagccagggcatggttttgcttactcttaactctcttaagtgagcctgtccagagagaggttacttcagcatcctgggtc

SEQ ID NO: 82198 - DNA, 1098 bp, Homo sapiens
ctgggtttggggcttcagcagccgaaaaggcaagaagtcccggtgcactcacagctctggcaggccccttgtatgctacctcctgtcggtcccttcctctcagtttttaccatccctgccttgctggcagcacttgccacctctcacctagattattacacagaatagtcccctctccgggcttcaccttgtccccacccctgacctctgggcatgttccataatgatactatctctctccatctgtcccagattaaaactcttccctgggttcccattgcctaaaggagaaagtctaagcttctaaatatggcctacaagtctttcaggacctgggccctgttcccttccccaccctcatctctcaacacccttttctccccactttaacacctccagaaagtactggctctattggtgctgggtcagaggtcactacttggcctatacttgcccttctgcctggaaaaccagtattctaccttattaacaccatccacgtggaaaacttgtattcatttttcaaaattcagctaaaatattagctttttatgctgattgtcaacatttaagaatgtactatgtatgataggcactgtgctaaatgtttgtttcatttattctctacaagaaccccatgaggtwggtaccctttttattctacatttactattgaggaaatggaaatggcagttagctaatttaggtaactttccaatggttgtacaatagtaagtggtagaaactggattcaaacccaggatgaacccagatcccaccttccaccggaccacttcacatttcttctctctgggagagcctttctggttgctcctgtctcccagatggctcatgtggtggactatactcttgtttataaacactcgctgcccctccctgggagaagatcaacattattatttcctgtcctattggtgtcaattttggccatgtgacttgctttatcccatgaactataggcagaaatatgggtattcttcctggatagacagtgtgggagccagggcatggttttgcttactcttaactctcttaagtgagcctgtccagagagaggttacttcagcatcctgggtc

SEQ ID NO: 82199 - DNA, 1379 bp, Homo sapiens
ataacaatgagagtaatgacaatgaggaatgagagaaaatatttaaatgtaagtcccaaatttgcatttctagctcagacttctagcctaaactgaactccarattcatatataaaattatctccactttgaagtctagtagatacaatttcaaaatgtctaaaactgaattcttactatattgacaccatgcacacactacccatctcagttgatggcagctgcatctttccagttacactatccctccatagttcaacagtttaggttgattcttctcattttctcgtatctacatccaattttctagaaaagccttttggttccacctacatacacataatctgatgactccctcactgcattcactactgctatcatggaaccaaccgtcatctcctctcttgcctggattattgcagtatcctcctgtgctatctctactccctgtagtctaccctcagcaaagcagccaggatgaagcttttaaaatatgactcagattatgttcttcctctgcttaaaagtctccagtggttttgcatatgccctgtagcagtgtccagagtcttcctagtggtcttcaaggcctgtgggatccgctctgctaccactatccccccactcactcagctgaatccacacgggcctcccagcagttcctggaacaggcaagcatttctgcttcggggcacttgctcttgcagccctgcctgaaatgccctttcctcccatcgtccccttagctcactttctcacctccttacgcctttgcccatatctcacctgagaagtgagggctccctccgtcccctgtttaatacctcaactactcccgtaatccagtatctagattccatttctcatattcttttttttcatagtgctcattatctgtattaatttgccatgtgtattctttctccatgtgcatttagaataccagccccaagtggacagggatctctgccttgttcattaccacacgccaaagcctagaacaggttactgatggcactcactcagctcccaacacacatttgttggctaaatatctttttcaatttataaagaaaagagatttaattggctcacgtttctgcaggaagcatggctgggaggcctcagaaaacttacaatcatggcagaaggcaaacaggaaggaggcacgtctgacattagtttattaagtcaaacagataaatttcaccctatggaccctctcagttttgagaacagcagtgctacactgccaagaattcatgctaaaacaaaccataaacctgacctacgtccctagtctgctgactttgcccaaaatctaagctcttgcattagactttaagtccaaatgatatcatcatggattttagaagaaa

SEQ ID NO: 82200 - DNA, 1867 bp, Homo sapiens
aatttctccacatgtttgccagcacaccttgttgtctgcgttttttgtgttttttttaaaaaccatcctagtggtggtasagtgggacctaattgtggttttgatttgtatttccgtaaagactgatgatgttgagcattttttcatgtgcctattggccatttgtacgtcttctttagagaaatgtctattcagatcctttgcacatttttttgtaaattgcgttatttgcctttttatcgttgagttgtaaaagctctttatatattttgtacactagacccatatcagatagatgatttgcaagtattttctcccatcccgtgggttgctttttcactttcttgatagcatccttggcttttaattttgatgaagtccagtttgtctatttttttttctgttgcttgtgctttaagtgtcatatctaagaaaccactgggcaatctgaggtcctgaagatatacacataggttttcttctaagagttttacttttagattttacatttaggcctttgatctattttgagtaacttttgtgtaaaacgtaaggtagtaatttattttaagtgtccttcacttaaaataaatgctccttagaatttttcgcatttatagggaaatcaaagattatccaatatttttaataacgtttgaacacctacaggaagaatcctatcatatggtatttctaagcacttttgaagtttaatgtatcatatattttttaaaaaattaggataatctagggttggaaattcaaagaatactaggaagaaaggcaggaaatcaagactagcctcttaaatcacttttccctgaatgtcatttaagggcatttaactttgtaactccacccaaagcagcactgcccctaaatttgagtcaaatcttgcagtattaaataagaggaacttggtgatcgtaatcatctttgttattctctaactttcctctctttgtctaaaagaaagccaagcaaaatggaccagagcatcgagcgccgcaaagtcaattatttacactttaaagtgaaaatggtaaaacgtgcctactttcaaaatgtgaagtttttatgactagtctatattctattctacagagaacatacatgaaactgcatctttgctcttattacactttacaaagtgtatcagaagcttttccatttcaactctgcttatgaaatatgcatattctagaccaacactgtccattagaatttcctgtggggatggaatgttctagtatggtgctgtccagaacagtggtcattagccacacagagccattgagtacttgctgcgtggctggaacagctgaggaactaaatttttcatgtcatctaattttaattaagttaaataaccacatgtagctggtggctgctgtggtggacagcacagctttatagtgactctgtgttatctggtagccagtaatttgcttaaaacaatgacaataacaacaggaactatagagtaggtagtctattgaaattataacctattttgaaaaatagtgaaaagttggggtatagctcttggggcaatttgtattggtgaatttaaacagtgatgcatatggctagaatcacttcctctttgtctgccaaagaaaagaatgtatgcagacttctggctgcacacatcctacactctgccaagcacggaactaaaattcaacaaaagtttaattgctaatagtttttttctaccctgtgaaaatcttggaaagcacaaaatcatggaaatgacatgcagatagaaatggaaaacattagcaaaattgcccgcgaacaaaggcacgcatctgacatctaaaccaaagttattaggcattttacaacatggaatagagcagag

SEQ ID NO: 82201 - DNA, 824 bp, Homo sapiens
agccaaactaccacaagccttctctctatctgctcccattctttttatttttcttttttgtatcttaattgtaagaagtcctcggccttataagaaaagaaataattcaatatgatgaagataaaattcmatttacagattccaaaatcctgtcatcagaaaaaaaaatacataatgcaagctcttattagcagaagttgttttgccaagcagagggcattctggacagtgggagagcctgcgagtcctctccctgctgcctgagacccggggctggggggcgtggggtgcaactgcacacctgacagtgcgctccctgaaatcttcctgcaatcccacctgacacaacctgtgctctccacacccccagctttccatgacaagactcacagcagagcaagcgattggggctcacactggcctctgctgcaccgctgggggtctccccacaaagcctgtcgctgtgaccttatggagtgccttggccaagtggtggcacttagataaacacacaggggctggcattgccactttgccttcggcttgtagttctctgatactcaaaatgaatacagaccatcttacaaagatttctgcatcaaaattcatcggaggacaaggagatgtgcacacagtgacagtaacttgcatttgttagatgcttataatgggccaggtactgggattggcacttcacccaaattatctggtttaatcttcacaaaaattctgtaaaataggtattatgtttcttttacagccctaaaaccagcctcacaaaaattaatgccagtccagtctcaaagctagtagcaagcaaagag

SEQ ID NO: 82202 - DNA, 544 bp, Homo sapiens
aagtgctgagattacatgcgtgagccaccgcgcccggccaaggcagacagcttttcatagccgcttctcactttcttcttgaacaccagtccatttatttctcaaacctaggttactcctggctttcaagctaccttgcactaggaacgtggcaagtcacgtaacctcacttgttctagtttcctcttctctgggatgaatggtgttgacatagatgggctctattgcttgttcctagatctcagtctttgtcacagttcttacacagggctagtaacggctggtaagggtttgtaaaggactcattctgtgatacctttgctctgaatgtgagatttctctaaactgatgatattacaggtgttgatgttttcattctatgtgactcgtttcctttcataagaaaacatcctctcttctgtgaacaatgtccaccactactttaataaaaacagaatcatcaaatagrtaaaagttcccaatctcacgaagtggcctctttttaagtgtactcatttctgtttcttaattttattcattcctt

SEQ ID NO: 82203 - DNA, 544 bp, Homo sapiens
aagtgctgagattacatgcgtgagccaccgcgcccggccaaggcagacagcttttcatagccgcttctcactttcttcttgaacaccagtccatttatttctcaaacctaggttactcctggctttcaagctaccttgcactaggaacgtggcaagtcacgtaacctcacttgttctagtttcctcttctctgggatgaatggtgttgacatagatgggctctattgcttgttcctagatctcagtctttgtcacagttcttacacagggctagtaacggctggtaagggtttgtaaaggactcattctgtgatacctttgctctgaatgtgagatttctctaaactgatgatattacaggtgttgatgttttcattctatgtgactcgtttcctttcataagaaaacatcctctcttctgtgaacaatgtccaccactactttaataaaaacagaatcatcaaataggtaaaagttcccaatctcamgaagtggcctctttttaagtgtactcatttctgtttcttaattttattcattcctt

SEQ ID NO: 82204 - DNA, 404 bp, Homo sapiens
tagggaaatttagacttgttgatgttaaatgtctcccagaagtcataggaatagatagtggcaaagccaggaaggtgcaggatatgtaaacaaatcaaaattaaataagcacactattaattttttwaaaaatatataaataaaaggtatcagttaaatatttgagctacagatgttaaaacatagtcttatctcttaccttggttaggtcactccacaaaaaggtgacctaacaaattaaagaataagaatataaaacaaaatttcatgtgacatttgagccatggaaacacctaaagccagagagaaattggtcatgatttaatttgaagatagggaactacaggcactgaaattgagaaatcaaaaatagctaccttcaaggaagtaaataaactttgtaa

SEQ ID NO: 82205 - DNA, 567 bp, Homo sapiens
ttgacaaaatgagtgcagtacatgaacaaagttctgactggatcataaacccaaaagtgattaatcagtttattaattagggactaacaatgaaatcaatgatatgtcttcatatactttgaattggcaaaaattcatatttatcataggtaaagcaccaaataactggcaactccagtgctggtttgttgggagtatgaatagagtggtgataagtgaagggcacacataggcccagcacaagaagaatccctctaaccaagtccaagctagcaactacagaaatcaaaaatccaacctactagtatagcaattcttattatacatttgaacattaggcaagtgaccaccagtggaactgtgaactcagtgggcaactctaagctcacctttgtcaaaacctctatatgcccccactttcaaaaacgttattttcaaaagaaagtcctgcctcctactcacycgaactttaccaagattcagtgcccaagggtacaatttttagaataataacaaatgagaaatttgaaattttatgcctcaccagtgttcaatttattgtccctt

SEQ ID NO: 82206 - DNA, 567 bp, Homo sapiens
ttgacaaaatgagtgcagtacatgaacaaagttctgactggatcataaacccaaaagtgattaatcagtttattaattagggactaacaatgaaatcaatgatatgtcttcatatactttgaattggcaaaaattcatatttatcataggtaaagcaccaaataactggcaactccagtgctggtttgttgggagtatgaatagagtggtgataagtgaagggcacacataggcccagcacaagaagaatccctctaaccaagtccaagctagcaactacagaaatcaaaaatccaacctactagtatagcaattcttattatacatttgaacattaggcaagtgaccaccagtggaactgtgaactcagtgggcaactctaagctcacctttgtcaaaacctctatatgcccccactttcaaaaacgttattttcaaaagaaagtcctgcctcctactcactcgaactttaccaagattcagtgcccaagggtacaatttttagaataataacaaatgagaaatttgaaattttatgcctcacyagtgttcaatttattgtccctt

SEQ ID NO: 82207 - DNA, 856 bp, Homo sapiens
ctccaaatttaattgtaatgtattcatttatttttgaataatatgagaagttgtttaaatatatctacttgtcggtaggttattacattagagcctgttgtcctttgattgacaaaatagcaagtctgtaaaataagctacttataataaataaataaatgctgccaaggtgttatgtataacttcattggaattacaaattatcaagcactacttccaagaaaaatttcaagtgacaattttagacacaaattcagaatattaccgtattgttaatttttttttttttttttttttttttttggcctaaaaatgaggaacctgttggtatcatgaatacaaataaagctgttgaataaactcaaaattgtattttgctgaatttggtcaactgattattaacacttagacaacgagctacaaactttgacaacagkgattaatatgttctgctatagccaaaacatttttatgtttaagttactaattttgaaactccaaagcaatcctcacaaactgaacaataatttacagggtttaacttttatttgctacatcagggttaaagtaactcaggtttcagcaaaaagttagaggtcattacaagaaagctttatcagataggaaattaaaaagtatttcacaaatacacaaaggtcccttgtttattctatatagaagaaaatatattcctactgtgttctatggagggggcatctgaacctgttcaactgcctggcttccttctgtttgactccttcctatatttccttccgctgcctccattgggaggggttgttaatctggtagttagtgttgagtccttgtggggccacattttatactggacaggatc

SEQ ID NO: 82208 - DNA, 856 bp, Homo sapiens
ctccaaatttaattgtaatgtattcatttatttttgaataatatgagaagttgtttaaatatatctacttgtcggtaggttattacattagagcctgttgtcctttgattgacaaaatagcaagtctgtaaaataagctacttataataaataaataaatgctgccaaggtgttatgtataacttcattggaattacaaattatcaagcactacttccaagaaaaatttcaagtgacaattttagacacaaattcagaatattaccgtattgttaatttttttttttttttttttttttttttggcctaaaaatgaggaacctgttggtatcatgaatacaaataaagctgttgaataaactcaaaattgtattttgctgaatttggtcaactgattattaacacttagacaacgagctacaaactttgacaacagggattaatatgttctgctatagccaaracatttttatgtttaagttactaattttgaaactccaaagcaatcctcacaaactgaacaataatttacagggtttaacttttatttgctacatcagggttaaagtaactcaggtttcagcaaaaagttagaggtcattacaagaaagctttatcagataggaaattaaaaagtatttcacaaatacacaaaggtcccttgtttattctatatagaagaaaatatattcctactgtgttctatggagggggcatctgaacctgttcaactgcctggcttccttctgtttgactccttcctatatttccttccgctgcctccattgggaggggttgttaatctggtagttagtgttgagtccttgtggggccacattttatactggacaggatc

SEQ ID NO: 82209 - DNA, 856 bp, Homo sapiens
ctccaaatttaattgtaatgtattcatttatttttgaataatatgagaagttgtttaaatatatctacttgtcggtaggttattacattagagcctgttgtcctttgattgacaaaatagcaagtctgtaaaataagctacttataataaataaataaatgctgccaaggtgttatgtataacttcattggaattacaaattatcaagcactacttccaagaaaaatttcaagtgacaattttagacacaaattcagaatattaccgtattgttaatttttttttttttttttttttttttttggcctaaaaatgaggaacctgttggtatcatgaatacaaataaagctgttgaataaactcaaaattgtattttgctgaatttggtcaactgattattaacacttagacaacgagctacaaactttgacaacagggattaatatgttctgctatagccaaaacatttttatgtttaagttactaattttgaaactccaaagcaatcctcacaaactgaacaataatttacagkgtttaacttttatttgctacatcagggttaaagtaactcaggtttcagcaaaaagttagaggtcattacaagaaagctttatcagataggaaattaaaaagtatttcacaaatacacaaaggtcccttgtttattctatatagaagaaaatatattcctactgtgttctatggagggggcatctgaacctgttcaactgcctggcttccttctgtttgactccttcctatatttccttccgctgcctccattgggaggggttgttaatctggtagttagtgttgagtccttgtggggccacattttatactggacaggatc

SEQ ID NO: 82210 - DNA, 798 bp, Homo sapiens
cctgaaggtggatcctgtccagtataaaatgtggccccacaaggactcagcactaactaccagattaacaactcctcccaatggaggcagcagaaggaagtatagaaaggagtcaaacagaaggaagccaagtgggggaacaggttcagatgtcccctccatagaacatagtaggaatatattttcttctatataaaataaacaagggacctttgtgtatttgtgaattactttttaatttcctatctgataaagctttcttgtaatgacctctaactttttgctgaaacctgagttactttaacactgatgtagcaaataaaagttaaacactgtaaattattgttcagtttgtgaggattgcttcggagtttcaaaattagtaacttaaaataaaaatgtcttggctatagcagaacatattattcactgttgtcaaatctttgtmgcacgttgtctaagtgttaataatcagttgaccaaattccgcaaaatacaattttgagtttattcaatagctttttttgtattcatgataccaacaggttcctcatttctaggccaaaaaaaaatccaaaattaacaatactggtaatattctgaatttgtgtcaaaaattgtcacttgaaatttttcttggaagtagtgcttgataatttgtaattctaatgaagttatacataaaaccctaacagcatttatttatttcttataagtagcttattttatagacttgctattttgtcaatcaaaggacaacaggctctaatataataacctaccgacaagtagatacat

SEQ ID NO: 82211 - DNA, 527 bp, Homo sapiens
aaaaaaagcatatgcaaaattttaaagattttgacatttattcatttattcagatttcattctaggcattagggatagtaataaaaaaaaattaaaaaaaaataaaataaaaccccatcatctcagccccaaagctwcttaaggtgataagtaaattcagcaaatgctcaggatataaaatcaatatgcaaaaatcactggcattcttatgcatcaacagcagggaagcagagagccaaattattaatgagctcccattcacaattgccacaaaaaagaataaaatacctagtaatatagttaataaggagagtgaaggaactcttcaaggagaactacaaaccactgcttcaaataaatcagagaggacacaaatagaaaaactttccatgctcatggataggaaaaatcagtgttttgaaaatggccatattgcccaaagtaatttagagattcaatgctattcttattaaactatcacttgcactgtacacagaactagagaaaactattttaaaatttatatg

SEQ ID NO: 82212 - DNA, 658 bp, Homo sapiens
gaatcttgaagagtgagaaggagttacccagacaagagacgagggcatgggaagtgggagtgaggtcatgccagacagatgagactgcacagccaagacaaggagtcaaggaacaccatggtaagtttggataaaaaaaactcattggtatttctggaccataaaaggcaaggcaggggaaagcaaaagactggacttgagcctgaggaggcagagcaaatccaggggctttgatcctcctatctcataaataatgaggagattttaaatcaggaagtgacaaaggtaattttatgttttagatagatctgagtggctttgggattgaaatcttgagggctttgagaagactctgttgcgtgtctctccctaggcttctggtggtttgcggtcaaggtttgagttccttggcttacagaaacatcaccccagtctctgtgttcatcatctttccatggtgttctccctgggtgtctgtctgtgtctaaatttcycctttttgtgaggacaccagccatattggaatagtgcccaccctgacaacctcatctttatacctgcaacaaccctattcccaaatgaggtcacattctaaggtactggcagttattacttcaacatatgaatttggggggggtggtgggggagatacaattca

SEQ ID NO: 82213 - DNA, 559 bp, Homo sapiens
  misc_feature (1)...(559): n = A,T,C or G
cannnnnnnnnnnnnnnnnnnnnnnnnnnnnnnnnnnnnnnnnnnnnnnnnnnnnnnnnnnnnnnnnnnnnnnnnnnnnnnnnnnnnnnnnnnnnnnnnnnntctcggctaacygcaacctccaccacccgggttcaagcgattctcctgcctcagcctcccaagtagctgggattacatgcatgcaccaccacgcccagctaatttttgtattttttttttcagtagagacagggtttctccatgttggtcaggctagtctcgaactcctgacctcaagtgatccacccgccttggcctcccaaagtgctgggattacaggtgtgagcaaccgcacccagccagcacatatattttaaacagaatcaaagcccatcatatgtcaagcttacaaaggattttttgtgtttgagggtctatcccaaacatatatctgtaagagagaataacacatcatacatccagggcatcaagtatctgaggatatcaccattaattcatatacaaacatctgtaccatttggtactacttttcaacaagtgccaaggaaccaccaat

SEQ ID NO: 82214 - DNA, 633 bp, Homo sapiens
tctttatttacagctggagagagtggaaattgaactgtgatatatagagaaggatgctctggatatggtctctgtaatgggaagtttattatacatacttggagactcttaaaaactgaagagtaccatatggaatttaaagtagtttttttctaattctgtgaagaaagtcaatggtagcttgatgggaatagcaatcaatctataaattactttgggcagtatggccattttcacaatattgattcttcttatccatgaacatggaatgtttttccatttgtttgtgtcctctcttatttcttgagcagtggtttgtagttctccttaaagaggtctttcacatccctgtatagccaagacaatcctaagcaaaaagaacaaagctgcagacatcacgcarcctcacttcaaactatactacaaggttacagtaaccaaaacagcatgatactggtaccgaaacagagagacacaccaatggaacagaacagagccctcagaaataacaccacacatctacaaccatctgatctttgacaaacctgacaaaaacaggcagtggggaaaggattccttgattaataaatggtgttgtgaaaacaggctagccatatgcagaaaactgaaact

SEQ ID NO: 82215 - DNA, 637 bp, Homo sapiens
gcactcactgaagatcctatcctgggaaacatccttcattaatatttacatttctcttgacagtgcagttgctgtaagcatagggtgggtaaatatagcctgcatctggctaatatacatagtcatggggctgcatttgtctcagaatccaaatgcttcgggtaagaatatggggctgattgtttctgtggactgcttggaaagaattaatttaagcaaggaaaactccatgacacttatttgaaggaagggggacatttataaccagttaacctgtggttgtaaaagaacaaaagatagctttaattctcatcccccacctcattttctttttcttcttcattttttattctgctgtgagcagtcacgaaaaatrtgcctggtcaataaggggcaagtaaaattggaggggttgctataggaacacacaaagtgatgcagagcaataaccactctaatttatactgtgttttcacgttgtatttcctttgcagttaaactcaacttcagaagactttccttaagaaaaaggctacttgaaatgcaggagactctttctaaggcaattttatgtactgactttaaaaataataaatcctaaatctgagtagtgctacaggcaggaaactggtatttc

SEQ ID NO: 82216 - DNA, 637 bp, Homo sapiens
gcactcactgaagatcctatcctgggaaacatccttcattaatatttacatttctcttgacagtgcagttgctgtaagcatagggtgggtaaatatagcctgcatctggctaatatacatagtcatggggctgcatttgtctcagaatccaaatgcttcgggtaagaatatggggctgattgtttctgtggactgcttggaaagaattaatttaagcaaggaaaactccatgacacttatttgaaggaagggggacatttataaccagttaacctgtggttgtaaaagaacaaaagatagctttaattctcatcccccacctcattttctttttcttcttcattttttattctgctgtgagcagtcacgaaaaatgtgcctggtcaataaggggcaagtaaaattggaggggttgctataggaacacacaaagtgatgcagagcaataaccactctaatttatactgtgttttcacgttgtatttcctttgcagttaaactcaacttcagaagactttccttaagaaaaaggctacttgaaatgcaggagactctttctaaggcaattttatgtactgactttaaaaataataaatcctaaatctgagtagtgctrcaggcaggaaactggtatttc

SEQ ID NO: 82217 - DNA, 637 bp, Homo sapiens
gcactcactgaagatcctatcctgggaaacatccttcattaatatttacatttctcttgacagtgcagttgctgtaagcatagggtgggtaaatatagcctgcatctggctaatatacatagtcatggggctgcatttgtctcagaatccaaatgcttcgggtaagaatatggggctgattgtttctgtggactgcttggaaagaattaatttaagcaaggaaaactccatgacacttatttgaaggaagggggacatttataaccagttaacctgtggttgtaaaagaacaaaagatagctttaattctcatcccccacctcattttctttttcttcttcattttttattctgctgtgagcagtcacgaaaaatgtgcctggtcaataaggggcaagtaaaattggaggggttgctataggaacacacaaagtgatgcagagcaataaccactctaatttatactgtgttttcacgttgtatttcctttgcagttaaactcaacttcagaagactttccttaagaaaaaggctacttgaaatgcaggagactctttctaaggcaattttatgtactgactttaaaaataataaatcctaaatctgagtagtgctacargcaggaaactggtatttc

SEQ ID NO: 82218 - DNA, 2276 bp, Homo sapiens
ttctccactgggacatcatcaatgagaaatttttatcaattcagcatgccattcctccatgccccatctactaatcaggatctcatcttttttcaattgccagttggyaggtgagccagtttcacatcgccatatttactatctgttttttcagaccacttggtaccatttgcattgatctctatgaaaaaaaaatggccaagaagtgagaatgactggaagaaacatcagatcatgatgtgtgaccctaggaaaaggagaaagaaggaaatgattaattaaaaaaaaatcttgcccattggtcagtttacgaaaagtttagaaaggccatttgggaggccttaagccaatgtcagctgtcaatagactcctgtatctctcactaatgagcttgtgtttgtagccctggcgtacccaatccctatctgggagcaacctctggtaaacatgcccttggcctcaacatggggaaagatttcaaagtctgttcttggggacaatgacagcttcacaggcatgtggcttgtgcagttacagaagaccccacacttgttttagtgctctgctcttatcttgagattctttgttattttatctttgaacttgtatttcacaagtgaaatccaatggaacaatggagagtgtgcacaaacagaagcatatgcaatatgtatgtctgccattgcttgctgccgcatttacatatggggttcatgatgccccatgagcaaaaaattctggtaggtccacaaggtaaggaagttcaagtaagacccaaaccagtgcaaagtaattttattatgtatacaactgagcaagcagaagcactgacagtgagtggccaagatgccactaatcagaatttgcttcaaactgagaaacaagggaaggcatcctaagaaacatgaatgaccaaggaatcatatcataatttttgtttctactctatgttaatccatgacttatgctgaaaatgataatgtagaaataggaaggtagggcagcctagttcctttttcttttagtccttccttactcatctataaactgaaggtagaaaatgttagtaggatgcatgtgtatcaagagtgaaataaaaacctttgagttgcttttgtgtaatttgcgtctttctggtaagatcaaaatacatacacatgtacaaattacaaaatatgaatgaatgtaagttatcctgcaaaaaagttaaatgctcttatatttgcatttaaaacaggcattgcacagcataaagatgaacagtgaaattcaatagtaattgtagattttaattttccttgacttagaacaacattaaatatcaatttcttcaaaaatcatgaagaaatcaagacagggactgcagaagaaaaaaaaagaggtagattttattacctttattgacactttttctgccttttgaacaagggcctcatattttcatttaagtccctacaaattatttagttggccctgccggggatccttggtgaattattctctctatagttgaagggctgtagagcattgatatggtttggctgtgtacccagccaaatctcatcttgaattgtagctcccacaatcccacatgttatgagagggacccagtgggaggtaattgaataataagggcaggtctttcccatgctgttctcataatagggaagaagtctcatgagatctgatggttttataagggggagtttccctgcacagtttctctctttgcctgctgctatccatgtaagatgtgacttgctcttccttactttctgccagattgtgaggcctcccctgccatgtggaactgtgagtccattaaatctctttccttcataagttacccagtctcagatatgtctttattatcagcaggggaacaaactaatacaagcatattttcataactctcatatgggttttggtatacagaaaattcaggatgcaaacctaagacatctgaattgtgattatttgttcaattcaccaacccacatatcctgtcagtatagatgccctgccccccttattttctgtcaaggcatgttgaaaactcctggagagatactctttaacaatgttctatgtcctaaaccaatgtaaatgacagatagtgattattatacatgtcaatcatacttggcaatctggtccactctatccctctatcaaagcatggctcacttgctcaataatttatttatttttccttagagtagatattaagtgtttgggttctgtagtcagactgcatcagttccaattctgactcc

SEQ ID NO: 82219 - DNA, 2276 bp, Homo sapiens
ttctccactgggacatcatcaatgagaaatttttatcaattcagcatgccattcctccatgccccatctactaatcaggatctcatcttttttcaattgccagttggcaggtgagccagtttcacatcgccatatttactatctgttttttcagaccacttggtaccatttgcattgatctctatgaaaaaaaaatggccaagaagtgagaatgactggaagaaacatcagatcatgatgtgtgaccctaggaaaaggagaaagaaggaaatgattaattaaaaaaaaatcttgcccattggtcagtttacgaaaagtttagaaaggccatttgggaggccttaagccaatgtcagctgtcaatagactcctgtatctctcactaatgagcttgtgtttgtagccctggcgtacccaatccctatctgggagcaacctctggtaaacatgcccttggcctcaacatggggaaagatttcaaagtctgttcttggggacaatgacagcttcacaggcatgtggcttgtgcagttacagaagaccccacacttgttttagtgctctgctcttatcttgagattctttgttattttatctttgaacttgtatttcacaagtgaaatccaatggaacaatggagagtgtgcacaaacagaagcatatgcaatatgtatgtctgccattgcttgctgccgcattyacatatggggttcatgatgccccatgagcaaaaaattctggtaggtccacaaggtaaggaagttcaagtaagacccaaaccagtgcaaagtaattttattatgtatacaactgagcaagcagaagcactgacagtgagtggccaagatgccactaatcagaatttgcttcaaactgagaaacaagggaaggcatcctaagaaacatgaatgaccaaggaatcatatcataatttttgtttctactctatgttaatccatgacttatgctgaaaatgataatgtagaaataggaaggtagggcagcctagttcctttttcttttagtccttccttactcatctataaactgaaggtagaaaatgttagtaggatgcatgtgtatcaagagtgaaataaaaacctttgagttgcttttgtgtaatttgcgtctttctggtaagatcaaaatacatacacatgtacaaattacaaaatatgaatgaatgtaagttatcctgcaaaaaagttaaatgctcttatatttgcatttaaaacaggcattgcacagcataaagatgaacagtgaaattcaatagtaattgtagattttaattttccttgacttagaacaacattaaatatcaatttcttcaaaaatcatgaagaaatcaagacagggactgcagaagaaaaaaaaagaggtagattttattacctttattgacactttttctgccttttgaacaagggcctcatattttcatttaagtccctacaaattatttagttggccctgccggggatccttggtgaattattctctctatagttgaagggctgtagagcattgatatggtttggctgtgtacccagccaaatctcatcttgaattgtagctcccacaatcccacatgttatgagagggacccagtgggaggtaattgaataataagggcaggtctttcccatgctgttctcataatagggaagaagtctcatgagatctgatggttttataagggggagtttccctgcacagtttctctctttgcctgctgctatccatgtaagatgtgacttgctcttccttactttctgccagattgtgaggcctcccctgccatgtggaactgtgagtccattaaatctctttccttcataagttacccagtctcagatatgtctttattatcagcaggggaacaaactaatacaagcatattttcataactctcatatgggttttggtatacagaaaattcaggatgcaaacctaagacatctgaattgtgattatttgttcaattcaccaacccacatatcctgtcagtatagatgccctgccccccttattttctgtcaaggcatgttgaaaactcctggagagatactctttaacaatgttctatgtcctaaaccaatgtaaatgacagatagtgattattatacatgtcaatcatacttggcaatctggtccactctatccctctatcaaagcatggctcacttgctcaataatttatttatttttccttagagtagatattaagtgtttgggttctgtagtcagactgcatcagttccaattctgactcc

SEQ ID NO: 82220 - DNA, 2276 bp, Homo sapiens
ttctccactgggacatcatcaatgagaaatttttatcaattcagcatgccattcctccatgccccatctactaatcaggatctcatcttttttcaattgccagttggcaggtgagccagtttcacatcgccatatttactatctgttttttcagaccacttggtaccatttgcattgatctctatgaaaaaaaaatggccaagaagtgagaatgactggaagaaacatcagatcatgatgtgtgaccctaggaaaaggagaaagaaggaaatgattaattaaaaaaaaatcttgcccattggtcagtttacgaaaagtttagaaaggccatttgggaggccttaagccaatgtcagctgtcaatagactcctgtatctctcactaatgagcttgtgtttgtagccctggcgtacccaatccctatctgggagcaacctctggtaaacatgcccttggcctcaacatggggaaagatttcaaagtctgttcttggggacaatgacagcttcacaggcatgtggcttgtgcagttacagaagaccccacacttgttttagtgctctgctcttatcttgagattctttgttattttatctttgaacttgtatttcacaagtgaaatccaatggaacaatggagagtgtgcacaaacagaagcatatgcaatatgtatgtctgccattgcttgctgccgcatttacatatggggttcatgatgccccatgagcaaaaaattctggtaggtccacaakgtaaggaagttcaagtaagacccaaaccagtgcaaagtaattttattatgtatacaactgagcaagcagaagcactgacagtgagtggccaagatgccactaatcagaatttgcttcaaactgagaaacaagggaaggcatcctaagaaacatgaatgaccaaggaatcatatcataatttttgtttctactctatgttaatccatgacttatgctgaaaatgataatgtagaaataggaaggtagggcagcctagttcctttttcttttagtccttccttactcatctataaactgaaggtagaaaatgttagtaggatgcatgtgtatcaagagtgaaataaaaacctttgagttgcttttgtgtaatttgcgtctttctggtaagatcaaaatacatacacatgtacaaattacaaaatatgaatgaatgtaagttatcctgcaaaaaagttaaatgctcttatatttgcatttaaaacaggcattgcacagcataaagatgaacagtgaaattcaatagtaattgtagattttaattttccttgacttagaacaacattaaatatcaatttcttcaaaaatcatgaagaaatcaagacagggactgcagaagaaaaaaaaagaggtagattttattacctttattgacactttttctgccttttgaacaagggcctcatattttcatttaagtccctacaaattatttagttggccctgccggggatccttggtgaattattctctctatagttgaagggctgtagagcattgatatggtttggctgtgtacccagccaaatctcatcttgaattgtagctcccacaatcccacatgttatgagagggacccagtgggaggtaattgaataataagggcaggtctttcccatgctgttctcataatagggaagaagtctcatgagatctgatggttttataagggggagtttccctgcacagtttctctctttgcctgctgctatccatgtaagatgtgacttgctcttccttactttctgccagattgtgaggcctcccctgccatgtggaactgtgagtccattaaatctctttccttcataagttacccagtctcagatatgtctttattatcagcaggggaacaaactaatacaagcatattttcataactctcatatgggttttggtatacagaaaattcaggatgcaaacctaagacatctgaattgtgattatttgttcaattcaccaacccacatatcctgtcagtatagatgccctgccccccttattttctgtcaaggcatgttgaaaactcctggagagatactctttaacaatgttctatgtcctaaaccaatgtaaatgacagatagtgattattatacatgtcaatcatacttggcaatctggtccactctatccctctatcaaagcatggctcacttgctcaataatttatttatttttccttagagtagatattaagtgtttgggttctgtagtcagactgcatcagttccaattctgactcc

SEQ ID NO: 82221 - DNA, 2276 bp, Homo sapiens
ttctccactgggacatcatcaatgagaaatttttatcaattcagcatgccattcctccatgccccatctactaatcaggatctcatcttttttcaattgccagttggcaggtgagccagtttcacatcgccatatttactatctgttttttcagaccacttggtaccatttgcattgatctctatgaaaaaaaaatggccaagaagtgagaatgactggaagaaacatcagatcatgatgtgtgaccctaggaaaaggagaaagaaggaaatgattaattaaaaaaaaatcttgcccattggtcagtttacgaaaagtttagaaaggccatttgggaggccttaagccaatgtcagctgtcaatagactcctgtatctctcactaatgagcttgtgtttgtagccctggcgtacccaatccctatctgggagcaacctctggtaaacatgcccttggcctcaacatggggaaagatttcaaagtctgttcttggggacaatgacagcttcacaggcatgtggcttgtgcagttacagaagaccccacacttgttttagtgctctgctcttatcttgagattctttgttattttatctttgaacttgtatttcacaagtgaaatccaatggaacaatggagagtgtgcacaaacagaagcatatgcaatatgtatgtctgccattgcttgctgccgcatttacatatggggttcatgatgccccatgagcaaaaaattctggtaggtccacaaggtaaggaagttcaagtaagacccaaaccagtgcaaagtaattttattatgtatacaactgagcaagcagaagcactgacagtgagtggccaagatgccactaatcagaatttgcttcaaactgagaaacaagggaaggcatcctaagaaacatgaatgaccaaggaatcatatcataatttttgtttctactctatgttaatccatgacttatgctgaaaatgataatgtagaaataggaaggtarggcagcctagttcctttttcttttagtccttccttactcatctataaactgaaggtagaaaatgttagtaggatgcatgtgtatcaagagtgaaataaaaacctttgagttgcttttgtgtaatttgcgtctttctggtaagatcaaaatacatacacatgtacaaattacaaaatatgaatgaatgtaagttatcctgcaaaaaagttaaatgctcttatatttgcatttaaaacaggcattgcacagcataaagatgaacagtgaaattcaatagtaattgtagattttaattttccttgacttagaacaacattaaatatcaatttcttcaaaaatcatgaagaaatcaagacagggactgcagaagaaaaaaaaagaggtagattttattacctttattgacactttttctgccttttgaacaagggcctcatattttcatttaagtccctacaaattatttagttggccctgccggggatccttggtgaattattctctctatagttgaagggctgtagagcattgatatggtttggctgtgtacccagccaaatctcatcttgaattgtagctcccacaatcccacatgttatgagagggacccagtgggaggtaattgaataataagggcaggtctttcccatgctgttctcataatagggaagaagtctcatgagatctgatggttttataagggggagtttccctgcacagtttctctctttgcctgctgctatccatgtaagatgtgacttgctcttccttactttctgccagattgtgaggcctcccctgccatgtggaactgtgagtccattaaatctctttccttcataagttacccagtctcagatatgtctttattatcagcaggggaacaaactaatacaagcatattttcataactctcatatgggttttggtatacagaaaattcaggatgcaaacctaagacatctgaattgtgattatttgttcaattcaccaacccacatatcctgtcagtatagatgccctgccccccttattttctgtcaaggcatgttgaaaactcctggagagatactctttaacaatgttctatgtcctaaaccaatgtaaatgacagatagtgattattatacatgtcaatcatacttggcaatctggtccactctatccctctatcaaagcatggctcacttgctcaataatttatttatttttccttagagtagatattaagtgtttgggttctgtagtcagactgcatcagttccaattctgactcc

SEQ ID NO: 82222 - DNA, 1298 bp, Homo sapiens
atccccttatggaactgtgagtatttccctcggttgtagattcagagtggaatgttaaaacagaggctaaatacagtacaaatacaattgtcctatgttttaccaaattgctccccaatacarttttaccagttttattctcaatagaagtacataaaggttcccattaaaaatcttattatcttccatcttgagtaactgatagggcaaaggaagacttggccagtttaattttagagttatgtttaaagagaattaacatggcgctgacaatattgatgtaagctttttgtggttactgggaatttatacatttgatattcaaatgttctcagactgttaaactgctgaagctgacattgaattggaaacaaagtataaaaataagtacttttccttgatttatctttgaaatatgcaaacaaaccctgatattatattattatgaaatggtagtacattttaagaagaaattttaaaacaactgacacaaatgaatgatgatatatctgcaacattttaagcagttccaggaatagtattttttataattgaaatcacagtttattatgaattcactaggtaatttgggggaaaaattcatgtcctattgctcatttgtttcaaacataattaatgatattttgcttttgtgtggagatataattatattgttacctgagtaaaagttttatttttgatgtatctgtgttggaaatgtagaatctgaaaatctctgagggatttacaaatgaaatcaagttagaggacatgacttcagtgaaaacatgtaatgcttctagctactgttggatttttctatttgatttttgtgttgcattatttctggccttttctgagtttcactgctaactccttcctagcctctaaaatgtaattcccttcatatcacagtcctgaaatggctttcttcaaggacagatctttttattgccaaatataaaagcatctcttcagtctttatatttttaaaatctgtgtttacattttaatgttcctaatactgcttttgaaactcttttcacttaattttttgatcctttactgtcctgcctctcctgcttttctcttcatcagctctctatttgtgttgcttgttctacttgttctgtacttctactgtgccctacatcttttgttgccctaacatcagatatttttaccgcatagtttctggtcctctgcaatgtaaagccctagatttaggtcataaagagtaattacacaagcacagggtgggtgtacttgggcttcgaattagttcctcttttgatgca

SEQ ID NO: 82223 - DNA, 1298 bp, Homo sapiens
atccccttatggaactgtgagtatttccctcggttgtagattcagagtggaatgttaaaacagaggctaaatacagtacaaatacaattgtcctatgttttaccaaattgctccccaatacaattttaccagttttattctcaatagaagtacataaaggttcccattaaaaatcttattatcttccatcttgagtaactgatagggcaaaggaagacttggccagtttaattttagagttatgtttaaagagaattaacatggcgctgacaatattgatgtaagctttttgtggttactgggaatttatacatttgatattcaaatgttctcagactgttaaactgctgaagctgacattgaattggaaacaaagtataaaaataagtacttttccttgatttatctttgaaatatgcaaacaaaccctgatattatattattatgaaatggtagtacattttaagaagaaattttaaaacaactgacacaaatgaatgatgatatatctgcaacattttaagcagttccaggaatagtattttttataattgaaatcacagtttattatgaattcactaggtaatttgggggaaaaattcatgtcctattgctcatttgtttcaaacataattaatgatattttgcttttgtgtggagatataattatattgttacctgagtaaaagttttatttttgatgtatctgtgttggaaatgtagaatctgaaaatctctgagggatttacaaatgaaatcaagttagaggacatgacttcagtgaaaacatgtaatgcttctagctactgttggatttttctatttgatttttgtgttgcattatttctggccttttctgagtttcactgctaactccttcctagcctctaaaatgtaattcccttcatatcacagtcctgaaatggctttcttcaaggacagatctttttattgccaaatataaaagcatctcttcagtctttatatttttaaaatctgtgtttacattttaatgttcctaatactgcttttgaaactcttttcacttaattttttgatcctttactgtcctgcctctcctgcttttctcttcatcagctctctatttgtgttgcttgttctacttgttctgtacttctactgtgccctacatcttttgttgccctaacatcagatatttttaccgcatagtttctggtcctctgcaatgtaaagycctagatttaggtcataaagagtaattacacaagcacagggtgggtgtacttgggcttcgaattagttcctcttttgatgca

SEQ ID NO: 82224 - DNA, 687 bp, Homo sapiens
aaaggaggtggaaatggcagaagttagggcctggttgaatatacacaaggagtgaaatgggataggatagtaatgataaaacataacacagagagcaaataaacacagaaattaaaagcaaaaaatttttttctgagttatgtacctaggtgatagtacttttttgatcataataaataaggtatagaagttgagaaacatatttgaggggaagtaactgtttctggacatctgaatttaattatctgygcagtatttttgtatagttcttcagcgggcaaactgataaataccttgcactcaacagaatgacgagtataattgaaaatcatcaaaatattttataataggaattgaagtcctaggaaaaattgagaatgcacagagaggaaatgaatataaacaatataaactgagaacaccaaaatgcaatggatgatgtctaaagagaacttaggaaaggggagtaggataaaatcatcttaaattaaggagaaaaagatttgtgccatactattcaagagaagatagaatttcaaaaggaagaatatgaccaacagtgcaaaatgctatagaaaagttaaatattttcagaattgaaaggagaccattatgcatggtgattaggaggtagtagggaacttttgcctacctctatggaaagctacaggtgaaagtctgactgca

SEQ ID NO: 82225 - DNA, 2121 bp, Homo sapiens
actccatgtgatgacggccatggcaaacgggttactcacgaaggaaggaggagtcaactgataccctccattgctctaatttgaacttaccacaatgtgtagcccattaatttttctaaaatgtccagagaatttacggtgcatttgcacttggagatgtggcataaaatcataggagcattatttttcccaaaagcaaaaaaatacaattgaaaaagccctcacatcagaatcattaaaatggacggctgaattaaatggtccacagcctcaggcactagcatgtgtgaaacatactgacacaaggaaatcaccaataaacctttttgttttaattccattcatactcattttagaaagttcaagtaaagcaaaatggaactgaaaaattacagatgataaaaatgcaaaaaagtagccaaacaatcacaacagtggtcaactaagagataagtctaggtgggaaccatcagaaaactcttaatgactgtaggaggcccagttaagaatcttaattataatttccaagttgcttcaactattgttactaaaactcttgacaaatgttttactcattcttactgtatttcttaatagaaaacttaaaaattaattaaaatgtaaaagaacacaatttttatgtttctttgccttataacgtgatctgagtcgtgatttacagatttcacagaaataagtaaattgagcagcacagctcacagtgctagttgctcagcaagcagctaaagtacacaccagataccaggcggcagaaccgattagcaagtcattgcgagagaagacagaaccacatggtggtgggcaatgtctgaacattctgctagtggtactaagtgcgatggtcacgkgcagagatgtgtttggaaagggtaggaaattattactcagaaaattgacacttgtggatccattaggtcaggcctttcaaggtggtttgatatggtttgaatgaggaagaaaaggagccaggcctgtgttttctgttgagggtaggtggaaagctaggatgagaattcagtttcaagggaaaagatttacatggtttcaatctgctgccaaaacccagagagagcacccaggcttgttttcaccatatcctgatgtgacgtcagaagtagaagaaagtaagtttaggattaaaagttgacagcagtgaattaaagaaaaaaatggagacagacacttctgatttccagtagagcaagtaggcataaaaggcaatggtcaagcttcctaggttgagttctgagttccatgaaaatgtctgaccccaccacgctgtctgagctactgaaatgttattaccagaggctctttccctattctctgtactgtaactggctcaactacagcagagtgataaagaattactcccaacactgtgaattttcattcacattgaaagatgacattacattcgataccaatccttcaacaaccagagtgatctggaaaaggagatgcagaaagtgaatccatacaagattgatataggtgcagtatattcccacagacccaatcaacacaatacagtgaagctgggagctttccaggctcaggaaaaagaactggtgtttgacactgacatgacagacatgacaatgtgaggagatgctgtagttctgcagatacatgttctacgtgctggaccctcatgacaagggccatacgcatcactaacacagcactgaaggaggactttggatttaagcattgtctctgggtatattctggaaggaggggtgtacattgtttggtctgtgataaatcagttagaaaactgtcttcggtggtatattctgggatagttgagtatttgagccttgtaaagcatggtcaagatgttaaaaagaaagttcacctaactgaaaaaattcacccttttgtcagaaaatctataaacataataaaaaaaactttgaagaatatgccttggttaatcaagatattctcaaaaataacaaaagctgggataagattttagcccttgttcctgaaacaattcaggatgaacttcaacaaagcttccaaaagtctcacaattcacttcagcattgggagcaccagcagatgtcagaataacatcaaaaatcaaaatgt

SEQ ID NO: 82226 - DNA, 716 bp, Homo sapiens
aagtcttttcgagtcttaagacagcattaactttactacattaccataactaaatagggtggaaaaattcctaacttaaggttttgattcttccaaacttttaagccttgaatgacagataacataattagagagttggtgatagcctggctcttgagaaactggccaaacagagggcaacaaagaggtctacttctgtatatatagatagctgctgcttttgagtgtttctgaacagactaaagtaaaaggaaagtagccacaatggctccaatggctcctgccctgtcatattaatcaagatcatataaatcaggtaagtactaagtataataagtataatacttagtgaaaggtggttcatctaaaacatagagatgaaatataataggaagtgggtaaagtggcaagtgatagtgaacaccttaaatataccttaccggtagtggtttaaactttacatgtatgatttgtatgatttgatcccttcttyactaccatctattaaaatgaaaattacttttttcctattttacatctgaggatattagagctaaggatgtttagttaacttggccaaggagccagcctaataactggcaaagtggaaagagtctttatctgttctcccagcccaatgctctgtccaacgcatcaaatcacactcaagggcattttgcatgcccaagagaaagcattctctccaaatagagaag

SEQ ID NO: 82227 - DNA, 2357 bp, Homo sapiens
tgttggtgtacacacaggtgcagtccatgatgtacaccaatggtggctggtcatgcaggcagtgctgatagacttgcaccagccctttgctggtcctttgaggtcacccagtgcaaaccctcacaatgtcaaagcagtatcacactcagagctgcggccaagaggagagagtcttcctccatcctgcatgaacaatcttgcttttgtttctggtttcaccaagctcctgtgaagactccttgactttgcctattgcttgctctctacagggctcatgaaatagttcagggagtagggttagtccaaacaggagagagagaagtcccctctccagatctcacctctctcacctgccagtaggaactcatgtacgatctaccttgataagacttctactgcaaaaaagaaaaaaaaaagattgattttgccttgtccatgwctgaattacagtctagtctccacgaggaccgctgtcgcaaccacaaagcttactatgtctttacatatgaatgtatggatttgatatgcttagatatcctaacggcatgaaactgggccttctgggtccagccttgatgccagtctccccattgtgtagcatccagacgaaatacaaaatagaccttctaaagatcatcaagaactcatctttttctaagattctttcatgaggagtgaagagagtgtttatgttgtacatcacccagcaagactttcaggaaatacactttagacatctctatctgttcctaagatctaatcctcagagaagcgtcatctttctcaagtttctaacaagtccatggctggggctggggtaggttgcacccaggacagaagtggctctctcaacagcctcatgtgcttttggcatcaggaaactaaaggtaccacatttctatttggagaaaaaccttggtaaaagtatcgctctcttaaaatcattgattgttttcttctcaaaaaccccaccagcaagtagaaagctgttaatttttttaagtactaaattttaaggacaaaaatatgtgcatttcatcccaatccaagatattcaaacaattttcacatttaataaatacaaatttcaataagttaacacatcagccttggatggctgtcctgggaagggcacgctgtggaaggttccaggacatgctgtgcaggtaattcccctggtcccagagtctaagccatgtgctagaggagaaagatggattttcacagagttctttcctcttgaagacaatctgccaccaggtgtttcttgtcaccacaatcatgccagactgcacaaggatatatccattgtcccaagtcatgagcagtgctgggtttcttactgaatatgttccctgaagttctagaacgggaagcaacaggggcttagtgaccaggtatttattattacccttattacctggaagtaaattagaggcaaagtgtatgatccaaaccagatggctcatgggtggaaggcactgatttggtctgggagagatacctttattttttttgagacagagttttactctgttgctcaggctggagtgcaatggtgtgatctcagctcactgcaacccctgcctcctgggttcaagtgattcttctgcctcagcctcccaagtagctgggactacaggccccccccccaccacgcccagctaattttcatatttttagtagagaatgggtttcatcatgttggtcaggctggtctcaaactcctggtatcaggttatctgcccaccttggcctcccaaaatgctggtattacaggcatgagccaccgtgggagacacactttttaccatttgttaagtctttgtctgtcaaaagtttgccttcagcatgctgtgtcacacatatgacaccttccccccaggtctactctagcaattttgttcccagtgctgttatttgctcttcttttctgaatacagccattatcatctttgtttaaattagctttgcaagtgttcagaattcatacactttttggagaagaataagtgtttaatgtaactcccagctataaattgctcctgcagtgacctgatgcagctatggctaatcttccaaatcttgctccaacacaggggttctaaacctactcgagtccatgccctcatggcaactcagtagtggtctcagccaggatactgggcaatggatcccaaggcaatcaaacacctattcccttcctatgatgaatccaaattctacagaatcatccactcccccagaattctggacaaatactaatttccagcctgcattcttgtgaagaattttcatagactttcctaatcttagagtgataagttacacgtccaagcaaagaaatatttgcttct

SEQ ID NO: 82228 - DNA, 541 bp, Homo sapiens
gtgctggcaaccagagtttcctctgaggggctgaagcacaggcagagaacgtcctgtttgtcagactgacttggatcattgctctgcgggtccacaggaatctgcccaagatgcaaaacagctatcagtaatgtccccacgttgtcattgtggccttaggctttcagagttttytttttttttttttttttttttttgagacggagtctcgctcttttgcccaggccagagtgcagtggcactatctcagctcactgcaagctccgcctcccgggttcacgccattctcctgcctcagcctcccgagtagctgggacaacagccgcccaccaccgcgcttggctaattttttgtatttttagtagagacagggtttcaccgcgttagccaggatggtctcgatctcctgacctcatgatccgcccgcctcggccttccaaagtgctgggattacaggcgtgagcaactgcgcccggcctaggctttcagagttttcttggataactttagcttacagactcccagaccaggctgcttcctg

SEQ ID NO: 82229 - DNA, 541 bp, Homo sapiens
gtgctggcaaccagagtttcctctgaggggctgaagcacaggcagagaacgtcctgtttgtcagactgacttggatcattgctctgcgggtccacaggaatctgcccaagatgcaaaacagctatcagtaatgtccccacgttgtcattgtggccttaggctttcagagttttttttttttttttttttttttttttgagacggagtctcgctcttttgcccaggccagagtgcagtggcactatctcagctcactrcaagctccgcctcccgggttcacgccattctcctgcctcagcctcccgagtagctgggacaacagccgcccaccaccgcgcttggctaattttttgtatttttagtagagacagggtttcaccgcgttagccaggatggtctcgatctcctgacctcatgatccgcccgcctcggccttccaaagtgctgggattacaggcgtgagcaactgcgcccggcctaggctttcagagttttcttggataactttagcttacagactcccagaccaggctgcttcctg

SEQ ID NO: 82230 - DNA, 541 bp, Homo sapiens
gtgctggcaaccagagtttcctctgaggggctgaagcacaggcagagaacgtcctgtttgtcagactgacttggatcattgctctgcgggtccacaggaatctgcccaagatgcaaaacagctatcagtaatgtccccacgttgtcattgtggccttaggctttcagagttttttttttttttttttttttttttttgagacggagtctcgctcttttgcccaggccagagtgcagtggcactatctcagctcactgcaagctccgcctcccgggttcacgccattctcctgcytcagcctcccgagtagctgggacaacagccgcccaccaccgcgcttggctaattttttgtatttttagtagagacagggtttcaccgcgttagccaggatggtctcgatctcctgacctcatgatccgcccgcctcggccttccaaagtgctgggattacaggcgtgagcaactgcgcccggcctaggctttcagagttttcttggataactttagcttacagactcccagaccaggctgcttcctg

SEQ ID NO: 82231 - DNA, 541 bp, Homo sapiens
gtgctggcaaccagagtttcctctgaggggctgaagcacaggcagagaacgtcctgtttgtcagactgacttggatcattgctctgcgggtccacaggaatctgcccaagatgcaaaacagctatcagtaatgtccccacgttgtcattgtggccttaggctttcagagttttttttttttttttttttttttttttgagacggagtctcgctcttttgcccaggccagagtgcagtggcactatctcagctcactgcaagctccgcctcccgggttcacgccattctcctgcctcagcctcccgagtagctgggacaacagccgcccaccaccgcgcttggctmattttttgtatttttagtagagacagggtttcaccgcgttagccaggatggtctcgatctcctgacctcatgatccgcccgcctcggccttccaaagtgctgggattacaggcgtgagcaactgcgcccggcctaggctttcagagttttcttggataactttagcttacagactcccagaccaggctgcttcctg

SEQ ID NO: 82232 - DNA, 2578 bp, Homo sapiens
  misc_feature (1)...(2578): n = A,T,C or G
actcttctttagtacataatgtcaaacattttccaaagtggttctaccaatctacatacccagcatcagggtataagagctccagttgctccataatcttgccagtatttgrtatagaccatctttttaattttagccattctgatgggtctgtagtattaactcattgtggttttaatgtgtattttcctgaacatctatgaggttgagcacctttttatatatgattggtcattttgctctcctctttcatgaagtaccttttcaagtctcttactatttttctactggagtgtgtatttttttatttatttataggagttcttttatatattactgataagatccctttttatatttgtggattttctttttacattgtatggtgtggctctatcataatttacctatttttatttataattatttagattgctttcaatgtttttattccaacaacttctatgaattgaggattgtgggtnnnnnnnnnnnnnnnnnnnnnnnnnnnnnnnnnnnnnnnnnnnnnnnnnnnnnnnnnnnnnnnnnnnnnnnnnnnnnnnnnnnnnnnnnnnnnnnnnnnnaccctccctcccaaatttgacaactaaaaatatctccaggcagtcacagaagggtgttggggagcaaatacacccccagttaacaaactcttccccagtgtttccttaaattaggaacagtgaactaataggcccaagtgagtttgtctttgcttttggtaactttggctatgttaaattaattactggtgtctttgagagaatctcagccatccacctccagatcaaagaaataataaatccgcagcaggccttttgtagaggacaggatcccagcctattcctactttgctgagaatgtatcagtgaaatgactccaaacgtggacaagagttctgcagcccagatcacaagtgcttatgtccaaatgttgacgaagtcttaacacccacaccaatcttcctcacattcatttcttcccacaatcctaactttaaaatctgtcatcttctttcttagatgaccatgaaataaaaaaggaaaaccaagaaaagttttagggtatgcctgatctggtgttacattagaactcagacattcatagttcaaacacgcaggcaatctttcagattggatgacaatcattatgataatttcttcaggtacgtgattatcacatagatcagtgaatcccaaaccaggatgcatttcagaatcacctggaaagcttttggggaagaggggaaaacaggcacagattcctggggattctgaagtctagaattctgttttgaaaaatttcccctggtgattttgctataaggtcaggtttggaaaccactcatctggacccagtgtacagatgtgaaaactaacgcccagagaggtgattggctcacctgcagtcaccatactactcctggggaaccactcatgtccaggcaagattgtgctcatgaataccagcacatacactgagagacggtaaatacatgatcaacacacagttccgttcagttcaggggaccaagtcagaccacggcaatctcatctaacacacactccgcctcttcctgttccctgcacacttttcttctcaccttcttcccgtatttcctaagtgctcgcagttgcttagctttttcagacctctccatggcagcctgtttagtctgcagcttctgtcgaatctacaacacaaaatgctgtcagttcatgtcatttgaatctggaatgaccactacttaggattcgctagagcagggaacagatattccctgttctttaaactgcggaacttataaatcatcagttccaacccctgaggacaatggggcccacaggctgagcactttaccaaaagtgccagagtgaagccagagattgaaagtcaccttcccgctcccagtgtgctgtctgtttcattatacaaactgcctatttgtagcccaggaaagaagacaaacttctccccatttctactgtcagtagactgaggctggaaaccagtatgcggcctcagtgtccttttctagtataccacatacacaataaaaacccaggcagataccaggtgcctagccttttcagtcaaacatacacattttagttaaaggatgagaagttgtcagtgagaatttgtacagagttcacagtaagaaggtgaactactaccacgacaaaagctccctaaaatccagcttgagaccccagggtactatttaaatatacttatccctcagtatccatagaggattagttctaggacccactacagatatcaaaatccacagatgctcaagtcctttatataaaaatggtgcagcatttgcatataacctacactcgcctccagtatcctttaaagtcagaggacctcaactcccaggccacagaccgctacgaacccactatgaatctgtggcctgttaggaaccaggccgcacagcagaaagtgagtgacaggcaagcaagcattaccacctgagctccacctcctgtcagattggtggtggcgttaaattctcataggagtgcgaactctactgtgaact

SEQ ID NO: 82233 - DNA, 1065 bp, Homo sapiens
ctccttcttgaaaaattaggaaattcaagacagccatagcatgcaataaaaccaagactggagccctgtgragcataggttctgtgcaaatgcaaaagtcaccaacccaggaagccagtcctgaacgtaagcctaatgtaagtcagtacaagatggtaaatgccttaatagaaatgtgtattaaattataataggaacacagtggaagtggtacttccatcttgacagttctagcagctctgccaatttgcatgatcaagataaatctgacttcttttagcaaaaaaatgcagacaatgaatttaaaaaattaacttaattgcaaaaaaatgaaatagagttatttgggcctactgcaccctctagccaggtaataggtagcaagtattgtttcagagactgaatccaacatttggaggagagaagagagtcattttcatatatgaagaatagtgaagtggacataggggatgaacaccaaatgtttgtaattttgttccctgatctatgggagccaaggaaattcacattgtactttttttcccctaacccacacaagacaatataattctaagaaagcaaatgaaaaatattccagcacaggacatcaatcgttttttacaataagagtgaacagaccaacagaccttttggcttttcttatttggattaacttcaatgtctaaaagttgctaagtaacacttttaataataagagatttcaaggccaggaaattaatggtccatgaccctatttaagagaaatattagtgcatcgtaaggcgagatggctgaatacagtaatgggaactttgggtaatacacttaaccactttcatgtgctactttttcattgccgctcacagtcaatttggcagacacgatttttttttattagaacatttactaagatcatttcatcattatctcaagttagctaataattacattggaaaataatgatatagagagaataaccattgtatagttgtgactattttgaaacaaagttgtttttagatctgataaatataaatgtttagaacacactaaatacaatttaac

SEQ ID NO: 82234 - DNA, 740 bp, Homo sapiens
accttgtgaacattaattaagtggctataaagagtccgaaattcaaattgtgtagatataaaactaaatcaggggccgggcgcggtggctcacgcctgtaatcccagcactttgggaggccgaggtggrcggatcacgaggtcaggagatcgagaccatcccggctaaaacggtgaaaccccgtctctactaaaaatacaaaaaaattagccgggcgtagtggcgggcgcctgtagtcccagctacttgggaggctgaggcaggagaatggagtgaacccgggaggcggagcttgcagtgagccgagatcccgccactgcactccagcctgggtgacagagcgagactccgtctcaaaaaaaaaaaaaaaaaaaaaaaaaaaaaaaaaacctaattcagagttaattgaaaagaaactgttttaaatgaaaagagtacccttttaaggggcaagtcggaattttttttttgcccctaggaagatgaaatcagttaaaaaaataaattatttttctacacacttggtcatctacatgttaaatttaagcttgctaaaaatgtgtggtggggttttttttttaaatcttctttttgcagcctgagtaggaaaaaataacctcttggaaaatttttaaactcttaccccaggaaaacagacgttttaccctaggatattttcctccaaaactactttttatccaaaagatgcaaggtaaaaaactgctggattttttactttt

SEQ ID NO: 82235 - DNA, 674 bp, Homo sapiens
ggtagagtttgttatgatccctattttgcagatgagaaaactgaggcttagggagacacagtcacttgccgaggtcacactgttagcaaatgtcctcaaatcccaaatcagcttgacctgaagcccagaatcttaaccacatgctccactgccttacagcaatcagcaaagagtttgaagaggatgcctagggagcttggatggaggacaggctggcagaggagactggaggcagaggatgggagtaggaggcgggcgccacactggcagagaggagggatcctaagacatagagctgtggtgtgctaaagcccggctctcaacgcactgtcagcttcacttttgttgttgtttccttatatagataagatatctgataaaatatctaatcagcaaagtacatacacacacacacacacacatatatatatacamacatactaattattatgcctactggtttctgcttggggtgatcttggcaggaggaggtgagggatgagggtcctgagcctggaagttggagttatacttgggctgcgggcatctggggcatttccgggggagttaccccaggaagtggtcaaagggagttggccgcccacctggctcagggccagggcggagagcgggcaggatggggaaacagccactctgcgcttcccttttcagcc

SEQ ID NO: 82236 - DNA, 382 bp, Homo sapiens
ttttatatctttgaaagcctgtgtgtctaaggaaatatcaacagaaagaattagaaatgaagtattgacattcttcactaaggggcatttggtcccatgtgatagctgaactccaaagtcattatgaccagaaagttgctactaagaaagycagaaggtagaaataggagctctattcagcttggttacctggacagcaattcctcgctacatttccagaggcagctctctgctaaaaagataatacgttgattatccagtgttcccttgtggctctatgtgtggcctttctttctctcttatcaaagcaaataatctgtaaagaaaggcaaccaaccaggcaagtgaattttttgagccttagatatatatggtgtgtgtg

SEQ ID NO: 82237 - DNA, 1085 bp, Homo sapiens
atcatagtccattaaggggatggaatgatttactttaatgcactccctattttgtggcattttatttctgctagaaagagatttttgcataacacaaatacatatttatggaagtgtgactgtgctttcttaccattccttcacctcacatcctctcttcaatacactttaatcctacattctttgctatcgctacactaagattgcttttattaaggtcaagtatttctatttgccatatacaaygtttatttcctctaccttattctagttgacttctcagcattgtatgacaccattaacaactcctcagtcccatcttccacttttctttattatattttttagtcagactcacagaattgagttgattttattcctcattgggtggcacactattatcgttcttcccaacttgttcagtatttgttttatgtatttactaatacttttctttatggtaggcagaattatccctcccccccacccccccacctcgacttccccagaaatatccacatttgaatccctggaacctgagaatttctaattttacatggcataaaggactttgcagatgtgattaaattaaggacattgaggtagggagattatcctggattatgtagatgggttcattgtaatctcaaagacccttaaaagtggaagcaggaggcaaaggggagagtgagaagaagaagggagaaaggcacaaggagatgcaatgtttgccatctttgaagatgaaggaaaggagcttctaaaagctagaatgctcccttactggcagagaaaggaacatagccttcctgactggctgattttagcccggagagaagcatgccagatttttgacctgcagaactagaagataataaaatttgtgttgtagtaagccacttactttgtggtaatttgttactgcgcaatagaaaacttaatacattctcttcttccattttcaagttcattctcctgcctcactctagtatatttaacgtttattcttccagtcttactttcaaagtttacttaaacatacctgtatccttaatagaatagaaaatgcttcacgtttttaacca

SEQ ID NO: 82238 - DNA, 1085 bp, Homo sapiens
atcatagtccattaaggggatggaatgatttactttaatgcactccctattttgtggcattttatttctgctagaaagagatttttgcataacacaaatacatatttatggaagtgtgactgtgctttcttaccattccttcacctcacatcctctcttcaatacactttaatcctacattctttgctatcgctacactaagattgcttttattaaggtcaagtatttctatttgccatatacaatgtttatttcctctaccttattctagttgacttctcagcattgtatgacaccattaacaactcctcagtcccatcttccacttttctttattatattttttagtcagactcacagaattgagttgattttattcctcattgggtggcacactattatcgttcttcccaacttgttcagtatttgttttatgtatttactaatacttttctttatggtaggcagaattatccctcccccccaccccccyacctcgacttccccagaaatatccacatttgaatccctggaacctgagaatttctaattttacatggcataaaggactttgcagatgtgattaaattaaggacattgaggtagggagattatcctggattatgtagatgggttcattgtaatctcaaagacccttaaaagtggaagcaggaggcaaaggggagagtgagaagaagaagggagaaaggcacaaggagatgcaatgtttgccatctttgaagatgaaggaaaggagcttctaaaagctagaatgctcccttactggcagagaaaggaacatagccttcctgactggctgattttagcccggagagaagcatgccagatttttgacctgcagaactagaagataataaaatttgtgttgtagtaagccacttactttgtggtaatttgttactgcgcaatagaaaacttaatacattctcttcttccattttcaagttcattctcctgcctcactctagtatatttaacgtttattcttccagtcttactttcaaagtttacttaaacatacctgtatccttaatagaatagaaaatgcttcacgtttttaacca

SEQ ID NO: 82239 - DNA, 702 bp, Homo sapiens
atgcccagctaatttttgtatttttggtagagacagggtttcaccatgttggccaggctggtcctgaactcctgacctcaaatgatctgcccacctcggcctcccaaagtgctgggattacaggtgtgagccactgtgccccaccaagcttggtgaattttaaagttctggaacttggtgtttctgacaacaaagttcagatacataagtcactgaaaagtgtatacagtgaagctgtatrcagtgaactctgggaggctgaggtgaaagaatgaaaaatttagtttctgtttgatttacaaagcctttgcttctttcctgtcttcttgcttcctgccttctgtccacttcattactcattaaccattccaggagagatgggggttggggggttgggggcgggggagagactcttaaatctgcacaattagtagaatgttgagtggggaaaattttgatctccttctatatttcatttacacaaatgtctctgccttccattaccagagatgagttaacccggtaccaaatggccaagacttctccctcccccaccttctacaaccaatcagatcaagctcacaacctcctttcagcctctactgtccctgtcacattaatcaccttggctcctatattatttatccagctggtctccctcttgccccccagtccatcagcagcatgcagtgttgcctaagt

SEQ ID NO: 82240 - DNA, 718 bp, Homo sapiens
caatttttttaaaaattcatcacatgggccaggttcagtggctcacacctgtaatcccagcgttttgggaggccaaggcaggaggactgctggagcccaaaagtcgagaccagcctgggcaacatgatgaggccttgactgtacaaaaaatgttaaaaattagccaggcatggtggagtgcacctaaagtcccagctacttgggagactgaagtaggaggattgcttgagcccaggagatcgaggctgcaatgagccttgttcgggccactgcactccagcctgggcaacagaatgagaacttgtcacaaaacaaaacgaaaacaaaaacaaaaacaaacaaacaaaaatctccctcactttatgatttcaatgtatatccagggttgagaactactgatctataataactatcatgtatcacatatgggcatgtaatgtttgtatatgtgaattatattaacataatatagtgtcatgtctattaaacaagtggtgaaaagaaattaaaaatctgtccagtgatttagtttgaaaaaaatatataaattggaagagtagataaatgataatcaggcctaagatctctggagtaggttgcctgtgcacaattaccacctcccacattcactagcttataactttgggcaagttactcractactgtttccttatttatcagctagggataatgaagatgcctatctctcattgcattg

SEQ ID NO: 82241 - DNA, 1061 bp, Homo sapiens
cttggaattttattttttgagataatcttccagttcagcacgttttcttgtgatttgctgatttcccttaaaagtctagtagcataagttttctcattaacagttttttagacatgggcttattttaatattcctatccaaatcattccaagcagttttcaaatgtttttctcaaaagtccagtaaaaacttaatccattgatcatggattttcactggacatgtgaacacgagacctatattacatttgcctcatgaaaggtgttcagagacactctttacattaaatttggagatcataatagaagagactcccagcacctcaactgaacaacacaggtttgaattactttagaacatcagcacctaggtgtggactacgtcttctcatcctgcaaactctgcaatccagcacagccatgcgtcttcaatggagaaaatgtggttgtttacaatagggtggtatttgttcctccctaatccctatccaattttacaattaaacttttaccttgaaaagcctagcatgggaaaataaagagaactataaaatcagttataaataaaagccagtagcacattttaaaggcatgggtgcctgcatgtgcaatgtaaagtcacatcatcttgtatcctgtctttaaaaaattgtgtaagaggtaacaagaggtagcagagcagaaayagtgagaggacagttgtgtaattagcaaacaaatctcctttcttggaggggatatactgtctgtattacataactctgccaaagtctctacaagggtgatgaagacagtagggtacagtggaaggaaaagtagcttgggaaccaggctattttttttttaatgttcttaaactcttgggctatttggcattgggtttttattacatacaactgtacctgtggctacaatagtgggtgtgtagggtagaggaggggggaaaataaattgagtatattcattttagctagaaaaagaaatacaaatcctaatgccttggaatagatcatctcaatcttttaaatcattctaattggatatttttaggccgattgtcca

SEQ ID NO: 82242 - DNA, 1061 bp, Homo sapiens
cttggaattttattttttgagataatcttccagttcagcacgttttcttgtgatttgctgatttcccttaaaagtctagtagcataagttttctcattaacagttttttagacatgggcttattttaatattcctatccaaatcattccaagcagttttcaaatgtttttctcaaaagtccagtaaaaacttaatccattgatcatggattttcactggacatgtgaacacgagacctatattacatttgcctcatgaaaggtgttcagagacactctttacattaaatttggagatcataatagaagagactcccagcacctcaactgaacaacacaggtttgaattactttagaacatcagcacctaggtgtggactacgtcttctcatcctgcaaactctgcaatccagcacagccatgcgtcttcaatggagaaaatgtggttgtttacaatagggtggtatttgttcctccctaatccctatccaattttacaattaaacttttaccttgaaaagcctagcatgggaaaataaagagaactataaaatcagttataaataaaagccagtagcacattttaaaggcatgggtgcctgcatgtgcaatgtaaagtcacatcatcttgtatcctgtctttaaaaaattgtgtaagaggtaacaagaggtagcagagcagaaacagtgagaggacagttgtgtaattagcaaacaaatctcctttcttggaggggatataytgtctgtattacataactctgccaaagtctctacaagggtgatgaagacagtagggtacagtggaaggaaaagtagcttgggaaccaggctattttttttttaatgttcttaaactcttgggctatttggcattgggtttttattacatacaactgtacctgtggctacaatagtgggtgtgtagggtagaggaggggggaaaataaattgagtatattcattttagctagaaaaagaaatacaaatcctaatgccttggaatagatcatctcaatcttttaaatcattctaattggatatttttaggccgattgtcca

SEQ ID NO: 82243 - DNA, 700 bp, Homo sapiens
tagaaattgtaatgtatctggctcatctgattatttcgactacgattgtacaccaaaaatctacatctctaccctggatctccagtctcaagctccctccaggaaagactacttagtatttgctttgctttattttatgctttatatacatgacaccctttaagcctcaaaacaaacccatgacgaataagatgattaacccgagtttacacataaggatactgatgtttagaaaggttcagtaacttgtctgaaactagtaagatgcagagctgaaatataaagtcagatctaatatcaaagactatgttctttttttttttttttttttttgagacggagtttcactcttattgcccaggctggagtgcaatgatgcgatctcrgctcactgcaacctccgcctcccgggttcaagtgattctcctgcctcagccttcctgagtagctgggattacaggcatgcgccaccacacccggctaatttttgtatttttagtagagatggggtttctccatgttggtcaggctggtcttgaactcctgacctcagcctcccaaagtgctgggattacaggcgtgagccaccgcacccggcccaaagtctatgttcttaatcactaagctactctaagcctaatgtgcaaaatgttaagttataacctctctgccaaataaagcaaacacctactaggatcct

SEQ ID NO: 82244 - DNA, 1491 bp, Homo sapiens
aacctatgttcaaagtgtggctggcagccatcattataaataaagccctcattagtgcacttgatgagtcttaagaaagaaagtggctgggtgtggtggctaattcctgtaatctcagcacttgggaaggccatggcaggcagatggcttgaggccaggagtttgaaatcagcctgtgaaacatggggaaaccttgtctccacaaaaaatacaaaaatgagctgggcatagtgccacatgcctgtggtagcagctactcaggaggctgaggtaagaggatcgcttgagcttgggaggtcaaggctgcagcaagccgtgattgcaccactgcactccagcctgggcaacagagcaagaccctgtctccaaaaaaataaaagccaactttagggtgaatataatattgtagatagcaaatcagatggacctaataaattgcgtccttggtgaaattattgagctactgaaataaataaccataaacccctccttaactttaaccttctagttatatgagccaatacagttccttatcatcttagccacaatagccttctttatgttagcatttgctttaatagaaacacttcccagtattatcaaactcttttagtaatgttgttttaggtatatcttatgtaaattgtaaatggctgggatttttttcttttctcaacatgactttgactttgggagaatttactacatgatcrtagctcactgaagcctctgactcctaagctcaaaggatccttcccaccttggcttcctgagtagctgggactacaggtgtgcaccaccacacatggctgatccaacgttttgaaatctggatctttcacatagaaattaagttgtgtatccacactttaaaaattagaggatctataatgtgaggccccttaatctcacatcactgagtggtggctggcccctttagatggggtatgtacccgctggttcaccacagtgccccccattctatgttatttttccaaagtggagagaattttagtttatatttatggtctctccttgcactatttttttcttatggtagaatatctgtttccatgactctattacttttattgaagaccaagagagccatatttcaagaaataaaagtaaaaatatccatttccacattacccttctggcccctgtggtcatttgggtttgcattttctgttttaattctttttctcttttacaattggttacctataaattgttaacaattatgttatgggtcactggtttctttctttttttttttttttttactttttttctttttctttttcttttttttttctttttttgagacaggatgaggctctgtcactcaggctggagtacagtggggtgatcacagctcactgcaacctccacctcctgggcacaggtgatccttctacctcagcctccctagtagctggaacttcaggcacatgtcaccacacccagctaatgtttgtattttttgta

SEQ ID NO: 82245 - DNA, 1491 bp, Homo sapiens
aacctatgttcaaagtgtggctggcagccatcattataaataaagccctcattagtgcacttgatgagtcttaagaaagaaagtggctgggtgtggtggctaattcctgtaatctcagcacttgggaaggccatggcaggcagatggcttgaggccaggagtttgaaatcagcctgtgaaacatggggaaaccttgtctccacaaaaaatacaaaaatgagctgggcatagtgccacatgcctgtggtagcagctactcaggaggctgaggtaagaggatcgcttgagcttgggaggtcaaggctgcagcaagccgtgattgcaccactgcactccagcctgggcaacagagcaagaccctgtctccaaaaaaataaaagccaactttagggtgaatataatattgtagatagcaaatcagatggacctaataaattgcgtccttggtgaaattattgagctactgaaataaataaccataaacccctccttaactttaaccttctagttatatgagccaatacagttccttatcatcttagccacaatagccttctttatgttagcatttgctttaatagaaacacttcccagtattatcaaactcttttagtaatgttgttttaggtatatcttatgtaaattgtaaatggctgggatttttttcttttctcaacatgactttgactttgggagaatttactacatgatcgtagctcactgaagcctctgactcctaagctcaaaggatccttcccaccttggcttcctgagtagctgggactacaggtgtgcaccaccacacatggctgatccaacgttttgaaatctggatctttyacatagaaattaagttgtgtatccacactttaaaaattagaggatctataatgtgaggccccttaatctcacatcactgagtggtggctggcccctttagatggggtatgtacccgctggttcaccacagtgccccccattctatgttatttttccaaagtggagagaattttagtttatatttatggtctctccttgcactatttttttcttatggtagaatatctgtttccatgactctattacttttattgaagaccaagagagccatatttcaagaaataaaagtaaaaatatccatttccacattacccttctggcccctgtggtcatttgggtttgcattttctgttttaattctttttctcttttacaattggttacctataaattgttaacaattatgttatgggtcactggtttctttctttttttttttttttttactttttttctttttctttttcttttttttttctttttttgagacaggatgaggctctgtcactcaggctggagtacagtggggtgatcacagctcactgcaacctccacctcctgggcacaggtgatccttctacctcagcctccctagtagctggaacttcaggcacatgtcaccacacccagctaatgtttgtattttttgta

SEQ ID NO: 82246 - DNA, 1240 bp, Homo sapiens
ctgtttttaaattatgtaatatacctcctaagtatagtaacatcttttttcaaggtggcatgttattggcaaaagtgaatgttcatcccaatgtggtcaaggatatagaaccttggacatccattgcatgaagtattccattcatgaaggacagactgttcaagttgatgaccactactgtggtgaccagcttaaacctcctacccaagaactatgccatggtaactgtgtcttcacaagatggcattattcagaatggtctcaggtacaataaaaatgattgcttaaaaaaagttgcccctttctttctaattacrtatttatgttactctgaagtataattttgttgaaaatctgatttttttccattagttaccacttttttttttttaatcagtgttccaggagttgtggaggaggggaaaggtctcgagaatcttattgtatgaataactttggccatcgtcttgctgacaatgaatgccaagaactgtcccgagtgacgagagagaattgcaatgaattttcctgtcccagttgggctgctagtgaatggagcgaggtacattaaacacatgatgcttggaactattaaaatattgtgttagtaaagctttgtaatctaagactttacaaaatttaaaagtgcttaaatttatttcatcattttgtaaataactattatcaaagctgtcagaaatttataagacaggccaggcacacagtgtctcatgcctgtaataccagcactctgggaaactgaggtgggtggattgcttgagctcagatgttcaagaccagcctgagcaacatagtgaaatttagctggatgtggtgacacacacctgtggtcccagctactcgggaggctgaggtgggaggattgcttgagtctgggacgtggagtatcaatgagcagagattgcggtaagctgagattggccactgcactccagcatgggtgacagagtgagaatctgtctcaaaaaaaaaaaaagaaatatacaagatagtttgtctttatactatttacagtatctgactagtaataacactaactgatatttaatctataaccctttgcataagaaagtgccagggtccacagcagcctgggatgaatacttattctaaggttagttttgcacctttgtttctaggataaatggatgtttcagtgggacttgggcagcagaagttaggggcaggctgattttacccagtgaatatctctggtgga

SEQ ID NO: 82247 - DNA, 560 bp, Homo sapiens
atgtaaaccaaaaaagatcaatataatggtactaattttgttgagtgaacttagtgagtgaactaagtgttgagtgaacttattatttaggaagaaaaaaagaatgtggtacctttccgatggcttggcctgatgctttcttcccaataaagctttcagagactccaagaatggcagctacattttgttctgctggactgagttggctaaactacatggaaaaagagcaaatagatggaaacatcaaaaaatctgtcatgtgaaccaaatccagtatttcttttgatatcacattctcatgattcaggatacaaaaaacaagataaatatatttgtaaatgttgcaggttttaaagttacatcattaggatataacaaggatataacayactttagaattacttaaaggcatagccacaagtactggtttccatggactatatgactatatttaataccagatggctgaggggaaggagaaggaaaggtttgagagtaattgcattatatagtgctacttaaaaaaaacttacttcctgagtaatgtaaactcaggaagt

SEQ ID NO: 82248 - DNA, 590 bp, Homo sapiens
tttttttgaaacagagtctcactctgtcacccaggctggagtgcagtggtgggattccggctcactgcaacctctgcttcccgggttcaagtgattatccctgtctcagcctcccgagtagctgggattaccggcgactgccaccacacccagccaatatttgtatttttagtagagatggggctttgccatcttggccaagctggtctcaaacacctgacctcaggtgatctrcccgccctggcctcccaaagtgctaggattacaggcgtgagtcaccatgcccggcccccatgctcttgccaacactaggtattatcaaatcttttaatctttgccaatttgataagtgaaaaaaatagcattttaatttgcatttcttaattacaaaagaggttaagtatttttttgatactttttactttttttcttggccattttctctgaaaaggataggcctattctttggctgcatttgtactgttttgcttttagtgatttgtaatcacattacttaaggaaactgggcttttgtcatgttttatacatatgctaatacagtttataattttttttctgtcaataaacac

SEQ ID NO: 82249 - DNA, 895 bp, Homo sapiens
aaaggattatgggtgcctagcaaggcaaatttcattggaccataaggctcaagaataatcctttgctggccaggcacggtggctcatgcctgtaatcccagcactttgggaggctgaggcaggcagatcacgaagtcaggagtttgagaccaccctggccaatatggtgaaaccctgtctctrctaaaaatacaaaaattagccgggcatggtggtgcgtgcctgtagtcccagctactagggaggctgaggcagaagaatcacttcaacgcaggaggcagaggagattgcagtgacatgagatcatgccactgcactccagcctgagtgacagagtgagactccatctcaaaaaaataataataattaaaaaaagaatgatcctttgctttgatgctctgccttccaggcccactgcagtagcagaatcaccctactgctctgtggggtggccctgccccttcctctctctgcaagggccccaccctctgaaaccaaggacgacatagcattgccccctgggcttatggtaagagtgacagctctgaggatctgtgatcccctttggcaccattctttccttttcttgaggaatagggcacattcacagtcaagtagctcatggttttctcttgtggaatcaaggaagtccaacagccttcgttcattctttcccacttactctgtcctctttacttcaaactagcagtgtttctgctgttataatcccttatctatcactggcttctgctgagatggctgattaacatcatggataatctatttatagagtcattgttcaaccgtacctttggtcttctctctagagcaagctttcttatttttagcaatatggataggctgagaattttctacatctctaagttctggttcc

SEQ ID NO: 82250 - DNA, 323 bp, Homo sapiens
cttccagtgatggractcttctgtcaatatccttgttgtggtattatactatagttattaagatgttatcattgatggaaattatgtaaaggatacaagggatctctattatactgaaattttcatctgaatttatacttaaaataaaaaaaaatttatttaaaactccagaattgcaatcaaaactactagcataactatatatatatatatatatatatatatatatatatatacatatacaactaaagtagtctctttaaaaaaaatcaaaatatattagaaacacaggcaatatagttaaaaaaagaaattcatagact

SEQ ID NO: 82251 - DNA, 540 bp, Homo sapiens
ttgtgtttaaggttctttgtgyggatatcatcattccactaaaaaggcaaggtaggtgagggaaaaagcatcaggacctcttatatagatgcttagactcagaattacttttcgtcatggtttttgtattaatacacgacaaaacaagaataagcacaatattccgaattttgagtcctttattccagtggttaatactgaatattattttaaaaaatatctattctcttttatttgaagttttaccaatgtcctcataagacctgtgctctgatgtatacacaaattacaacttgaaacgatgctcatatccttaggaaaagggtggtggcatgtgggatgcaatttaagtagatctggggacaaatgttggaaactggttggatttattgtttgtttttggtgtttttaatccaagattttcctaaatatttaggtggtaggctgaattttctagataattagctctattctctacagggttattacaatgggcttggcctttagtttgttgattttacctgccttgctttgcatgca

SEQ ID NO: 82252 - DNA, 540 bp, Homo sapiens
ttgtgtttaaggttctttgtgtggatatcatcattccactaaaaaggcaaggtaggtgagggaaaaagmatcaggacctcttatatagatgcttagactcagaattacttttcgtcatggtttttgtattaatacacgacaaaacaagaataagcacaatattccgaattttgagtcctttattccagtggttaatactgaatattattttaaaaaatatctattctcttttatttgaagttttaccaatgtcctcataagacctgtgctctgatgtatacacaaattacaacttgaaacgatgctcatatccttaggaaaagggtggtggcatgtgggatgcaatttaagtagatctggggacaaatgttggaaactggttggatttattgtttgtttttggtgtttttaatccaagattttcctaaatatttaggtggtaggctgaattttctagataattagctctattctctacagggttattacaatgggcttggcctttagtttgttgattttacctgccttgctttgcatgca

SEQ ID NO: 82253 - DNA, 540 bp, Homo sapiens
ttgtgtttaaggttctttgtgtggatatcatcattccactaaaaaggcaaggtaggtgagggaaaaagcatcaggacctcttatatagatgcttagactcagaattacttttygtcatggtttttgtattaatacacgacaaaacaagaataagcacaatattccgaattttgagtcctttattccagtggttaatactgaatattattttaaaaaatatctattctcttttatttgaagttttaccaatgtcctcataagacctgtgctctgatgtatacacaaattacaacttgaaacgatgctcatatccttaggaaaagggtggtggcatgtgggatgcaatttaagtagatctggggacaaatgttggaaactggttggatttattgtttgtttttggtgtttttaatccaagattttcctaaatatttaggtggtaggctgaattttctagataattagctctattctctacagggttattacaatgggcttggcctttagtttgttgattttacctgccttgctttgcatgca

SEQ ID NO: 82254 - DNA, 710 bp, Homo sapiens
aacacacacacacatttttatttcttcttgtaaaataccaaaaactcttgcatcaggattatataatgcaaatcttattaaatttactcacatgatgactgtatcctttcccattcaagcataataaatataggtgtttcttgtcattttttttttaaattggagatgacaattatatggactttcctgttatgaccaatttcacacaggattggtggtcacattttactatattttgactttgctctgttttcatgttccagggagaaatgaaccgacaagagattacttatataggaaaagttgacacacatcacggaacacataatgatatcctcttattcataatagtccatattttgataaataaaattcaaaagtgaaagattaaattattaaaataattaataatgactggaagtacttgatgaaaccagatcaattttgagagtaaaacactgttttctaaatatgagagaggaaataaaaatacaacttcactgtgtagacatttaaaccttgtacaaatttgactgggctaaaaaaattaaatggtttaatgrtaaattaaactttaaatttagaatatattgagaatattcatgtcattacaacttgtacatattttaatataaatatttgtggcaatgaacaacctactttgaaattaacctagggaggtgatgtatcccataagcctcaaaatctct

SEQ ID NO: 82255 - DNA, 792 bp, Homo sapiens
cacaaaagcccttggaaagaaagggctttttcagaaatacagaacacacccaccagaatgataggatgatagggtttgagaaatataggaatccattgcccagcttgatattgatgtgggcacactgtgcccacacgcaaagcaagagagtgagtgattctggaaacagcactcagtcaatgacagacggacagtggtggatgaatacccagcttctcatctgctcagcggcaaaacagtgagacatgttctacagtgcctcgcttgggtaggtacatcacacatcctcaccctaatgtgtcatgacaaggactgaagtgaaagctacacaatttaaatgattggtgagcaagaactattcaagggcataacacaaaaatagttttgcctgctgtaactgtacacatgatttaaaagacttaagytttcaggacaaacattatagaggattttaatttcttcctagatatacttttcagccataaactttaaataaacaaactacttgttcgaggaacctaaaaccattggcaaaatgcattacatttgtgttttttatatttaatatattttctttattagtttatataaaatatactacttccacttctacttataattacatatcttgttagagcaacagttaaaaaaaatgtagtagatacaagtagtctcccctagcacctaatcatcatccaacatatctaccttttttttcgtctcctgaaaggttataattttctctctctttgccgctgctcaaggtatcccagttacatgcacaaagtatat

SEQ ID NO: 82256 - DNA, 929 bp, Homo sapiens
tggggttcatgctcctatgggaatctaatgccgctgtggatctgactggaggtggagctcaggcggtcatgctggctgcctgtagctcacctcctactgtgcggcccttttctaacaggccaaggacccctgtcwgtctgcagcctgagggctgggggagtcttgtgctatgcagaagctccaaaagagtgataaagaaaagttcccaacattgattgctaagaatttcttctttcttattttttgtttttgtttttgtttttacgtgtttgaaaaatacttgtggacctatgtttctccaaatgatctttagggaagggatcatggcctgtaatagcaacattttggctcagtaaaatttcactgtctaacacaccagaaagggtacagcaagattccagagaaccccactgcctccagcagcaacctgcagactgttttcagatagtgcttgattttgatgcaggaactacttaactattcttaaaatttggatcccttgattctgcccttcttttggaatttttctcctcatttttgtacgattggatgtaatagtgcctggtatatggtatagggtaaagagatacttgcttaatgaataaccttagtttgagtctcaatcaggtacttaccatgtatgtggtcttggacactttgtctaatccctttaaatctcagattattcatatgtataatgaaaagactaatagtacttcgaggtctgctagcagctgccccaacaaaataagtctgcaataattgccataatgaaataccacagactgggtggcttcaaaaacagaaatttattttttcacagatttgggatctcaacatccaagatcaaagtgtcggcaggtaaagagtttttgcacagcaaaaggagatttcaacagggtaaacagacaacatgcaggatgacagaa

SEQ ID NO: 82257 - DNA, 929 bp, Homo sapiens
tggggttcatgctcctatgggaatctaatgccgctgtggatctgactggaggtggagctcaggcggtcatgctggctgcctgtagctcacctcctactgtgcggcccttttctaacaggccaaggacccctgtcagtctgcagcctgagggctgggggagtcttgtgctatgcagaagctccaaaagagtgataaagaaaagttcccaacattgattgctaagaatttcttctttcttattttttgtttttgtttttgtttttacgtgtttgaaaaatacttgtggacctatgtttctccaaatgatctttagggaagggatcatggcctgtaatagcaacattttggctcagtaaaatttcactgtctaacacaccagaaagggyacagcaagattccagagaaccccactgcctccagcagcaacctgcagactgttttcagatagtgcttgattttgatgcaggaactacttaactattcttaaaatttggatcccttgattctgcccttcttttggaatttttctcctcatttttgtacgattggatgtaatagtgcctggtatatggtatagggtaaagagatacttgcttaatgaataaccttagtttgagtctcaatcaggtacttaccatgtatgtggtcttggacactttgtctaatccctttaaatctcagattattcatatgtataatgaaaagactaatagtacttcgaggtctgctagcagctgccccaacaaaataagtctgcaataattgccataatgaaataccacagactgggtggcttcaaaaacagaaatttattttttcacagatttgggatctcaacatccaagatcaaagtgtcggcaggtaaagagtttttgcacagcaaaaggagatttcaacagggtaaacagacaacatgcaggatgacagaa

SEQ ID NO: 82258 - DNA, 929 bp, Homo sapiens
tggggttcatgctcctatgggaatctaatgccgctgtggatctgactggaggtggagctcaggcggtcatgctggctgcctgtagctcacctcctactgtgcggcccttttctaacaggccaaggacccctgtcagtctgcagcctgagggctgggggagtcttgtgctatgcagaagctccaaaagagtgataaagaaaagttcccaacattgattgctaagaatttcttctttcttattttttgtttttgtttttgtttttacgtgtttgaaaaatacttgtggacctatgtttctccaaatgatctttagggaagggatcatggcctgtaatagcaacattttggctcagtaaaatttcactgtctaacacaccagaaagggtacagcaagattccagagaaccccactgcctccagcagcaacctgcagactgttttcagatagtgcttgattttgatgcaggaactacttaactattcttaaaatttggatcccttgattctgcccttcttttggaatttttctcctcatttttgtacgattggatgtaatagtgcctggtatatggtatagggtaaagagatacttgcttaatgaataaccttagtttgagtctcaatcaggtacttaccatgtatgtggtcttggacactttgtctaatccctttaaatctcagattattcatatgtataatgaaaagactaatagtacttcgaggtctgctagcagctgccccaacaaaataagtctgcaataattgccataatgaaataccacagactgggtggcttcaaaaacagaaatttattttttcacagatttgggatctcracatccaagatcaaagtgtcggcaggtaaagagtttttgcacagcaaaaggagatttcaacagggtaaacagacaacatgcaggatgacagaa

SEQ ID NO: 82259 - DNA, 1228 bp, Homo sapiens
ttcctactattctgcactgtggctatcctagcaattttcaaagctcagttttatccctatctccttatagttaccctccttatttaaccataccaggggaagtcacctccaaacctctgaaatgctatggcttcataagcttttcaggataattttcttttcaacgaaacatcaacatttgcatatgcaaatgtgtacttttcttcaaagtaaaacctagggagtatctacatgtttattgcaatgaggttaccattgcttaaaactttatttttaattttactttgaaattgccctcaaagcaagttttaaaatctaaaacaaaagattacaccttattattttaccatgaattgtcatttggtttttggttgtttcttaatccatcattatttatgcttctatcattactttaggactacagtagactacagtcttactggatttaactttataatttcaactattgtgggtaacataatttgtgasttatatgatatgcaatttttctaaggcaaaaatttgagtagtagatgatgtgagattatggcgtggaagcaaattacccacctaactgccccacatccataggtcaatgcagatttttgttattccttgctcatcaccctatatatataaactcctgtgaagtgactttttttaaatgattatgaaaataaacccaattatttatgctagcgtaaccagaatatagacctttggattttttaatggaatgctgaaattgatgtgagtcaaatcagtgacatgaatgagtataccatctattttgtatggaaccagaaaagacttgtgaatctgttacagtcaatgctccaactagaacagaatctatgcaacaaatgacaaataaaacttgaaagaaagttgaaatggtgagctatttcacttggacatagtattattcaatagaaaattctaatattagttatttagatttatttagattcatagttacatattcactgagggaaggaaaagtcattttctatattttatcaaagaaattatatatccatttcagtagttctcaactcctttgaggtaaagaaaactttggagaattgatgaaagagggttcatacaagaaaaatatgtctatatacagaaaaatcttagcatacaattttagggattttatagattcgtaaggatcactccaggaccccggataaatgcaccagttatctctaagtttggactttat

SEQ ID NO: 82260 - DNA, 527 bp, Homo sapiens
ttgagaagggaaggaagatttaaagtagaaaatgtcacgattctttgactctaagtcccctctttattgaagtttccttttcctgagtmacctaaaattcttcttcactatccactttgaatacacttatttatctctaaagtgtttttgttggctgtgtgtggtggctcagacctataatcctagcaatttgggaatccaaattgcttgagctcaggagcccaggaccagcctgaacaacatagaccccatctctaccaaaaaaaaaaaaattaaaataaatagctgggtgtagtggctcgcacctgtagtcctggctacttaggagactgaggctggaggattgcttgagcccaggaggccaaggctgcagtaagccatcattgcaccactgcactccagcctgggtgtcagagtaagaccctctctcaaaaataaactgtttttttgtcatcttggtaataaaatagacaatgttgtgtccccaccaaatttataagccctaatcaccagtgtgttgtttattt

SEQ ID NO: 82261 - DNA, 633 bp, Homo sapiens
tccaatatatatattttcttgtttgtttgtttgtttgtttgagacggagtctcgctctgtcgcctgggctggagtgcagtggcgcgatctccgctcactgcaagctccacctcctgggttcacaccattgtcctgtctcagcctcccaagtagctgggactacaggaacccaccaccacacctggctactttttttgtatttttagtagagwcagggtttcaccgtgttagccaggatggtcttgatctcctgacctcgtgatccccctgccttggcctcccaaagtgctgggattacaggcatgagctaccacagcaggtcccttagatcccatatttttatcaatcttttctttatcctacattttgcagaagctcatctttgagtgccttcccaaaaagaatgccagtgagttactcattttactccttacatgtttgacgaagtctttattctattttttatttgatcagtaatttggctgaacttagaaaccttatgattttaaaggtattttacttacagggttagagaaatttaaaccattctgagacccatccttgtgtgaaaccagttacgggtttatgtccactttcccgccatttatatgctgaagtcttaaatccccagaa

SEQ ID NO: 82262 - DNA, 523 bp, Homo sapiens
tggttggttgttttatttctattgagtctttagaaaaatactgatatggttagtattgatttccatgatttgcttgtcctttacttattaaaaaatctgagaataactcacattaattttattacagcttgctataaatgaaacccttaaagattcaggaatgtttttacaaaactgtcatcaactgtgaggtatatgacggtttcataaaatgtayctgctagtgatttgttggtctgtttcttggcaactgaatggcttctgggatatcaaattattaggtagaagaaaaataaggttttattaaactgcaatgcgagctgaatctgtattatgggaaaatatgcatttataatttcttatttagaagctccagacaaaattctgccaacctaggtcatgctacaaaacttaacctctcccttttgagcaccagcacatcatttgaaatgctttggttgaaattttatattttaagaacttttcatacagattcttgtatgtcagtatgcttgaggtgagc

SEQ ID NO: 82263 - DNA, 1023 bp, Homo sapiens
acctgcctgctacagtgccagacagagtgtagcttcttgccccctccctctgtcccctgcctggccagttttcctggtacattggagccaactgagcagttcctggcctttcctcatctccgccaggcctgtcccaccctagcgcatccctccccacctccaggccattcccggcctggcctgctgttcctttggttgtcacgatttcccagcccttcccttcagcccaccctgctttcagcagtttgggcctttgctgtggacacagcagtccctgaagaaagtgccagcaccaacgcccacaagctcttaggctcattcgctagataacttttgtgctctctycacgcagctaatttccaggaagaaggcctcaaacattcccctgggccctggcccaccacagcccctccagtcctgccctctactcctcccaggctcgggagcagccactggtctggcgggttgggcaggcccagccaggaggaagctgggcttggttcaccctcctcctgggagcctgtgccccagtgggatctgcttgatctccctcccctgctgcttggaacacaccccaagctggctcgagcccctccaccccacccacctcattcccgcccccagaggctgaggtcactggctcccctgggcccgggtggggtggtgctgtcaacacctgccggttggaggaggaggcaaggcccctgggggctgttgtcttagcaattgagtaactagggagcttggctataccggaactggttcccaggccaggccggaacctgtggaggctgcagccccccgtggccttgggggtttggggtggcaggaagtccaccccagggaccctggctgggtgggggtagagggacataggtttgttcagagggctccaggggcaggaaaagcacatttcttgtcctgcagagccccttcccaaaggtgaaatggatgtgagcaaatgggggtccctgccttgaggtcagggtggggggcagcatgctcaccagcccctccctcctt

SEQ ID NO: 82264 - DNA, 1023 bp, Homo sapiens
acctgcctgctacagtgccagacagagtgtagcttcttgccccctccctctgtcccctgcctggccagttttcctggtacattggagccaactgagcagttcctggcctttcctcatctccgccaggcctgtcccaccctagcgcatccctccccacctccaggccattcccggcctggcctgctgttcctttggttgtcacgatttcccagcccttcccttcagcccaccctgctttcagcagtttgggcctttgctgtggacacagcagtccctgaagaaagtgccagcaccaacgcccacaagctcttaggctcattcgctagataacttttgtgctctctccacgcagctaatttccaggaagaaggcctcaaacattcccctgggccctggcccaccacagcccctccagtcctgccctctactcctcccaggctcgggagcagccactggtctggcgggttgggcaggcccagccaggaggaagctgggcttggttcaccctcctcctgggagcctgtgccccagtgggatctgcttgatctccctcccctgctgcttggaacacaccccaagctggctcgagcccctccaccccacccacctcattcccgcccccagaggctgaggtcactggctcccctgggcccgsgtggggtggtgctgtcaacacctgccggttggaggaggaggcaaggcccctgggggctgttgtcttagcaattgagtaactagggagcttggctataccggaactggttcccaggccaggccggaacctgtggaggctgcagccccccgtggccttgggggtttggggtggcaggaagtccaccccagggaccctggctgggtgggggtagagggacataggtttgttcagagggctccaggggcaggaaaagcacatttcttgtcctgcagagccccttcccaaaggtgaaatggatgtgagcaaatgggggtccctgccttgaggtcagggtggggggcagcatgctcaccagcccctccctcctt

SEQ ID NO: 82265 - DNA, 1023 bp, Homo sapiens
acctgcctgctacagtgccagacagagtgtagcttcttgccccctccctctgtcccctgcctggccagttttcctggtacattggagccaactgagcagttcctggcctttcctcatctccgccaggcctgtcccaccctagcgcatccctccccacctccaggccattcccggcctggcctgctgttcctttggttgtcacgatttcccagcccttcccttcagcccaccctgctttcagcagtttgggcctttgctgtggacacagcagtccctgaagaaagtgccagcaccaacgcccacaagctcttaggctcattcgctagataacttttgtgctctctccacgcagctaatttccaggaagaaggcctcaaacattcccctgggccctggcccaccacagcccctccagtcctgccctctactcctcccaggctcgggagcagccactggtctggcgggttgggcaggcccagccaggaggaagctgggcttggttcaccctcctcctgggagcctgtgccccagtgggatctgcttgatctccctcccctgctgcttggaacacaccccaagctggctcgagcccctccaccccacccacctcattcccgcccccagaggctgaggtcactggctcccctgggcccggstggggtggtgctgtcaacacctgccggttggaggaggaggcaaggcccctgggggctgttgtcttagcaattgagtaactagggagcttggctataccggaactggttcccaggccaggccggaacctgtggaggctgcagccccccgtggccttgggggtttggggtggcaggaagtccaccccagggaccctggctgggtgggggtagagggacataggtttgttcagagggctccaggggcaggaaaagcacatttcttgtcctgcagagccccttcccaaaggtgaaatggatgtgagcaaatgggggtccctgccttgaggtcagggtggggggcagcatgctcaccagcccctccctcctt

SEQ ID NO: 82266 - DNA, 1023 bp, Homo sapiens
acctgcctgctacagtgccagacagagtgtagcttcttgccccctccctctgtcccctgcctggccagttttcctggtacattggagccaactgagcagttcctggcctttcctcatctccgccaggcctgtcccaccctagcgcatccctccccacctccaggccattcccggcctggcctgctgttcctttggttgtcacgatttcccagcccttcccttcagcccaccctgctttcagcagtttgggcctttgctgtggacacagcagtccctgaagaaagtgccagcaccaacgcccacaagctcttaggctcattcgctagataacttttgtgctctctccacgcagctaatttccaggaagaaggcctcaaacattcccctgggccctggcccaccacagcccctccagtcctgccctctactcctcccaggctcgggagcagccactggtctggcgggttgggcaggcccagccaggaggaagctgggcttggttcaccctcctcctgggagcctgtgccccagtgggatctgcttgatctccctcccctgctgcttggaacacaccccaagctggctcgagcccctccaccccacccacctcattcccgcccccagaggctgaggtcactggctcccctgggcccgggyggggtggtgctgtcaacacctgccggttggaggaggaggcaaggcccctgggggctgttgtcttagcaattgagtaactagggagcttggctataccggaactggttcccaggccaggccggaacctgtggaggctgcagccccccgtggccttgggggtttggggtggcaggaagtccaccccagggaccctggctgggtgggggtagagggacataggtttgttcagagggctccaggggcaggaaaagcacatttcttgtcctgcagagccccttcccaaaggtgaaatggatgtgagcaaatgggggtccctgccttgaggtcagggtggggggcagcatgctcaccagcccctccctcctt

SEQ ID NO: 82267 - DNA, 1023 bp, Homo sapiens
acctgcctgctacagtgccagacagagtgtagcttcttgccccctccctctgtcccctgcctggccagttttcctggtacattggagccaactgagcagttcctggcctttcctcatctccgccaggcctgtcccaccctagcgcatccctccccacctccaggccattcccggcctggcctgctgttcctttggttgtcacgatttcccagcccttcccttcagcccaccctgctttcagcagtttgggcctttgctgtggacacagcagtccctgaagaaagtgccagcaccaacgcccacaagctcttaggctcattcgctagataacttttgtgctctctccacgcagctaatttccaggaagaaggcctcaaacattcccctgggccctggcccaccacagcccctccagtcctgccctctactcctcccaggctcgggagcagccactggtctggcgggttgggcaggcccagccaggaggaagctgggcttggttcaccctcctcctgggagcctgtgccccagtgggatctgcttgatctccctcccctgctgcttggaacacaccccaagctggctcgagcccctccaccccacccacctcattcccgcccccagaggctgaggtcactggctcccctgggcccgggtsgggtggtgctgtcaacacctgccggttggaggaggaggcaaggcccctgggggctgttgtcttagcaattgagtaactagggagcttggctataccggaactggttcccaggccaggccggaacctgtggaggctgcagccccccgtggccttgggggtttggggtggcaggaagtccaccccagggaccctggctgggtgggggtagagggacataggtttgttcagagggctccaggggcaggaaaagcacatttcttgtcctgcagagccccttcccaaaggtgaaatggatgtgagcaaatgggggtccctgccttgaggtcagggtggggggcagcatgctcaccagcccctccctcctt

SEQ ID NO: 82268 - DNA, 1023 bp, Homo sapiens
acctgcctgctacagtgccagacagagtgtagcttcttgccccctccctctgtcccctgcctggccagttttcctggtacattggagccaactgagcagttcctggcctttcctcatctccgccaggcctgtcccaccctagcgcatccctccccacctccaggccattcccggcctggcctgctgttcctttggttgtcacgatttcccagcccttcccttcagcccaccctgctttcagcagtttgggcctttgctgtggacacagcagtccctgaagaaagtgccagcaccaacgcccacaagctcttaggctcattcgctagataacttttgtgctctctccacgcagctaatttccaggaagaaggcctcaaacattcccctgggccctggcccaccacagcccctccagtcctgccctctactcctcccaggctcgggagcagccactggtctggcgggttgggcaggcccagccaggaggaagctgggcttggttcaccctcctcctgggagcctgtgccccagtgggatctgcttgatctccctcccctgctgcttggaacacaccccaagctggctcgagcccctccaccccacccacctcattcccgcccccagaggctgaggtcactggctcccctgggcccgggtggggtggtgctgtcaacacctgccggttggaggaggaggcaaggcccctgggggctgttgtcttagcaattgagtaactagggagcttggctataccggaactggttcccaggccaggccggaacctgtggaggctgcagccccccgtggccttgggggtttggggtggcaggaagtccaccccagggaccctggctgggtgggggtagagggacataggtttgttcagagggctccaggggcaggaaaagcacatttcttgtccygcagagccccttcccaaaggtgaaatggatgtgagcaaatgggggtccctgccttgaggtcagggtggggggcagcatgctcaccagcccctccctcctt

SEQ ID NO: 82269 - DNA, 510 bp, Homo sapiens
aaagtcattgcacagcctgggcaacaaggcaaaactctgtacaaaaaatacaaaaattagttggatgtgattacacgtgcctgtagtcccagctactccggaggctgaggcaggaggatcacctgagcccaggaagttgaggcttgcagtgagctgtgattgcaaatgctctccagcctgggtgacagtgtgagactccgtttcagaaaaaaagtataccacccagctgcctccagcacccagattttacccaaggggtgaggtctggggcaggaatgtgggggaaggggaggcctagggggagccccagaggggtcaggatttttctgaratcctttcttagaggtatgggttttacaaattgcagcaaatacatccttttaatcttgcagaactccttcatattttaattccagtatgattcttccaacagcctcctctctttactatacttggggaaagtactcattttatttgtcaagaaaaaaacaattgaaaagatagggatca

SEQ ID NO: 82270 - DNA, 624 bp, Homo sapiens
acacctgtggagggaggtagagaagtaggaatatgcagagggagaaagtgagcagcaatgcagcccaataaaagtctttagccaacattaaagggagctctggagctgaaaaggcccattagaattgttgaccagcagagaatgcaggctgtcagtggaaggaggtgtcaccttgggtaaggcagttttctgcagctgagactattctcaagaagagtgacagctaatggcttcctccrcaaatccacatttctaaagtggggcctgagatgtatatacaggaacacggagaagtctgtcgttttcaaaggcagatgagaaattaggcctagacaaacaacaggatatgcagaaaaataggaaaggttagtaagaaatcagtgtaaagagatatgtgttttggctcacgtagggttctgtgagttaggctaaacagacagatgtgtatcctcttggggtggggtcccaggagaaggttttaggcagaagagtgatttggattatagatagatagatagatagatagatagatatagatatatatagatagatatatctatatctatctatatatatatctttttttattatactttaagttctagggtacatatgcacaacctg

SEQ ID NO: 82271 - DNA, 624 bp, Homo sapiens
acacctgtggagggaggtagagaagtaggaatatgcagagggagaaagtgagcagcaatgcagcccaataaaagtctttagccaacattaaagggagctctggagctgaaaaggcccattagaattgttgaccagcagagaatgcaggctgtcagtggaaggaggtgtcaccttgggtaaggcagttttctgcagctgagactattctcaagaagagtgacagctaatggcttcctccgcaaatccacatttctaaagtggggcctgagatgtatatacaggaacacggagaagtctgtcgttttcaaaggcagatgagaaattaggcctagacaaacaacaggatatgcagaaaaataggaaaggttagtaagaaatcagtgtaaagagatatgtgttttggctcacgtagggttctgtgagttaggctaaacagacagatgtgtatcctsttggggtggggtcccaggagaaggttttaggcagaagagtgatttggattatagatagatagatagatagatagatagatatagatatatatagatagatatatctatatctatctatatatatatctttttttattatactttaagttctagggtacatatgcacaacctg

SEQ ID NO: 82272 - DNA, 684 bp, Homo sapiens
aaatgtcatctcatttaagctcaacacaaatgtcatctcaacataaatgagatgacatttgtgttgactaagtaacaagaagaaggcagtcatgcgaaggtttacagaaggcacttcaaatagaaggaacagcagatacaaaggtcctgaaatgagtgcacttagtataccattccaagggctgcaagagggtcagggtggttggagcttgggatgagaaagagagtggcctgagatgaaattcatgacagaagcaggggccacttcatgaagggccttgtagggcatagtaaaagcctagggcatggttttacgcagggaagcttacaccrtctgattataaggctcactcaggcatccgtgtgcagagctgcctgtaagacacgtgggtggagatgaggaccatcatcaagataatggcacttgatctgggggatggactatgctgacccggattaggatttcagtggcaaagataatagcaaaagaccagatttgggatgctttttggaagaagagctcatacaacttgctgatgcacagaactagggtgaaggaaaagaaaaaacaaatcaaggattcctcctagtttggggccttgataactgggttgatggtggattttggtggggacaggggtggcatgggtaaacaagtggtccgttttagaccaaactaagtttt

SEQ ID NO: 82273 - DNA, 684 bp, Homo sapiens
aaatgtcatctcatttaagctcaacacaaatgtcatctcaacataaatgagatgacatttgtgttgactaagtaacaagaagaaggcagtcatgcgaaggtttacagaaggcacttcaaatagaaggaacagcagatacaaaggtcctgaaatgagtgcacttagtataccattccaagggctgcaagagggtcagggtggttggagcttgggatgagaaagagagtggcctgagatgaaattcatgacagaagcaggggccacttcatgaagggccttgtagggcatagtaaaagcctagggcatggttttacgcagggaagcttacaccgtctgattataaggctcactcaggcatccgtgtgcagagctgcctgtaagacacgtgggtggagatgrggaccatcatcaagataatggcacttgatctgggggatggactatgctgacccggattaggatttcagtggcaaagataatagcaaaagaccagatttgggatgctttttggaagaagagctcatacaacttgctgatgcacagaactagggtgaaggaaaagaaaaaacaaatcaaggattcctcctagtttggggccttgataactgggttgatggtggattttggtggggacaggggtggcatgggtaaacaagtggtccgttttagaccaaactaagtttt

SEQ ID NO: 82274 - DNA, 684 bp, Homo sapiens
aaatgtcatctcatttaagctcaacacaaatgtcatctcaacataaatgagatgacatttgtgttgactaagtaacaagaagaaggcagtcatgcgaaggtttacagaaggcacttcaaatagaaggaacagcagatacaaaggtcctgaaatgagtgcacttagtataccattccaagggctgcaagagggtcagggtggttggagcttgggatgagaaagagagtggcctgagatgaaattcatgacagaagcaggggccacttcatgaagggccttgtagggcatagtaaaagcctagggcatggttttacgcagggaagcttacaccgtctgattataaggctcactcaggcatccgtgtgcagagctgcctgtaagacacgtgggtggagatgaggaccatcatcaagataatggcacttgatctgggggatggactatgctgacccggattaggatttcagtggcaaagataatagcaaaagaccagatttgggatgctttttggaagaakagctcatacaacttgctgatgcacagaactagggtgaaggaaaagaaaaaacaaatcaaggattcctcctagtttggggccttgataactgggttgatggtggattttggtggggacaggggtggcatgggtaaacaagtggtccgttttagaccaaactaagtttt

SEQ ID NO: 82275 - DNA, 684 bp, Homo sapiens
aaatgtcatctcatttaagctcaacacaaatgtcatctcaacataaatgagatgacatttgtgttgactaagtaacaagaagaaggcagtcatgcgaaggtttacagaaggcacttcaaatagaaggaacagcagatacaaaggtcctgaaatgagtgcacttagtataccattccaagggctgcaagagggtcagggtggttggagcttgggatgagaaagagagtggcctgagatgaaattcatgacagaagcaggggccacttcatgaagggccttgtagggcatagtaaaagcctagggcatggttttacgcagggaagcttacaccgtctgattataaggctcactcaggcatccgtgtgcagagctgcctgtaagacacgtgggtggagatgaggaccatcatcaagataatggcacttgatctgggggatggactatgctgacccggattaggatttcagtggcaaagataatagcaaaagaccagatttgggatgctttttggaagaagarctcatacaacttgctgatgcacagaactagggtgaaggaaaagaaaaaacaaatcaaggattcctcctagtttggggccttgataactgggttgatggtggattttggtggggacaggggtggcatgggtaaacaagtggtccgttttagaccaaactaagtttt

SEQ ID NO: 82276 - DNA, 684 bp, Homo sapiens
aaatgtcatctcatttaagctcaacacaaatgtcatctcaacataaatgagatgacatttgtgttgactaagtaacaagaagaaggcagtcatgcgaaggtttacagaaggcacttcaaatagaaggaacagcagatacaaaggtcctgaaatgagtgcacttagtataccattccaagggctgcaagagggtcagggtggttggagcttgggatgagaaagagagtggcctgagatgaaattcatgacagaagcaggggccacttcatgaagggccttgtagggcatagtaaaagcctagggcatggttttacgcagggaagcttacaccgtctgattataaggctcactcaggcatccgtgtgcagagctgcctgtaagacacgtgggtggagatgaggaccatcatcaagataatggcacttgatctgggggatggactatgctgacccggattaggatttcagtggcaaagataatagcaaaagaccagatttgggatgctttttggaagaagagctcatacaacttgctgatgcacagaactagggtgaaggaaaagaaaaaacaaatcaaggattcctcctagtttggggccttgataactgggttgatggtggattttggtggggacaggggtggcatgggtaaacaagtgktccgttttagaccaaactaagtttt

SEQ ID NO: 82277 - DNA, 1975 bp, Homo sapiens
attataataaaattatccagccaacgcttggtaggggagtggcatccataagaaggaatttttttgcagaaggcatctgtatattactcacatttgagaacattgctgtgtcttatagaaaccagaaaccaggcaaagctctgggggagccttgaaaggagtttatatgcaggctgaagacatgtctttatgccacaatgacaaaataaagagatgagagagacttcctcaacatgaaggctaggaagctgtgcattaccaaaaggcacataaaactcttgggcagaaaccaaytaaaaataatgaggagaggagggtttactgggaagggaataagtaaaataagaaaacattttggaggcccatttttaagagggtaggctgggataaagaagacctgacttagaattctcttttcacccctcattgaatgagtcccattggctgcatagcttaatgttcctgagtctcagtttctgcaacgttaaaatgccaccttcacagatttgttatgtgggtcaaataaaattagagaagtgaaagtacttcgtgagccacagcgcacggtgtatatgttagtggtgccactatattttgtgatttagatgttcatgggggatccctagaaattttttcaattctttataattaaacatttcagcaaaaagataaaaagccctagaaagctcaaggtcaatgaaataagcaattcttgcatctagtctaggctcagatcttggcaaacacagagttgatgtattttattaaaacaaaaccttggggagactggtttaggccaaatgcctaactgatggggaatttttattttgtcaatagattttgttaatcacaaggtttcttttatacattaaaacacacacacattcccatagtttggcacaaatatgttcatgcatatattcatgcacagaaatatccaggcttgtccatttattgatacttccagagacccacagagtttcatgcttttatatgcacaaaccacctgcatacacttgccccactcacccttgaatgagcccagttcttgtcaaccatagtgaccagagtctctcaaggattcatttcaagcctgattcataagtaagaggcaaaaatgtcaaactatcccatctcacagcattcatctcagccagtgatgccatgctatcctagtctttagatcattcttagaaagcattttggaacccgtgaagatagatttcaaaggcagtcatgcctaggttcatatcacgaccttaggcaagtggcttgatatttctgagccacaatttccttgtttctaaaatactggacagtgaaaactacctcaccaacgtgcaaacatgaggtgcaatgatgtaatatatatttcctctatgctcttctgggctattttaaggtgaattttttggttgggggaccatacacacaaacacacacacacaaacacacacacacacacacacacacacacacagagtaatcttaaggtcccaaaatggcccaggacccaggacccccagctggaggaactcatggacctcttaatgctcacctgctactggcttgatgacttctctttctacacaccttctccattctcctctctctagcatcaaactttctttgtttgcatggatttaactactgtcttctgacttcccataaccttactgaatggggctctaacgtaaggcatcctcttagcttctgacccaattataatgactatgatctctccatgttgatcaattctacatttgtgagagaggaatttgataagacttatcttttacacaacaggccataagaatttaactttggagtcccacagacttcagataaaaatatagttccagcacttcttaaatctctgaccttaggcaagttgctaaactctcagaatcttagttttctcatagctgtatagggagaattatagtttttactcccattggattgttgtgaggaa

SEQ ID NO: 82278 - DNA, 1975 bp, Homo sapiens
attataataaaattatccagccaacgcttggtaggggagtggcatccataagaaggaatttttttgcagaaggcatctgtatattactcacatttgagaacattgctgtgtcttatagaaaccagaaaccaggcaaagctctgggggagccttgaaaggagtttatatgcaggctgaagacatgtctttatgccacaatgacaaaataaagagatgagagagacttcctcaacatgaaggctaggaagctgtgcattaccaaaaggcacataaaactcttgggcagaaaccaactaaaaataatgaggagaggagggtttactgggaagggaataagtaaaataagaaaacattttggaggcccatttttaagagggtaggctgggataaagaagacctgacttagaattctcttttcacccctcattgaatgagtcccattggctgcatagcttaatgttcctgagtctcagtttctgcaacgttaaaatgccaccttcacagatttgttatgtgggtcaaataaaattagagaagtgaaagtacttygtgagccacagcgcacggtgtatatgttagtggtgccactatattttgtgatttagatgttcatgggggatccctagaaattttttcaattctttataattaaacatttcagcaaaaagataaaaagccctagaaagctcaaggtcaatgaaataagcaattcttgcatctagtctaggctcagatcttggcaaacacagagttgatgtattttattaaaacaaaaccttggggagactggtttaggccaaatgcctaactgatggggaatttttattttgtcaatagattttgttaatcacaaggtttcttttatacattaaaacacacacacattcccatagtttggcacaaatatgttcatgcatatattcatgcacagaaatatccaggcttgtccatttattgatacttccagagacccacagagtttcatgcttttatatgcacaaaccacctgcatacacttgccccactcacccttgaatgagcccagttcttgtcaaccatagtgaccagagtctctcaaggattcatttcaagcctgattcataagtaagaggcaaaaatgtcaaactatcccatctcacagcattcatctcagccagtgatgccatgctatcctagtctttagatcattcttagaaagcattttggaacccgtgaagatagatttcaaaggcagtcatgcctaggttcatatcacgaccttaggcaagtggcttgatatttctgagccacaatttccttgtttctaaaatactggacagtgaaaactacctcaccaacgtgcaaacatgaggtgcaatgatgtaatatatatttcctctatgctcttctgggctattttaaggtgaattttttggttgggggaccatacacacaaacacacacacacaaacacacacacacacacacacacacacacacagagtaatcttaaggtcccaaaatggcccaggacccaggacccccagctggaggaactcatggacctcttaatgctcacctgctactggcttgatgacttctctttctacacaccttctccattctcctctctctagcatcaaactttctttgtttgcatggatttaactactgtcttctgacttcccataaccttactgaatggggctctaacgtaaggcatcctcttagcttctgacccaattataatgactatgatctctccatgttgatcaattctacatttgtgagagaggaatttgataagacttatcttttacacaacaggccataagaatttaactttggagtcccacagacttcagataaaaatatagttccagcacttcttaaatctctgaccttaggcaagttgctaaactctcagaatcttagttttctcatagctgtatagggagaattatagtttttactcccattggattgttgtgaggaa

SEQ ID NO: 82279 - DNA, 1975 bp, Homo sapiens
attataataaaattatccagccaacgcttggtaggggagtggcatccataagaaggaatttttttgcagaaggcatctgtatattactcacatttgagaacattgctgtgtcttatagaaaccagaaaccaggcaaagctctgggggagccttgaaaggagtttatatgcaggctgaagacatgtctttatgccacaatgacaaaataaagagatgagagagacttcctcaacatgaaggctaggaagctgtgcattaccaaaaggcacataaaactcttgggcagaaaccaactaaaaataatgaggagaggagggtttactgggaagggaataagtaaaataagaaaacattttggaggcccatttttaagagggtaggctgggataaagaagacctgacttagaattctcttttcacccctcattgaatgagtcccattggctgcatagcttaatgttcctgagtctcagtttctgcaacgttaaaatgccaccttcacagatttgttatgtgggtcaaataaaattagagaagtgaaagtacttcgtgagccacagcgcacggtgtatatgttagtggtgccactatattttgtgatttagatgttcatgggggatccctagaaattttttcaattctttataattaaacatttcagcaaaaagataaaaagccctagaaagctcaaggtcaatgaaataagcaattcttgcatctagtctaggctcagatcttggcaaayacagagttgatgtattttattaaaacaaaaccttggggagactggtttaggccaaatgcctaactgatggggaatttttattttgtcaatagattttgttaatcacaaggtttcttttatacattaaaacacacacacattcccatagtttggcacaaatatgttcatgcatatattcatgcacagaaatatccaggcttgtccatttattgatacttccagagacccacagagtttcatgcttttatatgcacaaaccacctgcatacacttgccccactcacccttgaatgagcccagttcttgtcaaccatagtgaccagagtctctcaaggattcatttcaagcctgattcataagtaagaggcaaaaatgtcaaactatcccatctcacagcattcatctcagccagtgatgccatgctatcctagtctttagatcattcttagaaagcattttggaacccgtgaagatagatttcaaaggcagtcatgcctaggttcatatcacgaccttaggcaagtggcttgatatttctgagccacaatttccttgtttctaaaatactggacagtgaaaactacctcaccaacgtgcaaacatgaggtgcaatgatgtaatatatatttcctctatgctcttctgggctattttaaggtgaattttttggttgggggaccatacacacaaacacacacacacaaacacacacacacacacacacacacacacacagagtaatcttaaggtcccaaaatggcccaggacccaggacccccagctggaggaactcatggacctcttaatgctcacctgctactggcttgatgacttctctttctacacaccttctccattctcctctctctagcatcaaactttctttgtttgcatggatttaactactgtcttctgacttcccataaccttactgaatggggctctaacgtaaggcatcctcttagcttctgacccaattataatgactatgatctctccatgttgatcaattctacatttgtgagagaggaatttgataagacttatcttttacacaacaggccataagaatttaactttggagtcccacagacttcagataaaaatatagttccagcacttcttaaatctctgaccttaggcaagttgctaaactctcagaatcttagttttctcatagctgtatagggagaattatagtttttactcccattggattgttgtgaggaa

SEQ ID NO: 82280 - DNA, 1975 bp, Homo sapiens
attataataaaattatccagccaacgcttggtaggggagtggcatccataagaaggaatttttttgcagaaggcatctgtatattactcacatttgagaacattgctgtgtcttatagaaaccagaaaccaggcaaagctctgggggagccttgaaaggagtttatatgcaggctgaagacatgtctttatgccacaatgacaaaataaagagatgagagagacttcctcaacatgaaggctaggaagctgtgcattaccaaaaggcacataaaactcttgggcagaaaccaactaaaaataatgaggagaggagggtttactgggaagggaataagtaaaataagaaaacattttggaggcccatttttaagagggtaggctgggataaagaagacctgacttagaattctcttttcacccctcattgaatgagtcccattggctgcatagcttaatgttcctgagtctcagtttctgcaacgttaaaatgccaccttcacagatttgttatgtgggtcaaataaaattagagaagtgaaagtacttcgtgagccacagcgcacggtgtatatgttagtggtgccactatattttgtgatttagatgttcatgggggatccctagaaattttttcaattctttataattaaacatttcagcaaaaagataaaaagccctagaaagctcaaggtcaatgaaataagcaattcttgcatctagtctaggctcagatcttggcaaacacagagttgatgtattttattaaaacaaaaccttggggagactggtttaggccaaatgcctaactgatggggaatttttattttgtcaatagattttgttaatcacaaggtttcttttatacattaaaacacacacacattcccatagtttggcacaaatatgttcatgcatatattcatgcacagaaatatccaggcttgtccatttattgatacttccagagacccacagagtttcatgcttttatatgcacaaaccacctgcatacacttgccccactcacccttgaatgagcccagttcttgtcaaccatagtgaccagagtctctcaaggattcatttcaagcctgattcataagtaagaggcaaaaatgtcaaactatcccatctcacagcattcatctcagccagtgatgccatgctatcctagtctttagatcattcttagaaagcattttggaacccgtgaagatagatttcaaaggcagtcatgcctaggttcatatcacgaccttaggcaagtggcttgatatttctgagccacaatttccttgtttctaaaatactggacagtgaaaactacctcaccaacgtgcaaacatgaggtgcaatgatgtaatatatatttcctctatgctcttctgggctattttaaggtgaattttttggttgggggaccatacacacaaacacacacacacaaacacacacacacacacacacacacacacacagagtaatcttaaggtcccaaaatggcccaggacccaggacccccagctggaggaactcatggacctcttaatgctcacctgctactggcttgatgacttctctttctacacaccttctccattctcctctctctagcatcaaactttctttgtttgcatggatttaactactgtcttctgacttcccataaccttactgaatggggctctaacgtaaggcatcctcttagcttctgacccaattataatgactatgatctctccatgttgatcaattctacatttgtgagagaggaatttgataagacttatcttttacacaacaggccataagaatttaactttggagtcccacagacttcagataaaaatatagttccagcacttcttaaatctctgaccttaggcaagttgctaaactctcagaatcttagttttctcatagctgtatagggagaattatagtttttactcccawtggattgttgtgaggaa

SEQ ID NO: 82281 - DNA, 1364 bp, Homo sapiens
cccaggggaagtgggttaaaagaagggccgggaagaagggtgggacgccctccactggaaaggggagagcgttctagttaatgctgaggggaagttggggacctgggtcaatcggagtcagcgtgtgtctgtctccatgaaggggggtccgtctctccccgccccaggcgccgtctttggtctggagaagggtccagcctggggtcgttgggggtgtgaagggaccaatgagcggtctgtccgctcagaagggtccagagagagagccaactggaactacacccccgctcccccttcccccgccagaacttgggcttgtcctgtttgacgcacccgcagaaaggggcgggaggggtactgacccgaggagcggtcccgcgactctgtactccctgctgcccagtcccggccaggacgctgcccggcttagctggggcgcccctcgagaccaggatggaggtagggacgggctagggtcccggaagggcgcgggtgtctcgaaggagccccacggggtgggaataagtagagcgcagcctggggtctcctactgggggtctcgagctgggactgcagttcctggagaaaggagggggagaggggttcgtcctgggcttgggcggtgtctggatccggggtgcgtcccccctgctctggcctgggcagcgccgcctgctggcagggccggaccctgcggccccgggaccggacaccaggcggtgccgccacctggagggcgcgtgtagccgccgggccagcgagccaaggggcctgcagcgggtcgagaaggagccgcgtcgcttcgcctcgcccttccccttcgcggagctgagacccgctgcaccagaacccaggagaggggggagacggcagagactccgcgggcgcggggcgatcccagctgggctctctccacagggatgccgatccctctggagacacagagccgagccggggasgggtggatgggcgccttgacgcttgggcgggcgagcagagcaccagcactcttgcttttcggtcctttcccccgccgaggtcggggtcgcagccgccgccggaggatgggcggccggcgcacggagcagggccgggagggagcagaagcttccgccaagagctcaggagctggggcagccctggagctcttcctgcccttctgcccgcggcggcggaaactccagagtccctactctttctcgggaggactttagggaagaagcagagcggcaggggaagccgaggagcgagggtgcgacgtggggatggaaggacagtgggaggcacacggaaaaacagaacgaggaccttagacaggagagacggaagtggagagaggctgggctgaaaggcagggagagcca

SEQ ID NO: 82282 - DNA, 647 bp, Homo sapiens
gcattggtggatctgcccagacctaagcatttcataccagcagctcagctcagacctgcctggcttgcccattctcagtgggactgggatcagggtctatagaagctgcctccaaaaggtcccatgcctgaccctcataccgtatcacctaaaggttctctgactctccgtcctctgcttcctgagtcttcaataccaccctcccttgcggggcctctggcaaggcagcatgggataacaaaaagggcgggaggcagtggggtaaggagacccaagttccagtcccagagctgtagctaatggtgtggccttgggcaaatctcttccttccctggcttccatttcttgatgttatacaagagggcattcatgacaaggtcccgattccttcttggtcctcatgctgagttagagattagagagttgatctagtcttaccttcttsagtgcgctgtccactgtctctggacggctgatgtcaaaacatagtaatactgcatccgagtcgctgtagcagagtggacggacattatcgtagtagggagatcctggtgtaggccagaaagagctgatggtgagccatggtgttttccttccccaataggcctaagccctaaagccctgggaataccatcctcaatccctga

SEQ ID NO: 82283 - DNA, 596 bp, Homo sapiens
ggttagggaggaatcagagagagaaaagtctctactatttaactgaggaagaaagtggggcattaaggttgatgcttgctgaattcagatgggaggatgagttaaggaacttacagtgaggttgaagcaaaccactgaatctaacttgactaaagctgcaatggggctgatttgtctggcattttttttaaatcaacactctccccctatccaccatggaaaaaccatagtctgtgaaccaaaacagaggcaagtcttagtcsatgtagggccagaactaaagttaggctccttacaatctttggctcctctctgctccccttagaagatggggatagattaatcaatgatcagacgtcagcttaaaatcctggcaacaccatcaaaaaattgaataggtcctacaagacatcaagtcatgagtgggtaacaacatacatgttcagtatatataatcttgaatataggtatggaacttttaaatttttttttaataaaaaaaattgtttcaagagacgaggtctctctctgtcacccaggctacagtgcagtgatgtgatcatagctcactgcagcctcgaactcccgagctcaag

SEQ ID NO: 82284 - DNA, 717 bp, Homo sapiens
gcatcatagattatatgcctttatctgcttcattagaattttctaattaatgttccctcccctggtccctagactggaccatcacagctctcagtgttgtcacctagaagtatctgagagctcagaagcctccaaggcaaaccctttgctattagccttctcttttcctctgtttaaaggaaaggaacataaaatcctgaacattctgctagacctcagaatgcgacgtctggaagaggctttggtgtggtctcctgtgctgcctctctgccaggcactcccctgagggacatgctgcctcttgctacagctttggtgtctgcaggagcagcctgccaggctgttcctgcccattgacctgtcgggtttaacagatccctcatttctgttggcagcttttcaataggcacaaaatgaaacttatctgcaggaagtgtcactgccatctgcaggcacacacgctggtacccagggtcccctgtcattctctctccagatgggtcttgtgtttcagaaagcggctgtggcaggggagcgtggcctgttgtttcctttgttttctacaaggcttgtgaccatctgcctgtcatctcctgtaactctgtctttgaaaggcttaccaggaaataggaaggaatgggtatagcatgtgctgctggattgaaactcccagaaacaccccaggaatggtctgwgcggtcatctacctccctctct

SEQ ID NO: 82285 - DNA, 518 bp, Homo sapiens
tgcggagatgggccagggagaatgctggggtgtgttctgcaaagtgcttctgctcaaattctcttctaggagaaggaaatttatcgctggcctgcgcgagagtccctgaaaaccatgctggctgtgggctggactgtggagaggaccaaagagggagaagctttggttcaacagcgggaaaatgagaagcttcgaagtgtgtcccaggccaaccaggtatgacaccacacccagaggcccacgctgggccratggaagccatggagaatctgggaatgttctgcctggggcatcgtaggtgggaccatctaagatgaaccctggggagttttcaggacacatttttgacagctgaagttggggatgcctgataagaacaaggaaaataatggcaacccagtgactctgcctttgctttcctagggcaacagctacagtcctgctcccctcgacctctcaaacgttgtgctctccagagagctccaggtcagtgccccaggtccagcatgacttgcttt

SEQ ID NO: 82286 - DNA, 511 bp, Homo sapiens
ccatgcctaacacacaataggtgctaacctttttaaacgaattcagggcttcctttttttagataaataattgatgcttttcccaagcatgtccatggcycgtgcctgtggaggaatgtcttgacttctgcctgggtgaaaaacgcgagattaactctcaggctttcatcaagaagaagagccctacctctcctgtctgttgtccaaagcgtgtattttctgtatcttttgcaaaactgcaattggagacgtcgcgtcccttatagaaatcccttacgtaagcattgtgccgtgtgcccgttacataagtaaccatgacacacattcttcctcaaatccagtacaaaggaaaagtttacctctacaggacaaacctgtatattttcttctgtaactggtagctacataacttatcgcattttcttccttcccttagctttctagttacaacctaattgcctcatgccaatgatgaagtcagctcaggtcccaatgacatgcttcttttaat

SEQ ID NO: 82287 - DNA, 760 bp, Homo sapiens
atatttaataataacatttacactggctgagcactatcagcatattagtttttatagtaaacttatagaagaccaagtcctattctcatgtctatttaataaatattgacttcttgtttaggtatcagacaagatttattgacatgacaattccatattttctgagaaggattaaaatttttattaggccccaaaactagaaggcaatatcaatactagtcttctcacactcatttatcataaaattcattcaaaccgcagattgaggtttccataaaacaattagtcctgtttctcgttccatgcaaacaggacagacagaatttattcaaacatctttctcaaatcagatgtgaacaaagaactctcaagtctagatgcaatgttgaatttagtaacagtgctcctaaaaccagccagatctctcaaaaggcaaggtgagaagggggagacgcacagcagtgcagacactgagctgccaggtgaggacgggaatcatcaccgtctggcctactgtcacattgtcaaagtggaaaacactaaattaatttgcatgcatgaagatcctctcttgatttgcatgtaattgtcatctaagagataataaagggcaatatgaaaggattttattttattttatgtatctatttgtttgctttttaatttcccacttaacatagagcaaaaggaaaaaatctaaggaggtcctgaaatataatctgaaacmataaccaataactggattgctaagagaaaataa

SEQ ID NO: 82288 - DNA, 1250 bp, Homo sapiens
atttctctgggaaatgatgtcaagaacgaaattctggaaacaatacataatgctataattgattggcagttaatcatttatggcatatgcctgccaggatttttgtgtaatcctcacatacgggattaaaaatcattcataaaataaaacttttcttgtaaaagaaaatacaaactgtcacgtctgtagctctcacctcatgagaacagtgttaagctatgggaaaaaggttaatgcctttaaaaaaaaaaagcttgtataaatcctgtatttacatgtttttaaggagtgctggcttagattttactttaaacagtttttacttctgctgtttcaaaaagattgtgggaacctaattcccatacctaattcttaaatgatgttatacgtttaaagactcaagctattactttgggaggctgaggcgggcgggtcacatgaggccaaaagttctagaccagcctggccagcatggcaaaaccttgtctccactaaaaacacaaaaattagccaggtgtggtggtgcacgcccgtagtcccagctacatagtcccagctactcaggaggctgatgcatgagaattgtttgaacctggaaggcagaggttgcagtgagccaagattaagctgctgcattccagcctgggcaatggagtgaractctgtctcaaaaaacaaacaaacaaacaaacaaagactcaagctgctgatttatttgttcctgtgttcacttcaattgtaagagttcagagtgctactgcagaaccaaactccactgacctgttagtggctgggtatgagctcaaataccgtgtgtgtggtgtgtgtgtgtatgtgtgcacacatatataagtacacacacgtacatatatgtgtatgtacaaacatacacacacacagacttgcaaaatgatctgtatcctctgtgaagggtattgggttatcgtggagtgatcatccatccaaattcagctgaaaaactataaatgagaaagggtcaaagtacacgccattggctgttcttcaagccaacatgtgtttcaaccaaatagcaatgactattgactgaatgttccttgcatgttaaacatgtaggaatattgttttcttgtccttgtaaggtgattatctttctttccatttgacatgtgagggaagtgaaactcatggaaattgaataacttgtccaaggccacatagctagtaagtggcagaactgggattcaaatccagtctggatccaaacctca

SEQ ID NO: 82289 - DNA, 2018 bp, Homo sapiens
tactttcattaagagtgagacacagactaagtcaaaagcaagaatagatgctgaactttcagggctcaaggaatacctgtgaagggcttgcacatcaacatttataccctaactgagtagatcttttggcttctttttattcatgcaacaagacttctgtggcaagatggtttgatttcttgttcttaccttaaaagggaaagaaagaagaagagaaaactgccttattcttattacaaagttatactgatggactaaaagcactccagagataaataataggttaaggagacaagcatatgtactcaaaagtatttacaaagtaggcaaagctagtggggaaaaaaaggccacaaaaataatccttaagacaagatatgcttctgaaaacaattaaaaagcaaagttgaggagtgtttgaaataaaaatttttcaagtatgcttatatttcttaatatctttctaaaattcacttcttagctgcttaattatataatttgtaggatgttagtaaagcatttcagtagtacaaatgaggaactgtgacactgcccagatctctcatagtggctctgtgtcctggtgggaaagacagtagagccaaaccaacagacctgttgactctgttgagccttaaagagaatctgagtccttgtctaaactgaagataaagcatgaaggcaaaatttctggaattgaaaactgtggagtctgcttttgatacattgttaactgtgtgggagagggcagagcagggactggaagaggataaccttgatggttttgcagggcctggtgtgtggtgcaccagccagccgtttttctctcaactcttcaccaccaccgtgagagcctaatggcccacacacattagtaccacagccctcctgtggcaactgaatcgcagacacagtgccaaaacagagataatgggcctctaaaggtctggcctagaatctccaaccctattaaataaaagcaaatagaacaaaagccacgaagaagtctacagactgatgatctggcctagaaactgggtgaaccattattaaaacataaacatgtaagttttaatattaaaaaagaaattagagaagggtatgtagacaaccaaatcaccaagttttcctttcaaaggaaaattatatgcattaacaaatcatcatgggaccagttataaagaaattacaaacatactgaaaatagggtttatattgcacgatgctgtcaaagtttaccttcctttcatgttttctcaagaaacgtagtagactataattcataaaataaatgcttaataaacatattagttgagtggctaagccaatgatcaaatgatcccttaagtctccaaatctgcagtagaaattatgaatctgaaggtataattcaagggtgcttaagatttcacttcctttatttttctgtaactcaatttagtatctttttgagtttcccttctgcttggattgtgaaaatgtaatgtcaaacaattgagggtggccttctctgcctcttcagtgtgactcctaggtcgtctgacactctttaaccttatctcagtctccatctatcacactgcacagtgattttttttctctgtactttacccaagaagcaaggcaaaaaggccttggcagttcaatcctgtaaattaagggttctgtcatctgccctggtgatccgctcagaggggcaggagccagggtttccttatgtagggtcctataaagtctaattacaactttcttctttttgcttctccatcatcctaacctggagaatcttcagaagattgggaaaaaagcagcattgtgtttacttagaggaagcatagtttctccaagtattgtctaygccatgatgttcaaaagactgttttgaaactcaaaagccaagaattgatttgttttttgttttctgtatctatcttataagtatgtgtgcctatttgattgtatcctgaatagatttttcttaatataaaattattcacttataataagggcttattcaa

SEQ ID NO: 82290 - DNA, 2018 bp, Homo sapiens
tactttcattaagagtgagacacagactaagtcaaaagcaagaatagatgctgaactttcagggctcaaggaatacctgtgaagggcttgcacatcaacatttataccctaactgagtagatcttttggcttctttttattcatgcaacaagacttctgtggcaagatggtttgatttcttgttcttaccttaaaagggaaagaaagaagaagagaaaactgccttattcttattacaaagttatactgatggactaaaagcactccagagataaataataggttaaggagacaagcatatgtactcaaaagtatttacaaagtaggcaaagctagtggggaaaaaaaggccacaaaaataatccttaagacaagatatgcttctgaaaacaattaaaaagcaaagttgaggagtgtttgaaataaaaatttttcaagtatgcttatatttcttaatatctttctaaaattcacttcttagctgcttaattatataatttgtaggatgttagtaaagcatttcagtagtacaaatgaggaactgtgacactgcccagatctctcatagtggctctgtgtcctggtgggaaagacagtagagccaaaccaacagacctgttgactctgttgagccttaaagagaatctgagtccttgtctaaactgaagataaagcatgaaggcaaaatttctggaattgaaaactgtggagtctgcttttgatacattgttaactgtgtgggagagggcagagcagggactggaagaggataaccttgatggttttgcagggcctggtgtgtggtgcaccagccagccgtttttctctcaactcttcaccaccaccgtgagagcctaatggcccacacacattagtaccacagccctcctgtggcaactgaatcgcagacacagtgccaaaacagagataatgggcctctaaaggtctggcctagaatctccaaccctattaaataaaagcaaatagaacaaaagccacgaagaagtctacagactgatgatctggcctagaaactgggtgaaccattattaaaacataaacatgtaagttttaatattaaaaaagaaattagagaagggtatgtagacaaccaaatcaccaagttttcctttcaaaggaaaattatatgcattaacaaatcatcatgggaccagttataaagaaattacaaacatactgaaaatagggtttatattgcacgatgctgtcaaagtttaccttcctttcatgttttctcaagaaacgtagtagactataattcataaaataaatgcttaataaacatattagttgagtggctaagccaatgatcaaatgatcccttaagtctccaaatctgcagtagaaattatgaatctgaaggtataattcaagggtgcttaagatttcacttcctttatttttctgtaactcaatttagtatctttttgagtttcccttctgcttggattgtgaaaatgtaatgtcaaacaattgagggtggccttctctgcctcttcagtgtgactcctaggtcgtctgacactctttaaccttatctcagtctccatctatcacactgcacagtgattttttttctctgtactttacccaagaagcaaggcaaaaaggccttggcagttcaatcctgtaaattaagggttctgtcatctgccctggtgatccgctcagaggggcaggagccagggtttccttatgtagggtcctataaagtctaattacaactttcttctttttgcttctccatcatcctaacctggagaatcttcagaagattgggaaaaaagcagcattgtgtttacttagaggaagcatagtttctccaagtattgtctacgccatgatgttcaaaagactgttttgaaactcaaaagccaagaattgatttgttttttgttttctgtatctatcttataagtatgtgtgcctatttgattgtwtcctgaatagatttttcttaatataaaattattcacttataataagggcttattcaa

SEQ ID NO: 82291 - DNA, 719 bp, Homo sapiens
accaaattataggctgacacctccctgtttcctcccacccaaagcataattcatcttttcagttctactgggatattacattactttgggactttagaggtaagctgtgaatgaactctagtgcatctgtgctatggcctattaataaattctttaacaatgattcaccgtgggctttgaaacaagttaatatctattaatttgccttgccttaaatacaaattcttcctttcccaatagaacgtccctttgaaaatgattactactaaaacggtgagattgttaatgtgcttctcactttattcwtaatgaaaagtagacaaaatatatgaatctcagatcacaaaagataattttttgttaactggtgaaggcttggcttagtgttcacacattcagttccattcaatttcatcaatatttggagtattagatattatttatagtattacagtctctttgtgatccctgagtgcatggcttagtatttagtgaacaaatacctataagatgctaaacatcagatacaattgtgtataaggtttcatacaggagagaaagccattaggctcactttgagggaaggaaactatcaagctaaagagaaaaggtgatatttataagaattcaagcaaagaagtaaggcaacataacatacaatttcacatatattctggaaaccatgagaagtctagtgcagctaaaatgctggttgcatg

SEQ ID NO: 82292 - DNA, 719 bp, Homo sapiens
accaaattataggctgacacctccctgtttcctcccacccaaagcataattcatcttttcagttctactgggatattacattactttgggactttagaggtaagctgtgaatgaactctagtgcatctgtgctatggcctattaataaattctttaacaatgattcaccgtgggctttgaaacaagttaatatctattaatttgccttgccttaaatacaaattcttcctttcccaatagaacgtccctttgaaaatgattactactaaaacggtgagattgttaatgtgcttctcactttattcttaatgaaragtagacaaaatatatgaatctcagatcacaaaagataattttttgttaactggtgaaggcttggcttagtgttcacacattcagttccattcaatttcatcaatatttggagtattagatattatttatagtattacagtctctttgtgatccctgagtgcatggcttagtatttagtgaacaaatacctataagatgctaaacatcagatacaattgtgtataaggtttcatacaggagagaaagccattaggctcactttgagggaaggaaactatcaagctaaagagaaaaggtgatatttataagaattcaagcaaagaagtaaggcaacataacatacaatttcacatatattctggaaaccatgagaagtctagtgcagctaaaatgctggttgcatg

SEQ ID NO: 82293 - DNA, 719 bp, Homo sapiens
accaaattataggctgacacctccctgtttcctcccacccaaagcataattcatcttttcagttctactgggatattacattactttgggactttagaggtaagctgtgaatgaactctagtgcatctgtgctatggcctattaataaattctttaacaatgattcaccgtgggctttgaaacaagttaatatctattaatttgccttgccttaaatacaaattcttcctttcccaatagaacgtccctttgaaaatgattactactaaaacggtgagattgttaatgtgcttctcactttattcttaatgaaargtagacaaaatatatgaatctcagatcacaaaagataattttttgttaactggtgaaggcttggcttagtgttcacacattcagttccattcaatttcatcaatatttggagtattagatattatttatagtattacagtctctttgtgatccctgagtgcatggcttagtatttagtgaacaaatacctataagatgctaaacatcagatacaattgtgtataaggtttcatacaggagagaaagccattaggctcactttgagggaaggaaactatcaagctaaagagaaaaggtgatatttataagaattcaagcaaagaagtaaggcaacataacatacaatttcacatatattctggaaaccatgagaagtctagtgcagctaaaatgctggttgcatg

SEQ ID NO: 82294 - DNA, 599 bp, Homo sapiens
cacccgccaccacgcctggctaaattttttgtattttttagtagagacggggtttcaccgcgttagccaggatggtctcgatctcctgacctcgtgatccgcctgcctcggccttccaaagtgctgggattacaggcgtaagccactgtgcctggcctattttattttatgttaatttttgaaaaaagtatttcaagttatcacccatcctttccctccctaagcttttatattcatcagcactgagcccagcatgctggaattgtcaaatttgccaagatgaagagggtcccttgggcctgaagcaactcctgctgtagttaccctrtcttagctaagggtaattctattcttcccatttctcagacccaaaactttagtgtcaagattaatagcaccacaacctgctccctgcccctgtacccacatccaatccttcagcatttcctgttggccctaccttcaaaataggtccaaagtggaccatgacgcaccaccccactgccaagacctggtggggcttgccatcatctcatgcctggattattgcaatggcctcctagctggtctcctgcttcttttctcaacacagtagccag

SEQ ID NO: 82295 - DNA, 486 bp, Homo sapiens
ttttttttttttttttagacggagtcttgctctgtcacccaggctggagtgcagtggcgtgatctcagctcactgaaacctcagcgtcccaggttcaagcaattctactacctyagctgagtaggagagattataggcatgtaccaccatgctcggctagtttttgtgtttttagtagagatggggtttcaccatgttggtcaggctggtcttgaattcctgacctcaggtggtccacctgcctcggcctcccaaagtgctgggattacaggcatgagtcaccgtgcccggtcacagacctcttaacaaacatatcaagctctgatataggaaaacaaccatgatccactgccaccctacagggcaagttctcaagaacagggatggtactactcctagggatactggacacgaagccttccaaatcatacttgaagacacggacagtcacagaagcctgagctcggcttgttcgtttcttactct

SEQ ID NO: 82296 - DNA, 518 bp, Homo sapiens
gttcaagaccagcctgaccaacatggtgaaacactgtctctactaaaaatacaaaaattagctgggtgtggtggtgtgyacctgtagtcccagctacttgggaggctgaggcaggagaatcgctttaacccgggaggcagaggttgcagtaggccgagatcacgccaccacactccagcctgggccacagagcaagactccatctcaaaaaataaatagaaataaataaaaataaaaagttggagtcagtagaaaggaatgtttaatattagcgtaagttagttaaggaagtctgctaaccatcgtgtgattgatgctatgccagagtcaagttatgagagcaagccataacatactgggtccaagtgacctgtttagcaagatggatgggctgcagacatggctctctccaggctcctcagaaaggaatttagaacaccgaacagtggtcagaattcagtaagaatacattatccttatttttctcatttcacttcagacggatggaaatgtcatca

SEQ ID NO: 82297 - DNA, 754 bp, Homo sapiens
ttgtgctcctaaaacaaattaactaattagaaaaacttaatacagtctccagaagtaattgagccattaactggtttatacactgattagattgtgttaaaacctaaaataagacaattccttaagaagtataatacccattccaggaatagtaaagcgtttaaattgctgaactgcattattcytaatccttcccccactgcttaattggaaaggttaatggattctgaattgttctaatatattaagacaaccaactttttcttgcatttcaaaataaaattcctcacgaattaatacctgatgtcagctaaccattttcgagccctgtggttttgtttttttggctttctttttaaaaaagatctaattcctgaaaaagcagagtcttaaaaacacatgaaaaataattctgtagtcagtaaccttctttaacttcatggagtacatggcattggtacatatttaactgtggcctcagcagcccttcatctcatttgtcatcctatacatgttttaaaacactgccacggtttacatttgttcagtagaaggcagtgactgttttacaagatgtggggaaagaaggcccaaaaatgttcctttctaaaaaaacaaatctgcgatatacagttgtgccatttttttcttattccttaaaatatgacaatgtatgaatgaaaaatctgtaagttctgatgcaaactaagtaaatacatgttttaattatctctgtaacaattctcatattatg

SEQ ID NO: 82298 - DNA, 615 bp, Homo sapiens
catgagccaccatgccggccaagaattctttactgggyactaaatatatgccagagacttggtggataaattcttatggaggtaagggtctggtgagggagagagatgataaaaaagtaagtgacaaggaaagaagttatctttctgaataagtcagataaaagcagtgtttaagtcaatcaaaacggaggccaggcctggagaatccctgtgcagaccacaccagcctcttgagtcacctcaaccctgctcgatttgcatacataagtgaaacttaacttgagctatttcttgcaaaggcgtacgttaaagaaaaacagtttgagctcactggaggtttaaactcttggactcaggtgatcctcctgcctcggtctcccaaaacactgggattacaagtgtgtgccaccatacccagcctccagtgaccatttacaaatttacaactcggtggcattgagtacattcacagtgctgtgcagccgtcaccaccatttagttccaaagcattttcagcacctcatgttagtctattcaggctgttacaagaaaattccaggctgggagcggtggtttaagcctataatcccagcactttgggaggccaaggtcaga

SEQ ID NO: 82299 - DNA, 615 bp, Homo sapiens
catgagccaccatgccggccaagaattctttactgggcactaaatatatgccagagacttggtggataaattcttatggaggtaagggtctggtgagggagagagatgataaaaaagtaagtgacaaggaaagaagttatctttctgaataagtcagataaaakcagtgtttaagtcaatcaaaacggaggccaggcctggagaatccctgtgcagaccacaccagcctcttgagtcacctcaaccctgctcgatttgcatacataagtgaaacttaacttgagctatttcttgcaaaggcgtacgttaaagaaaaacagtttgagctcactggaggtttaaactcttggactcaggtgatcctcctgcctcggtctcccaaaacactgggattacaagtgtgtgccaccatacccagcctccagtgaccatttacaaatttacaactcggtggcattgagtacattcacagtgctgtgcagccgtcaccaccatttagttccaaagcattttcagcacctcatgttagtctattcaggctgttacaagaaaattccaggctgggagcggtggtttaagcctataatcccagcactttgggaggccaaggtcaga

SEQ ID NO: 82300 - DNA, 703 bp, Homo sapiens
ccagccagtcaccggctcctgcccgtcctttagaaacatccccctttctccagcccactgccatccctggctccatgcctagacaactgctgtcacagccccgacgcctctgtctgcatctagccctcaccaggtgaatattcctcaagcrcccccttgaccatgccacacgctgcttcagccttcaataccccccactgcccatagaaaaaagtcctaattgcaaggcttacagcagcctgttcccactggccttcccacatggacttcctgcaacccacctctctccaccctgtccttgtgcccagaggaacctcacgtactccctctccttcaggtggaaccccactttcccatgaagacccagctcaaaggacccattgtctgtaaaggccccctgactgcccagcctcgacgggcttcccctgcctcctgtgccctcctctggcaaaatacacactgcactgccttctacacctcctcttaatctgctcattgggtcttcaatcttgtggtagcttggctatgagcttatcttctcaactagattggaggctccctgagggcaggaaaaagattttgtgcctgtttccctatggtctctggctcagtcccaggccagagccagtatttgctgatttgtgcatgggttctgcactcccctggccactgtcagagtgagtgggtaggcacccctgggcat

SEQ ID NO: 82301 - DNA, 703 bp, Homo sapiens
ccagccagtcaccggctcctgcccgtcctttagaaacatccccctttctccagcccactgccatccctggctccatgcctagacaactgctgtcacagccccgacgcctctgtctgcatctagccctcaccaggtgaatattcctcaagcgcccccttgaccatgccacasgctgcttcagccttcaataccccccactgcccatagaaaaaagtcctaattgcaaggcttacagcagcctgttcccactggccttcccacatggacttcctgcaacccacctctctccaccctgtccttgtgcccagaggaacctcacgtactccctctccttcaggtggaaccccactttcccatgaagacccagctcaaaggacccattgtctgtaaaggccccctgactgcccagcctcgacgggcttcccctgcctcctgtgccctcctctggcaaaatacacactgcactgccttctacacctcctcttaatctgctcattgggtcttcaatcttgtggtagcttggctatgagcttatcttctcaactagattggaggctccctgagggcaggaaaaagattttgtgcctgtttccctatggtctctggctcagtcccaggccagagccagtatttgctgatttgtgcatgggttctgcactcccctggccactgtcagagtgagtgggtaggcacccctgggcat

SEQ ID NO: 82302 - DNA, 703 bp, Homo sapiens
ccagccagtcaccggctcctgcccgtcctttagaaacatccccctttctccagcccactgccatccctggctccatgcctagacaactgctgtcacagccccgacgcctctgtctgcatctagccctcaccaggtgaatattcctcaagcgcccccttgaccatgccacacgctgcttcagccttcaataccccccactgcccatagaaaaaagtcctaattgcaaggcttacagcagcctgttcccactggccttcccacatggacttcctgcaacccacctctctccaccctgtccttgtgcccagaggamcctcacgtactccctctccttcaggtggaaccccactttcccatgaagacccagctcaaaggacccattgtctgtaaaggccccctgactgcccagcctcgacgggcttcccctgcctcctgtgccctcctctggcaaaatacacactgcactgccttctacacctcctcttaatctgctcattgggtcttcaatcttgtggtagcttggctatgagcttatcttctcaactagattggaggctccctgagggcaggaaaaagattttgtgcctgtttccctatggtctctggctcagtcccaggccagagccagtatttgctgatttgtgcatgggttctgcactcccctggccactgtcagagtgagtgggtaggcacccctgggcat

SEQ ID NO: 82303 - DNA, 703 bp, Homo sapiens
ccagccagtcaccggctcctgcccgtcctttagaaacatccccctttctccagcccactgccatccctggctccatgcctagacaactgctgtcacagccccgacgcctctgtctgcatctagccctcaccaggtgaatattcctcaagcgcccccttgaccatgccacacgctgcttcagccttcaataccccccactgcccatagaaaaaagtcctaattgcaaggcttacagcagcctgttcccactggccttcccacatggacttcctgcaacccacctctctccaccctgtccttgtgcccagaggaacctcacgtactccytctccttcaggtggaaccccactttcccatgaagacccagctcaaaggacccattgtctgtaaaggccccctgactgcccagcctcgacgggcttcccctgcctcctgtgccctcctctggcaaaatacacactgcactgccttctacacctcctcttaatctgctcattgggtcttcaatcttgtggtagcttggctatgagcttatcttctcaactagattggaggctccctgagggcaggaaaaagattttgtgcctgtttccctatggtctctggctcagtcccaggccagagccagtatttgctgatttgtgcatgggttctgcactcccctggccactgtcagagtgagtgggtaggcacccctgggcat

SEQ ID NO: 82304 - DNA, 600 bp, Homo sapiens
cctgggatgtttaggcaggaaaatcgctttaacctgggaggtgggggttgcagttaactgagatcatgccmctgcacctccagccgaggtgaaacagtgagactccctttccaaaaaaaaaaaaaaaaaaaaaaaaaaaaaaaaaaaaaagattttaactgccagtagataccagaaattgtattaagactatttgacaaaataactaaatgactatgatatattctataattagaacataagctgtcattttaatagatcaggaatagattgttttcattaaataaatattctagttaacatttggctctcacttggaagagcaggattgcaagttttctaggaatcatagtcaattcaaatacaccaattccaaaaccatattgaacagtagttttcctcggttcagaagaaattttagaacatgtagactcacagcctcaccattataaatgtggacttttatgttgctggagacatgaagagaggggataaaaatgaaaaggagatacagatatgtcagagaagcccttggaaaactgagagttaagcaataaaaatcaacacaattagtaagattaggtagtaaaaatggtgtct

SEQ ID NO: 82305 - DNA, 554 bp, Homo sapiens
cttcttaatatagagtgagataattacggtgatcggtcataggccgaattagtgctttccagggtagctgactcaatttttcaaaatgaatcatcaaaawgagcaaaataactcatttcttaaagatgtcaaagtgcaattttaaatgtcatattaagtagtggcaagatgctggagtgtgggttagtagtgattactactatttaacagccatttaaaaacaaggcaagcgtaatgtttgcaccaatatggcatttaaatagtcaaaactaatagtcacaactactctactttgataatgaattaatttgtaattactaataacattttatttacttcatagcatttttcatgaagcttaaactgtatcattgttattattttagttaatatcatgttatctatctatgccaggagactggcattgccttttaaaaaaatgacagagaaatcaaaggcctgacacattaaggttttcatttaccttgatgcccagctagtgatattctgtgatattctgagttgtcttttcttaccttgttattgtctcatca

SEQ ID NO: 82306 - DNA, 554 bp, Homo sapiens
cttcttaatatagagtgagataattacggtgatcggtcataggccgaattagtgctttccagggtagctgactcaatttttcaaaatgaatcatcaaaatgagcaaaataactcatttcttaaagatgtcaaagtgyaattttaaatgtcatattaagtagtggcaagatgctggagtgtgggttagtagtgattactactatttaacagccatttaaaaacaaggcaagcgtaatgtttgcaccaatatggcatttaaatagtcaaaactaatagtcacaactactctactttgataatgaattaatttgtaattactaataacattttatttacttcatagcatttttcatgaagcttaaactgtatcattgttattattttagttaatatcatgttatctatctatgccaggagactggcattgccttttaaaaaaatgacagagaaatcaaaggcctgacacattaaggttttcatttaccttgatgcccagctagtgatattctgtgatattctgagttgtcttttcttaccttgttattgtctcatca

SEQ ID NO: 82307 - DNA, 554 bp, Homo sapiens
cttcttaatatagagtgagataattacggtgatcggtcataggccgaattagtgctttccagggtagctgactcaatttttcaaaatgaatcatcaaaatgagcaaaataactcatttcttaaagatgtcaaagtgcaattttaaatgtcatattaagtagtggcaagatgctggagtgtgggttagtagtgattactactatttaacagccatttaaaaacaagrcaagcgtaatgtttgcaccaatatggcatttaaatagtcaaaactaatagtcacaactactctactttgataatgaattaatttgtaattactaataacattttatttacttcatagcatttttcatgaagcttaaactgtatcattgttattattttagttaatatcatgttatctatctatgccaggagactggcattgccttttaaaaaaatgacagagaaatcaaaggcctgacacattaaggttttcatttaccttgatgcccagctagtgatattctgtgatattctgagttgtcttttcttaccttgttattgtctcatca

SEQ ID NO: 82308 - DNA, 701 bp, Homo sapiens
actgctatggtttgaatgtttgtgtcccctctaaaattcacattgaaaccctactacaatcgtattaagaggtggggtctttaagacgtgattaagtatgatggcttcagcctcatgaacgggatgaggtgcccttatcaaagggctccaggaagctagctaggctttttgctcttccaccttttaccacgtgaggacacagcaacaagatgccatcttgaaagcagagagtagtctgcaccagacactgaatctgctggtgccttggttgtggrctttgcagcctccagaactgtgagaaatgaatttttattgtttgtatattacccagtctgtggtattttgttatagcagcacaaatggactaaaacttctgctttctaatgacaaatacaactcttcagacaactgaaattctcaagtcaaactattagtgcattatttccctgtaggcaagctatatatcaagtgatatgctatgggacagaagaattacttgatcttaagtatttcttaataaagggagcatgagaccacctcctgcattagcgaaataagccctctaaggaaaccataaggtttgaggttggttagccaagactaccttccatggacaggtcccagaggatcaccttcaacttggttgctcacactccatttcctgtacagttgtggtcaactaacatctctctgcccaacca

SEQ ID NO: 82309 - DNA, 1254 bp, Homo sapiens
gcataagccactgcacccagcctatgtagccttttaagtaagctagttcccaatgggaccagtgattttagtacataaatagcaaagaaaatcagttgcccctttcctggctgtgagtttaccatttgccagcacaattgtagtatctgtttgcttctgcatcaragttagtgggtttttttgtttgtttgttttttcttttcatatgtcttgtgcttcacggagagaaagatatgtggttcactttcttagcagatccaacacccacctctattgtttctcatctgcacagttgttatttcttacagtctatgtcccaagttgctaaactgaactggttttggtgtcaacaggctgtgccttcaagttgttgtaacaagagactaagaagtgaaaaaaatatgtccatcaaggtgctttttaatttacatgtcacaaaaggtttgtctgtttactcattttcccccagctgagctggtcaattgcattagcatatctaaggactgctcatgaccttgtgtatttatccatcaatctgttcatccattgatttattgggttgcttatttaattaatgaattagttatttctctggctcaataaaaatattagataaatgactttttaaaagttttaatagtaaaacataaccccccaaatggacaagagaaaactcaaaagtgaagtcaacactagcagaaagagtgtacaaacaccacaggctttcagctgttgtgaggcacatatttaactctgatgtaactattggccaagaagaatgtcatagttctaaataaccaaaagaaaaaagtttcttggtgggtaacgaaaattttttctcagttaattcaaaggatattctttcgtattagttttctatatgctcagttgcagatttgagaatcttgtttccatagataaacaatattcgggtgaattttattttctgcaaaatctcattctaatagtagattttaaatttataaatatctgtaaattaatttctccttgttaaagtcaagatttgaagccagggctttctgaaggagtatggcaattcaaattgtcaagatgttgctctgtaccaacattataataggtactggggatataaagacagatatctttgcactgaaagagcttttatatatcagtacagattttcccataagagtgctgctaatggatgagttagtagatggatatgacgtttttattgtattgtaattattatttactttagaataactatgc

SEQ ID NO: 82310 - DNA, 1049 bp, Homo sapiens
ttagctgtaccactctgaaaaataaagataaaagatgctagtgagctatttatgatgggactacagaataataagattaatgaaaagaactcaggtaatttattttcatcataggttttaaacagtcactgaattacctatgattgcagcaataaaggttttttgaaaagtcattggagaactcaacatgkcaaggccctacttcctattcaattggaagggtattgatttagtgctggaaggagtttttttttttttttttcaactctatgttcataaactgagtgtttatgtggctgggattctctctttttctttctttcttttactcgatacaaaagtactgagttatcactcattgccaagcacagtgctaggtgctgatgatcaaaaggaactaagttacagtccttgatcctttagacctcactctagctcacaaacatatgcaaataatatttgatgaaaactatcatatgaacattctattgtgctgtgtctaaaaggctatctcagaaggcttcttgagggagacagctttgtgttgcatcgtaaaaaacattcttcaatgcttaattttagctaaatcctcttaaattattttcttataagccttaattcatacatgcttagacatttcctcaaaggaccctgtaaaatccctgaggtgaagtgctgacaagaccctgtgcctgaataccatcaaatttttccttggcttggatatctggatactgatatctcaacccttcaaccctttcttattttcagtagatctcttggcctctgacagtttgattaatcattaggaattttacttttctctgctttctggaatctgtgtctctggtgtggattcatttacccacctgccaacactgatgctttttgtgtgtatcttaattcctacttcccatgtgattgtgacgtattggttttatttttctattatagcttactaatctaaatatcctaaatgtaaatatcttcttccatgttctttatcaggcttactgaatttctacctggcttaatatagaggttttttt

SEQ ID NO: 82311 - DNA, 1049 bp, Homo sapiens
ttagctgtaccactctgaaaaataaagataaaagatgctagtgagctatttatgatgggactacagaataataagattaatgaaaagaactcaggtaatttattttcatcataggttttaaacagtcactgaattacctatgattgcagcaataaaggttttttgaaaagtcattggagaactcaacatggcaaggccctacttcctattcaattggaagggtattgatttagtgctggaaggagtttttttttttttttttcaactctatgttcataaactgagtgtttatgtggctgggattctcyctttttctttctttcttttactcgatacaaaagtactgagttatcactcattgccaagcacagtgctaggtgctgatgatcaaaaggaactaagttacagtccttgatcctttagacctcactctagctcacaaacatatgcaaataatatttgatgaaaactatcatatgaacattctattgtgctgtgtctaaaaggctatctcagaaggcttcttgagggagacagctttgtgttgcatcgtaaaaaacattcttcaatgcttaattttagctaaatcctcttaaattattttcttataagccttaattcatacatgcttagacatttcctcaaaggaccctgtaaaatccctgaggtgaagtgctgacaagaccctgtgcctgaataccatcaaatttttccttggcttggatatctggatactgatatctcaacccttcaaccctttcttattttcagtagatctcttggcctctgacagtttgattaatcattaggaattttacttttctctgctttctggaatctgtgtctctggtgtggattcatttacccacctgccaacactgatgctttttgtgtgtatcttaattcctacttcccatgtgattgtgacgtattggttttatttttctattatagcttactaatctaaatatcctaaatgtaaatatcttcttccatgttctttatcaggcttactgaatttctacctggcttaatatagaggttttttt

SEQ ID NO: 82312 - DNA, 1049 bp, Homo sapiens
ttagctgtaccactctgaaaaataaagataaaagatgctagtgagctatttatgatgggactacagaataataagattaatgaaaagaactcaggtaatttattttcatcataggttttaaacagtcactgaattacctatgattgcagcaataaaggttttttgaaaagtcattggagaactcaacatggcaaggccctacttcctattcaattggaagggtattgatttagtgctggaaggagtttttttttttttttttcaactctatgttcataaactgagtgtttatgtggctgggattctctctttttctttctttcttttactcgatacaaaagtactgagttatcactcattgccaagcacagtgctaggtgctgatgatcaaaaggaactaagttacagtccttgatcctttagacctcactctagctcacaaacatatgcaaataatatttgatgaaaactatcatatgaacattctattgtgctgtgtctaaaaggctatctcagaaggcttcttgagggagacagctttgtgttgcatcgtaaaaaacattcttcaatgcttaattttagctaaatcctcttaaattattttcttataagccttaattcatacatgcttagacatttcctcaaaggaccctgtaaaatccctgaggtgaagtgctgacaagaccctgtgcctgaataccatcaaatttttccttggcttggatatctggatactgatatctcaacccttcaaccctttcttattttcagtagatctcttggcctctgacagtttgattaatcattaggaattttacttttctctgctttctggaatctgtgtcyctggtgtggattcatttacccacctgccaacactgatgctttttgtgtgtatcttaattcctacttcccatgtgattgtgacgtattggttttatttttctattatagcttactaatctaaatatcctaaatgtaaatatcttcttccatgttctttatcaggcttactgaatttctacctggcttaatatagaggttttttt

SEQ ID NO: 82313 - DNA, 760 bp, Homo sapiens
tggggaggtgaggtaggagaatctcttgatcccgggacatggaagttgcagtgggccgagatcagccactgcactccagcctgaatggatggagtgaaaccctgtctcaaaaaaacaaaacaaaacaaaaaagaaagataagaaatgaaaggggctaaatttaagaagatattcatcacagcaacttagattgagtaagtggtttgcattctttatttcatttaattctaacaacaaacctctaaacgtttaggttttccctattttataaaggagaacattaaaggtcagagagcttcaataattgtcacaggtcacatattcataagtggcacagaccaagctagtttcatattccatttcatttgatttggtttaaggagttttggaaagctgctccaagcatacattagagatagagaagggatgggcaggaaatactgaggagaatattactaacattattttaaaaragcggtggaacgacccactcccaaaatgccctttggaatataataagaacacatgacttcctcaaagctctcacttcctcaagtactatagattttgagatttggaggaggacaagttaatgtgcagggcttgtaattttatatttatgagtaagatgtgactgaatatgattatgtgatctttaggggaaaaaaaatccagtcttacatcccatctgaaactcaaaaccctagaggaattccacttatgaaaaggagaatccttaaaagaaaggaaagtttgaaaa

SEQ ID NO: 82314 - DNA, 552 bp, Homo sapiens
tttggagatcacagatggaaagccacctgtttgaggtaacagaaggaataaggtcactagttcgtagatgcaatataatgacacaggtatactaagctctcataaatggttatatgagaaatataaattaaggctcatgtaaatatacaaagtagctgattacaaaaaaaaattatgaatatctttgtaaagtatcatttccaacatatttcctatgtaaaactttttttaaaaaattaggtttgctgaaattgaaagatacacatacttatctctgaactctttctaactaatggtcagtgaagaaaagtgcaaaatcctttagtttattagctaatgcttggaaatgtaactgttcattaatccttaattaactcaagtarcactgaaggaaagggtcagaaacattactgaataaagtataataatcaatgaccacttaatcccaatagctccctagaagggacagatttagaaggaaagcgaagacaatgaaatcaagatgaataaacaaataacatttctttggaactactaccaaaagtacatgac

SEQ ID NO: 82315 - DNA, 1418 bp, Homo sapiens
ccgggcgtggtggcagcgcctgtagccccagctactcgggaggctgaggcaggagaatggcatgaacccgggaggcggagcttgcagtgagcagagatcgcaccactgcactccagcctgcgtgacagagcgagactccgtctcaaaacaaaaacaaacaaacaaaacagatcagactcaaataaaagcctaacttaaaatatttttaaatgcaacattttatttaacactacaatgtaaacgctctgctgtatttccatattttataatatcacaatggctcagagccttcattatgaatgtcaacttttatggtatcaaagcaaaaagagccagttagcagaagttcacaattattgtacagtagattaaactaagtttactataggatgcatttctatatatggcaataattaagttaatagagcataaataagttgataaaaggaagtctgattatagcattattcctcaatacttccttagtttcgttttataaataatttaaaaattaccttcccartgtttggggatgtcaggtatcagaccatacttgtaaacatacttgtaaaatgtcaggtatcagaccatacttgtaaacagttggttgtagcctggattatgaataatttgtttgcattttaatcagtttataagccaaagcaggtgatgttgaataagtttctcccttgattttttattaatgctactcgagatacagagacagtgcaaaaaataagaataaaaggccaaattaaaaaaaaaaacaacaaccctgttttgatattgttaatagtcaagtattccctgtgagctaatttgacagtaaaaacacgtggaaaggcattgggaataaaacatacctgttccttgtacaaaaaggaacgacataagcttgaataactataataacaaaagttaggtggattgaagttatcattgatcagagaattattcaagattccattattctgagcctaacagtattgtagaaaatacatttctcacttgagaaatgaaccttgtgtctttaaaaatgatatcaggaacattaggcaaccaagaaaaacatgttgaaaatcatgaatatgttattttggtgattaatttttgatgatgctaaatattttattctgcatgttttggagacttttggtcttagaaaatagctgtttaccagtttgagtaattatcatagcgtgttggcagaggttagacactaagtaagcttaaggtttaatttatcttccacttaaaaaatggcacatgatcaatgtagacacactggaaataagagaaaaatttaaagggaataaaaatgactataactcctctttgtaagaatagtcactttagttctacactctaagaatgttcactttaaccctgtccagtattttttttgatgttcacatgca

SEQ ID NO: 82316 - DNA, 1672 bp, Homo sapiens
tttgtaatttgtaatttccatttacaaatggaaaatcactttgtaaatggaaatactttttataaaaggaaagctcatgccctgtttttggagcttttcctgaatccactggttctcaatggcctttagctcaaaataattcatatgtcaaagaggcatatttgggagtgacatattctggtaccttgcaccaaatttgtcagaaaagcaatagattaatacgtccagtatagggggcaacttaagcaagcaaaagaatgtggggatgaatgacagaattaaattaatttctctgttaacaaaggctacagcagaccatgcagaaacataccaccaagcatctccacatacagactagcacttttggtcatgtaatggaggaccagattatcctatagtagggtggcaagaagcatcatagaaccaaactgtgttcagattcagatactgtcttcacattgttgcctagccatgagtggggccacttagtgctggtgaacagtgggcagcttggagccagctcacacgttagatttggaccccttacaaaactagcatgtgggttcttgagttattaattgaaaaaataaaaataaagatttattgatgttttttcctcaggtttgtggagcatgaaatcatggtcaccttccactttccactttaaacattcgtagggtttgaattatttatattgagcaggcattacttttatgatcagaaaaagaaaacagcacaaagacaggctaattttgcaaaacaacaaaacaaaccctgaggtttataaatggttttaatttttttctgaatcagtctttatgccacaacagtcttctcagttatttgtgaatattaagagaaattgtttctgaaaaatccatgcagtgagttagaagtttcctctgaaaatccaatttttatacttaatcttatgcgagtggattattaccaattttaattttttattcataacgttrccacttccagtctcacaggtatctttccattattcttaggaccgtcatgcattgaactccattgcattacatctcaattatcttgttccttagttaagaggatgaagacttaccttaagttagagttttagaaatcgagagatattctccatacaaactatccctgaacaaaagcaaagtatgtcactaatgtgccatcattgttgaactatgtccctgtggccattgtaaacaattgccagcaaaatgacactatgttaattaaaggttgccgttaccctcttcaaagctgaggttatagctcttccccatctgttaattttatattattggaatttagatttcttgaggaagcagacggccataaactttcacaggtgttcatggtgcactgccttaactttatatgctgaacaggtacagcttgaagtttgctgggctgcacagggaattagtgctttaaatgatgtgtgggtagagaattaatttgttttgaactacctgaagaaaattcaatatactgtgcacagtggttcatgcttacttgacatggtgcaatacaacgagaaatgtcaaaaaaaaaaaaaaaaaaaaaagagatttaaagaaaccctgaattgtattcttcaaaccagcccaccacttgtcctgctaataaaacgccaaacaagaacatgatccaaggatactgcagt

SEQ ID NO: 82317 - DNA, 1282 bp, Homo sapiens
ggagggcaactttgtggagaatcattgtagttagtcccaagcaatatgacaagatcatgccattatttccgtggaattacagcagtttcacagctaggcttcatttctgcattcccaaagccatccctggtgactatgtatatattgacctgtccatttagttgttcagcataggaaaaaacttgtttccggctgagtgatgagatttrttaattaggttcattcattaggaggagtcactgggaaattttagagcagagaacagtgttacttgcataaacaagttattactataaaaaaaagtttccgtaagtgttcagaaatgccctgtgcctgtttcttcatgaacagttgcttcagataagtttcacaagaaaacaaagagcacaaggaaagtcagaaagacttgaagttctgaataaaatgcaatgaaactcttcatcttgaagagaaaagcctgagtttagcaatttcaacaggttaaagttgaacccttccctttctaaataagcaaatatgaaaaagcaaggagagaggggttcacagtgatgtatgatgaaacataggtaagattttgaattattggacatttgggtttagaatcctagttctgacgctttacagctgtgtgatccttaaattttctaaaccttggttttctcttctgtaagatatgaatcataatagagcctactgtataagattattataagggttaaacaaactaatctttataaagtgcttactagttagcaattattgcatgaaacaatatcaatacttatggcccacataaaactcatttattatttaccctgagcctgtgggtgagcttgacactgctgctgacctggcccaggcttgggtagtgttacttgagtccaatcacatatctgctatcagaggcatgcttactgggggatggctggtctagcatggtctcactcacatgtctgaagaattaccagatattggctggttattacgttgatttaagaaatggggatacatatttctcatgatccaggtacctagctcaggcttgttctcatagcagaagcagatgtctaagagaaagaatggacacatttgagatttctggaggcctaggcttggaagtggcacataattacttataccatattctattagccaaagcaaaccacatgactaaattcaacatcagtggagtgaaagtacatttcacctccacgagaggaactgtaaagtcacatggcaatggttatgaaaacctggaggtctgaacaattgtggctattta

SEQ ID NO: 82318 - DNA, 719 bp, Homo sapiens
caacttattctcaacgctgctggcaaacccattcctggtttcttctgctttgaatgcttcactttctcctcctaggcatttgggtatagttcagatgctttaagagacatttctatccattcataatctaccctaccctacgtttacgttttttatctcctcccattttctcccctcaccacttacacaaaatgctctaaagataccaagcttatgacaatatcctaaacatagtttccatgctttgttctaaatgtattcacatatactattatttctgccaaaatggtgtttttatttctccagaaggacttttattcatcttcagaattcagttcaaacatcctctcatccagaaatcctttatttaatattttcctctaagagttactcacttcccctgagctacctttggttcttgtttatatttctattgtacttacttatatgtctttttcttcttctaaaccctgaggtccttaagaacagagactgagctttacctgtctctgatatttcagtgaccagaccatcacctaatgyatggtagtcatttacagactttgttagaatgaatggatgaataatggttatcccttgtcacacacagcttgaacttgccattgattctaagggcactgaatacccctgccctttgtatttacagcacttgccaaagcatttagtttttaacttacaaagaaataattaaacagaaa

SEQ ID NO: 82319 - DNA, 776 bp, Homo sapiens
tttctagtttttatggtgtacaaacaagtccagttccatttactccttcatggccagcagcaaaagtttgttcccttcaacaaacttttgaggattttccaagactgtaataaaataacatatatttgattactctatttttaaatttgtggcatgttgacataaattcacctgcttgatttttcaactctcattatttgtcattatataagataaaatagttctatataaaaatacaatgtatgataatttgttttgttgggatagaggtgctatcatttcgaggactttctaagtgtgattttttcatttaastttttgaatttcaaatatattaatctgtgtcaaaatccaaaaaattttaaaaaggaattcagctaaatatttctcctttatcttttctccatttatccagttgccaacccacaaacaggtaacccttgttattagtgacttttgaatccttctatagatactttattttttattcaaggcaatacaaatgtaagctccaatatttcttatgttataaaatagaatatcttagatgtctttatgtatcaaaaaataatatggaatgatagctataaatgttaaaggaaaaatacttttcagtaattgtctgccaaattattgaaattatccctaaaagaagaaaatataatttttaagcaaaaaaaaagagataaatttgagaaccaattatagtgtcttttaaattcaaatagccatgataaatttggcaaataaaatatgacttctccaccctcacttgg

SEQ ID NO: 82320 - DNA, 634 bp, Homo sapiens
attatttttattatctcagcaagagaaatgtggtaggagagcagggtgataataaggagaaggtcatcaaaaaaaaaacatgtgagcaaaagaatctatgtcgtaattaagttcaaggggaggtactatgcctggatgtgcacataggccagatttatatttttctctgcccaaatatctcagtggagtaaagaataacaaggcagcattgctgcmaacatgactcgcctccctccatagggcggtttttctcctgtctcaaaattcaacaaatgtacagttgggttttataccaagacattcagttttcaggggcaggcaggagacagtggccttcctctatctcaactgcaagaggctttcctcttttactaatccacctcagcatagaccctttatgggtgccaggctgggggatggtcaggtctttctcatctcatgaggccatatttcagactatcacatggggagaaaccttggataatacccggctttccagggcagaggtccctgctgcttttcgcagtgcattgtgcccctgattttttgagactagagaatggcgatgacttttaccaagcatactgcttgtaaacattttgttagcaaggcacgtcctgcacagctctggatc

SEQ ID NO: 82321 - DNA, 634 bp, Homo sapiens
attatttttattatctcagcaagagaaatgtggtaggagagcagggtgataataaggagaaggtcatcaaaaaaaaaacatgtgagcaaaagaatctatgtcgtaattaagttcaaggggaggtactatgcctggatgtgcacataggccagatttatatttttctctgcccaaatatctcagtggagtaaagaataacaaggcagcattgctgcaaacatgactcgcctccctccatagggcggtttttctcctgtctcaraattcaacaaatgtacagttgggttttataccaagacattcagttttcaggggcaggcaggagacagtggccttcctctatctcaactgcaagaggctttcctcttttactaatccacctcagcatagaccctttatgggtgccaggctgggggatggtcaggtctttctcatctcatgaggccatatttcagactatcacatggggagaaaccttggataatacccggctttccagggcagaggtccctgctgcttttcgcagtgcattgtgcccctgattttttgagactagagaatggcgatgacttttaccaagcatactgcttgtaaacattttgttagcaaggcacgtcctgcacagctctggatc

SEQ ID NO: 82322 - DNA, 1472 bp, Homo sapiens
  misc_feature (1)...(1472): n = A,T,C or G
ggcaagnnnnnnnnnnnnnnnnnnnnnnnnnnnnnnnnnnnnnnnnnnnnnnnnnnnnnnnnnnnnnnnnnnnnnnnnnnnnnnnnnnnnnnnnnnnnnnnnnnnntgtcttcgcataggaaatgcccacaactgaaaatatattaagttatttgtntattcattcattccttcctgaaaatgaaatatcattggatgcatcttctttgacagaacaggtattctttattcctctcctacagttgtactttcatttccttttcttccttccagagatgggtcttgacctagagcctctctcaatactgaattcattcatttttctaatggaaagctatttgaataagacccttgaattcttggcaaactacctatttaggtataaaaactgcatgcagatgggaaattcttattackaattagagctttaggcccaatcccacaaaactccgcatgaactttatctcactcttccctttactttcagtgcctagaacagtgcctgaaacttaatggaaactcagtattctctgaatgaatgagtgaatggaatccccacaacacagatggcaaacacatgtgccttcactcttctcttccgtgttcacttcaaacctcactagggatcctagtaatcatcctgtgaggccaacagagggcctctgcatccttctacacagcaccccgagcagcaactaccaacctactgaaggcagcgtttgcaaagaaatttatttacacttttttttttgtggttgtctaccctgggaaactgagctgagtcacacatcagtaaggaagaccctcacctgtccctccggcttaaggccaaggctaggtgacctcagtcacgtggcctgttcctttgtggctttatttctaatgggtccacaatctagtcatctgatatggcccagagatgtactggagctggcttggattggctcaggagaacagattgtccctgtctcttccgacatctgtgtacagtaacgtcatggttgtcagcttgaaatcagccgtaggttggtgtatttacaccatgggaatcagcaagggctacaaatcagggcttgtttgtgtgtgtatatgtttttctgagacccagttgttaagccagcacatcatttccttgactctctcaattccagtaactaaaggagatgaagaagaacaagtccaaaggggatgtttttttcctcactgagaatagaagtggctaaaccactcatggggggcttccttcccagtggtcacagcctggttccttttgtcttttttttttttttttttttttttttgagatggagccttgctctgcctccaggctggagtgcagtggtgtgatctcgtctcactgcaacctctgcctcccgggttcaagagattctcctgcctcagcctcccaagtagctgggattacaggcatgtgccaccacacccagctaatttttgtatttttagtagagata

SEQ ID NO: 82323 - DNA, 1472 bp, Homo sapiens
  misc_feature (1)...(1472): n = A,T,C or G
ggcaagnnnnnnnnnnnnnnnnnnnnnnnnnnnnnnnnnnnnnnnnnnnnnnnnnnnnnnnnnnnnnnnnnnnnnnnnnnnnnnnnnnnnnnnnnnnnnnnnnnnntgtcttcgcataggaaatgcccacaactgaaaatatattaagttatttgtntattcattcattccttcctgaaaatgaaatatcattggatgcatcttctttgacagaacaggtattctttattcctctcctacagttgtactttcatttccttttcttccttccagagatgggtcttgacctagagcctctctcaatactgaattcattcatttttctaatggaaagctatttgaataagacccttgaattcttggcaaactacctatttaggtataaaaactgcatgcagatgggaaattcttattactaattagagctttaggcccaatcccacaaaactcygcatgaactttatctcactcttccctttactttcagtgcctagaacagtgcctgaaacttaatggaaactcagtattctctgaatgaatgagtgaatggaatccccacaacacagatggcaaacacatgtgccttcactcttctcttccgtgttcacttcaaacctcactagggatcctagtaatcatcctgtgaggccaacagagggcctctgcatccttctacacagcaccccgagcagcaactaccaacctactgaaggcagcgtttgcaaagaaatttatttacacttttttttttgtggttgtctaccctgggaaactgagctgagtcacacatcagtaaggaagaccctcacctgtccctccggcttaaggccaaggctaggtgacctcagtcacgtggcctgttcctttgtggctttatttctaatgggtccacaatctagtcatctgatatggcccagagatgtactggagctggcttggattggctcaggagaacagattgtccctgtctcttccgacatctgtgtacagtaacgtcatggttgtcagcttgaaatcagccgtaggttggtgtatttacaccatgggaatcagcaagggctacaaatcagggcttgtttgtgtgtgtatatgtttttctgagacccagttgttaagccagcacatcatttccttgactctctcaattccagtaactaaaggagatgaagaagaacaagtccaaaggggatgtttttttcctcactgagaatagaagtggctaaaccactcatggggggcttccttcccagtggtcacagcctggttccttttgtcttttttttttttttttttttttttttgagatggagccttgctctgcctccaggctggagtgcagtggtgtgatctcgtctcactgcaacctctgcctcccgggttcaagagattctcctgcctcagcctcccaagtagctgggattacaggcatgtgccaccacacccagctaatttttgtatttttagtagagata

SEQ ID NO: 82324 - DNA, 1472 bp, Homo sapiens
  misc_feature (1)...(1472): n = A,T,C or G
ggcaagnnnnnnnnnnnnnnnnnnnnnnnnnnnnnnnnnnnnnnnnnnnnnnnnnnnnnnnnnnnnnnnnnnnnnnnnnnnnnnnnnnnnnnnnnnnnnnnnnnnntgtcttcgcataggaaatgcccacaactgaaaatatattaagttatttgtntattcattcattccttcctgaaaatgaaatatcattggatgcatcttctttgacagaacaggtattctttattcctctcctacagttgtactttcatttccttttcttccttccagagatgggtcttgacctagagcctctctcaatactgaattcattcatttttctaatggaaagctatttgaataagacccttgaattcttggcaaactacctatttaggtataaaaactgcatgcagatgggaaattcttattactaattagagctttaggcccaatcccacaaaactccgcatgaactttatctcactcttccctttactttcagtgcctagaacagtgcctgaaacttaatggaaactcagtattctctgaatgaatgagtgaatggaatccccacaacacagatggcaaacacatgtgccttcactcytctcttccgtgttcacttcaaacctcactagggatcctagtaatcatcctgtgaggccaacagagggcctctgcatccttctacacagcaccccgagcagcaactaccaacctactgaaggcagcgtttgcaaagaaatttatttacacttttttttttgtggttgtctaccctgggaaactgagctgagtcacacatcagtaaggaagaccctcacctgtccctccggcttaaggccaaggctaggtgacctcagtcacgtggcctgttcctttgtggctttatttctaatgggtccacaatctagtcatctgatatggcccagagatgtactggagctggcttggattggctcaggagaacagattgtccctgtctcttccgacatctgtgtacagtaacgtcatggttgtcagcttgaaatcagccgtaggttggtgtatttacaccatgggaatcagcaagggctacaaatcagggcttgtttgtgtgtgtatatgtttttctgagacccagttgttaagccagcacatcatttccttgactctctcaattccagtaactaaaggagatgaagaagaacaagtccaaaggggatgtttttttcctcactgagaatagaagtggctaaaccactcatggggggcttccttcccagtggtcacagcctggttccttttgtcttttttttttttttttttttttttttgagatggagccttgctctgcctccaggctggagtgcagtggtgtgatctcgtctcactgcaacctctgcctcccgggttcaagagattctcctgcctcagcctcccaagtagctgggattacaggcatgtgccaccacacccagctaatttttgtatttttagtagagata

SEQ ID NO: 82325 - DNA, 1472 bp, Homo sapiens
  misc_feature (1)...(1472): n = A,T,C or G
ggcaagnnnnnnnnnnnnnnnnnnnnnnnnnnnnnnnnnnnnnnnnnnnnnnnnnnnnnnnnnnnnnnnnnnnnnnnnnnnnnnnnnnnnnnnnnnnnnnnnnnnntgtcttcgcataggaaatgcccacaactgaaaatatattaagttatttgtntattcattcattccttcctgaaaatgaaatatcattggatgcatcttctttgacagaacaggtattctttattcctctcctacagttgtactttcatttccttttcttccttccagagatgggtcttgacctagagcctctctcaatactgaattcattcatttttctaatggaaagctatttgaataagacccttgaattcttggcaaactacctatttaggtataaaaactgcatgcagatgggaaattcttattactaattagagctttaggcccaatcccacaaaactccgcatgaactttatctcactcttccctttactttcagtgcctagaacagtgcctgaaacttaatggaaactcagtattctctgaatgaatgagtgaatggaatccccacaacacagatggcaaacacatgtgccttcactcttctcttccgtgttcacttcaaacctcactagggatcctagtaatcatcctgtgaggccaacagagggcctctgcatccttctacacagcaccccgagcagcaactaccaacctactgaaggcagcgtttgcaaagaaatttatttacacttttttttttgtggttgtctaccctgggaaactgagctgagtcacacatcagtaaggaagaccctcacctgtccctccggcttaaggccaaggctaggtgacctcagtcacgtggcctgttcctttgtggctttatttctaatgggtccacaatctagtcatctgatatggcccagagatgtactggagctggcttggattggctcaggagaacagattgtccctgtctcttccgacatctgtgtacagtaacgtcatggttgtcagcttgaaatcagccgtaggttggtgtatttacaccatgggaatcagcaagggctacaaatcagggcttgtttgtgtgtgtatatgtttttctgagacccagttgttaagccagcacatcatttccttgactctctcaattccagtaactaaaggagatgaagaagaacaagtccaaaggggatgtttttttcctcactgagaatagaagtggctaaaccactcatggggggcttccttcccagtggtcacagcctggttcctttygtcttttttttttttttttttttttttttgagatggagccttgctctgcctccaggctggagtgcagtggtgtgatctcgtctcactgcaacctctgcctcccgggttcaagagattctcctgcctcagcctcccaagtagctgggattacaggcatgtgccaccacacccagctaatttttgtatttttagtagagata

SEQ ID NO: 82326 - DNA, 736 bp, Homo sapiens
aaccagctggcagatgacttggcaatgaagggagaagagaagaatctgcttttaaaaagagagagcaaggctgggcacggtggctcacaccggtaatcccagcactttgggaggccaaggcaggcagatcacaaggtcaggagttcaagaccagcctggccaacatggtgaaatcctgtctccactaaaaatacaaaaaaaattagctgggcatggtggtccatgcctgcagtcccagctactggggaggctgaggcaggagactagcttgaacctgggaggcagaggttgcaatgagtggagatggcaccactgccctccagcctgggcaacagagcaagactccatctcaaaaaaaaaaaaaaaacagagagagaragcaagagggaaaagatagcaaaacgtgtgaagcttacatagagaccatctctaatatattaccattactaattatcattttatattgataatgagttgatcagcactaccatctctggctgttgcagagagagcttccactcatgctacccagggccaggttcttgaatctcagcctagtgtcccctgataactcaatattcatggaagcctggggttcagggaacctctagaacttataagttagatgaaattgcatgtcaacttcatgtgggtcgccctcaaaccaattaaaacatcctctttgtggagaaactatttcaagtcctgaacaactgaaatgtaagtggatttttag

SEQ ID NO: 82327 - DNA, 555 bp, Homo sapiens
taagatgaagaaatgaataggcaaaacttgatcagagagtaattctatgaggcatttaccttgttcataaagtagttccatattcgaatctttgcaggcaactagattgctgagtaatgcaatcacactttgcatggtattacccagaatgctctcctgatgttcctgcaatagatcataatttccatcataaccatacagaaatacaattacatcatcgtaaagacaaataagcaaatgatgtscactgcttcattctttgcacaaggttaaatgattacctttttgcactttaatgaagcacatccttctatgttaagacaaatcccatcagtgagttaagtgagctgggagggagggtaaatcacccagacaccagtgctgcagcacagacttccctgcccatgagctgagagataacacatggtcctccatgctttaggtgggtgacaaaggaattcaagtatgtagaactcagaagatcatgcttgaagatgagtttgatatcacaaaagaaaactacttcaagcaaatatttatgcagtttcaatatta

SEQ ID NO: 82328 - DNA, 768 bp, Homo sapiens
gacttaataaactctaacttctgaacaggcttacaaaatcatagataattggaccctttcttatgtttctagcactttctcttggtttttctagtcatattctatgttctgtgcaccaactcttttcagttctttaaacatgccttgatttcccttagctcattctcctttcattttgctgacttttccttggctttcaggtcttggcttyattgtcacttactttaggaagctggttacacccacgaaaactggtttagcgtgcctcagaccccggctcccatagcatccccagcctcctagtcctaacacttcctgttacctggtaccaaaaacacttgtttatgtctctgtccctcccactaagctgtaaaccctaggaaggcaggagccatatcggtttgcttcactttggggcctgttacagagaagggatttaattatatttgtgtaggaaaggaagtaaagagctagcaaatgtagcatagactaagtctggtaagacatagattcaagtacaaatttattcagagaatttgtccgcagcactcctgctgtcctgcctggcctctagtaggaggtggtggtggtgatggctcactggctcggctcgcttgctttaaaattgcatcatttagacttctctctagaagttgccctcttcttagcagggttagccctgacattcattgggcagcctgtgtttctgaaacaacccaaaccctatctttgattgacaagaaaggatccaaaagggcagatgacatt

SEQ ID NO: 82329 - DNA, 768 bp, Homo sapiens
gacttaataaactctaacttctgaacaggcttacaaaatcatagataattggaccctttcttatgtttctagcactttctcttggtttttctagtcatattctatgttctgtgcaccaactcttttcagttctttaaacatgccttgatttcccttagctcattctcctttcattttgctgacttttccttggctttcaggtcttggcttcattgtcacttactttaggaagctggttacacccacgaaaactggtttagcgtgcctcagaccccggctcccatagcatccccagcctcstagtcctaacacttcctgttacctggtaccaaaaacacttgtttatgtctctgtccctcccactaagctgtaaaccctaggaaggcaggagccatatcggtttgcttcactttggggcctgttacagagaagggatttaattatatttgtgtaggaaaggaagtaaagagctagcaaatgtagcatagactaagtctggtaagacatagattcaagtacaaatttattcagagaatttgtccgcagcactcctgctgtcctgcctggcctctagtaggaggtggtggtggtgatggctcactggctcggctcgcttgctttaaaattgcatcatttagacttctctctagaagttgccctcttcttagcagggttagccctgacattcattgggcagcctgtgtttctgaaacaacccaaaccctatctttgattgacaagaaaggatccaaaagggcagatgacatt

SEQ ID NO: 82330 - DNA, 1089 bp, Homo sapiens
ccctctccacacttcttcagcaggtacctgttctttttcaaagatgagtaacaatcaggaaggaacctgtacataaaaactggagggaagaaacttatacaaaaggcagagaaaggacaaataatayaagagaaaaagaagacgaatcatacatagtctgtaagagatgcaaacacactcactctagaaaaaaagagttcaatgagaggttcaggagcacaaaggaagtgtgagacagagaaggagataaggagcaaactggggagcttaggaagacatggaagtagggaatgttaatatcactggacattatagatcaccaagatgagagccacactagaagctgcaaaagaccaaataagcacaactgaaagcatcctcagggaggtggcagataggctttaggtagtcacacaaaatgacaggaaatgaaacagtgatttaaactgtgcatagagacaatgacggagatgtcattgacaaaggagctacatcataagcatgattagtatttttacagaagaagtgaaagggaaccagacaggtgaaagagttaaaaatagaaaagcaatgttccataaataaatgtgcagataaaaagggcacattgtatgctaggaaatacagatacaaaatgacatattccagtgagagtattagccatcaaggacagggaaaggagtatttgatgctcctgcagaaaaagttagtcatgtgcaaggcacagtaagggagcgatgatgggatctggagtgaaagctgcctggaaagggctgttttacaggaactatgccctttgggagggagactaggcctcactcttgtcccgacctttgatttcctgcctgtggctccctgtggctgcaccagaagacgagagtccattgatgccattcatacaggtcggctgttggatggggagccgatcaggaagagaaacagaaagcattcagcatgtgcatcaaaatattttttttcttgctattcaattaagaaattaaaacttgttttagactctttaggaacgggtaatgctaaagattaatagtcatagtgttccttgctgtcctgcttccctttctcaccatg

SEQ ID NO: 82331 - DNA, 1089 bp, Homo sapiens
ccctctccacacttcttcagcaggtacctgttctttttcaaagatgagtaacaatcaggaaggaacctgtacataaaaactggagggaagaaacttatacaaaaggcagagaaaggacaaataatataagagaaaaagaagacgaatcatacatagtctgtaagagatgcaaacacactcactctagaaaaaaagagttcaatgagaggttcaggagcacaaaggaagtgtgagacagagaaggagataaggagcaaactggggagcttaggaagacatggaagtagggaatgttaatatcactggacattatagatcaccaagatgagagccacactagaagctgcaaaagaccaaataagcacaactgaaagcatcctcagggaggtggcagataggctttaggtagtcacacaaaatgacaggaaatgaaacagtgatttaaactgtgcatagagacaatgacggagatgtcattgacaaaggagctacatcataagcatgattagtatttttacagaagaagtgaaagggaaccagacaggtgaaagagttaaaaatagaaaagcaatgttccataaataaatgtgcagataaaaagggcacattgtatgctaggaaatacagatacaaaatgacatattccagtgagagtattagccatcaaggacagggaaaggagtatttgatgctcctgcagaaaaagttagtcatgtgcaaggcacagtaagggagcgatratgggatctggagtgaaagctgcctggaaagggctgttttacaggaactatgccctttgggagggagactaggcctcactcttgtcccgacctttgatttcctgcctgtggctccctgtggctgcaccagaagacgagagtccattgatgccattcatacaggtcggctgttggatggggagccgatcaggaagagaaacagaaagcattcagcatgtgcatcaaaatattttttttcttgctattcaattaagaaattaaaacttgttttagactctttaggaacgggtaatgctaaagattaatagtcatagtgttccttgctgtcctgcttccctttctcaccatg

SEQ ID NO: 82332 - DNA, 271 bp, Homo sapiens
atctggcgtttcccctactggcactccgtctctctcctgccaccatgtgaagaaggacgtgtttgtttcccattctgtcatgattggaagttttttgaggcctccccagccatgactcacatgcagaactgtgtcagttaaacctctttcctttataaattacccagtyttgggcaattttttatagcagcatgagaacaggctaatacctctacttatatgtctggctgttttcacagtgcattttctgtgtcatccacattgttgtttt

SEQ ID NO: 82333 - DNA, 545 bp, Homo sapiens
tctcagtatttattaactaacatctagcatcatctaacaaacttatcatcttaattttgtttgttktttattttttccacaaaaatgtaagctccatgaaggcagggattttggtcagttttattcattgctgtattctttgcacatggaacaatacctacaaatatctgttcaatgacttaatgaactagatctggggtggcaaactctagatctgggataaagttttactggaacacagtcacacattcatttatatattgtctacagctgtttttgtgctacaagagtggatttaaatagttgtaccagagactgtatggcccataaagcttaaaatatttcttgtcgagacttttacagaataaaatttgccaatccctgaactagatgcaccaatcagaatgtcatgtagagttccgattccaaacttctaggtaactgtggtagattaaagatggccacaaattactgtcattaagagctagagtctctttctccaccccttgaaccaatatggcttagtgattctctcaaccaataaa

SEQ ID NO: 82334 - DNA, 955 bp, Homo sapiens
gaatgatttagtggagaagagactgatgcttttttggtaagaaaggagatacagatgtaaacaacttttgtccaaatcatctcctttcttccttcaggaggaaaatcagtaaacagaaatgccaaataatgagccattattgcttaaaattgaccagtttcaaaatagaatatattattccctttttctgtaactggctctgtgtttttcctagagactcaggctttaagctaggagtaactttcaggtcttccctttttctgtcatattttatatattcaattgaaaatcagtttaccattaattcataccctacattaccgaaaatttaactgtagctaatatgggttgaattgtgtccctcaaaagttatgttgaagtcctaacctctagtacctcacaatgtgacttgtttggaaatgrggtcattgaagatttaattagttaagtcaagatgagtccatacttgagtagaaaatactcctaatccaatgtgactaatgtccttacaataagagaagagacagaaacacagggagaatcctgtgtgacagcaaaaggaaagattggactgatgtggctgccagtcaaaggatgccaaggttgtgtggccaccaacagaagttaggaagaaacaatgaagattatcttctagagacttcaagacaacgtgattctaccaacaccatgactttgagtttctgttctccagaaccgtgcagcaataaatttctgtgtttaagctacctagtttgcaatactttgcagtggcagccctgggaaagtgatataatggcatttctcatttctcaatcactaaacatatgtgagcccacatactgttcttggctttctattgaaagttatctacttgttcagattctaattgtggttatgtttatttttctgtgcatttttctcagttgtatcagatacagtgcatatatcatgaagc

SEQ ID NO: 82335 - DNA, 955 bp, Homo sapiens
gaatgatttagtggagaagagactgatgcttttttggtaagaaaggagatacagatgtaaacaacttttgtccaaatcatctcctttcttccttcaggaggaaaatcagtaaacagaaatgccaaataatgagccattattgcttaaaattgaccagtttcaaaatagaatatattattccctttttctgtaactggctctgtgtttttcctagagactcaggctttaagctaggagtaactttcaggtcttccctttttctgtcatattttatatattcaattgaaaatcagtttaccattaattcataccctacattaccgaaaatttaactgtagctaatatgggttgaattgtgtccctcaaaagttatgttgaagtcctaacctctagtacctcacaatgtgacttgtttggaaatggggtcattgaagatttaattagttaagtcaagatgagtccatacttgagtagaaaatactcytaatccaatgtgactaatgtccttacaataagagaagagacagaaacacagggagaatcctgtgtgacagcaaaaggaaagattggactgatgtggctgccagtcaaaggatgccaaggttgtgtggccaccaacagaagttaggaagaaacaatgaagattatcttctagagacttcaagacaacgtgattctaccaacaccatgactttgagtttctgttctccagaaccgtgcagcaataaatttctgtgtttaagctacctagtttgcaatactttgcagtggcagccctgggaaagtgatataatggcatttctcatttctcaatcactaaacatatgtgagcccacatactgttcttggctttctattgaaagttatctacttgttcagattctaattgtggttatgtttatttttctgtgcatttttctcagttgtatcagatacagtgcatatatcatgaagc

SEQ ID NO: 82336 - DNA, 787 bp, Homo sapiens
aaaaggggtacagaacaaattaaagatttttagcatttatcaaatgtttacaataaggatttcaagtaaattcttatacttaatgtacacaataattaagaaaagtattatgtcacaattatcaaaattaggattcagcgtatgaagaggtaaaataattagcccaaggccataagttagttagtgggggataagcgggagttaaagcaggtctgtgtaacttccaaacccatacttttaacttttaaagttagctgcttgaaagacaataagaaaagtaaacagaatccattcacaattgccacaaaaataataaaatacctaggaatatgkttaacaaaagaagtgaaagacctattcatggagaactaaaaactactgctcaaagaaatcagagatgacacaaacaagtggaaaaacatttcaggctcatgaatagaaagaatcaatattgttaaattgcccatctgcttaaaccaatttatcgactcaatgctatttccactaaactaccatttacattcttcacagaattggaaacaaaactattctaaaattcacatgaaaacaaaaaagggcctgaatggccaagacaatcctaagccaaatgaacaaagctggaggtatcacactaccaacttcaaactatactacaaggctacagtaatcaaaacggcatggtactggtacaacaacagacacatagaccaatggaacaaagtaaagcatcgagaaataagactgcacacctacaaccatcttatctttgacaaacctgacaaaaaca

SEQ ID NO: 82337 - DNA, 673 bp, Homo sapiens
acctaatattcaattcttcaatccgcaagtatatatttgaaatgggtatatacagcaattaaaatatgcccctccccgcttgccattgagatcttagattgttaagtaagacctagtayaatgataaaaggcaaaagaaaacctctgacccttccccaacacttcagggaagataatacataaaaataatatttcatccttaggaagatggtatagattagtgccatggataaagacctaaaagatgcatggctggttgtctgcatcatatctctacttcattttccaatctggccactgcagaaaacagatgagttctggaaatgactataaattgccacagtcttaaccaaatggtagccacaatcacagctgcaatctcatgtacatgtaatgtgatcattgagttggtgaatatgtgttttccactccaattagataagaagatgagaaacattttacatgtacttgagatagacattattcatttacagttttgtttcagatttatattaactctcccaccctttatcacaatatagtcaaaaaatctataccattagaagctgtattatgtttgaactactaaatgtaagcattcagatgaatctggcagcaggcagtcttaacgtaaaaatattttatactgttttcagcctaagcaaagtaaaaa

SEQ ID NO: 82338 - DNA, 673 bp, Homo sapiens
acctaatattcaattcttcaatccgcaagtatatatttgaaatgggtatatacagcaattaaaatatgcccctccccgcttgccattgagatcttagattgttaagtaagacctagtacaatgataaaagrcaaaagaaaacctctgacccttccccaacacttcagggaagataatacataaaaataatatttcatccttaggaagatggtatagattagtgccatggataaagacctaaaagatgcatggctggttgtctgcatcatatctctacttcattttccaatctggccactgcagaaaacagatgagttctggaaatgactataaattgccacagtcttaaccaaatggtagccacaatcacagctgcaatctcatgtacatgtaatgtgatcattgagttggtgaatatgtgttttccactccaattagataagaagatgagaaacattttacatgtacttgagatagacattattcatttacagttttgtttcagatttatattaactctcccaccctttatcacaatatagtcaaaaaatctataccattagaagctgtattatgtttgaactactaaatgtaagcattcagatgaatctggcagcaggcagtcttaacgtaaaaatattttatactgttttcagcctaagcaaagtaaaaa

SEQ ID NO: 82339 - DNA, 673 bp, Homo sapiens
acctaatattcaattcttcaatccgcaagtatatatttgaaatgggtatatacagcaattaaaatatgcccctccccgcttgccattgagatcttagattgttaagtaagacctagtacaatgataaaaggcaaaagaaaacctctgacccttccccaacacttcagggaagataatacataaaaataatatttcatccttaggaagatggtatagattagtgccatgrataaagacctaaaagatgcatggctggttgtctgcatcatatctctacttcattttccaatctggccactgcagaaaacagatgagttctggaaatgactataaattgccacagtcttaaccaaatggtagccacaatcacagctgcaatctcatgtacatgtaatgtgatcattgagttggtgaatatgtgttttccactccaattagataagaagatgagaaacattttacatgtacttgagatagacattattcatttacagttttgtttcagatttatattaactctcccaccctttatcacaatatagtcaaaaaatctataccattagaagctgtattatgtttgaactactaaatgtaagcattcagatgaatctggcagcaggcagtcttaacgtaaaaatattttatactgttttcagcctaagcaaagtaaaaa

SEQ ID NO: 82340 - DNA, 673 bp, Homo sapiens
acctaatattcaattcttcaatccgcaagtatatatttgaaatgggtatatacagcaattaaaatatgcccctccccgcttgccattgagatcttagattgttaagtaagacctagtacaatgataaaaggcaaaagaaaacctctgacccttccccaacacttcagggaagataatacataaaaataatatttcatccttaggaagatggtatagattagtgccatggataaagacctaaaagatgcatggctggttgtctgcatcatatctctacttcattttccaatctggccactgcagaaaacagatgagttctggaaatgactataaattgccacagtcttaaccaaatggtagccacaatcacagctgcaatctyatgtacatgtaatgtgatcattgagttggtgaatatgtgttttccactccaattagataagaagatgagaaacattttacatgtacttgagatagacattattcatttacagttttgtttcagatttatattaactctcccaccctttatcacaatatagtcaaaaaatctataccattagaagctgtattatgtttgaactactaaatgtaagcattcagatgaatctggcagcaggcagtcttaacgtaaaaatattttatactgttttcagcctaagcaaagtaaaaa

SEQ ID NO: 82341 - DNA, 459 bp, Homo sapiens
aatgtctgacaaaactaaatattgaagggaatgtgtagtaatatagggctgttggagtagaaattgataatatttatttgcaaaatagtgtggcctgtctgctgaagttgaatatcgtgttctactaattttacactgttatgcaacttacagaattktgtgcttatgtgtgtcagtttaaacgtacagaatttttataatagccttattcataattatcccaactgtaaacaaagcaagtgtttagaagaagtgtggaccaataaattgtgttatatctatacaatgttatggtgagaaaaatgaaaaatatatatgtatatccaaaaagtatgggtaaaatttcacataatgttggcaccaaaagccagaaacaaagaaacacaaaactgtacgtagtatgaactatttacatacacttctgaaaaacaacactaaactttattgtttatttatgca

SEQ ID NO: 82342 - DNA, 634 bp, Homo sapiens
tttcttttggcactgccagatttctgtcctcttgtatagaagaattcctactttcctcatatcctgattgacatttggtgttagccaccttcaaatgtttgacagttttgtgtatctaaaatgatagctcagtgttcttttcattttcacttctctgattcccagtgaatacgggtgaataggttcttcacatacctattgacccttcacatttccatttgtgaattaaatggcaaggttttaagaaagaattccttctgccaaattagtcgggacacacaggcgaagagagatggattaaaattcagatcttgctagaaaatctttggccaaggtggggtgagagagaagcagaggaaataattccagcatgtaggactgtgatctggaccatttttgactgagtgtgggagaggaattgtcaatggattatggtcatttttctccttgattgttggaaacctgacacctggaattaaaatgttgcaatccagattggcacatgygtaattctgagattgcctctaattattgtcagtttgacagagatccttgaggatgtccagcaagaaccgtcatgggaaactatgagatgaggagacttgtgactaagggagagtaagaccagagtcaa

SEQ ID NO: 82343 - DNA, 798 bp, Homo sapiens
ttttggaaacacagaaatttgagggattttacaagtcataagctacagaaactgagtagctgtccacaactttagtgctgaatacaaacagattcataatttgctcttggcatgtgtttgtcctggcttgtattgtaagcctttaactacatcagtatggtgataaataccaaacttttttgtggttcacaaccaaatcttccttttggccctgtctttgaaaacattttgtgatgaaaaagttcaaacaaaaaagtagaaaatatagttaataaacctccacatctccctcactggtctcagtaattatcagcttatgggcaattttaattatttcacatacttccyttccaagctggattattttgaagtaaagtccatatatgataacaacatttcatccatatttcaatatattaaattaataactattgtatttacaaacagtccattcagatttaaaaatcaccaatgattggctgaattaactgattaaatttttctgacttaacagattagtcacctggatacaatataaatgtgaagctttaagctttaagttctctcctttttttttttttctttttttgtcgcccaggagacaaaaaaaaatctgctgcccattgcaacctctgcctcctggaagacggggtttcaccatgtcggccaggctagtcccaaactcctgacctcaggtgatgcacccacctcggcctcccaaagtgctgggattacaggcgtgagccactgtgcccagccagtcctctctttttattaacttaatcgtatctagataaa

SEQ ID NO: 82344 - DNA, 652 bp, Homo sapiens
tcaaccatgaatccatctggttgtgagctgcttttttttttttctctcaagtgtttcaatcccttatttgttattggtctgttcagattttctatttttcatgattcagtcttagtaagttgtattgtgtctaggaatatatctacttcctctagttatccaatctattgatctataattgttcgtagtagttttatgatccttagaagtaattagttttttaaaaaatgccatcarttaaataataaatgggaaaaaactaaagtgtatttatatgtgtgttatgcttatataccattgtggtaggcaggcattctttctgtattataacatgctagtggtgttttctttactttttaaatggtgtgagcaataaattcacctagcatattctttcacccaaattaaagttcttaggtaccaataaaggttatccacacatttgtcatgtatggttttaaacaccttgcctctcgtgagtgagatggagaatgagaacagtggggtcaaaagtgatattgggctgataagagctagtttagaaagaactcaacaaaagcctctgaagtgtgatccagaccagcagctctgtccagtgattttgccagctaaggcattatataaaaacacacagtgtggaataaacttagaa

SEQ ID NO: 82345 - DNA, 1735 bp, Homo sapiens
ttttgcacatttcatggcctgacaagtagttatacaaaccagaatttcttttaataaaccaagaaagtcaaatttattccaggaaaaaaaagtaagatgcaaacaagtcaaaatctatcactaagatttttagataataaagacacttaagagtaactattttccaccttctttagcaaacttagtaaatcaaaacttggatttacacaaacaataacctatgaagtgccttgataatatatgaagtgaggccacacgcagtggctcatgcctgtaatgccagcactttgggaagccaaggcagaaggattgcttcagcccaggagttcgagaccagactaggcaacatggtgaaactctgtctctataaaaaatataaaaattagctaggcatagtgccgtgtgcctacagtcctagctacttgggaggctgaggtgggaggatcaattaagctgggaggtcgaggctgcagtgagccatgattgtgccactgcactccagcttgggtgacagggagagaccccatctttctctctctttctctctctctctcactgtgtgtgtgtgtgtgtgtgtgtgtgtagtgaaatttaagtatctaacttttctagttttactaagcagtttataaatgtaattttaggattacatgtgctaagtaaaacaaagtacatcataacagaaaagagcctcccttatgagtaaaacacagatcttccaagattttagcaaaaaagaaaagtccccaggaagtcattccagaatgggagtctgctaaggttttcctcawattgattcccactgaagctctgactcaaaaatgaacactcttccctatcccctccctgccccattccctagttccctttgacccatttaatattttcttttagacttataaatgcatatacttgtgttgcttttcattttgtagtggtttttgcttgatatattttaaaacttaactaaataagagagaacataagaaataattatggaaaatcaaaactctaaaaacaggcacatttccaaagtacatatttctgatcctaaaataatctccctctaaccctaaaggaccagtaattctttgcagtcaccttacccagctcccatcttttccagttccctgcatttcccaagttagctgagaagtcttggaatctatactaataagaaccaatcttagaaaatagttcttagacacaaaatttgaccctttccttttatttcctttctttaaatttccttcacctgtaagcctgcacttaagcccagtttcccatctaagaaacacaactgattaatggggacatggtgattagaataattaattatccacctctttctagcccaaaagttacaagttcagtccaccttcggaggaggctgtgattcagtggcaagtcactaagtatacagccaaatgtgtgatatccctaaactggacaacagccattgcatacacacaatgttatgtcttactccacactactggctttggaggccatggaactcagggggactcagcctgctcaggtcttatccacaaaccactcccaacagctgaataaaaggaagacaaagcccctcaagactgcaggaacagaagacacaaacacttgatgagaaaagagccatagggctgactatttgaaccgcaaaggagttgtgggaggaagtcattgagaaatgaaactcagattaacagcccaggacaaactggaatttgac

SEQ ID NO: 82346 - DNA, 1735 bp, Homo sapiens
ttttgcacatttcatggcctgacaagtagttatacaaaccagaatttcttttaataaaccaagaaagtcaaatttattccaggaaaaaaaagtaagatgcaaacaagtcaaaatctatcactaagatttttagataataaagacacttaagagtaactattttccaccttctttagcaaacttagtaaatcaaaacttggatttacacaaacaataacctatgaagtgccttgataatatatgaagtgaggccacacgcagtggctcatgcctgtaatgccagcactttgggaagccaaggcagaaggattgcttcagcccaggagttcgagaccagactaggcaacatggtgaaactctgtctctataaaaaatataaaaattagctaggcatagtgccgtgtgcctacagtcctagctacttgggaggctgaggtgggaggatcaattaagctgggaggtcgaggctgcagtgagccatgattgtgccactgcactccagcttgggtgacagggagagaccccatctttctctctctttctctctctctctcactgtgtgtgtgtgtgtgtgtgtgtgtgtagtgaaatttaagtatctaacttttctagttttactaagcagtttataaatgtaattttaggattacatgtgctaagtaaaacaaagtacatcataacagaaaagagcctcccttatgagtaaaacacagatcttccaagattttagcaaaaaagaaaagtccccaggaagtcattccagaatgggagtctgctaaggttttcctcatattgattcccactgaagctctgactcaaraatgaacactcttccctatcccctccctgccccattccctagttccctttgacccatttaatattttcttttagacttataaatgcatatacttgtgttgcttttcattttgtagtggtttttgcttgatatattttaaaacttaactaaataagagagaacataagaaataattatggaaaatcaaaactctaaaaacaggcacatttccaaagtacatatttctgatcctaaaataatctccctctaaccctaaaggaccagtaattctttgcagtcaccttacccagctcccatcttttccagttccctgcatttcccaagttagctgagaagtcttggaatctatactaataagaaccaatcttagaaaatagttcttagacacaaaatttgaccctttccttttatttcctttctttaaatttccttcacctgtaagcctgcacttaagcccagtttcccatctaagaaacacaactgattaatggggacatggtgattagaataattaattatccacctctttctagcccaaaagttacaagttcagtccaccttcggaggaggctgtgattcagtggcaagtcactaagtatacagccaaatgtgtgatatccctaaactggacaacagccattgcatacacacaatgttatgtcttactccacactactggctttggaggccatggaactcagggggactcagcctgctcaggtcttatccacaaaccactcccaacagctgaataaaaggaagacaaagcccctcaagactgcaggaacagaagacacaaacacttgatgagaaaagagccatagggctgactatttgaaccgcaaaggagttgtgggaggaagtcattgagaaatgaaactcagattaacagcccaggacaaactggaatttgac

SEQ ID NO: 82347 - DNA, 1735 bp, Homo sapiens
ttttgcacatttcatggcctgacaagtagttatacaaaccagaatttcttttaataaaccaagaaagtcaaatttattccaggaaaaaaaagtaagatgcaaacaagtcaaaatctatcactaagatttttagataataaagacacttaagagtaactattttccaccttctttagcaaacttagtaaatcaaaacttggatttacacaaacaataacctatgaagtgccttgataatatatgaagtgaggccacacgcagtggctcatgcctgtaatgccagcactttgggaagccaaggcagaaggattgcttcagcccaggagttcgagaccagactaggcaacatggtgaaactctgtctctataaaaaatataaaaattagctaggcatagtgccgtgtgcctacagtcctagctacttgggaggctgaggtgggaggatcaattaagctgggaggtcgaggctgcagtgagccatgattgtgccactgcactccagcttgggtgacagggagagaccccatctttctctctctttctctctctctctcactgtgtgtgtgtgtgtgtgtgtgtgtgtagtgaaatttaagtatctaacttttctagttttactaagcagtttataaatgtaattttaggattacatgtgctaagtaaaacaaagtacatcataacagaaaagagcctcccttatgagtaaaacacagatcttccaagattttagcaaaaaagaaaagtccccaggaagtcattccagaatgggagtctgctaaggttttcctcatattgattcccactgaagctctgactcaaaaatgaacactcttccctatcccctccctgccccattccctakttccctttgacccatttaatattttcttttagacttataaatgcatatacttgtgttgcttttcattttgtagtggtttttgcttgatatattttaaaacttaactaaataagagagaacataagaaataattatggaaaatcaaaactctaaaaacaggcacatttccaaagtacatatttctgatcctaaaataatctccctctaaccctaaaggaccagtaattctttgcagtcaccttacccagctcccatcttttccagttccctgcatttcccaagttagctgagaagtcttggaatctatactaataagaaccaatcttagaaaatagttcttagacacaaaatttgaccctttccttttatttcctttctttaaatttccttcacctgtaagcctgcacttaagcccagtttcccatctaagaaacacaactgattaatggggacatggtgattagaataattaattatccacctctttctagcccaaaagttacaagttcagtccaccttcggaggaggctgtgattcagtggcaagtcactaagtatacagccaaatgtgtgatatccctaaactggacaacagccattgcatacacacaatgttatgtcttactccacactactggctttggaggccatggaactcagggggactcagcctgctcaggtcttatccacaaaccactcccaacagctgaataaaaggaagacaaagcccctcaagactgcaggaacagaagacacaaacacttgatgagaaaagagccatagggctgactatttgaaccgcaaaggagttgtgggaggaagtcattgagaaatgaaactcagattaacagcccaggacaaactggaatttgac

SEQ ID NO: 82348 - DNA, 686 bp, Homo sapiens
atgtgaagaaaatttaaagaacaagatatcaagtagatattaaaaagaaaaatacagtagagcaccaaatagaatattctcaacaaatgtctcaaaaaatgcacagagcaaaaatgagacaaacaactgctacaaacagatcagtctaacagctaagtgatttggaatgaaaattaactctttggctaatctttccctccctcacagaatgaggccgtgtggctcagggagatcaactgatttgtctgaagcttgcaagggtagatttcagagacgcttcagatgagggagcctctctttccatgaggagatggcagaatgctgaatccctgttcaatctgaaatttagccatataacttgtagaaataagaggaggttttargactcacttaaaatataaatatcattctgagtcctcttctagggttatcccatcactttctgaaaatattagaaaagatcaagttgtatccaggtaataatcaggataagaccatctaatacatatctttaatagccaaaattttttcaaacatgatacgtgagcagaaccaggaaattctggaaacctagtctgccacaggttacttttaacacaaggttactcagccttggcacgactaccatttcgggcaggataattctttgttgtggggcgctgtccaatgcaggttatttagcagga

SEQ ID NO: 82349 - DNA, 614 bp, Homo sapiens
gccctgtcctccctggagacagtatcttcctgtaatgctctagttttcaactactttctcctctaataaggtatctaaactccagcctaacaatttgtcttcatcggcattattattcactacatgaatgaagggacaaactttttagggtactatcactaatgcacagactgggtttgattttgtttgttttttggcctcatctgacaaccagaacacatgtccaagtaaagacaaaactattctctatgtgatacctgactaaatattaggtcaattatgatgaaaaaaaattagtcaaccacggtttgtgtgtcacataaataaaaataactggttgacaggattttgttgttatttattattttggcttgacattgacacagtgtgagttttagaaatggttactcatttttttctatttatgtctaattttgacaggtttcctggattctccagaayggcatgctctacctccaggtatcctagagcatacccgagccttctgagaagcctaattaaaattgtagttagaaaatcttacttttaggcatatctcatcatggaaatgttaccatgtgaagatccgtgcaggatgactagagtcctgttca

SEQ ID NO: 82350 - DNA, 715 bp, Homo sapiens
ccaagccatgggtatcagtcactgttgttgtgactaattagatatggtctctattttccaatttagttgaatacatgtatgggatagcctacctacagtgctgccctgcatrcattaaagcttgtcattatttcaggagaaataatcaaattattttctgttgacaataacacttggcctagttttaaccaagcagtttgatgtttcaacttgatatcaagtaacagttttaagaaaatgagaaatatggtaattacatttagtaggaatttatagaataacaaatacatagtaaattgctatttaaagaagtgcaaagaatatgggatttgtatttttatattatatttaatcatgtttcactaaaagtaatttccttttgcaaaacctaatcaagtgttttatcctttcttttttctttccttttttttttttttagtgaatcactgttttaggtgacatgacaatctctatgtctcaggataaaatccaataactaattcatatacagttgtccactcacgtattttaaacgtggtgataaatcctggaggttctgctacactggatttttctgaaaatcatgtaaaaagatcaaattatttaacaactgatattcaagagaataaatgtgtaaagatatgtcttcatctacaatattctttaagttaccccacttctataaatattcccaaattactttgttttgtttttt

SEQ ID NO: 82351 - DNA, 1425 bp, Homo sapiens
taaccttctttcttccctgacaccgcacatcctgacttctcccctttatcctaatccaggactactccccactccttcctagttacctcccctaccctggggtcctagttggcaaggatctgccaagtgtctgttcttgaggaggtgtgccaacactttaaaaagaacctaatgaaaaacaggctgggggtgggagggaaagggttgattaatcatcagtttcctccaaatagccaggaatgagaggggctggagcttgttgccgcttgtgtagccctgagcactcaaacgttgccttaaaaggagaaggagcccagagtcctcccagggctgggatttctgttgagctgagctcctcggagccggcacatagcagagctgcttccttcgtgctaatctgaaagggaggctaggaaaacttcttcttgcttccagaattgatggtacatcccggtgacctccagaggttatttttgcctgtgtttctgtcgctagaccttactcaactgtctatcccttatagcaggaggaatttaggttagatataacaaagaacttccatgcagtaaaggtccacaggcctcttgatgagaaaactaggtagcaacagttattttttccctttgcgaaaagcattagggttaggggaagccccgcaggggtggtttgggagtccctggttggaggcaggggaatggaaaggatgacctctgaaagccggtactgacctgtgacacattgaggtacctagtgattgggctcagagtaagaaacggctccttgcccccatctcctccaggccttatggctacatgatgttgctctgtgtctgccacgtgcgttaggatccaagtttaatgccyttgataggttcagatgggcagagcacagcattttctcccttaccttggcccttctgatgctgctttctttagaagtcttatctgattaaacagaggagagaacatttcaccacctccattggcaaaagatgagaggaaaaggattatttgtctatccagaaagtttaaaatgagaacttgctgagagcaagggccagagcctctgtgtgctgcattcggcaaccacagcccactgataccttgccagcccacaccgtcccccactgaggtcaccttcttccttcctgtgacccatcacctgaggaggaggcatctccctctctgcagagtcatttggacccatgtagctgcaagggaggaagtctgcagacagaccctggggagaatggctccagcaggaggttggaagatgagtctgcctgtgcttgcagaggtcactttccaggcactcgcctaggagagggcagagccaaggagggcagggctgactagcattgactgcaccctcacaggtgataccactgccgtgaattcagaagtatttgttcctttcccaaagcaa

SEQ ID NO: 82352 - DNA, 704 bp, Homo sapiens
acctgatgtgcctatcttttccatttttctttatttttctttttctctcagctttagaagattgagttaatcatagccttcagctatcaaaagcaaatgtcatcaagtattacatgagttagcaaatggtcagggaaagagaaaccaatctggatatttcttacaagagatatgatacagagacttgattccaaaggtgttggaaggacatcaaaagcttaaagaagaagggaactaatagaagcaacagaagctgcaaataaccctgtaataagcccagaagcctatgctgctcttgtgctgttggaaatgcatgttggttttgatcatcatgtccattcttctctcccaaaaaaacaaccactacaatgtggctgatctacattcttgagtatatggrtacccttttaaaatatgcagggttgagttgttaatttgcatatattaaaattgcattttaggtatgttctttcttcatatttttcagcattcatttttataacttcactacttgtttgatgtacatctaattcatttctaactaattcataggtttccatgttgtataactgtatattttatttatctacctctttagtcatgtataactaggtcacttccaatgtcctgctggctcaaaaaatactatgataaatattttcatatatacttccactgggatgagtatcaagccaagggatccc

SEQ ID NO: 82353 - DNA, 968 bp, Homo sapiens
tttctctcttcttgaagaatattgtcacaggacggcaatcttggaggagcaaagacacagcaagaaatgacagggttatgaagaaaattgaggatggtagtcaagatgatagaagaaaaaaaactaaaaaaaataggatcaattattcacagttcatgggaagtttccatttgaattcactaataatggagcaggatacaagtaggtctccatggaataagcaaagagatagtgaacaaaatctatgtgggaatgctagagaggcaatctgatggaagtatatagtgcagtttaaactgtgtggaaaattctccttttgggccacctcagtgagaagaaaaaggaattattagtaaaattgcgtttattgagccaagaagaagccactatgwtaatgtttctagaatccatttatattatagtataaacatttgatattaccaataaagaacttcttatttattaactgctcaaaaaataactgcaactattgttattgtgtgtttatcttatttatgtaataaggtacaattttcctttgaaatattgtattttgaaattaaataactgaatttcctttgtaattaagttattaagagcagcttacgtttataaagacagtgttcactaaaactctgtgtgaaaacaaggagagaaatcataaatcttactgcaagcttggtagataaagctgtaactatgatctaaaagctaaaatattttgttttagaagtgggttatcatagcatgaaataatattaagcatttagggaatgctgataaaaatacataaaaatgttaaatatagattattttgagttctggggaaaatattggtttcataaattcttttctgcttttgtgactttcctacatattttttcaatgaacatttgctatctataaaattggacaaatctatttgttaaagatcagatggaaggtattactataagcaagggttttta

SEQ ID NO: 82354 - DNA, 968 bp, Homo sapiens
tttctctcttcttgaagaatattgtcacaggacggcaatcttggaggagcaaagacacagcaagaaatgacagggttatgaagaaaattgaggatggtagtcaagatgatagaagaaaaaaaactaaaaaaaataggatcaattattcacagttcatgggaagtttccatttgaattcactaataatggagcaggatacaagtaggtctccatggaataagcaaagagatagtgaacaaaatctatgtgggaatgctagagaggcaatctgatggaagtatatagtgcagtttaaactgtgtggaaaattctccttttgggccacctcagtgagaagaaaaaggaattattagtaaaattgcgtttattgagccaagaagaagccactatgataatgtttctagaatccatttatattatagtataaacatttgatattaccaataaagaacttcttatttattaactgctcaaaaaataactgcaactattgttattgtgtgtttatcttatttatgtaataaggtacaattttcctttgaaatattgtattttgaaattaaataactgaatttcctttgtaattaagttattaagagcagcttacgtttataaagacagtgttcactaaaactctgtgtgaaaacaaggagagaaatcataaatcttamtgcaagcttggtagataaagctgtaactatgatctaaaagctaaaatattttgttttagaagtgggttatcatagcatgaaataatattaagcatttagggaatgctgataaaaatacataaaaatgttaaatatagattattttgagttctggggaaaatattggtttcataaattcttttctgcttttgtgactttcctacatattttttcaatgaacatttgctatctataaaattggacaaatctatttgttaaagatcagatggaaggtattactataagcaagggttttta

SEQ ID NO: 82355 - DNA, 552 bp, Homo sapiens
atcctgcagccctagagggatgagctgcgagatgggttctgtatttctaaattcattcccaattttttctgtggctatatggaggccagaattcctctccatccacaccaatagacacaatatttggccatgatgagagaaagaaataaacttttgttgggtcaagtagcaaaaatgttgatttactttttcatatgtgatgcttacctttatatgtcaacttcactaggctatagtayccagttatttaaccaaacactaattcagatgttgctgtgacagaattttggagatatggttaacatctacaattggttgaccttaagtaagagaagttcaccctcaatagtttgtgagggcctcatcctacaattagctaaaggcctgaagagcaaaactgaagtttttctggaaaaagaaattctgcctcaaggatacagtaccaactcctgcctgaatttccagtcagctggcctgccctacagatctcagactaaatagaccccataatcatgtaagccaactccctaaaataaatctcttcatatagga

SEQ ID NO: 82356 - DNA, 552 bp, Homo sapiens
atcctgcagccctagagggatgagctgcgagatgggttctgtatttctaaattcattcccaattttttctgtggctatatggaggccagaattcctctccatccacaccaatagacacaatatttggccatgatgagagaaagaaataaacttttgttgggtcaagtagcaaaaatgttgatttactttttcatatgtgatgcttacctttatatgtcaacttcactaggctatagtatccagttatttaaccaaacactaattcagatgttgctgtgacagaattttggagatatggttaacatctacaattggttgacyttaagtaagagaagttcaccctcaatagtttgtgagggcctcatcctacaattagctaaaggcctgaagagcaaaactgaagtttttctggaaaaagaaattctgcctcaaggatacagtaccaactcctgcctgaatttccagtcagctggcctgccctacagatctcagactaaatagaccccataatcatgtaagccaactccctaaaataaatctcttcatatagga

SEQ ID NO: 82357 - DNA, 1328 bp, Homo sapiens
taaaattaataatagtacattttagacatttgttacacttgagttaatataattatgtagtctttataacaaatgctacccaccactcttctccaactcctatcactcgataaaaaaattaactgatgatttgaaaaaaatgatacacgcagacgcacatacacacacacacacacagacagagggtgaagtttaatttttaagttacaaactcatgcgtggtgttcattctttgtgttgaaaatataatcaattttgctagttctgattcagatgaattagttcttcataagctttgatggggatatcgcttagtagattaatgtaacttcagcccattacacataatggtggtcaaattaattcactaaaactttgaccacattctagatagtaaagcaagaaaaaattaatcagcttggggctgtgcatcatattacatgtagaagtaatcatataagtgtaaattatgcacattatttctatgccatttcaaaatagtagaaaatataatgtgcagtttcaccagtgtaaattatgtaattattggagtgtttcattatataccaattctattataaaataatcaaatggttataacaaattgcgcaatcatgttccttatcactgagggaaatgtactttgatacattcattaatgagagcactataatttcaactacaagaaagaaaagtgttacaaaggtatttggtaaattaggttagcaacatgagtacagttaatttgataaattttagtctgttaaatgtgttagttgagaagatgagatgaatccaaagatgcaatcataaatttgttaaattatgtttagaacatatatttatttatgactttgattcaagaccattgtattcacagtttccactatttctgattcaccaactttggatgtatcccactgaatatgacagaacagtggaaagcattgcagaataaagcaaaaggccctctaatttcagacagatgctcccctcagtctgtttaaaactttgagcaattcacgtaatcaaatatctttcttaaagtataagtggaaatagaagaataaacatcaaaatttgaataaaytaaatggcagacaacctatgaaaaatataatttttctagagctcttgacaaatatctatcagagggtaagaatgctttaatgttgttaaaattaaaaagaataccaagctttggtttccacattgtctatcgtttactcagtatcaagctgtattttaaacatgtgttatatttatgtaacacttgtgtttcattacaatcttctcagtcatctattcacccatccatgtattaacta

SEQ ID NO: 82358 - DNA, 1117 bp, Homo sapiens
tgcattgtttctttctttaaattagctattgcgtagatrtgttcaatgtggtcaccatgaaataatgtagctctcttgaaatttctgctttggaagacatggtggttccgatttggggaaatatcctctctcccctggaagaagggggggcatgtactgacgtaaatgccaagaaaaaaacctggcaattaattaagaagttcaagctaaatctcattttattctttgattctttggcattaaaatgtcaaaatccctaaaaataattttatctaaataatttgtttttgatttgataattgtaacttttaaagaaaccgacaacagactggaagtaactagaaagtaactatgtaatccaattcatcagtccagacatgtaatcttaaaaaccaggttatgcccttccaatgagcttgaaatttctgcttgtggcaaaagcaataaacagtttcttacgaataaaattgtagaaaaaagacacaggtagaggtctgtgaaggtggaaggtcaatgttggtacttcaagtacttactgaaaagcatgtgttgcctgaaactgtttacttgagtcagaacgtttattaactacattcttttcttctggaagatgggattctactataaattatttggataggccacaatctccacattaatttaccaaggctttcatcctcctacactgaagtgtatttcttaacacagctcaaaagacatcaagtacctcatccaacctattcaccacctctaaatgggatttgacattacgaggtcagcattgctttccctcatagatgactaacaaatttacggagacgtaagttcactgttctcatatggatcactgcgcaacagaccactgtgttttgatggtaacatttaggtttcagttattaaatgaaagcggaaactcaggctgcgacaaattgcttggcacctaaataatgatccagagagagagttagaaggaaggtcaacgtgtcttcaggtttcaagaggggaacttggtcaataataatggaattacatcattttgtggaatttcgtgaaagtcaaatattagaataaattaaaatataatttagtcttaacatctcattaatgtacataaaat

SEQ ID NO: 82359 - DNA, 1117 bp, Homo sapiens
tgcattgtttctttctttaaattagctattgcgtagatgtgttcaatgtggtcaccatgaaataatgtwgctctcttgaaatttctgctttggaagacatggtggttccgatttggggaaatatcctctctcccctggaagaagggggggcatgtactgacgtaaatgccaagaaaaaaacctggcaattaattaagaagttcaagctaaatctcattttattctttgattctttggcattaaaatgtcaaaatccctaaaaataattttatctaaataatttgtttttgatttgataattgtaacttttaaagaaaccgacaacagactggaagtaactagaaagtaactatgtaatccaattcatcagtccagacatgtaatcttaaaaaccaggttatgcccttccaatgagcttgaaatttctgcttgtggcaaaagcaataaacagtttcttacgaataaaattgtagaaaaaagacacaggtagaggtctgtgaaggtggaaggtcaatgttggtacttcaagtacttactgaaaagcatgtgttgcctgaaactgtttacttgagtcagaacgtttattaactacattcttttcttctggaagatgggattctactataaattatttggataggccacaatctccacattaatttaccaaggctttcatcctcctacactgaagtgtatttcttaacacagctcaaaagacatcaagtacctcatccaacctattcaccacctctaaatgggatttgacattacgaggtcagcattgctttccctcatagatgactaacaaatttacggagacgtaagttcactgttctcatatggatcactgcgcaacagaccactgtgttttgatggtaacatttaggtttcagttattaaatgaaagcggaaactcaggctgcgacaaattgcttggcacctaaataatgatccagagagagagttagaaggaaggtcaacgtgtcttcaggtttcaagaggggaacttggtcaataataatggaattacatcattttgtggaatttcgtgaaagtcaaatattagaataaattaaaatataatttagtcttaacatctcattaatgtacataaaat

SEQ ID NO: 82360 - DNA, 1133 bp, Homo sapiens
aaataagaatcccccaaattgaaaataacatgcaattcaacagacataagaaagcactaaattgctctagaagcatctgctgacctttggtctgaggtggtctggaactttggtttaactgtctgtgcactatcaacagggcaaagtctagacaggggattggatcaaaaagatctttctaaagttggaactctgggaaggctttaccttcaactgagtatgtctcaaaaaatcctaaaatacagaaggagatgtttgggacactttcttgaaaaaatataaatatgtctcccgggatttcttaactacattctgcttccaaacttgcttgataccagaatgtatgaagtagtgctgaaataacaagatgaacattgagctggaagtggtcctagtcaggcccttgctatacttacctgagagaaacaacagaaacagtctcaaaaaaaaaaaaaaaaaaaaaaaacccccccaaaactttaagtcaagccttcaaataatctccaagattcatttttaaaaatagaatattaacaaaaatttaagttgacaagaaaatacatatcctgagtcaaagtttctgacagaaaagagattatcagaatgatctaggtacatttgaataaraagcaaatctataaacacaaaggtcacctagaagtaaaaaacatattaactaaaattaaaataatacagactgattttacgactatttagagaaaactgaaaacacaattagtaagctgaaaaaagtcaatgaaatttattccaaattgaaaacacagatttaaacatatgaaaaatacagtaggaataggccgggcgcagtggctcatgcctgtaatcccagcactttgggaggcccaggcgggcggatcacaaggtcaagagttcgagaccagcctggccaacatggtgaaactgtctctactaaaaaaatacaaaaattagccgggcgtggtggtgggggcctataatcccaactactcgggaggctgaggcaggaaaatctcttgaacccaggaggtggaggttgcagtgagccgagatcatgccactgtactccagcctgggcaacagagtgagactctcaataaaatataaaaaaaatatatagtagaaataggaatcat

SEQ ID NO: 82361 - DNA, 710 bp, Homo sapiens
ctttggagatggagcaggggctatctaaggagtactaagctgggttgatcaaatgcagccatggaaagagaaatgagattattttttcttgataagagcctgtggaggcagcctggtggtaactcttcattgatgaaggttgaacaaatagggaartgaaactctgaagatgtacattgaagaggccaaagaaagcctgggcacatttgggatgattctgtgtagcctaaatgcctttgatcgtcccgagagagcatacttcccaaagacatgatagctcagtgaggaatccagagactattatatcacacttcaggagtactcaattaccatatccacatggccccagataaataatttcattcctgaggtttttttttttttttccagccatgtggttctggttttataaacatgagattaaaaactgactagagatgagccctcataaggaggtggctggtcagggcctgtggggtgcaggtatttgtctcccaggggtccttggatagagcagggatggtgggggtgggcatgtcacgactgcatgcatgtgggcaggccttctggtatgaaacacatactgaattaccagacttcagaagctattttttcttttctatatattttttcattcataacaagctttgcaaaactgccttccaaatggagggtcaaataattttgatcatgagatcaggaaaaaacaa

SEQ ID NO: 82362 - DNA, 614 bp, Homo sapiens
gtccggttattagtcagcatgtgaggctcagttgtgcacatttgaaaagctgcctatctgcctgcctgcttggtggggatcggattggaggcaagggagagtggcagcagggacataggtcgtggctattgatgccaagctactgggaaacattgataacttagaccagggtagtctcaaccctgccaagcatctaaaataacccatgttcaggttctaccccagaacaattgaatgcagtttctgaaaggagggcctgagcattcaccttttaaaataatatgccttaaggatgcgaatctctaggctggaggttgccagtggtgtggagaggcaggaagcrttgaggcatgcattagagacagtgtcagtcacccccattgctggacctcccaagaccaccctcaacagccttgagcttgtcctggtttaggagggtggtctcttcccataagtgaaaaacacacatgagattagtcattgtacaacttctggaagtgacaaaacatgtctcatgtccacacaactggattttttagttataacagccagaactggagtcttccattccagtgtattttccttcattttaagggtgaaataagacctggatc

SEQ ID NO: 82363 - DNA, 1342 bp, Homo sapiens
ttcaagtgattctcctgcctcagccacctgagtagctgggattacaggcatgcgccaccatgcccagctaatttttgtgtttttagtagagacagattccaccatgttggtcaggctgaactcctgacctcgtgatcctcccacctcggccccgcaaagtgctgggattacagacatgagccaccgtgcctggccgcgtgttacattttgtcaattattcataattaccttgaatatctgaagagaaagttagccaagtggatgttttctgactcttgcccacttttattaatggttctttaaagaagctcttactgacaaagccagtccccaaaaaaggggggtctttccctgattggtgctgtgaagccaatacacaaaaccaaaagtgagcaccaagcagtacaggctttattcgatggccatggaattgagaagtggaagcgtggttcacaaatcagctcctcagttcgagagagtggggaagtcacagatacagggcatcttcaatgaaggggttggggcattaaaagcaagggaaggaatagtcatgtcttttctggagatggtggggggaacttctcaaagtagaatgccacttttctttttgtccttttatggtttcttctcattgttgtcatggtgattatcaactgtcagggtgctggtggaagtgtccttttgcatgagagttagatgataatgaagttagaaactcttcagaggccaagtgagcggccaccctggatcccagcagtcggagccagtttagtcaggagggggagcttctgacctcaggcatcgtatttcccaaaggtaagcagagttaatgtaggatagaaattcacttggtcatgtaggcgatttccggggtaacacaaccttcatctaagccccagaattttatctcaatagagaaaatgccagccaggcgcggtggctcacgcctgtaatcctagcactttgggaggttgaggagggtggatcatctgaggtcgggagttygagaccagcctgaccaatatggagaaaccccatgtctactaaaaatacaaaattagctgggcttggtggtgcatgcctgtaatcctagctactcaggaggctgaggcaggagaattgcttgaaccctcgaggtggaggttgctgtgagctgagatcgcgccattgcactccagcctggtgctggaaaaaaaaatagaagaagaaaatgccaatttgtagcactatttattgttatttttaattattttgagttgtctgctatattttacattctgtaagatttcctgttcgctagcaaaatcctaagggctacccagccttacacttggttactata

SEQ ID NO: 82364 - DNA, 1342 bp, Homo sapiens
ttcaagtgattctcctgcctcagccacctgagtagctgggattacaggcatgcgccaccatgcccagctaatttttgtgtttttagtagagacagattccaccatgttggtcaggctgaactcctgacctcgtgatcctcccacctcggccccgcaaagtgctgggattacagacatgagccaccgtgcctggccgcgtgttacattttgtcaattattcataattaccttgaatatctgaagagaaagttagccaagtggatgttttctgactcttgcccacttttattaatggttctttaaagaagctcttactgacaaagccagtccccaaaaaaggggggtctttccctgattggtgctgtgaagccaatacacaaaaccaaaagtgagcaccaagcagtacaggctttattcgatggccatggaattgagaagtggaagcgtggttcacaaatcagctcctcagttcgagagagtggggaagtcacagatacagggcatcttcaatgaaggggttggggcattaaaagcaagggaaggaatagtcatgtcttttctggagatggtggggggaacttctcaaagtagaatgccacttttctttttgtccttttatggtttcttctcattgttgtcatggtgattatcaactgtcagggtgctggtggaagtgtccttttgcatgagagttagatgataatgaagttagaaactcttcagaggccaagtgagcggccaccctggatcccagcagtcggagccagtttagtcaggagggggagcttctgacctcaggcatcgtatttcccaaaggtaagcagagttaatgtaggatagaaattcacttggtcatgtaggcgatttccggggtaacacaaccttcatctaagccccagaattttatctcaatagagaaaatgccagccaggcgcggtggctcacgcctgtaatcctagcactttgggaggttgaggagggtggatcatctgaggtcgggagtttgagaccagcctgaccaatatggagaaaccccatgtctactaaaaatacaaaattagctgggcttggtggtgcatgcctgtaatcctagctactcaggaggctgaggcaggagaattgcttgaaccctcgaggtggaggttgctgtgagctgagrtcgcgccattgcactccagcctggtgctggaaaaaaaaatagaagaagaaaatgccaatttgtagcactatttattgttatttttaattattttgagttgtctgctatattttacattctgtaagatttcctgttcgctagcaaaatcctaagggctacccagccttacacttggttactata

SEQ ID NO: 82365 - DNA, 1099 bp, Homo sapiens
tagcccggcatggtggggcccatttgtaattccagctactcgggagggtgagggaccaaaatccctttaaccggggaggcaaagttttcaacgaacttaaatggccccagcctgggggacaaaacaaaatttgtttctaaaaaaaaaaaaaaaaaaaaaaaaaaaaaaaaaaaaaaaaggtggtggagggagcctcagggaacctaaaagtatcaggaatataatggagaaggagaagctcaggaacgtgaaagttttatgtgaacccctgggctccacacacgtgaaagttttatgtgaacccctgggctccacacagactgcatgcatgaatctgaccctaaacagcatagcartgactttgagaactgaacaagatagatactgcccaggccccagactgtcgactttgtagtacacatacagagctcaaccaaatggcacggcaagggctctgaaaactgaactgatattagagccacagaagacaggtcagaacttgtgactcaaactgaaccaggttaattgcctgcttaaacaaaaatgtcaacattttctgtaatatttaaacaaaacccagagtttcataacattattttaaaaatatccaggagataagccaaaattacttggcgcgcaatgaactaggaaaatcccaacttgcatgggaaaagatagatcaccacccctgggccaagttgatacagatacttgatttttcagtttttaatgcagccattatgaaaatgcttcaggaagtaagagtgaacattcctgaaatgaatagaaagatggaaagtctcattaagaaatagaatatatagagaacccaatggaaaatttagaaacgaaatttacaatgaaagatacaataaccaaagtaaaaagcttaccagatgggctcggtagcagattggaaatgatagaccttaaataagacacattagtacttatattacatatgactggtctaatcacagtaattaaaagacagacattaatgaataaatgaaacaagacccaactaaatgctgcttacaagaaacccacttataatgctataggtggtttaaaagcaaaaggatgcaggagaaaaaaa

SEQ ID NO: 82366 - DNA, 1099 bp, Homo sapiens
tagcccggcatggtggggcccatttgtaattccagctactcgggagggtgagggaccaaaatccctttaaccggggaggcaaagttttcaacgaacttaaatggccccagcctgggggacaaaacaaaatttgtttctaaaaaaaaaaaaaaaaaaaaaaaaaaaaaaaaaaaaaaaaggtggtggagggagcctcagggaacctaaaagtatcaggaatataatggagaaggagaagctcaggaacgtgaaagttttatgtgaacccctgggctccacacacgtgaaagttttatgtgaacccctgggctccacacagactgcatgcatgaatctgaccctaaacagcatagcagtgactttgagaactgaacaagatagatactgcccaggccccagactgtcgactttgtagtacacatacagagstcaaccaaatggcacggcaagggctctgaaaactgaactgatattagagccacagaagacaggtcagaacttgtgactcaaactgaaccaggttaattgcctgcttaaacaaaaatgtcaacattttctgtaatatttaaacaaaacccagagtttcataacattattttaaaaatatccaggagataagccaaaattacttggcgcgcaatgaactaggaaaatcccaacttgcatgggaaaagatagatcaccacccctgggccaagttgatacagatacttgatttttcagtttttaatgcagccattatgaaaatgcttcaggaagtaagagtgaacattcctgaaatgaatagaaagatggaaagtctcattaagaaatagaatatatagagaacccaatggaaaatttagaaacgaaatttacaatgaaagatacaataaccaaagtaaaaagcttaccagatgggctcggtagcagattggaaatgatagaccttaaataagacacattagtacttatattacatatgactggtctaatcacagtaattaaaagacagacattaatgaataaatgaaacaagacccaactaaatgctgcttacaagaaacccacttataatgctataggtggtttaaaagcaaaaggatgcaggagaaaaaaa

SEQ ID NO: 82367 - DNA, 1972 bp, Homo sapiens
taactgggcacggtggcttatgcctgtaatccaggcactttgggattccaaggctggtggatcacttgagcccaggagtttgaaaccagcctggatagcagaaggagaccctatctctacagaaaaaaaaaaaaaatagcttggtgtggtggcatgtgtctgtggtcccagctactcaggaggctgagatgggaggatcatttgagcctgggyggataaggctgcagtgagccatgatggcaccactgctccaacgtgggtgacagcgtgagaccgtgtctcaactaaaagaagatttgagtgtttaataatgtgatgttgctttttacttattttatttaattatgtgatgttgctttttacttatacttgctttttacttattttatgagaaacattttacaagttaggacatagctttggtaaatgactgtgtacgctgagttctaggaccatgacaggtatttgtgttttagttattattttggtatattaaataatgcttcagtgaacacctttgcttccttttttattttgtttaaacttagagctatttccttagaataggtttcccaaatcatgatgactgggaaagggcttgaagaggacttcgaggctcttagtataaacacatacgtgctcacccaccctggctggaagtgggctctgctacttaggcagtgatggagattttggtcacatcccttcacttctcagagcctcagttttttcttcttccaaatggaggtaaaaatacccactgcatatggcttttctattaataatacctataaagtccctctggagaacttggcacacagtgagcgctaaatacatggtaactttacaaaataattatagttctagatagccttattacaggtttctaccagtttgccctaccaccagcaatgcatgaagttatttaacctctctagtgtttgatacataatcatttctttttaaaatacctttgccaatttgagtgaaaacactaccttattattattttaatttgcatttgttttattatagtgagagtgaaaaattttgcatgctattataaacaagtttgttgtctctcatataaaatgccttttttctattggcatttaatattgtcttactagtttgtattaactatttaaagaaattattctttaacatatttgttgtcatagatccacttatctagtataattttatatcaaactttcatatgctgcattcaaatgctgcatacagatttctcattaggatgagaaatgtgattataattgtaatctctttgtaataaattctgtgaatttttttattgtatctataattttacttgcaaattatgacaatatgtatttccaacaattttgtatcttatcatttttcatatcttattaaatttgcctgaaattctatagcagtgttaaataatccatgggtttaatgagcatcatttaaaaattatttctgattagtaggaatatctctagtgttttaccattaaatagactatgaatctgttatttctcaaaatatactgcttattgtgtcaaggatatgtccaaataatttttaaattttttgagttattacatatttaggagcatattttttctcagaataatgtggttttctttttcttttttctctttttttttttctttgttcagacagagttttgctctatcacccagactggagtgcagtggtgcgatcttggctcactgccacctccgcctcctgggttcaagcaattttcctgcctcagcttcctgagtatctgggattacaggtgtgcaccaccacacccatctaatttttgtgtttttagtagagacaaggttttgccatgttggtcaggctggtcttgaactcctcacctcatgtgatccacctgccttggcctcccaaagtgttgggattacaggcatgagccactgtgcccagccactaatgtagttttcttatttga

SEQ ID NO: 82368 - DNA, 1104 bp, Homo sapiens
tgcatgccattctccccctttcttgcagctgcagacacagtgaccaggccttggttgtatgatgcctccagctcgtttctaagttaggaccttcrcttttgctcttccctttacctgtaggctctttctcccgctcctcatggggctgcctctttctcttcattcaggcctcagcctcagtgctacttctttagtgatgtctgcctgcgttacccagtctgaatgagttttttttaacttcctattctacacatttatatagaaatagaagtggcttagaatcccaggccttcctccctgcactgatcccatgtcctgggtctccattactcttcaggttaggtatgagaaaactgggaggcaacaagacaatatgtgtgacctagacttcatggaattaagtaaacatcaaacattagcaaagccacaatttgtggtcagagaaaaattgctagaaccagagggacattcaatagtggaagacctaaagtgaccacaggggcaagggccttgagtgatcagaatcctgttggcaactgacagcctggatgatattccttgtcctgcttgtcatcagggaggctcaagcccctccgccctgccgccacctctgcagggctgaacacaggcactttgtatagggaaacttcaaagacatttttcaaaaagcaaaaccagagtgcacttatatctcagaaaaaatgagctccacttgaatttccaacatttcacagatttatgcaatcacacttaggtaccaaaataacagagcaacagaaatagagttactgaactgtaatcaagacagaaagtctccatattttaaatactggacattgaacaacttctgtatttagcaacccagctcagacacaagaaaatgatcaatccaatgtgagtttgtttatactgatttgggaaaagccccttcatggactgttgaaggaagtaagataaagatggaaccagggcaatgtgaggagattccagagcagacatttatcctcagcctcttctgtcgaaaagatgcaaccattccttaagaaggagggatggggagtaaccactagacccataggggttaagcctacatatattttgtaa

SEQ ID NO: 82369 - DNA, 1104 bp, Homo sapiens
tgcatgccattctccccctttcttgcagctgcagacacagtgaccaggccttggttgtatgatgcctccagctcgtttctaagttaggaccttcgcttttgctcttccctttacctgtaggctctttctccygctcctcatggggctgcctctttctcttcattcaggcctcagcctcagtgctacttctttagtgatgtctgcctgcgttacccagtctgaatgagttttttttaacttcctattctacacatttatatagaaatagaagtggcttagaatcccaggccttcctccctgcactgatcccatgtcctgggtctccattactcttcaggttaggtatgagaaaactgggaggcaacaagacaatatgtgtgacctagacttcatggaattaagtaaacatcaaacattagcaaagccacaatttgtggtcagagaaaaattgctagaaccagagggacattcaatagtggaagacctaaagtgaccacaggggcaagggccttgagtgatcagaatcctgttggcaactgacagcctggatgatattccttgtcctgcttgtcatcagggaggctcaagcccctccgccctgccgccacctctgcagggctgaacacaggcactttgtatagggaaacttcaaagacatttttcaaaaagcaaaaccagagtgcacttatatctcagaaaaaatgagctccacttgaatttccaacatttcacagatttatgcaatcacacttaggtaccaaaataacagagcaacagaaatagagttactgaactgtaatcaagacagaaagtctccatattttaaatactggacattgaacaacttctgtatttagcaacccagctcagacacaagaaaatgatcaatccaatgtgagtttgtttatactgatttgggaaaagccccttcatggactgttgaaggaagtaagataaagatggaaccagggcaatgtgaggagattccagagcagacatttatcctcagcctcttctgtcgaaaagatgcaaccattccttaagaaggagggatggggagtaaccactagacccataggggttaagcctacatatattttgtaa

SEQ ID NO: 82370 - DNA, 578 bp, Homo sapiens
tcccgtctcagctttctgagtagctgggactacagacgggtgcaactgcaaccatgcacagtcattttctcaaaatttcccagtgtggttgtttgaaaaaatttcccatagaacataatccattttcaaatataggttactggtggggtaagttcaacatacttagaaaaatttaaaaattactttgaattgtataatattttaattatccatgcttctaytatctgccattgtatggagaaaaaaactttgttgtgttatctgttttttaaaaaaatcagtttgtgtctgtttgtgtgatatcacatatatacatatatgaatttcaatacatacgtcttggaatacaccttcacagatggtttgtatagatacaaaagaacaaattgtgagggggtagttttgttcggttgatgagaaaacattgtagtctagagtacatgtgagagatgaagttcaagtctggttgcttctgactccaaccttccactgtgtctcctgtaagctacacttcctccagatgtttcatctatatgctgcctgacatctggtgttttccagctatatttataatgccc

SEQ ID NO: 82371 - DNA, 825 bp, Homo sapiens
cctcagcataatacccagattcttagttaggaaggctaagctgctggaacaaaaaaacttcaaagtctgagcattttacagaatgcgaagtccttttttctttgccatgtgacagtccagagtgggagttccaggtctgtgactgttttactccatgcagtcacgtgagacacaggatgatcagcatgtggcttctaaagtcttcctgataatttccaccttagtcagcttgaatggggaaaagcatggaggagcttacatggaaggtattcacttctcttctgctccatttccgtctggaggaacttagtcacatagctgcaaaactacaaggaagactgatatacgtgggtagctggccagccatgtgcaggcatttctttactatgtggcagggagaaaaaggattttgaaacacagatggctgctccactaaaatctcagagaatgtttaccaaaataaacaatttttaaatcattatattgctctgctatagatgctgatatcaataccccaactcccagaatcattctgtttctttcattttgttggcaggatttcaatatccaaacaactggcttcagtgaaaggtaaggcacagatgacgcagatgtacatttttctcctctaccaagatggcatgccaagtgttaaaaaaaaataataggacatcaaagaatgccagagatgtaagggaacttttgaataaatcatcaaayattcatgatgttctttttaaagatgtgggaactgaagtcccggagtaggaattaacttacctaaacttacacagttcattaaagacagagctgagatgagaccat

SEQ ID NO: 82372 - DNA, 936 bp, Homo sapiens
gcatctgaaattgcctaggatggttctgattgctggtattcagatccaatgtaactccaaatatttacccatacacttcaagaatgtttgaatgataaggtctctgtgtgctttacaataggatagatttgataccactgaataataaatggcttttgctgagtcagtagcgacctagagcactctacttatagtcattgagtcactcatttattcactaaacatttgttgagcatctacttgatggaactgctgaggatacagtaatgaattggccaggcaattccttccttcagacatgtttgcagaagtctagcagaagagatagacattgaacaatttttaawtaattgcatacacagtataattagaattgaaataagggctataggatgctaaaagagattatcacctgatcggagttcaaaggtcagaaaagctttactgacattctataaaaagcaaaaaaaaaaaaattggtccatggatgccagggatatgggtgggaaatggggctgtccacaaatggcacaaggggagttttttattttattttattttattttattttattttattttgagacagagttttgctcttgttgcccaggctggagtgcaatggcacgatctcagcttactgcaacctcgatctcccaggttcaagtgattctcctgcctcagcctcctgagtagctgggattacaggcgtgtgccacgatgccaggctaattttttttgtatttttagtggagacggggtttcgccatgtcggccaggctggtctcgaactcctgacctcaggtgatccgcccacagcctcccaaagtgctgggattacaggcttgagccaccaagtctggccaaggggacttttaagggggctggaaatggtctccattttgattgtgaggtggtggctacaagattgcatgca

SEQ ID NO: 82373 - DNA, 936 bp, Homo sapiens
gcatctgaaattgcctaggatggttctgattgctggtattcagatccaatgtaactccaaatatttacccatacacttcaagaatgtttgaatgataaggtctctgtgtgctttacaataggatagatttgataccactgaataataaatggcttttgctgagtcagtagcgacctagagcactctacttatagtcattgagtcactcatttattcactaaacatttgttgagcatctacttgatggaactgctgaggatacagtaatgaattggccaggcaattccttccttcagacatgtttgcagaagtctagcagaagagatagacattgaacaatttttaaataattgcatacacagtataattagaattgaaataagggctataggatgctaaaagagattatcacctgatcggagttcaaaggtcagaaaagctttactgacattctataaaaagcaaaaaaaaaaaaattggtccatggatgccagggatatgggtgggaaatggggctgtccacaaatggcacaaggggagttttttattttattttattttattttattttattttattttgagacagagttttgctcttgttgcccagrctggagtgcaatggcacgatctcagcttactgcaacctcgatctcccaggttcaagtgattctcctgcctcagcctcctgagtagctgggattacaggcgtgtgccacgatgccaggctaattttttttgtatttttagtggagacggggtttcgccatgtcggccaggctggtctcgaactcctgacctcaggtgatccgcccacagcctcccaaagtgctgggattacaggcttgagccaccaagtctggccaaggggacttttaagggggctggaaatggtctccattttgattgtgaggtggtggctacaagattgcatgca

SEQ ID NO: 82374 - DNA, 648 bp, Homo sapiens
agtcatccggatgcccctttgcagcttcagccgagcctcggcccctctagggctgcattgcgccatgtcctctcctgctttgccccctggaggctgcagcctgcgggggtagggaggaggggaccaaggctggagaaaccgcgaggagcatgcacaggccatctgagcacccggagcagctgagcgccggctctcaaacaatccaccacatctgtgcgaccccgtggtcacgactcattgcagacccgcagccctgccccacatacagccccggggtccagctgctcggaaaagtctttcccaaccaacagctgcgcaaggcggcctccctcgggagcggcaacagcagagctggycccgggggatgtgtttgcgcgatctggaaagggttcattttcttgtgaaaacaacaatttgaaggaaaggttgtcagggacaacttggaatgacggagtgacagggttcttggagatttagattagaggcttgacattccctggggtgtttaaacctggctcctgggtcaagaaaaatttgagcatttcttttaactcaactctctcagtttatgggtcatgaaaccacagctcggagagtctagggttatttgacatttccagtccatatggaaagtaaattggatccact

SEQ ID NO: 82375 - DNA, 648 bp, Homo sapiens
agtcatccggatgcccctttgcagcttcagccgagcctcggcccctctagggctgcattgcgccatgtcctctcctgctttgccccctggaggctgcagcctgcgggggtagggaggaggggaccaaggctggagaaaccgcgaggagcatgcacaggccatctgagcacccggagcagctgagcgccggctctcaaacaatccaccacatctgtgcgaccccgtggtcacgactcattgcagacccgcagccctgccccacatacagccccggggtccagctgctcggaaaagtctttcccaaccaacagctgcgcaaggcggcctccctcgggagcggcaacagcagagctggtcccgggggatgtgtttgcgcgatctggaaagggttcattttcttgtgaaaacaacaatttgaaggaaaggttgtcagggacaacttggaatgacggagtgacagggttcttggagatttagattagaggcttgacattccctggggtgtttaaacctggctcctgggtcaagaaaaatttgagcatttcttttaactcaactctctcagtttatgggtcatgaaaccacagctcggagagtctagggttatttgacatttccagtccatatggaragtaaattggatccact

SEQ ID NO: 82376 - DNA, 1278 bp, Homo sapiens
ggctcaggccttccctggcttcccagagggaggcaggatgagatcagttccaagggtccttccagatctcgcagaaagtgccctcgctttattgcacctccattcaagctgaaagagatggccaaccaaattagcccaggattgaacagaaattgattttaatttaaagccctttgagtgctttctcctctcagatgaaagaagagtaggctgagatgtgtctcctgytgccccataactgtatctgagccaactttcagccccacactgtctgctccagatgaggcagcttttctcattgtctctgggtggtgactgagctttacctccaaactgcaaaggaatctcattcttttattccagtctggtgccatcgcacacactctgacacatattcccctgcactaagagatgaaggttgaactgagccttccagaacagtgcaacgcaaggggctgaaacaggggcctgggtccaccattccctaatccaggaggagcgacatctgagagtccccagctcagacacttccctccaggggagcggccatccctgtgtgtgatggacggcgcaatcccaaatgcactggctgggagattctggagtcgggagctcagtggcaccaccttcggaagttcaagttgaacacctaggagacttagagttggcaccgtgttggtgccatgtgcttagcgtatggcgctgtgtgcttaggagagagcctgggtcatgaggatccccatgccccaggggcccctctttggcccttagccccaaatcccattaaccaggcaggtgaggccagggacatgtctgtcccttctgaggcccaagcccacttggtgttcctcatggtgcggcatgcaggcagattgaccaagatggctattgaggctggagtcccaagcccctcacccacgcaggctggccaagaacctggaaggaacctcaggccccacaaaacgtgaaaccatggctgcccatccttcttcccctagtccttgaaatccatcccctccatccatccagcctgtgaatttacccccaggccaaggagcatagctgcagagcaagggtccctcctgcagggtcaggctctggaaggtgaccagaaaccccagaaaccccacccctgcctcccctccctagccatgaccgtaactcccactgcactgagaaaatcaagggccagaagcccctgcaccacctcccccactgcagtaaaagaggggttcgcccttgcccccatcgcccaccagcacccccttcaccctggtc

SEQ ID NO: 82377 - DNA, 1278 bp, Homo sapiens
ggctcaggccttccctggcttcccagagggaggcaggatgagatcagttccaagggtccttccagatctcgcagaaagtgccctcgctttattgcacctccattcaagctgaaagagatggccaaccaaattagcccaggattgaacagaaattgattttaatttaaagccctttgagtgctttctcctctcagatgaaagaagagtaggctgagatgtgtctcctgttgccccataactgtatctgagccaactttcagccccacactgtctgctccagatgaggcagcttttctcattgtctctgggtggtgactgagctttacctccaaactgcaaaggaatctcattcttttattccagtctggtgccatcgcacacactctgacacatattcccctgcactaagagatgaaggttgaactgagccttccagaacagtgcaacgcaaggggctgaaacaggggcctgggtccaccattccctaatccaggaggagcgacatcygagagtccccagctcagacacttccctccaggggagcggccatccctgtgtgtgatggacggcgcaatcccaaatgcactggctgggagattctggagtcgggagctcagtggcaccaccttcggaagttcaagttgaacacctaggagacttagagttggcaccgtgttggtgccatgtgcttagcgtatggcgctgtgtgcttaggagagagcctgggtcatgaggatccccatgccccaggggcccctctttggcccttagccccaaatcccattaaccaggcaggtgaggccagggacatgtctgtcccttctgaggcccaagcccacttggtgttcctcatggtgcggcatgcaggcagattgaccaagatggctattgaggctggagtcccaagcccctcacccacgcaggctggccaagaacctggaaggaacctcaggccccacaaaacgtgaaaccatggctgcccatccttcttcccctagtccttgaaatccatcccctccatccatccagcctgtgaatttacccccaggccaaggagcatagctgcagagcaagggtccctcctgcagggtcaggctctggaaggtgaccagaaaccccagaaaccccacccctgcctcccctccctagccatgaccgtaactcccactgcactgagaaaatcaagggccagaagcccctgcaccacctcccccactgcagtaaaagaggggttcgcccttgcccccatcgcccaccagcacccccttcaccctggtc

SEQ ID NO: 82378 - DNA, 616 bp, Homo sapiens
gagatcaaagctggcgaggtggacaggcccctttgaagctttacgggggttttcagagaggcaggtcctggcagccacagagtttttgctcccaaggaagaaagaggttggaaagtggagccccaacacccctgtggagggctgttacctgtagaaatagtttttctccatgggagcgcttgctggccatgcctggcatggctgcactcagggggcacgtgtgatttctgcctgtctaccattcattccctttcttagggaaaggctctctgtgtttgctctgaaaatgaccctctccccagtccagcagccctggccacagacacatgacccagtcgggccaatcagcaccgcccagctcgggagacagggactggatgggcacatgacccaggcgggccactctgattcctgagagtcttggaaggttattgaaaatagagagttgctctatgcctggagcttcttatggccatcatgtctacctggagagacagcgtgcccaagaatgaagctacccaaggggaagcagagcagagayagacaggcagatggagacagcctctttggagaccctccatgagctgctccaccctcggagcaacagtgagcagtg

SEQ ID NO: 82379 - DNA, 558 bp, Homo sapiens
tgcagcactggggagattgcatgcaatagtgcatgtaaaacacttggccccatgcctggtgcatactaacccagcaggaaatgttagctgttactatattgttactatgtttggtttttggaaaaagtgaaggcagggagggaccttgccaagtaacattgtccagaagctcatgagtgggacacaatgatgaaatcgtaaatctgctgattagtaccaggatagaaaccactccacttactggctccctggagccctgagctgggagggattctgaggctgggcctgagtttgacgagaaagattatcatgattgattagtgatgtctgccatgggcatgggtaaggggtgtgggtacgtgtgctgtggattttctgtccttgagctagagctttctgctgaggatagaacagtggctcttaaccaggagcatgcatcagaatcttctagtatggttwttataaatgcacatttcttggccttgctctgaatcagaattgccaggagtgaggcttggataactttcagaactctgcaggcaattctgcttgtgaaat

SEQ ID NO: 82380 - DNA, 1104 bp, Homo sapiens
ggaaagggaaactgaaagagtttaaataacttgcctggagttggacagctcccacacaggatttgaccagggatttgaatgtgtgccatgctgctctggagtctgctgcgaaccatggtgttctcttgcctttctagatagtttttcaagcagatgtccaccattctgccaccttctccgtgaccaccgcttgggtatcagtggaatagaaaggtgccaatgcccttcctttcaccttcagcaccacttccttcaaaatgttgacaaagtgaaaagctgccagtcatcagggtacattctggaaggttctgccacatgcacctttgatatcacatatctcttgctttgtcttcaggagaagaggtcagtgctggtcatcttgtggatcctggcctttctggcggggaacaccctctatgtgctttatacattcagctcccagcagctgtacaacaggtgagcatgggaatccaacccccacggtgggagagtggggcacttggctgggcttggggcacgtaccctttcacttgagaatgaggcacaagctctatgtcatgttgtaacttccaaattccaccctgctgttactacttatatatatctagaccagcactcaatagtagaatttcaaggcaagccacataggtaaattaacatcttctagttactgaaaactaaacagaaacaggtggaatcaattataataattgattttatttaacccagtatatcaaaaatatttgttttttgttttgtctgtttgttttgctttttttttgagacaggatctcactgcatcacccaggctggcagtggtgtgatcatggctcactgcagcctcgacctcccagggctcaggtgatcctcccacctcagcytcccaagtagctggtactacaagtgcatgccaccacacctggctaatttttacattttttgtagagatggggtttccctgtgttgcccaggctgggctcggacctctgagctcaggcaatccacctgccttggcctcccaaagtgctgggattgattacaggtgtgagtcgccgcacctggccccgaaagattgtcatttcaacatacgatcgatataaaaat

SEQ ID NO: 82381 - DNA, 2953 bp, Homo sapiens
  misc_feature (1)...(2953): n = A,T,C or G
annnnnnnnnnnnnnnnnnnnnnnnnnnnnnnnnnnnnnnnnnnnnnnnnnnnnnnnnnnnnnnnnnnnnnnnnnnnnnnnnnnnnnnnnnnnnnnnnnnncaaattagtagatgcagatctaactgcatctcttttttcctaatatcatatgcatgggaatcatacacatattgggtgttctttcagatttttttcgttttcccttactttctcttctgtcatcttatctctcatcatgcttggtaacccacgtgaattacttggtgcatatctttttatgttttcctctatccccaggtaaccatatgtgaacatataaacataaggggttgagaatatttattaacttttattaaatggtatattaaacacacttttctgtatcttagttttttcattaaacaaaacttcgtagaagcatctccaactcaactggccatagctcacattcattcttttatggctacatactgttccrtggtatggacctcttattatttattcaactgtcaccttttgttttcttttttgccattaggaatagtggtataataaacgtatttgtacattctttttgtactggtatttttactttaaaaagtgttacagtgggatctcattaaaatgtacctttagcaatagctattgccagattgcttctaaaatttttttaacagttgccattagcaatttgtgagaatgcccctttcttgacatctctgttagcaataagtgctaatctttatgctttttgcatctggatggaaatgttgagtttgagcagctttctatacacttggtctttttgttcttgactttgctgggaatttcctattcattttttttttttttgcacatttttctactgagttgcttttcaatcaactaagagctctaggctgggcgcagtgtctcatgcctgtaatccctgcactttgggaggccgaggtgggtggatcgcctgaggtcagtagtttgagaccagcccggccaacatggtaaaaccccatctctactaaaaatacaaaaattagctgggcatggtggtgtgcacctgtaatcccagctacttgggagactgagaatggagaatctcttgaaatctggaggtggaggttgcagtgagccgagaccaggccattgctctccagcctgggcaacaagagtgaaactctgtctcaaaagctctattgatatcagcattttatttaaaaatgtttattgcaaatatttttaggccttttatttgtctttcaactttgcttgtgatatcttttgcttttgcaaaattttaaaatttccatatagccaaatatgtatctttagtattatgtttatatgttttgtgggataagctctccatgcattcctaggttgtacatatagtcccctccctagattttcttcttaagagcctattggcttatttttgacatctagcctttccttttatgtattttagtaaaattactttgtgtaatttttacatatggggcaagtaagaggaccaaattaattttgttccaaatagacagccaaaggtgtcagcaccatttatttgagtcccaaaaacatactgaagggggcgttaaggcttcccttgtcagatgttaaaacatactataagggctactataataaaatcaatgtgatagacaaatgtgtcaatggaacagaatggagactccggaaatagatctcagtataagtaaaattttaaaatatgacaatgcggtatttaaattctgttgttaaaagagtagtatatttaaaatatatctactttttaaaaatttcaggggaaaaaagaatttgcagagtgtgttcatttttatcaacaatgcagataaatattcatggcatttgcgaataaattccacagaaaaatgcagaatctttgctgaagaatttctcagtggcggctcattttggtgtatttcagtgactgtgacaatgacagtcaagtcatttgctgacctcacaccataagtgctgacaagtctgagggaatatcccagtgggtcacttcttaatttcaaggcactacagatgacacagatggtacaagattaattacctaaaaacaaaagaaaattgtgaccttccattagtttcttctctcattagtccatgcacacggggcatttcctaaccgaatgcagctgggcagaattagaagggagggtgtgttcctttattcaggaatgtattcatagtggcccatatggggagtgggtgtgggcagtgctaagagattctgaggaggaaggtggtggtgtgggagcatcattgaagtggagccgtgaagcagaggtaggattttaacaggtggaatggaaaaggtggccttccaagaacgtgtgtgacataagcacacacgcatgtgcaatagtttggtgaagtggatatgtgaggagagaggggaatgatcaggttaggagtgatcagccctacatgatcagaggtggggcctccagcatgggagacttacgtatagggctgagtttgttttggaaaggtcactttgaggggtggttggagtagagtccattcagaagtctcttcataaccatgaccttatttggcctgtgctctgttgactgcccccagacagttaccatttactgagcaattccagatgccaaggttcattaggcacttcccatgcaagaacactgtggagtcagcaatcgatcctggtcttacaggtaagaaaactgagtaacgagaccagttttcactgggttatgtttattggcagagctgctattcagagtctggtctgataggatccaaagactttgccctttctaacctatgacactgtcttttacccacatgttacatctgcgcccctgccacctgcccacagtaataccagcctgacattgcacgatttctgtgaagtttcgtgtaatgcagcttgcattatggttaatgcaccccatgca

SEQ ID NO: 82382 - DNA, 857 bp, Homo sapiens
aggcactgaagaaagaatagtaaagaagatattaaaaggggacttatagactattagtagaagagaatgttaagaatatacttaaagaaatctgtagcatcacctgtagtatttttccaataaatttgccttgaagaacagtgattttgtattttacctcttaatatacaggctacaagacaatctcaattcaaaagacagtgaaaattataataataatgccataaattataactgtaataataattttattttgtaagtaatatttatcgagcactcactatatactagactctatgccaagcacatttgtagattagtttatttaatttttataacaacacttttagataagtttattatttttctgtttttatagacgtgaaatttaaggcacaatcatgggatggcagtctgattcttaaccatggcttcatgcaatctgggagtgaaaacactgcacggattccctcagctgtagatggaatcagttgtaaatgggatctgtcctcaggcgattagagcagctagcccaagttttcttggttacaagggaaaggcttctggcgctcacctcgattttgtgatttttcatgtgtgtaaatgataagaatctactagattttctcctagagcacatttgttccattagtattatcaccttggcctgctttgtgtttgaaaaatcagtgacatcctgttgtaagctttcatcttgcttccctcatatgaaatcgtactcagagcagcgaggcatttgaaagcaatgarcttcagggaattgtctaggcatctgggaataacaaagccttcgtgaaatattctcactgcccgtggctatgtgagccccaaatgca

SEQ ID NO: 82383 - DNA, 1408 bp, Homo sapiens
aaatcctggttgatctgcaaacctttgaacacagaataaatgtttgttgtttttaagccactgagttttaaggtagttattacgtagcattattgtggaaaaagctgactaatacagaatgcaatatggattcttgtgagatactataacatcatgtttaagagtgtggctggtttttttttttttttcttttttgagatggagtttcgctcttttgcccaggctggagtgaagtggcaagatgtcagctcactgcaacctccacccaccaggttcaagcaattctcctgcctcagcctcccaagttgctggaattatagatgcctgctgccatgcccagctgctttttgtatttttagtagagacggggtttcgccatgttggccaggctggtcttgaactcctgacctgaggtgatccacccgcctcagcctcccaaagtgctaggattacaggcgtgagccactgcgcctgaccaagtgtgtggtttttcaacttgttagcttgaaagtagggtaaacattttaaaaagagagaagaaaaagagtgtggttttcaaagtgtagcctatctcttatttttttgttttgaatcaggcagcccctgaaccagaatagattcagagaggctcctccatatcttgttttgaatctcacttctgttacaatggagattattacggtaccaatctcatagcactgttgtgtgaaccaaatgagaccatgcatatcatagagctaagacagttcttggtacacagcgaggatccaatcaatgtttgtattaataacaataataataattgtcttttctataaagggaattgtactttcctgttaacttacaatataaagctgtatgtattttttcttgtaaaactggatataggagaattctgggaagatggcagagtagggagcaccaacaatctgtctctctgcttagacaacaattatactggcagaatctgtctgatgcaactattttggaactctggaatctattgactggaatctgttaaaggtttgtgactttcagaggaaggcttggagggtaattgtagttaatwtcaatcaatttcaactcttatcacagtagtagctactcatcaccctccacctcccttacacacagcttacaggaaccgtggtggggaaaaatcacctgtcctccaaatatcataaatctgttatctgataactggttgctgcttccaaccacagagctacaaagaggctggaagtcactgttgttgcacctccccacattgttgcaagccccttgtcctccaactgaggtggcttctataggatttaaggggctagcaccctctctcccctttcatttttctcttttaccctttttggaagccagacattaaagaatagggcattcaaaacaactgcat

SEQ ID NO: 82384 - DNA, 758 bp, Homo sapiens
taataagacatttctcttttgctgatgataaaggactatgggaggttatatttaaaagattaagatcaccattaatttgctgacagtggagataactacatcttggtgtatatccttttcatttgtggtttatgcaaatctatccattcattcattcagatatatttttggaggagctgttatgttctaggctgtctcttgtgtcaggaatacagtagtgaatgaaacaaagatctttgctctcatggagcttacattctaggtaaaggaaacagaaaataaagaagtaaaatattcagtttgtgaacaatgataagtcctatggaggaaaagaaatcaggaaaaggacgtgagatgagcaggatgatttgccattgaaataaggtagtaaaggaaggactcaatgagactaagacatttgagctaagacagaaaagacgtgaagaagtaagaagactgaacatcttacagaaagaagagtaagtgcaaaggtcctgaggtaggagtgtgaccagtgaattctggaaaaagmagaaggctacaagcagatataatggagagtacaaaggcaagactccaaaaggtatagcgagtgagactcttccttttctctgcatgagatgagaggccaatggagaatgttgagtaaagaactgacctgatctagtttacgttttaaacagtctattctggaatttgtgttgagaaaagctacagagggataaagaggatcagtaggagattattgcaatcatcct

SEQ ID NO: 82385 - DNA, 695 bp, Homo sapiens
tgcatgtatctttattatagaatgatttatattcctttgggtatatatccagcaatgggattgctgggtcaaatggcatttcagcctctaggtctttgaggaatcggcacactgtcttctgcaatggttgaactaatttgtactcccatcaacagtctaaaggtgttccttcttctccacaaccttgcaaccatctgttgggttttactttttttttttttttttttttgagatggagtctcggtctgtcgcccaggttggagtgcagtggcgcaatctcagctcactgcaagctccgcctcccgggttcaccccattctcctgcctcagccacctgagtagctgagactacaggcacccgccaccatgcccggctaattttttgtagttttaatagagacgggatttcaccgtgttagccaggatrgtcttgacctcctgaacttgtgatctgcccacctcagcctcccaaagtgctgggattacaggcatgagccaccgcgcccggccccgggttttgttttttagtaaaagccattctgactggcatgagatggtaacttattgcgattttgatttccatttctctaatgatcagtgattcaacataggaacatttacagggacacaaacattcagtctgtgataccagacttgatggatttcatattcctacttcatacatcctataatca

SEQ ID NO: 82386 - DNA, 767 bp, Homo sapiens
atcccgtggttcatggcaatttaatgtgagatcctatgttggaaaatgactctttaaaccttcagttaatgatactgagtgaagcagtgcaggcagggatggcgaccccayacccagaatatgtatcagaataaagacaaattactgctcacttcagggtggaaggtgtcccatggaattaatttagcactaatggtttgtctccttaagggatggtgccgtacataaggcttgctgcaggtctgtcatttttggcactgagagcatcaaggcagatctggtgaactggagcccatgctcttggcccatgtatctgtcacatccatctttaccactgtgactaccatgctcagggaccccttgtgcaagtcctggtgtgaccaaagagagctggatggagcaaaaacagtatctgctacactgaccttaccttcttttgtccagtttccaaatgggaagagccctagctttcggttttgttttcacttttcagattcagttgtcaacacatagccctatcttcgtgaccttttgtgttctcgagaatctcccgctaacttatattttttctttctttctttcttttttttttttttttgagacaaagtcttgtgtcatccaggctggcgtgcagcagcgcagtctctgctcactgcaacctctgcctcccggcttcaagcaatcatcctgccgcagcctcctgagtagctgggattataggcgcgtgccaccacttcctgctaatttttgtatttttagcagagacg

SEQ ID NO: 82387 - DNA, 767 bp, Homo sapiens
atcccgtggttcatggcaatttaatgtgagatcctatgttggaaaatgactctttaaaccttcagttaatgatactgagtgaagcagtgcaggcagggatggcgaccccatacccagaatatgtatcagaataaagacaaattactgctcacttcagggtggaaggtgtcccatggaattaatttagcactaatggtttgtctccttaagggatggtgccgtacmtaaggcttgctgcaggtctgtcatttttggcactgagagcatcaaggcagatctggtgaactggagcccatgctcttggcccatgtatctgtcacatccatctttaccactgtgactaccatgctcagggaccccttgtgcaagtcctggtgtgaccaaagagagctggatggagcaaaaacagtatctgctacactgaccttaccttcttttgtccagtttccaaatgggaagagccctagctttcggttttgttttcacttttcagattcagttgtcaacacatagccctatcttcgtgaccttttgtgttctcgagaatctcccgctaacttatattttttctttctttctttcttttttttttttttttgagacaaagtcttgtgtcatccaggctggcgtgcagcagcgcagtctctgctcactgcaacctctgcctcccggcttcaagcaatcatcctgccgcagcctcctgagtagctgggattataggcgcgtgccaccacttcctgctaatttttgtatttttagcagagacg

SEQ ID NO: 82388 - DNA, 767 bp, Homo sapiens
atcccgtggttcatggcaatttaatgtgagatcctatgttggaaaatgactctttaaaccttcagttaatgatactgagtgaagcagtgcaggcagggatggcgaccccatacccagaatatgtatcagaataaagacaaattactgctcacttcagggtggaaggtgtcccatggaattaatttagcactaatggtttgtctccttaagggatggtgccgtacatarggcttgctgcaggtctgtcatttttggcactgagagcatcaaggcagatctggtgaactggagcccatgctcttggcccatgtatctgtcacatccatctttaccactgtgactaccatgctcagggaccccttgtgcaagtcctggtgtgaccaaagagagctggatggagcaaaaacagtatctgctacactgaccttaccttcttttgtccagtttccaaatgggaagagccctagctttcggttttgttttcacttttcagattcagttgtcaacacatagccctatcttcgtgaccttttgtgttctcgagaatctcccgctaacttatattttttctttctttctttcttttttttttttttttgagacaaagtcttgtgtcatccaggctggcgtgcagcagcgcagtctctgctcactgcaacctctgcctcccggcttcaagcaatcatcctgccgcagcctcctgagtagctgggattataggcgcgtgccaccacttcctgctaatttttgtatttttagcagagacg

SEQ ID NO: 82389 - DNA, 767 bp, Homo sapiens
atcccgtggttcatggcaatttaatgtgagatcctatgttggaaaatgactctttaaaccttcagttaatgatactgagtgaagcagtgcaggcagggatggcgaccccatacccagaatatgtatcagaataaagacaaattactgctcacttcagggtggaaggtgtcccatggaattaatttagcactaatggtttgtctccttaagggatggtgccgtacataargcttgctgcaggtctgtcatttttggcactgagagcatcaaggcagatctggtgaactggagcccatgctcttggcccatgtatctgtcacatccatctttaccactgtgactaccatgctcagggaccccttgtgcaagtcctggtgtgaccaaagagagctggatggagcaaaaacagtatctgctacactgaccttaccttcttttgtccagtttccaaatgggaagagccctagctttcggttttgttttcacttttcagattcagttgtcaacacatagccctatcttcgtgaccttttgtgttctcgagaatctcccgctaacttatattttttctttctttctttcttttttttttttttttgagacaaagtcttgtgtcatccaggctggcgtgcagcagcgcagtctctgctcactgcaacctctgcctcccggcttcaagcaatcatcctgccgcagcctcctgagtagctgggattataggcgcgtgccaccacttcctgctaatttttgtatttttagcagagacg

SEQ ID NO: 82390 - DNA, 767 bp, Homo sapiens
atcccgtggttcatggcaatttaatgtgagatcctatgttggaaaatgactctttaaaccttcagttaatgatactgagtgaagcagtgcaggcagggatggcgaccccatacccagaatatgtatcagaataaagacaaattactgctcacttcagggtggaaggtgtcccatggaattaatttagcactaatggtttgtctccttaagggatggtgccgtacataaggcttgctgcrggtctgtcatttttggcactgagagcatcaaggcagatctggtgaactggagcccatgctcttggcccatgtatctgtcacatccatctttaccactgtgactaccatgctcagggaccccttgtgcaagtcctggtgtgaccaaagagagctggatggagcaaaaacagtatctgctacactgaccttaccttcttttgtccagtttccaaatgggaagagccctagctttcggttttgttttcacttttcagattcagttgtcaacacatagccctatcttcgtgaccttttgtgttctcgagaatctcccgctaacttatattttttctttctttctttcttttttttttttttttgagacaaagtcttgtgtcatccaggctggcgtgcagcagcgcagtctctgctcactgcaacctctgcctcccggcttcaagcaatcatcctgccgcagcctcctgagtagctgggattataggcgcgtgccaccacttcctgctaatttttgtatttttagcagagacg

SEQ ID NO: 82391 - DNA, 767 bp, Homo sapiens
atcccgtggttcatggcaatttaatgtgagatcctatgttggaaaatgactctttaaaccttcagttaatgatactgagtgaagcagtgcaggcagggatggcgaccccatacccagaatatgtatcagaataaagacaaattactgctcacttcagggtggaaggtgtcccatggaattaatttagcactaatggtttgtctccttaagggatggtgccgtacataaggcttgctgcaggtctgtcatttttggcactgagagcatcaaggcagatctggtgaactggagcccatgctcttggcccatgtatctgtcacatccatctttaccactgtgactaccatgctcagggaccccttgtgcaagtcctggtgtgaccaaagagagctggatggagcaaaaacagtatctgctacactgaccttaccttcttttgtccagtttccaaatgggaagagccctagctttcggttttgttttcacttttcagattcagttgtcaacacatarccctatcttcgtgaccttttgtgttctcgagaatctcccgctaacttatattttttctttctttctttcttttttttttttttttgagacaaagtcttgtgtcatccaggctggcgtgcagcagcgcagtctctgctcactgcaacctctgcctcccggcttcaagcaatcatcctgccgcagcctcctgagtagctgggattataggcgcgtgccaccacttcctgctaatttttgtatttttagcagagacg

SEQ ID NO: 82392 - DNA, 1786 bp, Homo sapiens
acacacacgagactgggaagaaaaataggtttagcggactcacagttccatgtggctggggaggcctcacagtcctggtggaaggtgaaaggcacttcttacctggccaggcaagagagaatgagcttgtgcagggcaattcccgttttcaaaaccatcagatctcgtgagacttatgcactatcatgagaacagcaggggagaaaacggtccccgttattcaattacttcccaccaggttcctcccatgacacatgggaattgtgggagttacagttcaagatgagatttgggtggggacacagccaaaccatatcaccccaggagagtggagatcagtcatgagattccacagttgctgtggaagcagaatctrtagaacacagcagctcaacaatcaacagggctttgaagtggaaagggagtgggtggtgggggggtgtgtggctttagggtctctggcttaggaagctgagtctccgtagtgccattcatacagatggaatgagggaagaagcagtttcatgggaaagtagtaaatttgattgagtaacaagagcttgggggatccagaagagagctaggtttgcagttcaggagtccaggagagagtcagactgaaaacataagcccatggatagtcagtcattgaagccatgggaatgaagatcacctatgggaaacacagatagaagcgaatgttaccacaatgaagtgtggtctatacaattaattgctgcaaagaggtcaggtaagataaggactgaaaaatagccatcgggtttagtaacaacaatgcctttggtgacattggaagtaaaagtggcacagtaggccgggcgcggtggctcaagcctgtaatgtcagcactttgggaggctgaggcaggcgcatcacgtggtcaagagattgagaccatcctggccaacatggtgaaatcctgtctctactaaaaatacaaaaaaattagctgggcattgtggcgtgcctgtagtcccagccactcaggaggctgaggcaggaggattgcttggactctggaggtggaggttacaatgagccgagatcgcaccactgcactctagcctggcaacagagcgagactccgtctcaaaaaaaaaagtggcacagtaggtgcagaacactgtacagaatgtaacaagtagccacgaggcaatgaagacagtgcagacaaggctcataatgcatgattctgaaggaaaggggagaaataatgaggctgtctagtgaggaaagtggagtggttgaaaaaaaattctttttaaagacagatgtgtctggaacacatttaaatactgataaaaatagactagagcattgagagaaatcgaatgtggttattttaaatttgggactaaaagagctataaggtaatatgttagccagatataatttttttcactttagaaaaagtcagtttgattataataggtatgatttaccatacctgctatgtgccaagcactgtactgggcattttatgtctccagtgattttatgtttaaacaacattaggaggtaggcattgctatcattgctatcattatttttcagatgagaaaatgaagatgttatgtgtctttctcagcccatgagtagtagattttcagttcaaattccaacctttctccaaatccatattccgtacacagcaccacctctcagcatatatttgctatgtggtagcagaatccttggtgaatgagcatcgaaaggcatgttttgatcaggctgggaaatgaggagagaatgcgaagatctgaaa

SEQ ID NO: 82393 - DNA, 662 bp, Homo sapiens
ctaaaaacaggctggtcctacctcctaggctacgcccggaggaagactgttagggcgactgaggyatgtggtaggagctctccatgggtttgggaatcctctcttttttccacctgcaacctactttccagcagccgccactcaacattgacagaggacagactctaatactgtctcttctcatgtttgaagctccaattatcatctcttctccaggcaaaacttgtagttacttgaagcctatataagattgagtgtttattacgtgttttccttgtattctctctctccattctcacacatcttatggagaaggcaccatggcttccaggcccctctccatcctggtcagccttgtttaaccatgttacaatttgacaaaagtatcttaatacatggggcctgtcatctaaagttaatcaagtaaaaggttattaatctcacctgtttcccttcaatttcatcctttcacaatggtatgtctataaatctccctctgttcctgtctctttccctccctccctctctctctctttttctgcctcttttgcccaaagtgtaacgtattccacatgcacaatatggaagtgttcttttttcactaaacatatatcatggattttcctcttggttaatgtatacagatctattttcagaagctg

SEQ ID NO: 82394 - DNA, 662 bp, Homo sapiens
ctaaaaacaggctggtcctacctcctaggctacgcccggaggaagactgttagggcgactgaggtatgtggtaggagctctccatgggtttgggaatcctctcttttttccacctgcaacctactttccagcagccgccactcaacattgacagaggacagactctaatactgtctcttctcatgtttgaagctccaattatcatctcttctccaggcaaaacttgtagttacttgaagcctatataagattgagtgtttattacgtgttttccttgtattctctctctccattctcacacatcttatggagaaggcaccatggcttccaggcccctctccatcctggtcagccttgtttaaccatgttayaatttgacaaaagtatcttaatacatggggcctgtcatctaaagttaatcaagtaaaaggttattaatctcacctgtttcccttcaatttcatcctttcacaatggtatgtctataaatctccctctgttcctgtctctttccctccctccctctctctctctttttctgcctcttttgcccaaagtgtaacgtattccacatgcacaatatggaagtgttcttttttcactaaacatatatcatggattttcctcttggttaatgtatacagatctattttcagaagctg

SEQ ID NO: 82395 - DNA, 1667 bp, Homo sapiens
taatgatgcagcatttggaagtttgtttaactttaaaaagttaaatatacacttaccatatgagctagcaattctactctggaatattttacacaaaagaaatgaaaacaaaaagatttgtacacgaatatttacagcagtactatttataataaacaaaatgtagaaataatgtaattagccattaactggtatataagtaaacataacgtggtatatctcaccaataaaaaggaacaaagtacgaatatgccaaaaacatggatgaagctcagagacattatgctcaacggaagaggagggacaaaaagattacatattatattctctttatataaaataggaacataaaccacaaacacacaaagcagatttttggttgcctgaggctgggggtggcagtgtagatacattgtgaatagtcaagtaggaacctttgaggagatgggagtgttctaaagctgaattggggtgaaagtcgcgtaactggatacattttctaaaagtcatcgaaccgtacattgcaattggtgaatatgtagtatgatatgctgattatacttcactaaagcctgtctagaaataaagatgtacaccaaatagtccagggatccctatctctcaggttcaaaatactaataataacaataataataataatacctcatgagtagaaaatacagtcagcaaatrttttcccacatttttgagacttccagtgcatccctatagactgaatgttggtgcatctctagaaacagaaggcaggtaagatttgtgaccaggttccagctgtacatggaaaacaggcaaacagaaagtgtccagtgtccagtgaccgggagacaaaggagcgagcagcatggtggcctgaggtgagcagggccaggacttagtcctgacaaagtgggagtgttgaggagatatgataaaggaagcagaggatgaagggagagtgttgttgtctttcaaaatagaaaggggaccagagtcaagaaatgcgagtggcctctagaagctgaaataagcaaggaaatgcattctgtcctagagcttccagaaggaattcaaccatgccaacaccttgattttagcttgtgagactcatgttggatttctgatacccaaaactgtaggataatgaatgtgcgtcattttaagccacgaaatttgtgcagcctattttagcagcagtaagaaacgaatgctgcgtctacctgatctatctccaccaaaggtattacatctaaaatatgtttgatagtgaagaattatttcttcttgaaccacttattcatacaactatttgtttagaagttcagacttgattctgattgacaaaattgctttctcatacagagacaatatttaattatctatgtaattaaaatgttttgtagtcaaccatgaccagtacaagtgcatacattttttctatcttaatatacaacccaaatattcaccaattttatatttgtttgttttgttttatgttttttgttttttctttctttgagatggggtctcactctgtcatccaggctagagtgcagtggcatgatctcagctcactgcaacctctgcctcccgagttcaagccattctcttgcctgagcctcctgagtagctaggattacaggtgtgcaccaccacacctaggtagtttt

SEQ ID NO: 82396 - DNA, 743 bp, Homo sapiens
tgggtattggttcaatatgaactggaggaagactaccttctactgaatcaattactgcatgaacacaaaacaacattccagttgccagtttagactgatagaaataatttgatcaaaattaataaatagttcttgcagagaaccgtactttttttttttttttcaaatcttcttgcagatttaataccaagattctcaggtgcgctcagactgacattgccagtcatgttgtggtatactgcaactgcttttctctacaatttctacaccaccaaaaaactgtaaaactgatcatttatactgttacttatatattgagaatgctactttggtttcctgaagtaattaaattacacttaaaattatgtgcatgagaacaggttcattaaccccagggggttatcttttataaagaaaataattcaaacagcaagagatacaaaacatactatttcccccacaatagaatttcattgtgttattttttaccatttattaataagaacaattaattcattaactagaagttaaaaataaaataataccaatgaaaatttgccaatattgataaaaacatatcatgtttaattatttcccttatattagaaatgttactattatataatccaaatattggtatttttggtgaattctttacattaaatatctacaagtgagrttggaattgctgtattaaatagtttgttttattgattgcttttaatttacatttcaaattgtaa

SEQ ID NO: 82397 - DNA, 652 bp, Homo sapiens
ttattttgtttatgtaaagataaatttcactgagaaataattcagtttatgattagtttttgaaaagaataaccacttaaaattacaacttaatgataaatgtaacagtcaaacctacagtgctctgtgtgaaaaagccttttatctttctatttattcttataaaagacataaagaggaaaatggtaaaagcatgacaagaagcccattatttctacaaagttcaagttaaaaataaactaaaaatatagctcaacttaaaaaagcaacaactgaagtgtgagtatagaagtatatgattacttagctatggtttttactccatactatattaacagaaatttaaaaatattcctcagatatggttaggctaatgtattmtccattattttataagcattttattacatatacattcatatttgttgtgggaacttcatccagaagaaactgtaaaaatatattttaaagtgcttaaagaaagagaaaatagtatgggaatctacatctttgaaaaaagaaagttaaagaaagacaatttcaggtaactgaacattgaggagatgtgtccccaaatggactgcatacaagaaatactgaaagaagttattcagggagagggaaaattataccagataaaaacccagaactg

SEQ ID NO: 82398 - DNA, 652 bp, Homo sapiens
ttattttgtttatgtaaagataaatttcactgagaaataattcagtttatgattagtttttgaaaagaataaccacttaaaattacaacttaatgataaatgtaacagtcaaacctacagtgctctgtgtgaaaaagccttttatctttctatttattcttataaaagacataaagaggaaaatggtaaaagcatgacaagaagcccattatttctacaaagttcaagttaaaaataaactaaaaatatagctcaacttaaaaaagcaacaactgaagtgtgagtatagaagtatatgattacttagctatggtttttactccatactatattaacagaaatttaaaaatattcctcagatatggttaggctaatgtattatccattattttataagcattttattacatatacattcatatttgttgtgggaacttcatccagaagaaactgtaaaaatatattttaaagtgcttaaagaaagagaaaatagtatgggaatctacatctttgaaaraagaaagttaaagaaagacaatttcaggtaactgaacattgaggagatgtgtccccaaatggactgcatacaagaaatactgaaagaagttattcagggagagggaaaattataccagataaaaacccagaactg

SEQ ID NO: 82399 - DNA, 751 bp, Homo sapiens
agcaataaactaagtcaataatgtaaatgattgaaataatactgagagatttctggtttctggtctggaatgtaaggagcttgaaagttgtcactgcaacttcacaacaagaaaaagttgaaaacaaaacccactaaaaattgacgactcttcttagatccgtcaggtgaggatatgtgaggtcacaaagtgaaacaccgaccgaaatattgaagacgaagacaggtggatgcagagaatcacaggttcctggagcagaacaccaggaacgaaaactgtggggatcggtactgggggtaggaaaacctaaactgcagttgacaaattgccagaggctcatcatggacaattttgagagttaacttttgctgagagtagtggaaaaacaggtagatagagtacatattgtatacattcaatttacatttatcctacattttatttatgcaggaataggaaagactcttctgtggtgacagaaatgacagcrgtggctatgagaattaggtgaagtaattagaaaagcttatgcaggaactttctagggtgatgaaaataatgtaaaattttacaggagtgtaggtaacatgggtgaatacacttggcaaacttattagacaccatacttaggatctttacattgaaaagtatataagctgtacttcaataataaatttttaaaaattaaataaatacacgtctaactgtattactgcttactctttctataagtaaaaattttaattaatta

SEQ ID NO: 82400 - DNA, 548 bp, Homo sapiens
gtgctgggattacaggcrtgagccaccatgcccggccagttactgccttttaagagcaataatacacatattattatttattgattaccttgtaatgtgtcaggcaggtagtaaacaatttatctaataatattcatttaattttcctcacaaccccatgagatagagtaatatagtccccattttatagtccccattcagggtcactgagatctgcaaaaatagagcaagatcccacagctaataagtagcagaactgtcatttaatcagttaacccagatttggttggccccaaagtgaatgctcttaaccattgggttcagggtctcctaagcctggagtggacatgtggagcaaaagttagctatgaacccaattttacctattccaaaacctgtgcttcaaagagaacactctgcttttatatgctttataaatttaggttctacataacattgtttttttaaagcttcaaagcaaaaactgtaataattgttgtattaagctgctctcgcattgctgtaaagaagtacccaaggctgggtaa

SEQ ID NO: 82401 - DNA, 548 bp, Homo sapiens
gtgctgggattacaggcgtgagccaccatgcccggccagttactgccttttaagagcaataatacacatattattatttattgattaccttgtaatgtgtcaggcaggtagtaaacaatttatctaataatattcatttaattttcctcacaaccccatgagatagagtaatatagtccccattttatagtccccattcagggtcactgagatctgcaaaaatagagcaagatcccacagctaataartagcagaactgtcatttaatcagttaacccagatttggttggccccaaagtgaatgctcttaaccattgggttcagggtctcctaagcctggagtggacatgtggagcaaaagttagctatgaacccaattttacctattccaaaacctgtgcttcaaagagaacactctgcttttatatgctttataaatttaggttctacataacattgtttttttaaagcttcaaagcaaaaactgtaataattgttgtattaagctgctctcgcattgctgtaaagaagtacccaaggctgggtaa

SEQ ID NO: 82402 - DNA, 745 bp, Homo sapiens
ttggttctgttccctggagaatactgactaatacttccagtattcctggagctgtgggatgggtacagggaatcatcataatgcttaacattgatcaagtgattacaccccaggcaatgttctaagtggcttacttctattaacttatttaattaccataacagttctacgatgtaggcatttttattgtagccagttaaaaaagatgaattggagatacagagtgggtaagtaacttgcccaaggacacacagccaccaatgaaaggtctgagtttgcacccaggtgatctgactgtagaatttgagatgtaaccactatgctttactgactttctaaaaaggaaaagaagtggtggggaaatgagcaagacagggaggagctaacggatggatacaagagaggtcttcaacgcccagatcataaygaattttatgagtgtctgcaaagttcacataacccatttaagtgcttctttcaaacagagactctcaggatctatgtatgtgcacattttacccctctcccctggaccagttggttgaactggatccaacttgggccaatagtaatcttttaggaatttggaattaggactgagaagttctggattggtctggacaggactgttagaactaaagggagtatattcaggaatggtgggagccacgttctgcccacctgtggccttgagacacctggccttgacagaaaaagaactataagtgcaggggagagcagggaa

SEQ ID NO: 82403 - DNA, 745 bp, Homo sapiens
ttggttctgttccctggagaatactgactaatacttccagtattcctggagctgtgggatgggtacagggaatcatcataatgcttaacattgatcaagtgattacaccccaggcaatgttctaagtggcttacttctattaacttatttaattaccataacagttctacgatgtaggcatttttattgtagccagttaaaaaagatgaattggagatacagagtgggtaagtaacttgcccaaggacacacagccaccaatgaaaggtctgagtttgcacccaggtgatctgactgtagaatttgagatgtaaccactatgctttactgactttctaaaaaggaaaagaagtggtggggaaatgagcaagacagggaggagctaacggatggatacaagagaggtcttcaacgcccagatcataatgaattttatgagtgtctgcaaagttcacataacccrtttaagtgcttctttcaaacagagactctcaggatctatgtatgtgcacattttacccctctcccctggaccagttggttgaactggatccaacttgggccaatagtaatcttttaggaatttggaattaggactgagaagttctggattggtctggacaggactgttagaactaaagggagtatattcaggaatggtgggagccacgttctgcccacctgtggccttgagacacctggccttgacagaaaaagaactataagtgcaggggagagcagggaa

SEQ ID NO: 82404 - DNA, 527 bp, Homo sapiens
cattctcgctacataataactctcttgctacataataaacaaccacaaaatcttagtgacatacagcaataagtatttgttttggtcacatgtcagcaggtcaataggtggttggcttctttggctggggaatggctgggaaacgtgggtgggcaagctcagatctatgccttgaatctttctctgtgatcagagggccagtccaggcacgctctggtgatgatggcagaagagaaaaagagcaagccaaatcatgcaaaccctttccaaaccctgggggcacactgcacccactaatattccactgatgaaaacaggtcacagggaaaagctcaaagtcaaggcacaaggaaacatgttttgttcatgtaggtggagcargaatgaatatttctgaacaataatcaaatttaccacaacctctcaggtatagtttcttccagagtagacagaaaggagtctattccatgattaaagaggacaaggctcagcactggagcgctaaccagtttctggacattaaactt

SEQ ID NO: 82405 - DNA, 1364 bp, Homo sapiens
ttttttttttttttttttttgagtacagaatctcgctctgtctccaggctggattgtagtggcgcgatctcagctcacggcaacctctgactccctggttcaagcaattttcctgtctcagcctcctgagtagctgggattacaggcacacgccatcatgctcagcttatttttgtatttttagtagagacagggtttcaccatgttggccaggatggtcgcgatctcctgacctcatgatctgcccgcctcagcttcccaaagtgctcagattgcaggcgtgagccactgcgcctggcctaatttttgtatttttaatagagacgggtttcaccatgttggccaggctggtctcgaactcctgacctcaggtgatcctctcgcctcagtaccaaatatggttttcaagcagaggtatgataacctagaatagggagagctaggggtagaaaaactacaaggaagctgtttagagttaataggagagaaatgatgaggtacttatcaaggcaatggagaccagctgacacctaagtgctgaagaggcgctaaacttggctcttttcatgcatgatttcactgagtgctcaaaacaaccacttgagaaagttttatctcctgattttatagatggggaaacagacctggagaggttagataacttgctccagagccacacacttaacaagtagaagtgccggagggtttttaacccaggccagctgattccagaccctgagtatccatgatactaaacaactaggtcatgatggacaggaaggttccaaccagagatatttaggggtttaattgttaggctttcgttgtggctgggatgttgcttccttgaaatagcactgccatgattttcttcttcccctaatgaacctttctttctttcattggctcctcttaattacaagttggtttctgctctttcttttcaaaatacttactaacttttttggaggtggttttctctagtagcttcctctatcaatgattttgttgatttgacccaaatctcttatttctaatctcagtgtcttaatcacactcctgaagatcattttgacttgtctgtactaacagcacctgaaatctatatctaaaattaaactcgtattttacttcagtttctcttgatgctttctattaacagcaaaacgaaccagatttctgggctttagaagaatatttgactgtaatattccttcacttttcacaccctatcaggcaaccaaccagtccagtcaattttttagcattkccttcaactcatctcctccctttcataacatttgctgccactctgctattagctctcagtagttaatccctgaattactgcgtttgtttcctat

SEQ ID NO: 82406 - DNA, 716 bp, Homo sapiens
aagaatacaaagttcttttgtatagagccctggactgaagtctgattaaaagccagaaagaaagatagtcaattggaggaataacagaaaagttcccaatcttatgaggtttactttacttcctttaccccagagaaaagctttcacaccagagagaacctttttatttctcctctaagccacaagaaatattaggtagaaattcaacaagaaaacataagaacatagggctgttcaattatatcaatctaaaaggaaaaatcatctgttaccatcatacatcaggagctaaaaagacagattgagagagctggacaactttccrgttccatttaactggatctttagagtactatttcattatctggatgaaagtaggttgtccagtctgcatacacttactgaaatacgactttgcttcagccatccttctaaaatggtgcattctgcagtagcagagacttctgaattcccagatgcagtgattacgttttagtcctcttcttacttgcactctcattagctgtgctctccttgatttacatgataccatacatccatggcttttcatctcccttcctaagcacactgctgcctcttcccttggcaatatcttcttcattcagtcctctctacttactctctctgaaagacctcttccactaccatggttttcatttgcttacagtccagcgattcctaaagctgcatctcta

SEQ ID NO: 82407 - DNA, 717 bp, Homo sapiens
tttagttccagcttgaatccaaaggcctgggaacaagaagagctgatggggtaagttccagttccagggcagaagaccaatgtctcagctcaagtggcgaggcttgaagctctctcgttctcagcctttttgttctatttgggtcttcaattgatcagatgagacccaatctgctttactgaatctgccaattcaaatatatatcttatacagaaacaccttcacagacacacccagaataatgtttggccaaatatctgggcaccctgtcacccagtgaaattgacacacaaaactaacgatcacagaggtatctggcctgagccattggatgtatttgacagatgagtgatatacacaaggctgtgtcaagaaagatrctgaattagttacaaacaaaacaagatgaaaaaactcagaagttagcacaaatgcaatagtctatattcatataaaaacatgttatttattataaaataaaacctgcatttcagtgggcagaggcaggtgtgaattaaagtatttgacaagagttccattggaccacagtcctaataggggcaaagtacaatttgtgcattttgatcttttggcagctccattaggaagaagcccatcaatcagcaacaggaatgcgggaagtcagcagaaccgcatctcagctgagagatttgagggctcagcagtttataatagatgtaagaatcatgaagaggc

SEQ ID NO: 82408 - DNA, 1175 bp, Homo sapiens
agtgattgtctgtactggtttagcaggggaccttacattccatatagtcaaggtgccatctgaatgactgcaaataaattgttttccttcatgatgccaagcaacagagtggatagcctatagaaggatgaaaaataccatttaaaaaatctatttaaacagtaaactatttgtaaatgatctcatctattaattttcatttttaacttttctttatttcctaaggttaacatgtgaacttaacatttccataataatttggccctcttgtaatacaaatgagattttatttcttcatattaacactgttttaattctctgtacttactttactccttaaatcagcataaagaaggcatgatagtgacatctacggacaagttcagtgaaacaaaatgttttcttacattatttttagcataaacaatacctaaacataaattaccaaattattacaaccagtgtcccaatagaaaaactagttgcaatgacaagattagaataaaatgtgttaattgaccatgatcctaagagccaaaatgtagatttggaattaagatcaatacaaatgtttcaggttgagctataagacatgttcctcatctctcacagtaattactgaggcaatttttaatctcaggggacactgttctgataagaaatttattttgtacttctgggtcgcttaaaaactatctggaaaatatttttatatcaccaaagtatgatacccctcatttttttgctytaatattatttcaattttggtatgtaaaaaaaactttttaaatcactctcccatgcgtcctttgaattatttcttttcaactcaagttgatacaattttagttcttaatggtcaactgacttaaagccaccctactggaatgcaagaattgcagagtatagcacaaaaatcgtataactgaaactcaaaacttctgtcacatataaagccaacattttctatcatgtcatctatttatttgagttctttctatacttataaatttaagctaaatattataaaatatcttggtatgaaatcagatggatacagataatcagctatacttctaaatgacaatatttaatacaatgttttttattcaaagtacagatgctcctcaatttacgatgaagtcataccctgataaactcatcataagtcaaaa

SEQ ID NO: 82409 - DNA, 1092 bp, Homo sapiens
agcctggaatttaaagatctagctgcgtttttattaatatatagctatatttcctataatcatctatttaacaatgtattcctttctaactagactgtagtccttcctttaccatagagtgagttcttatgtctatactaaaatttgttttagtctatttagctgatacatatatatatatatatatatatatatatatataatcattagtgaatacccctgtttagatcagctataaaatgtattttaatatctagtatggcaatcttcaccactgtattatttgcaatataacattagttttttttctcatccatttattattatagaagaagaacattaggaatattttgtcttaaaaactctccttaaaataatgtatatctttatagtattcgtagtactttctgtaactgttcacattgtgcctaccagttttaggctagaagatgttgcaggtgtttcctgtgcattatatttcatcccttcaaaaaccagttcagatagataaaattatagccatttttaagtgaagaaactaaagttcaggcaaataagtaacatggtcaaggtcacaaaattagtaagtagcagaaataaaatttgaatccagatatacgtattttttatttcaacaatgttacagtcttctttgcatagtgtcacactgctcttttcaaccgggaaagtgaataattgctttacttatatatttggtaaggcacatttggaaaaaaggaagaacattccacctacaagaaaagagaaagaaagacagttgcaggaaggactgactggagaggaagtgtctggaaatggggtctgagttcaatgccacgaacaagcaaatgctaggcatgttgcgaacaagaagcaagcatattaggtcatccagctgtcaccatactttatttcctgctcagagttcaatggtccttgtgttttgctcccaaattctatttaagtatgctgggttttatgtgaaaatgccatgataaataaacataagaataaaaagaataagagytatcattttgtcagtcatatcatgtactaactcgtcatctgattacttaatctaattctgatttt

SEQ ID NO: 82410 - DNA, 1281 bp, Homo sapiens
ttgaatagcttcaatactaatccacttctaggtcttaaaggagcctcgtcaaattactgtctccacagctgcattttttttgttgttgttgttgggcattctggtcctcagggctccctcaggccaggggctgtagttagcagacaggctgtatccttacctggtttttcttaatttgctgtctgagtgctttctggaagaacatgagtttgcatttgcctgcaagttctggtagaagcaggaatgctgtgcagaaatttttagtgcatgtggcccatttgactataaggggctgaggtggatgaagttgcctgatcttccatcaagatgtctggggggaaacaggaagctgcacctctcagcaaatttaggcagatgtatgtctgctgtgctggaagctccagaaggtgtggcttgcttatctccaagacacagaggtgggtagtcccccaccatggcatctgagtacttcttagggaaacagaaggctttgccctctggctaagttcaaacagaagaaggagcgttgggctggaagcactagcaagcattgcccacctggctaccagtggtcagggtttatgggttcactggccctgccatcggggtgcttcctgggacaacagaaggctatattctccagctgagttcaggcagaagagggatccctgaggtggaagtctaacaggcattgcctgcctagctacaagcagcaggggtgggccggtcacccatcctgccgcccaggtacttcccaggaaaataggaggttgctctcctggctgagttcagacagaagtggaaccactaggtcagaagctctagaaagaattgcctkcccagctaccagtggcaagagtgggttggtccacctgcccagtggtgcaggtgcttcctggtacctttgtatttatgtgtgcttttatgatgatgaatatcgttcttttatttccatatgtagaagtcctttgagcatttattgtaggtcttgtctagtggcaacaaattccctttgcatttgctcgcctgggaaaggctttattgctccttcatttatgaagcttagcttgatgggatataaaatacttggctggatttttttaagagggttaaaattaggacctcaattccttctgtcttgtagggtgtctgctaagaagtctacttttagtctgatgagatttcccttataggtggtttaatgcatctctctagctgcttttaaggttttattttttttttcatgttgacatcagatagtctcatgactatatgccttgc

SEQ ID NO: 82411 - DNA, 1281 bp, Homo sapiens
ttgaatagcttcaatactaatccacttctaggtcttaaaggagcctcgtcaaattactgtctccacagctgcattttttttgttgttgttgttgggcattctggtcctcagggctccctcaggccaggggctgtagttagcagacaggctgtatccttacctggtttttcttaatttgctgtctgagtgctttctggaagaacatgagtttgcatttgcctgcaagttctggtagaagcaggaatgctgtgcagaaatttttagtgcatgtggcccatttgactataaggggctgaggtggatgaagttgcctgatcttccatcaagatgtctggggggaaacaggaagctgcacctctcagcaaatttaggcagatgtatgtctgctgtgctggaagctccagaaggtgtggcttgcttatctccaagacacagaggtgggtagtcccccaccatggcatctgagtacttcttagggaaacagaaggctttgccctctggctaagttcaaacagaagaaggagcgttgggctggaagcactagcaagcattgcccacctggctaccagtggtcagggtttatgggttcactggccctgccatcggggtgcttcctgggacaacagaaggctatattctccagctgagttcaggcagaagagggatccctgaggtggaagtctaacaggcattgcctgcctagctacaagcagcaggggtgggccggtcacccatcctgccgcccaggtacttcccaggaaaataggaggttgctctcctggctgagttcagacagaagtggaaccactaggtcagaagctctagaaagaattgcctgcccagctaccagtggcaagagtgggttggtccacctgcccagtggtgcaggtgcttcctggtacctttgtatttatgtgtgcttttatgatgatgaatatcgttcttttatttccatatgtagaagtcctttgagcatttattgtaggtcttgtctagtggcaacaaattccctttgcatttgctcgcctgggaaaggctttattgctccttcatttatgaagcttagcttgrtgggatataaaatacttggctggatttttttaagagggttaaaattaggacctcaattccttctgtcttgtagggtgtctgctaagaagtctacttttagtctgatgagatttcccttataggtggtttaatgcatctctctagctgcttttaaggttttattttttttttcatgttgacatcagatagtctcatgactatatgccttgc

SEQ ID NO: 82412 - DNA, 635 bp, Homo sapiens
tttttttttttttttttttttgagacagagtctcactctgtcacccaggctggagtgcagtggcaccatctcggctcactgcaaactctgcctcctgggttcacgccattctcctgcctcagcctcccgagtagctgggactacaggcgtctgccaccacatccggctaattttttatatttttagtagagatggggtttcaccgtgttagccaggatggtctccatctcctgacctcgtgatccgccygcctcggcctcccaaagtgctgggattacaggcatgagccaccacgtccggcctgtgcctttcttaaatgctgtttaatgtatttagcatatgagacaacttggtatcttttgcagtgctgagagtttgaaggtctctgaaagtttatcatacctttgctgtatgcctttttgtcagcatattttttatttgatggtgcaattcagtctccaatgaagtaggtgaagctttagagtaaaaagccagccaacccttggttaccctgatcatgagtggaagtgcatgccttgaccaggaaggtgggagcagtctgtgatgtggtgtgctatgtaaaaagaatcagggaggggattgcaccagtttcctttcctgggcaggcagaaaaa

SEQ ID NO: 82413 - DNA, 1294 bp, Homo sapiens
tgcataatagctgctgagatctttaaacaattcataatatatgttttacttctctatattaataagaataaattcaaaataccatacaaaaatttttaaaggcctacattgaaattccaagaaagccaacctgaattttggagtgaggataatgataatggacagtcatataaaactattcagtctataaaacacataaagcactttttacatgcaaaatattaaaatgytaattcttaaacaacttggaagcaaaatattatttgaacatatactaagtctctgtctaactactaagggcttcttagtacagagtgggagctcattgaagtctgattcttgtcacgcccgagcccaggacagaaggttcaggcagtagagaaagagggaaatcacaagctttttttttcttcttcttcttcttcttttatttttttcaatttctacttttattttagatacaggggatacatgtgcaggtttgctacgtgggtatattgcagccagatagtgagcatagtacccaatcggtagttttccaaaccactccccactcctttccctctagtaaactacagcttctattgttcccatgtttatatccatgtgtgctcaatgtttagctcccacttagaagtgagaacttgtggtatttgactttctcttcctgcattaatttgcttaggagtatagcctccagctccatccatgttgctgcaaaggacttgatttcattttttctttcatgtctgtgtagtattccatgatgtctatgtaacacattttttccctagttgttttttcatttggtttttttgttgttgttattggttttttttaacttttattttaatttcaggggtacatgtgcagatttgttatataggtaacttacatgtcacaggagtctggtgtacagattatttcatcacccaagtaataagcatagtaccaatagatagtttttcatcctcatcctcctctcgccctccaccctcaagtaggccccagtgtctgtttttcctttctttgtgtccatttgcactaagcgtttagctcccactgataagagagagcatggggcattcagttttctgttcctgccttagttcacttaggataatggcctccagctgcatccatgttgctgcaaaaaacataatctcattcttttcatggcagtgtagtgttctgtggtgtatacgtacattctttatctagtctaccattgatgggcatttagattgaatccatgtctttgttattgtgaatagtgcttcaatgaacatatgca

SEQ ID NO: 82414 - DNA, 681 bp, Homo sapiens
tagaaaccaggtctgctctttgcaggtatgaagttcttgcctctaaggtcctggttcctgtgcaatattcartctacctgcatatcaatagtcttagttatagtgactccatggatagcttttggtgtaaagtaccaacggtatacacattgccacttctaccgtattctgttggctaaagcaaagtaaaagccaagccagaattcaaggagcagtaaaacagactctatttcttggtgggaagagcccccacatcacattgcctagagtacagacacagaaagatgtgaagaattgggcccattttgtaatcaatctaccacattgggtgtgatggagaattctagctgtccatcaaaatccactctcccttcttccatagcaaaagaaatgcagccagccatgtagattacattgcacagcctcttttgcaactcattgtgacctaggtgactaagttctcatcacttttcactaatggaatgtgagtagaagtgacatgtgccacttaagatatctgagaatgtcttctgggaggctatattccatccttttgtcagctagaatcttgatgtagcaacaaatccagcatcattttatttatgcagctgatgacaatgtccctggagatagaggagtaacaacttacaagaaacttgggttcccaaatgaccaagagaa

SEQ ID NO: 82415 - DNA, 681 bp, Homo sapiens
tagaaaccaggtctgctctttgcaggtatgaagttcttgcctctaaggtcctggttcctgtgcaatattcagtctacctgcatatcaatagtcttagttatagtgactccatggatagcttttggtgtaaagtaccaacggtatacacattgccacttctaccgtattctgttggctaaagcaaagtaaaagccaagccagaattcaaggagcagtaaaacagactctatttcttggtgggaagagcccccacatcacattgcctagagtacagacacagaaagatgtgaagaattgggcccattttgtaatcaatctaccacattgggtgtgatggagaattctagctgtccatcaaaatccactctcccttcttccatagcaaaagaaatgcagccagccatgtagattacattgcacagcctcttttgcaactcattgtgacctaggtgactaagttctcatcacttttcactaatggaatgtgagyagaagtgacatgtgccacttaagatatctgagaatgtcttctgggaggctatattccatccttttgtcagctagaatcttgatgtagcaacaaatccagcatcattttatttatgcagctgatgacaatgtccctggagatagaggagtaacaacttacaagaaacttgggttcccaaatgaccaagagaa

SEQ ID NO: 82416 - DNA, 677 bp, Homo sapiens
ggaagtttttcctgacccctcagaccaggatagagccctctttctgccttctgatgggacctttcctagcactgcaacaattatacttaaataagtatttctttcaagttgaattgtagactcacaatcccctgaggacaggaaccatgtctcctttccttaccactacatgccggcacctgacatagtatagcaggcagccctcgaaaaatactgaatgagcttatgcctgtaatcccagcactttgggagccaaggcgggcagatcacgaggtcaggagatcgagaccatcctggccaacctggtgaaacctcgtctctactacaaaaaaattacagaaaattagccgggcgtagtggcaggcrcctgtaatcccagctactcaggaggctgaggcaggggaattgcttaaacccaggaggcggagattgcagtgagcccagattgtgcattgcactccagcccgggtgacagagtgagattccgtctcaaaaaaaaaaaaaaaaaaaaacaaacgaataaacatatagataaactaatgaaggggaagtgtcagagacagaaagaaaaagagagacaaacagacacacgaaaaggagaaacagagaacatcagtttgctacctgatagaatggttcacgtgccagtgaaatgctggaggcacaccctccacccc

SEQ ID NO: 82417 - DNA, 1250 bp, Homo sapiens
ataagatgaataagccccattgacttttaaaaaatcagtccccaagctaccacctgaagacccatggacttttaatcctttcattttgtcaatgaataattatttgttgaatagttggggatgcctactacatgtaatgtacaatgcggtacatgccttgtatgtacatgccatataaccaccagtacttgccttgaaatagctgatgatctagatctagatctaggggagagaaatatttataaataactaaaaccaaggcagcatataggagaatactttagaatatgttttaaaagttcagagaagggacagagagtatatgatcaaagtgtaacatgtagtatataaagaaacactttctttctctaactagatgctgtctctaaattctaacttcgggcagcagactgtatagagagaatagaggttgctattgctgccaacatcaaaaccttcctagcggtagcctaatttttctccagaaattatccccttccctattcttaggccttgtgcttcctttgaagcccattccttttttgtttgtttgttttttaccactttgggagatgattaaggcctcagctaactagtgcattgtatccacctggccacagagattgatccaggatgggaacatggcccattcagaacacatacaaagcagtgaatctttgtgacttctggggaaaacactattgcttattgcttttctytgcagtcctgggaacttcacgcatgacaaaaaaaggagagcctgtctaaggatggagcatttctacagaaagtggagctaaaggatagatcctggtaagattatataagcctggaaggcagattttctgtttttttttttttttttttctaactgaaacaattattacttactgaaacaacaaaatacaaaacagttcaataaaatctggaatctaattaggttccaaaatacaaaagcagtgcactttgtagaatacttgtagaaaagaatggaattatatcaaagttaccatgagaatattagtaattgtaggtcattggaggttatctacacatccttaacaaattaggagggcttaagacttccagatctactttggagatagtctcagattcctttagcctgtgcttgcaatagaacgtggtaagattcttgggagaagtttcctttataacaaggattgaaatttaaaattagagacatggcattctgctgtgaaatgaaaggcatccatgaggtagtatggagg

SEQ ID NO: 82418 - DNA, 636 bp, Homo sapiens
tctggatttccatttactctaaaggaaggcttccccctgaccccccagatagagcaagggacaaagatcccagcttgcaggcaagctatttcaagatctaatacggctcttagtagcatggcagaggggcaggacatacgtggcataaaaaacacaggctgcctttggggtctgtgtgcctgtgttcatgcatgtggctacatgcatggaaatacacatgccccggccttttcccctgttgagaatytctcctgggtgaaagagaaggggcctatggccttgacacccccacctcactgcaacgtgcagggcaagacatcccttcctctttactgccgtggccccagcttcactctgcaaagtcagggagggagactgggggattttcaaggatgatttcaattctaactctctatgacccttctgaaaattagttattttaatgttctgcctttatgctgaagagaacaaaggggaaaacaccagataggtattaaaattaaaataagtctttggaatgagaggacttggatttgtaccctgtcttttacacattacacattacacaaaagctgagtgaattttggagaatttcttaacttccctgagtccccagtcttaaagtaaaactaaact

SEQ ID NO: 82419 - DNA, 2132 bp, Homo sapiens
ccttccagccctggtattctagaattgtagttggtggcttctaggacctggaaggtgttgcttgaaaccagtgctgtttaatcagtgggagattttacaccacccacttcaagcaatgtttgaagacattttrttgttgtttttgtttctttgtttgtttgttttgagacaaagttttgctttgtggcccaggctggagtgcagtggcacaatcactgctcactgcagcctcgaactcctgggctcaagtgatcctcccatcttagtcacctgagtagctgggactacaggcatgagccaccatgcctgactaatttttaatttttttttttttagagatgggatcttgctgtgttgcccaggctggtctccaatccctgatctcaggtgatcctcccacctcagcctcccaagtagccgggactacaggcccatgccaccacacctggcaaaaacccatgctgtttaaccagagggagattttgcccccaggggatatttggcaatgttcgaagacatttttgattgtcaaaaaatttatgtgcaggggtgctactggcatctggtgggtagaggccaaggatgttgttcaacatcccacaacacccaggacaaccagcccacaacaaagaactcactggcctgagtgtcagaagtgctaaggctgagaaaccctgggttaaactttgtgaccccttgcatggcaaggatacggaattttgagccctgagtattcacgcagcaggtatttaaagggtgcttactcttcgcccagctctgtgtaggtacttggggagtatacagaactggaagatgcttcatcccttccggggcttaaaactgagttgctccaagcctctggttctggacacattgtgcctgagcacccttagatgttgatgctaccatccctcttaggataaaataccactttggatttccaaagaaaatattttatcctcaacagagtagccactatttatttatttattcctacctcatgcatagagctacactgagtgtagctggtttattttcaaaaagaagttgaggaaatgccacacattagactcaaggaagaaagttagaatcagatgtgcaactgtaagccagcaacacagttgatgcaagtaagcttcctggcagcaagggcaaaaagggaaataatccttcatgataatataaagcattgaagggactgtattactgtctcctcaaagggtacaaagtcttgaataaaattttaatgtaggcttcacacagaagatactgcttagtatttggtaatgcgtactatgttcaccaggcatatcaaaggcaggcatttctgggttttggatggaatgataaattaggaatgatatctgtcttcagatgtctgttggagaagataagcaattatgccactacctgttaaacagggttataaatgtgaggataaaaggagtgttactatgtgagtgaggcaggcagagaagacttacagaataaaacaatatgtttttatttttatcttttaattttttttttttttgagacagggtcttgctctgtcactcaggctggagtacactggtgtgatcacggttcactgcagcctcaacctcccaggctcaagtgatcctcccacctcagcctccggagtatctgggactacaagtgcacaccaccatgcccggctaattttttgtatttttgtagagacggggttttgccatgttgctcaaagtggtcttgaactcctagactctagcaatctgcccaccttggcctcccaaagtgttggggttatagacacattttaaaatacatatatatatttttctaattgcaaattaatacactgcattacagaaaattagagcaatacaaatatgaaggagaaaataaaagctccataacctttctacctgtagacaaccactgttatcctttgatgtgtatctattttcatgcacacatgcgcttatatattaatatatttaatagaaacaaaaattggaatctcattatattttaccatgttgtaaccaaatatcccttaaagggctttgaaggatgagttggagagaaagtgagttgcacgccactgcggagttgggcagccagagtcaatttccaccacgcatgca

SEQ ID NO: 82420 - DNA, 2132 bp, Homo sapiens
ccttccagccctggtattctagaattgtagttggtggcttctaggacctggaaggtgttgcttgaaaccagtgctgtttaatcagtgggagattttacaccacccacttcaagcaatgtttgaagacattttgttgttgtttttgtttctttgtttgtttgttttgagacaaagttttgctttgtggcccaggctggagtgcagtggcacaatcactgctcactgcagcctcgaactcctgggctcaagtgatcctcccatcttagtcacctgagtagctgggactacaggcatgagccaccatgcctgactaatttttaatttttttttttttagagatgggatcttgctgtgttgcccaggctggtctccaatccctgatctcaggtgatcctcccacctcagcctcccaagtagccgggactacaggcccatgccaccacacctggcaaaaacccatgctgtttaaccagagggagattttgcccccaggggrtatttggcaatgttcgaagacatttttgattgtcaaaaaatttatgtgcaggggtgctactggcatctggtgggtagaggccaaggatgttgttcaacatcccacaacacccaggacaaccagcccacaacaaagaactcactggcctgagtgtcagaagtgctaaggctgagaaaccctgggttaaactttgtgaccccttgcatggcaaggatacggaattttgagccctgagtattcacgcagcaggtatttaaagggtgcttactcttcgcccagctctgtgtaggtacttggggagtatacagaactggaagatgcttcatcccttccggggcttaaaactgagttgctccaagcctctggttctggacacattgtgcctgagcacccttagatgttgatgctaccatccctcttaggataaaataccactttggatttccaaagaaaatattttatcctcaacagagtagccactatttatttatttattcctacctcatgcatagagctacactgagtgtagctggtttattttcaaaaagaagttgaggaaatgccacacattagactcaaggaagaaagttagaatcagatgtgcaactgtaagccagcaacacagttgatgcaagtaagcttcctggcagcaagggcaaaaagggaaataatccttcatgataatataaagcattgaagggactgtattactgtctcctcaaagggtacaaagtcttgaataaaattttaatgtaggcttcacacagaagatactgcttagtatttggtaatgcgtactatgttcaccaggcatatcaaaggcaggcatttctgggttttggatggaatgataaattaggaatgatatctgtcttcagatgtctgttggagaagataagcaattatgccactacctgttaaacagggttataaatgtgaggataaaaggagtgttactatgtgagtgaggcaggcagagaagacttacagaataaaacaatatgtttttatttttatcttttaattttttttttttttgagacagggtcttgctctgtcactcaggctggagtacactggtgtgatcacggttcactgcagcctcaacctcccaggctcaagtgatcctcccacctcagcctccggagtatctgggactacaagtgcacaccaccatgcccggctaattttttgtatttttgtagagacggggttttgccatgttgctcaaagtggtcttgaactcctagactctagcaatctgcccaccttggcctcccaaagtgttggggttatagacacattttaaaatacatatatatatttttctaattgcaaattaatacactgcattacagaaaattagagcaatacaaatatgaaggagaaaataaaagctccataacctttctacctgtagacaaccactgttatcctttgatgtgtatctattttcatgcacacatgcgcttatatattaatatatttaatagaaacaaaaattggaatctcattatattttaccatgttgtaaccaaatatcccttaaagggctttgaaggatgagttggagagaaagtgagttgcacgccactgcggagttgggcagccagagtcaatttccaccacgcatgca

SEQ ID NO: 82421 - DNA, 2132 bp, Homo sapiens
ccttccagccctggtattctagaattgtagttggtggcttctaggacctggaaggtgttgcttgaaaccagtgctgtttaatcagtgggagattttacaccacccacttcaagcaatgtttgaagacattttgttgttgtttttgtttctttgtttgtttgttttgagacaaagttttgctttgtggcccaggctggagtgcagtggcacaatcactgctcactgcagcctcgaactcctgggctcaagtgatcctcccatcttagtcacctgagtagctgggactacaggcatgagccaccatgcctgactaatttttaatttttttttttttagagatgggatcttgctgtgttgcccaggctggtctccaatccctgatctcaggtgatcctcccacctcagcctcccaagtagccgggactacaggcccatgccaccacacctggcaaaaacccatgctgtttaaccagagggagattttgcccccaggggatatttggcaatgttcgaagacatttttgattgtcaaaaaatttatgtgcaggggtgctactggcatctggtgggtagaggccaaggatgttgttcaacatcccacaacacccaggacaaccagcccacaacaaagaactcactggcctgagtgtcagaagtgctaaggctgagaaaccctgggttaaactttgtgaccccttgcatggcaaggatacggaattttgagccctgagtattcacgcagcaggtatttaaagggtgcttactcttcgcccagctctgtgtaggtacttggggagtatacagaactggaagatgcttcatcccttccggggcttaaaactgagttgctccaagcctctggttctggacacattgtgcctgagcacccttagatgttgatgctaccatccctcttaggataaaataccactttggatttccaaagaaaatattttatcctcaacagagtagccactatttatttatttattcctacctcatgcatagagctacactgagtgtagctggtttattttcaaaaagaagttgaggaaatgccacacattagactcaaggaagaaagttagaatcagatgtgcaactgtaagccagcaacacagttgatgcaagtaagcttcctggcagcaagggcaaaaagggaaataatccttcatgataayataaagcattgaagggactgtattactgtctcctcaaagggtacaaagtcttgaataaaattttaatgtaggcttcacacagaagatactgcttagtatttggtaatgcgtactatgttcaccaggcatatcaaaggcaggcatttctgggttttggatggaatgataaattaggaatgatatctgtcttcagatgtctgttggagaagataagcaattatgccactacctgttaaacagggttataaatgtgaggataaaaggagtgttactatgtgagtgaggcaggcagagaagacttacagaataaaacaatatgtttttatttttatcttttaattttttttttttttgagacagggtcttgctctgtcactcaggctggagtacactggtgtgatcacggttcactgcagcctcaacctcccaggctcaagtgatcctcccacctcagcctccggagtatctgggactacaagtgcacaccaccatgcccggctaattttttgtatttttgtagagacggggttttgccatgttgctcaaagtggtcttgaactcctagactctagcaatctgcccaccttggcctcccaaagtgttggggttatagacacattttaaaatacatatatatatttttctaattgcaaattaatacactgcattacagaaaattagagcaatacaaatatgaaggagaaaataaaagctccataacctttctacctgtagacaaccactgttatcctttgatgtgtatctattttcatgcacacatgcgcttatatattaatatatttaatagaaacaaaaattggaatctcattatattttaccatgttgtaaccaaatatcccttaaagggctttgaaggatgagttggagagaaagtgagttgcacgccactgcggagttgggcagccagagtcaatttccaccacgcatgca

SEQ ID NO: 82422 - DNA, 2132 bp, Homo sapiens
ccttccagccctggtattctagaattgtagttggtggcttctaggacctggaaggtgttgcttgaaaccagtgctgtttaatcagtgggagattttacaccacccacttcaagcaatgtttgaagacattttgttgttgtttttgtttctttgtttgtttgttttgagacaaagttttgctttgtggcccaggctggagtgcagtggcacaatcactgctcactgcagcctcgaactcctgggctcaagtgatcctcccatcttagtcacctgagtagctgggactacaggcatgagccaccatgcctgactaatttttaatttttttttttttagagatgggatcttgctgtgttgcccaggctggtctccaatccctgatctcaggtgatcctcccacctcagcctcccaagtagccgggactacaggcccatgccaccacacctggcaaaaacccatgctgtttaaccagagggagattttgcccccaggggatatttggcaatgttcgaagacatttttgattgtcaaaaaatttatgtgcaggggtgctactggcatctggtgggtagaggccaaggatgttgttcaacatcccacaacacccaggacaaccagcccacaacaaagaactcactggcctgagtgtcagaagtgctaaggctgagaaaccctgggttaaactttgtgaccccttgcatggcaaggatacggaattttgagccctgagtattcacgcagcaggtatttaaagggtgcttactcttcgcccagctctgtgtaggtacttggggagtatacagaactggaagatgcttcatcccttccggggcttaaaactgagttgctccaagcctctggttctggacacattgtgcctgagcacccttagatgttgatgctaccatccctcttaggataaaataccactttggatttccaaagaaaatattttatcctcaacagagtagccactatttatttatttattcctacctcatgcatagagctacactgagtgtagctggtttattttcaaaaagaagttgaggaaatgccacacattagactcaaggaagaaagttagaatcagatgtgcaactgtaagccagcaacacagttgatgcaagtaagcttcctggcagcaagggcaaaaagggaaataatccttcatgataatataaagcattgaagggactgtattactgtctcctcaaagggtacaaagtcttgaataaaattttaatgtaggcttcacacagaagatactgcttagtatttggtaatgcgtactatgttcaccaggcatatcaaaggcaggcatttctgggttttggatggaatgataaattaggaatgatatctgtcttcagatgtctgttggagaagataagcaattatgccactacctgttaaacagggttataaatgtgaggataaaaggagtgttactatgtgagtgaggcaggcagagaagacttacagaataaaacaatatgtttttatttttatcttttaattttttttttttttgagacagggtcttgctctgtcactcaggctggagtacactggtgtgatcacggttcactgcagcctcaacctcccaggctcaagtgatcctcccacctcagcctccggagtatctgggactacaagtgcacaccaccatgcccggctaattttttgtatttttgtagagacggggttttgccatgttgctcaaagtggtcttgaactcctagactctagcaatctgcccaccttggcctcccaaagtgttggggttatagacacattttaaaatacatatatatatttttctaattgcaaattaatacaytgcattacagaaaattagagcaatacaaatatgaaggagaaaataaaagctccataacctttctacctgtagacaaccactgttatcctttgatgtgtatctattttcatgcacacatgcgcttatatattaatatatttaatagaaacaaaaattggaatctcattatattttaccatgttgtaaccaaatatcccttaaagggctttgaaggatgagttggagagaaagtgagttgcacgccactgcggagttgggcagccagagtcaatttccaccacgcatgca

SEQ ID NO: 82423 - DNA, 984 bp, Homo sapiens
tgcatccaacagtgaaagtcatttctcatgtctttgcatattatctttgtgtggtggtagctaatcttcaaagatggccctggggaaccacacttcctggtaggtgcccacactcttgtgtgctcttctcrcttgttaattcgggcttggcctatgtcaccaacagcctactgtagaagtgatgctgcatgacttttgagctagttcataaggaaccttgctctctcagaatgcttgtggaagaagtccattgccatgtgagagtctagctgccctgagacggccatgctgtgaggaagccccagctagactaggaagggtccatgtggagagagagatgccagccagctctggctgttccaatcatcccaactgagacagcagacatttgagtgaataaaccatccttgagcctttagatgactctacttccagctgctccagtcaacccacagaaccataaaaaattctctaataataaattgctttaagccattaagttttggaactgtttgttacatggaaatagataatcagaaaaccataccatctaggcttttccatgtacctgtcctattcaatgatttaactaccaaatccttaagaaataagaccaaatcctttctcatttataaggaaacatcaataaactttttttctttctttttttaaatagagagagggtttcactatgtggaccaggctggtcttcaactcctgggctcaagcgatccacctgcctgggcctcccaaagtgctgggattatagacgtaagccaccacgccctgcccattttttttttttctaagttaggacagaaggggaggaaaatgaacacacccaccagcggcatgcacttaacttagattcttcatctaatgcttaatttgaaataagtgctatgagttccaacttacagatgagaaaaccgaggctttgtatgggacttgtcctaactgggtcacagagcgacatcagcgtgt

SEQ ID NO: 82424 - DNA, 984 bp, Homo sapiens
tgcatccaacagtgaaagtcatttctcatgtctttgcatattatctttgtgtggtggtagctaatcttcaaagatggccctggggaaccacacttcctggtaggtgcccacactcttgtgtgctcttctcacttgttaattcgggcttggcctatgtcaccaacagcctactgtagaagtgatgctgcatgacttttgagctagttcataaggaaccttgctctctcagaatgcttgtggaagaagtccattgccatgtgagagtctagctgccctgagacggccatgctgtgaggaagccccagctagactaggaagggtccatgtggagagagagatgccagccagctctggctgttccaatcatcccaactgagacagcagacatttgagtgaataaaccatccttgagcctttagatgactctacttccagctgctccagtcaacccacagaaccataaaaaattctctaataataaattgctttaagccattaagttttggaactgtttgttacatggaaatagataatcagaaaaccataccatctaggcttttccatgtacctgtcctattcaatgatttaactaccaaatccttaagaaataagaccaaatcctttctcatttataaggaaacatcaataaactttttttctttctttttttaaatagagagagggtttcactatgtggaccaggctggtcttcaactcctgggctcaagcgatccacctgcctgggcctcccaaagtgctgggattatagacgtaagccaccacgccctgcccattttttttttttctaagttaggacagaaggggaggaaaatraacacacccaccagcggcatgcacttaacttagattcttcatctaatgcttaatttgaaataagtgctatgagttccaacttacagatgagaaaaccgaggctttgtatgggacttgtcctaactgggtcacagagcgacatcagcgtgt

SEQ ID NO: 82425 - DNA, 984 bp, Homo sapiens
tgcatccaacagtgaaagtcatttctcatgtctttgcatattatctttgtgtggtggtagctaatcttcaaagatggccctggggaaccacacttcctggtaggtgcccacactcttgtgtgctcttctcacttgttaattcgggcttggcctatgtcaccaacagcctactgtagaagtgatgctgcatgacttttgagctagttcataaggaaccttgctctctcagaatgcttgtggaagaagtccattgccatgtgagagtctagctgccctgagacggccatgctgtgaggaagccccagctagactaggaagggtccatgtggagagagagatgccagccagctctggctgttccaatcatcccaactgagacagcagacatttgagtgaataaaccatccttgagcctttagatgactctacttccagctgctccagtcaacccacagaaccataaaaaattctctaataataaattgctttaagccattaagttttggaactgtttgttacatggaaatagataatcagaaaaccataccatctaggcttttccatgtacctgtcctattcaatgatttaactaccaaatccttaagaaataagaccaaatcctttctcatttataaggaaacatcaataaactttttttctttctttttttaaatagagagagggtttcactatgtggaccaggctggtcttcaactcctgggctcaagcgatccacctgcctgggcctcccaaagtgctgggattatagacgtaagccaccacgccctgcccattttttttttttctaagttaggacagaaggggaggaaaatgaacacacccamcagcggcatgcacttaacttagattcttcatctaatgcttaatttgaaataagtgctatgagttccaacttacagatgagaaaaccgaggctttgtatgggacttgtcctaactgggtcacagagcgacatcagcgtgt

SEQ ID NO: 82426 - DNA, 595 bp, Homo sapiens
gaaatatttgtctacttattatagaaacaaaatagttagtatccatgttgtaatagcagtagagaaagtagggaggtggagcttgcactatgaattggtgggaaaggacactcaggaagaaaggaatatcccactttgccttttttctctctgtgccctacatctgactcataaggcttcttctaatgcttttcctcctaattttaacaatcaccatttcacatagtactgcgaaattttgttgactcagcacaagttctgcaaatattttcagaagaagcaactgcccatcttcccccactcccatgctttcgtgtaacagtagctttgcattttatgaggcttggatacaacacattttaaatacattccaagccaattcaaatttgattctacttgtaagtatcttctgggatggtgatgaaaaaaaaattcaaaaaaatcatggaaatggaggccgtttttacatggaagatattttctacaagttaccttgcagtttttttcttttttcttccgtrtgtgtttttctttttttctctgcctggtattggtgctcatagtgaaaaagtaacaagcacagaaggaaatgtta

SEQ ID NO: 82427 - DNA, 2204 bp, Homo sapiens
aggaaagtagggttgttgttttcctttttttaattttttaattttttttatggtagtttctctttgttggaactcaagaatattaaagagagtctgaaacaagtcattgcttgttatgagttgaattgtgtaccccccaaaaatgcatagattgaactattaggccccaggaccatagaatgtgatgttgtttagagataaggtctttagcatggtaatcaagttaaaatgaggttattagatcaggcttaatctaatatgcctaatgtcattataaaaagggagaatgtgaacaaagacttgtgcataggaacagatgatataaagagacataagsagaagatagctatctacagtttgagaagagagggcttgagacagattcttccctcacagccttcagcaggaacctattctgatgtctccttgattttggacttctattctctaaaaccacgagacagtaaatttttgtaatttaaaccacccattgtgtggtactttattgcagtagcactagcaaacgaatacattgttcaataagtatgtatttgttgaataaattgaatgagaaaatattatgaaaccaggtttataaaatgaaatagatgcttccccagctttctcataactcatgtccctccacagttatttagtaaatactgcaactatgcataagtccttccagcaaaacaggtaacaattataaagaaatcagaatggtgcatatatactgatactaccaaaaaaaaagggaaaggaaacaggaaaagaaacacaaacatacttgcagatgaaaatgaaaatcataaaaattatataatgaaacagaagaaaattttaacatggcacttatgcatgagcttaacagtcttgaggaagatatagagcttttgaaagaagagcttggatacacaagaaatattgtcttaaaaaatagaagaaaaaattggcagcactcaggaaaggaaaactaaaaaaaattatgaaaatgaaagctgcactggagaagtaaaaaagttaaatatgaattgctgaaagtagggaggagtatgataagaaaacttagtaaacttaaatacatctcaattacaatgaaatcattttaaagcaaaaaaagaaagaaaaaaaaacaaggaaactgtgaacatctccataattgtttctcttgaagtaaatactgtaaggatggagcacatgaaacagaaatacggttttaaagataggatgccctattaataaaaatgtactatctgagggcatgtcagagctgagggattaaaaaataattagcagccggtcactgtggctcacgcctgtaatcccagtactttagaaagccaaagcgggaggatcacttgagcccaggagtttgagaccatcctgggcaacatagagagatccttgtctttacaaaagttaaaaaattagtcaggtgtcatggcatgcacctgtagtcccaaccatttgggattctgaggtaggacaatcatttgagtccaggagtttgaggctgcagtgagctttgatggtaacaccacactgcagcctgggagacagagcaagacctcatcactaagaactaatcaaataaataaaaataaaataattaacaccaggttgtattttagtgaagttactgaataatggagaagaaggggagaaatgccacaatgggtcagaaatgcaccctcccctaataagtcacctaaacaaaaaaatgattggcttaaaattgtacaatgcaaagttcagtgctagaatactgtggatcagtacctataaagccacatgaagtagattctttaaaattgaaacatccaaagattttttaatctggccatatttcttggcatatcagtgtgcactcgataaatgtatagtaattaaattttcttagccagacaattgcttgaagtttaaatccagccaataaaataaaaatagaaagcttagttgtttgttgtaatggataaaaaaatgacagcacaggtggtaagcattcatatagatcaaaggcagagttttctgtcttgctatgcaacacaatcacctgaatatctgatatagtaaacactcctgggtaattccaatatgctgccaaggttgagaatgactcaaactttcagcacctctgggtattactattacatactatagcacacagtaaggtgtgtaatatcaaacaatatggtttaatatgc

SEQ ID NO: 82428 - DNA, 2204 bp, Homo sapiens
aggaaagtagggttgttgttttcctttttttaattttttaattttttttatggtagtttctctttgttggaactcaagaatattaaagagagtctgaaacaagtcattgcttgttatgagttgaattgtgtaccccccaaaaatgcatagattgaactattaggccccaggaccatagaatgtgatgttgtttagagataaggtctttagcatggtaatcaagttaaaatgaggttattagatcaggcttaatctaatatgcctaatgtcattataaaaagggagaatgtgaacaaagacttgtgcataggaacagatgatataaagagacataagcagaagatagctatctacagtttgagaagagagggcttgagacagattcttccctcacagccttcagcaggaacctattctgatgtctccttgattttggacttctattctctaaaaccacgagacagtaaatttttgtaatttaaaccacccattgtgtggtactttattgcagtagcactagcaaacgaatacattgttcaataagtatgtatttgttgaataaattgaatgagaaaatattatgaaaccaggtttataaaatgaaatagatgcttccccagctttctcataactcatgtccctccacagttatttagtaaatactgcaactatgcataagtccttccagcaaaacaggtaacaattataaagaaatcagaatggtgcatatatactgatactaccaaaaaaaaagggaaaggaaacaggaaaagaaacacaaacatacttgcagatgaaaatgaaaatcataaaaattatataatgaaacagaagaaaattttaacatggcacttatgcatgagcttaacagtcttgaggaagatatagagcttttgaaagaagagcttggatacacaagaaatattgtcttaaaaaatagaagaaaaaattggcagcactcaggaaaggaaaactaaaaaaaattatgaaaatgaaagctgcactggagaagtaaaaaagttaaatatgaattgctgaaagtagggaggagtatgataagaaaacttagtaaacttaaatacatctcaattacaatgaaatcattttaaagcaaaaaaagaaagaaaaaaaaacaaggaaactgtgaacatctccataattgtttctcttgaagtaaatactgtaaggatggagcacatgaaacagaaatacggttttaaagataggatgccctattaataaaaatgtactatctgagggcatgtcagagctgagggattaaaaaataattagcagccggtcactgtggctcacgcctgtaatcccagtactttagaaagccaaagcgggaggatcacttgagcccaggagtttgagaccatcctgggcaacatagagagatccttgtctttacaaaagttaaaaaattagtcaggtgtcatggcatgcacctgtagtcccaaccatttgggattctgaggtaggacaatcatttgagtccaggagtttgaggctgcagtgagctttgatggtaacaccacactgcagcctgggagacagagcaagacctcatcactaagaactaatcaaataaataaaaataaaataattaacaccaggttgtattttagtgaagttactgaataatggagaagaaggggagaaatgccacaatgggtcagaaatgcaccctcccctaataagtcacctaaacaaaaaaatgattggcttaaaattgtacaatgcaaagttcagtgctagaatactgtggatcagtacctataaagccacatraagtagattctttaaaattgaaacatccaaagattttttaatctggccatatttcttggcatatcagtgtgcactcgataaatgtatagtaattaaattttcttagccagacaattgcttgaagtttaaatccagccaataaaataaaaatagaaagcttagttgtttgttgtaatggataaaaaaatgacagcacaggtggtaagcattcatatagatcaaaggcagagttttctgtcttgctatgcaacacaatcacctgaatatctgatatagtaaacactcctgggtaattccaatatgctgccaaggttgagaatgactcaaactttcagcacctctgggtattactattacatactatagcacacagtaaggtgtgtaatatcaaacaatatggtttaatatgc

SEQ ID NO: 82429 - DNA, 573 bp, Homo sapiens
tttgggaggccraggtggatggatcacttgaggtcaggagttggagaccatcctggccaacatggtgaaaccccgtctctactaaaaatacaaaaactagctgggcgtggtggcgggcgcctgtagtcccagctactcgggaggctgaggcaggagaatcgctcgaactcgggaggtggaggttgcagtgagccaggattgcaccactgcactccagcctggacaacagagcaagattctgtctctaaacaaataaataaataaataagaacttagcacagggtcatggcgcatcggagcaatcactcactgctggtctcccaaagacacagaagaccttccccagctgctgggagtcaaacacggaacaggcagtgcagtgaccacacggcggacttgctgtggccaccgatgcaagacgggtcctcgcccggccacagtgagcgcagggccagtgccgccggggggaacctgaggctggccgcaccggagactcgaagagacggacagctgactgcagcccccgccgtctgcaccccagccctccccgctccccaggtgcagcccccgccg

SEQ ID NO: 82430 - DNA, 573 bp, Homo sapiens
tttgggaggccaaggtggatggatcacttgaggtcaggagttggagaccakcctggccaacatggtgaaaccccgtctctactaaaaatacaaaaactagctgggcgtggtggcgggcgcctgtagtcccagctactcgggaggctgaggcaggagaatcgctcgaactcgggaggtggaggttgcagtgagccaggattgcaccactgcactccagcctggacaacagagcaagattctgtctctaaacaaataaataaataaataagaacttagcacagggtcatggcgcatcggagcaatcactcactgctggtctcccaaagacacagaagaccttccccagctgctgggagtcaaacacggaacaggcagtgcagtgaccacacggcggacttgctgtggccaccgatgcaagacgggtcctcgcccggccacagtgagcgcagggccagtgccgccggggggaacctgaggctggccgcaccggagactcgaagagacggacagctgactgcagcccccgccgtctgcaccccagccctccccgctccccaggtgcagcccccgccg

SEQ ID NO: 82431 - DNA, 1238 bp, Homo sapiens
ctgaatgaacctgggaaaatctgtcaagaattccaaaaactttgagactgacaatacaccattttttacatcttagagtataagaagtgatgtctaacctttgcatttatacatctaagaatagcaaaaacactttgcactttaaaggcctcctataaagtcccaaagtgcttccggacggttaggtgattcttccatagctataaaatggttgttaattgcctaacaactagcaagtgctctggaaatggacatccagagtgatccttaaaatattattttagtagcattgagaaaagccttgaaaaataaaatcttattctgttattccaagcttactcagtgctatattattcagatcagggttccccttacacactttgggcaggatgataggggctacttctctatatgaagtcttgaaatcatatgattcaaggtgattcaaggtggagggaatttaaaaattaaaaaaataattccaacagtgaaattcctaagggtgagtctttgctcttctacccactaagaattccggcttcctcttcccaaaagaacagaagagtggggaaagatttgtgacagccaaaaggacatggtgtagcaagccaacttggaagagttactggagatggcttagcaaatattcatgcctttactcaactaaaacaaaaacaaaacaagtcaaatttgggcattttttatagatcacaggcttttgtttgatcaatgcactacatttctttatgacaaaaggtaacgacaatgattttgcatattcccaaatttggatagttgtccaatttaacagtctcaaggagcctaacatggtgctgtgtgggatgaaaagaggttcaaagtatgatccctgtcttaaaattaagatacagaatcttccaattaatatgtatattttctaaagtggagtccttaaactgctggatctcctcagaagtcttttgagggtcccaatatcatccaagctttgagtttctcaaaagaaagagtatatgatactaataggtctacaatactcgttacaatagctcttccctcaattcccttatacatttgtaaatactccctaaaggaggtaacctaaccctcaccccttccccgtgtttaagaaccacagtggcttcccaacacagttgaaataaaatccaaaccccttacactggcctgtaagaccctsagtgccctgcctccttcctacctactgacaatttctatgatgc

SEQ ID NO: 82432 - DNA, 552 bp, Homo sapiens
acctgtatgatacatccatttataagtcaattgtcctgggatctgattttatgtttatggtgtttacatgtctgtcatctgtaatattggtattttttagagttcatctagatctttgaccattcagtcagcactctgtttagtaagatacggaatccaaagatgcactaaaactatcccaactgtgctataggagatgtgcaataggaattaatgtcaggcagaagcagttaaaacacttggcaactgcctgaactgctatgcttgccgtttcctagagataatgcaaattgtgctttggcaagagatwacctgtcgattttttttcttattttgtaattgctccctcacaaaaaacacaggttagactgtaccgtctgctgtccatggtgctaattgtggtctttgctgggaaatggtaccttttacagagccagcttgtgaaatcctttaacagattgtttgcgatccctgtaattctggcagtgccaagcatatttgagtactagattctatgctcagttagttttcccccaagtcacatgagctaag

SEQ ID NO: 82433 - DNA, 1115 bp, Homo sapiens
ctaataggtaatagcattttgttatctttttaaagctttttatagtattacttttgaactataccactttgcattaggagcatgtgcagtatttggaaaaagtagcatgttaaagtatgggcctgactctcatgctgtatttgtgaagttgttagaacattctggctttctgaatccaccaagcaagtcagccaagatggaaacattaattggaatatgtgggtgcattcgcatttttatggtatacccttagagattacatgattggccaagaaagcatatttaggattcatatgttttaattatgaaatataactctccatggatctcatttttggctcagtttattattttagttctttaaaactctaataattagcatacatagatgttaagtgttttaatctgaggcatttattattgacttttaatggttcgtcataaattatatgcaaaaggggaccaagaaaacaaaaaaggtttatggttgtgttataaattatcaatataaattgtgagctcctaattttcaatggaaaaaatgctgtgtttattttattttcaccattaattatttaaccagtaagggacacagacactgttgggattgtcattctctttcctccaaattctgaggaaatatgattctaaaaatgaatgctagggcatggtttttatttgtctattcttttaagttgtagtttgggacgaaatttattttcaccaacaccagtggaaagcaaagtgccaggaggtcgagagaaggagagagaccgaatgcagaacttgtgatctaacagaaatagtcacttgaaaactgtagacaactgtcaaaatttgtggacagttcttagaatttggtttaaatattactataatgccaaatatatgaatatattttcagctggaaagtgtatgaatattttaaatyagaggcactgttaaaagccatattcgtacagatcttaggttagtttttatgtctgatacagcataaaaataatggtgtttattattccctaccatgtatcatgaaaagtcatctttataatcgtgacaagaagcacaatcacattttacacagggcagcctggagtatgcatggtccctatcta

SEQ ID NO: 82434 - DNA, 227 bp, Homo sapiens
aagtatacrgaaggatgtgcataggttatatgcaaatactttaccattttatatcaggaacttgagcatctttggattttggtatctgcagagggtcctggaaccattgccccgtaaatatggaaatgactgtatacattatattatgtatgtctatctattgtaaactacatacataagatactatactatgtatacctattagatacatacttgctttttattcc

SEQ ID NO: 82435 - DNA, 586 bp, Homo sapiens
tttttttatgttttgtacagatggggtctccctgtgttgcccaggctggtctcaaactcctgggctcagtgatcctcctgcctcgggctcccaaagtgttgggattacaggcgtgagcctccgygcctggcctcttctcagttttcccaccctcctgtctagccccatttgtccatgatgtttcctctgctgggtgcatccttccctggcacctgcattcgtctctaagtactcccaggttccctgctagacaccaggatcccggtcatctttttccctacatcgtgtcattccatcccctgaactccttcctccctcctggggcccaccagcccttgctcccagggtagccggggtggtggggggtcggggtgcacccacctgctgggacatcaggggctgggcttcggcagggagtggtggggctgggggagaggctgtgggtgggcgagccggggaggctctcactggatgacagtgagtggtggagtccggaggagaagctgcggctggtgtgcagcacggaggtctgcttggagatcttcttgaaaagtgacttccgcctggggtaagaaaaccggaggct

SEQ ID NO: 82436 - DNA, 586 bp, Homo sapiens
tttttttatgttttgtacagatggggtctccctgtgttgcccaggctggtctcaaactcctgggctcagtgatcctcctgcctcgggctcccaaagtgttgggattacaggcgtgagcctccgtgcctggcctcttctcagttttcccaccctcctgtctagccccatttgtccatgatgtttcctctgctgggtgcatccttccctggcacctgcaytcgtctctaagtactcccaggttccctgctagacaccaggatcccggtcatctttttccctacatcgtgtcattccatcccctgaactccttcctccctcctggggcccaccagcccttgctcccagggtagccggggtggtggggggtcggggtgcacccacctgctgggacatcaggggctgggcttcggcagggagtggtggggctgggggagaggctgtgggtgggcgagccggggaggctctcactggatgacagtgagtggtggagtccggaggagaagctgcggctggtgtgcagcacggaggtctgcttggagatcttcttgaaaagtgacttccgcctggggtaagaaaaccggaggct

SEQ ID NO: 82437 - DNA, 586 bp, Homo sapiens
tttttttatgttttgtacagatggggtctccctgtgttgcccaggctggtctcaaactcctgggctcagtgatcctcctgcctcgggctcccaaagtgttgggattacaggcgtgagcctccgtgcctggcctcttctcagttttcccaccctcctgtctagccccatttgtccatgatgtttcctctgctgggtgcatccttccctggcacctgcattcgtctctaagtactcccaggttccctgctagacaccaggatcccggtcatctttttccctacatcgtgtcattccatcccctgarctccttcctccctcctggggcccaccagcccttgctcccagggtagccggggtggtggggggtcggggtgcacccacctgctgggacatcaggggctgggcttcggcagggagtggtggggctgggggagaggctgtgggtgggcgagccggggaggctctcactggatgacagtgagtggtggagtccggaggagaagctgcggctggtgtgcagcacggaggtctgcttggagatcttcttgaaaagtgacttccgcctggggtaagaaaaccggaggct

SEQ ID NO: 82438 - DNA, 586 bp, Homo sapiens
tttttttatgttttgtacagatggggtctccctgtgttgcccaggctggtctcaaactcctgggctcagtgatcctcctgcctcgggctcccaaagtgttgggattacaggcgtgagcctccgtgcctggcctcttctcagttttcccaccctcctgtctagccccatttgtccatgatgtttcctctgctgggtgcatccttccctggcacctgcattcgtctctaagtactcccaggttccctgctagacaccaggatcccggtcatctttttccctacatcgtgtcattccatcccctgaactccttcctccctcctggggcccaccagcccttgctcccagggtagccggggyggtggggggtcggggtgcacccacctgctgggacatcaggggctgggcttcggcagggagtggtggggctgggggagaggctgtgggtgggcgagccggggaggctctcactggatgacagtgagtggtggagtccggaggagaagctgcggctggtgtgcagcacggaggtctgcttggagatcttcttgaaaagtgacttccgcctggggtaagaaaaccggaggct

SEQ ID NO: 82439 - DNA, 651 bp, Homo sapiens
acacaggggtctggaggaatgtctacctgccctgccctttttttttttttttttttttttggagacagggtctcactctgtccgtcaggctggaatgcagtggcatgatctcagctgactgcaatctccgcctcctgcctcagcctcccaagtagctgggattaccggcgcctgtccctatgcccaggtaatttttgtatttttagtagagatggggtttcaccatgttggccaggctggtctcaaactcctgacctcaggtgatctgcccacctcggcctgccaaagtgctgggattacaggcgtgagccacagtgcccggctccctgcmccactttctgagacccagatccacttcctggtttcctgtgtggtcatgtgaccacacttggccaattggagccttttgttatcacaggcacagggattgggtcagggctgggcacgtgatcctgcctgagccaatcatgctacgagtttggagactccctggaagaaggcctagaagtaaggaaaaccatcttggacgcatgatgatggcagtggatcagagtcccaaggacactggtgaagatcagagcaggactcacacaacctcagatccctgtggagtcagggtggaaccagagggaaggctgaaggctggagggt

SEQ ID NO: 82440 - DNA, 622 bp, Homo sapiens
tgtgatttgtgtttatatttttttctttttgtccaagagttaatgaacttttctaagtaaaaggacgtttttgttcttatagctttgttattaatttgaattttattgcattatgatcagaaaatactctttctgttaaaacgagttaatgggatttattaaagctttgtggcctaatagttgtcatgttccatacatactgaaaaagatagtattgggtcagggagggatggggatgacttgctagatttctgttttattgttcccttttatgttgttatagtgtaaagagctttttttttttttttaatgtgtcttctgattcttttctttctgtactgtcttttaccaatggggcccttatcttcatttttccttgtttccattcaccagccagcctctaggtggaactctaattgctatgtgcctcctttttagagtggkgccttctgctagtgtctcatccagtcatgcatacttttcaaggtccattctgattttccaggaaccatttggtagaacctaccaggtctcagatctctcaatatttcctacacaggctagatccgtctctttctgtagtggaatcctagttgatcttatctgtgttttgccaccaatg

SEQ ID NO: 82441 - DNA, 622 bp, Homo sapiens
tgtgatttgtgtttatatttttttctttttgtccaagagttaatgaacttttctaagtaaaaggacgtttttgttcttatagctttgttattaatttgaattttattgcattatgatcagaaaatactctttctgttaaaacgagttaatgggatttattaaagctttgtggcctaatagttgtcatgttccatacatactgaaaaagatagtattgggtcagggagggatggggatgacttgctagatttctgttttattgttcccttttatgttgttatagtgtaaagagctttttttttttttttaatgtgtcttctgattcttttctttctgtactgtcttttaccaatggggcccttatcttcatttttccttgtttccattcaccagccagcctctaggtggaactctaattgctatgtgcctcctttttagagtggggccttcygctagtgtctcatccagtcatgcatacttttcaaggtccattctgattttccaggaaccatttggtagaacctaccaggtctcagatctctcaatatttcctacacaggctagatccgtctctttctgtagtggaatcctagttgatcttatctgtgttttgccaccaatg

SEQ ID NO: 82442 - DNA, 1035 bp, Homo sapiens
aaatgaaacccttgatttagaatctgaaacacttagaagtaatgatcctgtttactgattgagtgaagttgtggtttttaagcactacttaatagaggaaacaaaaagcaatactcaaataaaatggaagcatctgagttactttagaaagcattcgtagttaagaaataatagacttttattttatttttccctgtttgtgcctcagtgctacttagccaacattgttatttagtttaatgttacccattttttgagatgcctgatctttccaaatttaaacttaatgaatgctattagtaattcaaagattagtagaacatcattcacataaatcaagttttctatcatgtatttgttttaattacattattgaaacagacttctaaaatatcttttataaagggttaattttatttacaaatattaatttatcttttaaatgtcatgtatttgacagcatggggaagttgtcacagttcccttctttctgaagtgaaatactataaagtaacttttataaatgtttgtggaaattttcaaaccaataaaattgctgcaaatccttctatgaaaattgaaacattcaaactgctttgccttctttatcttttgtttgtacagctagtctcaagcctctatttcaaatgagaatatcctaataaaatcaatcaatcaatcaatcacttttggatggccggatagttagcattcaacttagcctatgtttgtatttaaaattaggaatgagtaaacttatttcagataagataaaatttaaaaaaagatcctaaagtatgtatggtattttggattgaaaaaaatgtaaataatgaaataatttgagaaaacaaaataattgatattttatttggttctaaattttttttctaaataattaacatgaattgagttgaaattttgaatttcctgctctttcmaaatagtaaaatatctttcctctcttaatgtcttccaactgaagtgcattagaccaaatagagatattatgcattgttttggatatatgctgcc

SEQ ID NO: 82443 - DNA, 628 bp, Homo sapiens
cctcccccaaagcaagcaaagaggggtccaagagaacctcgggtttagggagatycttgcaaggagagacaaactctcattttatggacagaagcttgttgagtggtgaaaacatttcagcccgcatagtgctactaccagagttgcgaatgccaaaggtcttgggagagcttgccatgtgtcccctggagtctgggggcatgatgactggcacctggctctcgagagctgtgaaagcaggagccaggtggagccaggaggcagggtaagaagagagagggcagctgggtagcaagatgccatttgaaagtgtcaaaaggcaaattacaacacgtttagtttaaagatctacttggcttttattagtgaatctagaagtgggcaacatctcattcaataaaatacaatgagtgttctgatgagctgagcagaagaggttaactttatggacagaaaagggctgaagagagcagaaatggggaacaaaaagtggattggttagcatcaggttactttcggttactttccttggaaggattaaagcagaggggacttccttgtcatgtcggctaaaactggcctgtttggggatttggctgtaatctctcctggtttctcagaaggtcag

SEQ ID NO: 82444 - DNA, 628 bp, Homo sapiens
cctcccccaaagcaagcaaagaggggtccaagagaacctcgggtttagggagatccttgcaaggagagacaaactctcattttatggacagaagcttgttgagtggtgaaaacatttcagcccgcatagtgctactaccagagttgcraatgccaaaggtcttgggagagcttgccatgtgtcccctggagtctgggggcatgatgactggcacctggctctcgagagctgtgaaagcaggagccaggtggagccaggaggcagggtaagaagagagagggcagctgggtagcaagatgccatttgaaagtgtcaaaaggcaaattacaacacgtttagtttaaagatctacttggcttttattagtgaatctagaagtgggcaacatctcattcaataaaatacaatgagtgttctgatgagctgagcagaagaggttaactttatggacagaaaagggctgaagagagcagaaatggggaacaaaaagtggattggttagcatcaggttactttcggttactttccttggaaggattaaagcagaggggacttccttgtcatgtcggctaaaactggcctgtttggggatttggctgtaatctctcctggtttctcagaaggtcag

SEQ ID NO: 82445 - DNA, 700 bp, Homo sapiens
agatgctttcttcgctcctgggatggtagcaaaaaaaacctcaaatcttcaaagtgaataccagcattgatctttaagttcagtgatggaattactctcagaggcttccataactaaattgaaatctccccaattcaaaatttcaaaatagagttttcttcttaccttctgtttttgtctgaatgcagttccrtctctctctctgcaccataacaaatctcggaattggcttccccaatttccaccaatcacccagcactggaaagtctagtctgtgcccccaccggaccacagtgaccaccaccgtgtggctaagccaacctctgctccacgtgggggcccctctggccacgccaggacctttcatctcaaccacccaccaaagcaagtgtcaacatctccttacagatttgcatcagaaatgttaagaaatgttactacaggcagcagaagagccactccttacctcctgttaaaacattataaaaaggaaatgtgtgaggaagaagagcataggtttgtgtactaaatctcagaagagcagcttttcaaaactctgtcaggcctgggagacaaaggaaatatatcttgacctcacagagagcattcaggtggaaaaaagtaatttttttaacttgaaatttacatttaactaaaatgaatttgtctcacaatgaagaaagactaaataaatcatggt

SEQ ID NO: 82446 - DNA, 636 bp, Homo sapiens
cattgtaaatacttaaacaatggaatacttaaaagattctgtagagatgggaatttgtatgtgtttgttgtgtatgggagaaatgaagaccaagaaagatttggtttctctaaacatattataaaatactaactggttcttgatgcataatcaaccaaaaatattcaaatgtggccatagagatttcttggtaactccttcctagtgctggataggatgtagggctatgaagaaggacactgcacatctctctgcatgaaatgggagaatctctcrtggggtcagaacagaaaagcttccttctggggaactaggtcctttgcacccggtggacctgacaaattgacaccaccgtttaatggaataggctggactctgcaggctacaatcctggaaacaaataatttttgcaaataggcttagccagttctccctgtgctgtgtatgaaagataccttggatggattccgaagattttgggttcctttcgggtattagaacagtctcattatcagatatcataacattaataaaatctaaaaaaactcctgtttttcattcacttttctctacaccaaagagaggaaaatgtttagtctttcctagaatttaccttgctgcttctcttttttcatt

SEQ ID NO: 82447 - DNA, 648 bp, Homo sapiens
ctctaacaatcctttactggttccttcataccttctgaaggtatgaaaattctgacaaatgagaagcccatacgtatttttgatccactgcatgaggaaggtactttcttctttgctctcctccatgccctcatccaaattgtccctggacttcagattttcctgccctaatcttgatgtcacttcttcttcccttccacaatctgtctgcagtgttccaactctccaactactgacagttaaatcatcaccctagtagatgcctcagctagttctgtggctggttctcmtaggaaacaaagcataccatgttcttttacattaaaatataaccccagcttctctgatatctgcctttaattctttcattaaagaggcagtagagattgcagattctgtaaccagaatatctatgttcaactggatctaccaattactacctgtttgaccttgaacaaattacttaatttcactgtgatttggctttcttatctgtaaaatgtggcaatgtaatcatgcctagctcatagtatttgacaagaattaaattgtttaattcatgtgcgctactttacaagagtgtctgcacacactcagccctgctcctttctattgcattaaccttgtttaacaacttgcatcagactt

SEQ ID NO: 82448 - DNA, 865 bp, Homo sapiens
tgctacttcaagtataatttagaattttaattttgttattatcataaaatcatcttagttgttacagtttcttcctcctaaaatacaatttttatgaacttgaatccatagtaagtacctatgtaattgctrtcttctttctagttaacctgatactctctggagttacagcacaatgcacatgacatccataaacttcagtgttgcaacaatagatggagaaagtgagctttaattcagttgcagcagaatggtacagaaaggtggaatgatttgcttgtaattttataatacaggaaatcattctataagcacattttcccattaacacttaaaaaaaactatgtggttatttatagtaagtgtttaacagaatcctgctgtgagaacatgaaccattgatattatttatattaattctggctattcatgctgtcttataattagcttctacatggttttaagattgttttcaataattgaacgggaagttggagttgatggagtcttgtatgataatcaaaaggttttatctataatcaaaattataggataatgacatcattgagatagtgataaatatatcacaattaaaaatacataatgataattctcattagaaaacaaatgtgcccactaagatttttgagagattactttatctccattaaaataacctggcatttgagtaggaatgattttgtttattgtggggatttaaatgataaaatagtcacttgggtttttgttatttacaatgttaataactgttaacagtataaacaatttaataaatctcagaatccacaatgaattgaatgatcaattacgtctattatcacttaatcaagtctggttttttgaa

SEQ ID NO: 82449 - DNA, 865 bp, Homo sapiens
tgctacttcaagtataatttagaattttaattttgttattatcataaaatcatcttagttgttacagtttcttcctcctaaaatacaatttttatgaacttgaatccatagtaagtacctatgtaattgctatcttctttctagttaacctgatactctctggagttacagcacaatgcacatgacatccataaacttcagtgttgcaacaatagatggagaaagtgagctttaattcagttgcagcagaatggtacagaaaggtggaatgatttgcttgtaattttataatacaggaaatcattctataagcacattttcccattaacacttaaaaaaaactatgtggttatttatagtaagtgtttaacagaatcmtgctgtgagaacatgaaccattgatattatttatattaattctggctattcatgctgtcttataattagcttctacatggttttaagattgttttcaataattgaacgggaagttggagttgatggagtcttgtatgataatcaaaaggttttatctataatcaaaattataggataatgacatcattgagatagtgataaatatatcacaattaaaaatacataatgataattctcattagaaaacaaatgtgcccactaagatttttgagagattactttatctccattaaaataacctggcatttgagtaggaatgattttgtttattgtggggatttaaatgataaaatagtcacttgggtttttgttatttacaatgttaataactgttaacagtataaacaatttaataaatctcagaatccacaatgaattgaatgatcaattacgtctattatcacttaatcaagtctggttttttgaa

SEQ ID NO: 82450 - DNA, 758 bp, Homo sapiens
aatattgggcccacagacctccatgacaacagaaggatggtgctgaattgggccagtttcttttaggaagagtaaaaacaacaggcaagttaatttctcactcatcctgccacatatagcagaactttagcttggaaaaatgaaaaacttgcctatggatatatgactcaagtcaggatttgaattcaggactttctatctctaaagtctgaatgctttctattacacaatgaaagactgtttaaaaataaagtaggagtcaattttttttgccaaaaagattaaaaattttaattgagtctatcaattttgttgattgaatctcccaacatttttcacctacgaagagagaaatccaaatggtcacttgcgtaaacatgaagcagattgtcattgtttaattgtgttctatttaagttgccccaatcttccacttgacaascaaattacaatgtattgtacaaatattttcataatttttagcccactgattatgtgccaaatggctgtgatctaaaaattgtttaaagtatatgtgtatatatattatagtttatatatatacattcacacacacatagacacacacatttcctttggttaatttactttttcaagtagccatcttccattaaaattatcaacagccagaatataatctacatttctagaaataaaaatggtatatatttaaggtatagaacatgatattttgacatatgtatacattgtgaaatagttacaacagtaaagctaat

SEQ ID NO: 82451 - DNA, 547 bp, Homo sapiens
tgattgccaggttaaaaatgattcacactatttctaaaacaaaatatgccattagtaaatgtttagtcaaaaatacagagtgtatgaaatgaattttctaaatgagcatgcagtccaggtgtaagaatcattctaagcagaatgtatggcagattgtatcttttaattatgactacacctctaccttccatcctcatgctctttggcattataatcttactattttctcactaggtgttgggatctgtctttccactctcttgaatgtgtgcaagctgtgagagtgctttaaccaaaataatatagtagaagtgtcaggtccaaaaatagcccttaactaacctgcagtttctgctgcttacctcttgaaattcagyagccctgcagtgagagcccatttcacatgaaaggttatatgtggattccacagtaagtagcatctattgaactttctttcaatcaagaacctgccatgtgaatgagccaccttggaattttcggttgaggtgctataacagaaatctaaacaatttgacattgactttga

SEQ ID NO: 82452 - DNA, 560 bp, Homo sapiens
tagaatatgcatacacacattatttattttaaaagtattttgctttttccaaacagtgggaaacattcaaagtgtgtttctggggtaatagcagctttttagaaagtttttaagaacctgagaactaaagagatgatgttttarcatttattcactttgtccctcaaagcacggcagaattatttagagctgcttgtttgcctctttttagacatctcgttaggattcagactgtttcttgcacaggggagatctcagcctgaggaaaacatgatgtagaatgcattgggaagattccagtaagatcaaggggagggggcttggagatggaaaatgggccaggactttccgctgtgccccacttctgccttgcaaccctgtcgtcaacacggggatggtgaccactataagcacagctgcatttgcttcaagacataaaatgcagacttccctgcttggtgtgaaggtgccacaggcaagcagactgacacaggctctggagggaaatcgtgcatcctgtctgttgcacgcgaggatgcgatggccacagtgatgctcca

SEQ ID NO: 82453 - DNA, 2195 bp, Homo sapiens
cattgcagctggcaaggtttggtaggtacgtacctctcatttggtcagtgattaccaatggcagtctacaaaaatggagcttccccaccttcatgctgggaggcactcatagattccctcagtccctggatctgctggatcccaggcctgttagctcttgctgttagcagtcccaacatgtatgtcaatgatctgaactgtataatttcctctggctaccatgaaattttaaaaaatgtttaaaaggcttggaagcactgtagcagccaaatgaccagatgtatttttggcctttattgaaataagccrtagttatatagagaaattcagagggtgcttaggataatgataaatgtattttaaagaactagtctcttgtaaaagtgcaaattgtgcatgcctgttgaagaggttgatatgaatagcaaaactagaacattccataataagtcagaccaatcctagaagtgcctcatggctacattttctattaatgtagcattagtttctaaggaaactttgtaaatatgctgttatctaagcatgttgtcaatattgaccatgaatttagaaggaatgttttattttattaaaatcttactcaaatatctagaaaggaaaacatgatgtacacacaaaggaagtgttcaaaagtgaggagtgttgatctttggcagttttcacactacatttggccctgggagctgtatcccaggacttaagagtcaacttggcttagaaggcagtggtgccaggggcagggccaaagtcaatggccgggagaacaggctggcagagtcaacctgcatgtgtggtaggcgctaagtgctttaatgtgtgaaatctttgttcttgcaataaccctggcaggcacatagtagcctaatcctgattttcttagcgggaatggtgtcaggactgaacagattccaaaatcaagttctgtaatcaaagtgcagaataaggaaaatccaaataacctgccccagacaaagcattcctgtgtttatgaactcagctttgagcgtggaaactcatggctcttgaggtgggaggaaggagaactaacaattatggctccatttttgtcaatgaatctggatggcatcttttcagtggcctctttctcctatctggaccaggtttggatttacccaaagtccagtatttaaagtataaatatctaggaaaaattctcaactggtttaatacctaatattttatgcatctctaatttctcaaactccttttcccaaataagatgggcatcctgggggatgaggtggaaggatggacaatgctctctgaaactcctcttagaagcttccccttggagactcagtgtaggctcaagtaagggaatctatcaagctgcctggtattgaaaatgacaagtatttgtggtactcagtggggattgtagaagggaggggcaccatcttagaaggaatggacttgccacaaggaagctggtgctgtctcttctgcatcagtagagactgtctgggattggtggaaattcatttacatggacaaaattggtgtcttgcagattttgaaggatcctgaatctattgtcatttatgcaaagtggttaacttagaggtagccctaggtggccataattggatgctcttcagtaaggatggtatggagattagagatgaccacacattctttgctactcttccctttgaaagatggcatatattgttcctcctcttgaatctgggctgaactcatggcttccttgaccaatggaatgcagtggaagtgatgtcttgggacagctaaaaccaggtgacaagagactatgtggcctccatttccattctatgtggccattctatgtggccaccaatgatggtgaacattggggtgttcaccagcaacatcctcccttttgggaggctccctcttggaatgtagtcagcatgccttgagaaagctcaagaaatccaatgtggaggctcaaatggaatggaactgagtttcctgtctgatggtcacctgatgagcaccttgacatccagcacagctgagcccttggataactgcagctcagccagcatcttattgcactgcatgggagactgcaagtgaagccccccacaagctgaatgctttctggatttctcccttccagaggctgtagtcctgcctctgttcccagaggaccttggtctttcactgca

SEQ ID NO: 82454 - DNA, 2195 bp, Homo sapiens
cattgcagctggcaaggtttggtaggtacgtacctctcatttggtcagtgattaccaatggcagtctacaaaaatggagcttccccaccttcatgctgggaggcactcatagattccctcagtccctggatctgctggatcccaggcctgttagctcttgctgttagcagtcccaacatgtatgtcaatgatctgaactgtataatttcctctggctaccatgaaattttaaaaaatgtttaaaaggcttggaagcactgtagcagccaaatgaccagatgtatttttggcctttattgaaataagccatagttatatagagaaattcagagggtgcttaggataatgataaatgtattttaaagaactagtctcttgtaaaagtgcaaattgtgcatgcctgttgaagaggttgatatgaatagcaaaactagaacattccataataagtcagaccaatcctagaagtgcctcatggctacattttctattaatgtagcattagtttctaaggaaactttgtaaatatgctgttatctaagcatgttgtcaatattgaccatgaatttagaaggaatgttttattttattaaaatcttactcaaatatctagaaaggaaaacatgatgtacacacaaaggaagtgttcaaaagtgaggagtgttgatctttggcagttttcacactacatttggccctgggagctgtatcccaggacttaagagtcaacttggcttagaaggcagtggtgccaggggcagggccaaagtcaatggccgggagaacaggctggcagagtcaacctgcatgtgtggtaggcgctaagtgctttaatgtgtgaaatctttgttcttgcaataaccctggcaggcacatagtagcctaatcctgattttcttagcgggaatggtgtcaggactgaacagattccaaaatcaagttctgtaatcaaagtgcagaataaggaaaatccaaataacctgccccagacaaagcattcctgtgtttatgaactcagctttgagcgtggaaactcatggctcttgaggtgggaggaaggagaactaacaattatggctccatttttgtcaatgaatctggatggcatcttttcagtggcctctttctcctatctggaccaggtttggatttacccaaagtccagtatttaaagtataartatctaggaaaaattctcaactggtttaatacctaatattttatgcatctctaatttctcaaactccttttcccaaataagatgggcatcctgggggatgaggtggaaggatggacaatgctctctgaaactcctcttagaagcttccccttggagactcagtgtaggctcaagtaagggaatctatcaagctgcctggtattgaaaatgacaagtatttgtggtactcagtggggattgtagaagggaggggcaccatcttagaaggaatggacttgccacaaggaagctggtgctgtctcttctgcatcagtagagactgtctgggattggtggaaattcatttacatggacaaaattggtgtcttgcagattttgaaggatcctgaatctattgtcatttatgcaaagtggttaacttagaggtagccctaggtggccataattggatgctcttcagtaaggatggtatggagattagagatgaccacacattctttgctactcttccctttgaaagatggcatatattgttcctcctcttgaatctgggctgaactcatggcttccttgaccaatggaatgcagtggaagtgatgtcttgggacagctaaaaccaggtgacaagagactatgtggcctccatttccattctatgtggccattctatgtggccaccaatgatggtgaacattggggtgttcaccagcaacatcctcccttttgggaggctccctcttggaatgtagtcagcatgccttgagaaagctcaagaaatccaatgtggaggctcaaatggaatggaactgagtttcctgtctgatggtcacctgatgagcaccttgacatccagcacagctgagcccttggataactgcagctcagccagcatcttattgcactgcatgggagactgcaagtgaagccccccacaagctgaatgctttctggatttctcccttccagaggctgtagtcctgcctctgttcccagaggaccttggtctttcactgca

SEQ ID NO: 82455 - DNA, 564 bp, Homo sapiens
ccatggtgtccaggctgtccacacagagaggagactacaggcctgttgctgagccactctcagcccctttggccccactcctgtgcttttcagtgctcaaagtccagagggagttaagatgacagggcctggtatgtcagcactgccctaagctcatgcacacctggccaggttttgacagcactctgacttggccacaactttgctctgccccagagcaggcactgggagtggggagaggccagggagagggagcaggcactttcaagcctgcagaggcaggggacttcctgggcctctgagaggacagggatagctgggtctggaactgcagctgggtggctgtagctgcacccaggagcatggggccccaccccgccaactcwgtagttgagggggttcccacctagtcctagacctgattgcacctcccctcctgcagctggtgtccacacagcagctgctccagacgggctgctgctgccatcactaggagaactgattatataaatttcagtcaaaggtttggaaaatatgagatgagatatcccagctcagtcagga

SEQ ID NO: 82456 - DNA, 391 bp, Homo sapiens
acatagtgagactccatctcaaaaaaatgaatgaataataaataaataataaataaataataaataaataaatggtaattgttaactgggaaaacagttttattagaaacgtagagggtagaagttctactatagtaagttgaggagttaatggaagatcagaaaaatgactaacatttgcagactctagaaacttggctttaaaacaaatttatattagatggttagakgagaatggagacatgggttgtttttgttttgtttatggatggtaatagagcacattttaggctggggaaaattaatctagtggtttggaagacattaacagagcaataaatgatctgttttccagaacataagagccaaaaggaaaaagaatttctatttg

SEQ ID NO: 82457 - DNA, 743 bp, Homo sapiens
tggacgttccaaaccttccctcatcttcctgtctttttctgagctctccaaactgttccaacttctgccccatacccagttccaaagtcacttccacattttcagatatctttatagcaatgccccactctcctggtaccaattttctgtgttagtccattttcacactgctataaagaactacttcagactgggcaacttatgaaggaaagtgctttaattgacttacaattccacaggtttaataggaagcatgactagggggcctcaggaaacttacactcacggcagaagatataagggaatcaagcatctcttaccatggcacagcaggagagagagagggagagaagaaggggaagtgccatacattttcaaacaatcagatcttgtgagaactcattcactatcacaagaacagcaagggggaagcttgtttcccagaatgtcttgccagatttttgccaaggaaaactagtgtagactgctctgagctgagtgtcctcttggaaagggaatgtaatgagaaaaaggcaccaragacatgctacaaagctcctttttgtaatatggatatccaggagacacttagggttcccagcctgttgcttgaaacatatatggcagacagcatccatgaacttgtgagtgatttttcgtaagcaacatatgaccttagatgaccttgactttccctatgaggcatggccacctcaccactctggggagtgcccaacatgtaa

SEQ ID NO: 82458 - DNA, 743 bp, Homo sapiens
tggacgttccaaaccttccctcatcttcctgtctttttctgagctctccaaactgttccaacttctgccccatacccagttccaaagtcacttccacattttcagatatctttatagcaatgccccactctcctggtaccaattttctgtgttagtccattttcacactgctataaagaactacttcagactgggcaacttatgaaggaaagtgctttaattgacttacaattccacaggtttaataggaagcatgactagggggcctcaggaaacttacactcacggcagaagatataagggaatcaagcatctcttaccatggcacagcaggagagagagagggagagaagaaggggaagtgccatacattttcaaacaatcagatcttgtgagaactcattcactatcacaagaacagcaagggggaagcttgtttcccagaatgtcttgccagatttttgccaaggaaaactagtgtagactgctctgagctgagtgtcctcttggaaagggaatgtaatgagaaaaaggcaccaaagacatgcyacaaagctcctttttgtaatatggatatccaggagacacttagggttcccagcctgttgcttgaaacatatatggcagacagcatccatgaacttgtgagtgatttttcgtaagcaacatatgaccttagatgaccttgactttccctatgaggcatggccacctcaccactctggggagtgcccaacatgtaa

SEQ ID NO: 82459 - DNA, 746 bp, Homo sapiens
gtagctcagccctgactcctggtttgtaaacacacagttgtagagtcccagtttctgagaaggtggaggccatgtaagagctgcttcattttatagctttatcccaccctttctgaccctgaccttccatacatcattcttgacttctcccaccccacatttctgccttctgcatttgatctatggactataagtagatataatgaaatgccaagtttctttaaaaagaatcccccctcccctgctcactgccaacaccaaatattggacctggggatcrtccaataatagacaataatgctctgctcacttgtgttgggctggagcatgtcacctgcataaagtcttgaagacctggagtcgctgtgtgctatgtggtttcactaaccatttctcttaacctgtatttattttcattttgctcacaggaagccacaaataatttgtttaaaggtaacatgaaaagctgagcaaagaggctcccttcccttccttagctcctgcttcagcaaagagacaaatctggagtaagaaggatgttggtcttggtcctttctggcttgcaagtgtgaccccataaggttgcatggaagagctctgttcctttacttgtggggaaggtgagctccagggtcccatcagcctagactatctgctcctttctaacccagggactttaacctccttcgttaatcaaagggttatgaggtcatctcacagttcccttatcagggcttccaccttcc

SEQ ID NO: 82460 - DNA, 645 bp, Homo sapiens
tgcaaacatcaacaccatgctaggttaagcacagacacagtccccatttctccccccgagcttgcttcattcatgtaattattcattcagcaaacgcttacttctggcccactatgtgccagagatgtgactggaacaaaatggtgatcaagatacaggcccttccctgaaggagctcctgttataaggcatgcatgggtctgtacatgagtggggtgcaaataattgaacaggtaattggcccaatgtagaggctgtggatgcaccttggaattcagggaagctttgcagagacagtggctaccaagctgagtcatgaacagctagccaggtaaaagaatgattggagtgctatggggggaattggaggcattccaggccacaaggacagcaggcacagagttctggaggtgaatgaggatgcagtacattggtgggactcatgtcatcaagcaacgctgattaagagagagtgtgagaggcaggtggcaagagagcaggatggggagatgcttggggttcaratcacttggggcctcgtgcgccatgttaaccagcttggcttcatctttgagtcactcatgggcctttgacctgtgggtcaagactgcattttagaaacagcccatcaacagcacagagaat

SEQ ID NO: 82461 - DNA, 713 bp, Homo sapiens
gggatccttttaaacccatatcagggcacaaacccacagatggaattggttgaggcctctcttgaagcccttttcctctcctccaggtttaggatgctgttcgcgatggaaaggaagtccctggccaacactggtgcctgctctggcccttttataggagcatctcctcctgccttcaggtcttccagagcccagcytctgctcgctggtcctacatcttttctttttcttcttctttttttttttttttttttttttgagacagagtctcactctgtcacccaggctggagtgcagtggcgtgatctcggctcactgcaacctcagcctcccaggttcaagcaattctcctgcctcagtctcccaagtagctgggattaccggcatctgccaccacacccagctaatttttgtgtttttggtagagacagggtttcaccatgttggccaggctggtctcaaactcctgaacgcaagtgatctgcctgcctcagcctcccaaagtgctgggattacaggtgtgatggtcccacctcttgtcttgccactctgcccctcatcgtctctgcatcagcatcttatcactgttcagttcccaggactgttccctgctcttcacatctgtgtcttagcatgtgctgacccctcaccatgctcctccattccctcctcttgcctgctttgcccaaccaaatcctactcatcctccattt

SEQ ID NO: 82462 - DNA, 1448 bp, Homo sapiens
ccctgaaaacactgtttaaaaggctgtaatttttttttccagcctttgttcagggatgcaaagaatctgaatgggaagaggtggggaaaaggcactctgggtggagagactggtgcaggcagaagctgcatagggagaaattgccagtgtggggcaaaatgagagagctggtcctggaagcaccggggtcggaggaggcaccatgccaggctctttagttgcatctttgtggccaccctggaggctttggggtcccataacatgtaatcatgggaatagtgatttcctcctggtcacaggtaagtcagaggctggtggggagcatgcttagggcttcccacctcccagccgggacatcccaggccccaggctcttggtgccagtgaaaaataggatgacaaaaatgccagagtggtaagaaaatggactttgatgaacagggttccagtcctgacctcaccactttctagccacccatgtctgactcagtttccctacctgcacaaggggaaaaataagagaaccagcctaccttacagggccaggagaaggatttgataaattcatacatggaaataaagaaaactgcagcgaaaactcaagtgtgagatcaagaacatttactggctgggtgacctgggacaattcctgaaactttctggtcctcagtctgaaaaatggggatcctaayggtgcagacctcagggctgcccgtttatcaaaggttaaggaagtgccggttatggggccaggcaccagctagaaaatagaaaggcaaacgtgattcacataacaggcaagctctctgtcctcatggacctgacattctagcagcaggtatgggttggtggtggtggtattattaacaacacaacaaagcaaagacatattttaatttatctgcttatttatttatttatttagtttagaggcaggatctcgctctgttgtccagaccagagtgcagtggcgtgatcaggctcactgcatctccttgggttcaaacgatcctcccacctcagcctcccaagtaactgaggctgcaggaatgcccaccatgcttggctaatttctaaacttttttatgtagccactgggtctcgcgatgttgcccaggctgtcctcgaatgcctggactcaagccatccacccacctgagcctcttaaagtgccaggattatagacgtgagccaccacacacagcccaaaacatattttaaaatatgcaataagaggtatggaggaaaataaatcaagactgtgagctgagggatgcccagaggttagttcacttttcaatagttagggaagacctcattgagaaagtgacattagaacaaagaccttcgaagagttgacagcatcaagccagggtcaagccaacgagggctgaatcctgccatgcccatttgttccatcgctgatggctgccttctaaaaaggacaca

SEQ ID NO: 82463 - DNA, 1448 bp, Homo sapiens
ccctgaaaacactgtttaaaaggctgtaatttttttttccagcctttgttcagggatgcaaagaatctgaatgggaagaggtggggaaaaggcactctgggtggagagactggtgcaggcagaagctgcatagggagaaattgccagtgtggggcaaaatgagagagctggtcctggaagcaccggggtcggaggaggcaccatgccaggctctttagttgcatctttgtggccaccctggaggctttggggtcccataacatgtaatcatgggaatagtgatttcctcctggtcacaggtaagtcagaggctggtggggagcatgcttagggcttcccacctcccagccgggacatcccaggccccaggctcttggtgccagtgaaaaataggatgacaaaaatgccagagtggtaagaaaatggactttgatgaacagggttccagtcctgacctcaccactttctagccacccatgtctgactcagtttccctacctgcacaaggggaaaaataagagaaccagcctaccttacagggccaggagaaggatttgataaattcatacatggaaataaagaaaactgcagcgaaaactcaagtgtgagatcaagaacatttactggctgggtgacctgggacaattcctgaaactttctggtcctcagtctgaaaaatggggatcctaacggtgcagacctcagggctgcccgtttatcaaaggttaaggaagtgccggttatggggccaggcaccagctagaaaatagaaaggcaaacgtgattcacataacaggcaagctctctgtcctcatggacctgacattctagcagcaggtatgggttggtggtggtggtattattaacaacacaacaaagcaaagacatattttratttatctgcttatttatttatttatttagtttagaggcaggatctcgctctgttgtccagaccagagtgcagtggcgtgatcaggctcactgcatctccttgggttcaaacgatcctcccacctcagcctcccaagtaactgaggctgcaggaatgcccaccatgcttggctaatttctaaacttttttatgtagccactgggtctcgcgatgttgcccaggctgtcctcgaatgcctggactcaagccatccacccacctgagcctcttaaagtgccaggattatagacgtgagccaccacacacagcccaaaacatattttaaaatatgcaataagaggtatggaggaaaataaatcaagactgtgagctgagggatgcccagaggttagttcacttttcaatagttagggaagacctcattgagaaagtgacattagaacaaagaccttcgaagagttgacagcatcaagccagggtcaagccaacgagggctgaatcctgccatgcccatttgttccatcgctgatggctgccttctaaaaaggacaca

SEQ ID NO: 82464 - DNA, 1509 bp, Homo sapiens
ttggggacacccagagttggcctgcggtcatctagaagggcaaactaaagatttcggaacccaggagacccaggccaaggcaggcccatcagaaggatgaagcagctcctggacgcgtcagagcagggcagaagtgtctgtcctgaatccaagcaaaagaatagaacagcaattgttggtggtgatttctccttgctctgcaaagccaaagtaccgggtgtagttattatataaatgaagaacgtttgttgttacttaaaatatctgtatatatctggagccggtttcggtattcatacattcccagaactggggagggcacattctatccaggaatattctatgaaaccagctacgggaaaattcagtggagattggggaattatggtgctgtatttatgttttttctctcattcctttactttccataaaagcactttcatttttcctggcaaccactgtggatacagagtgaactgtgtttctccacaattcctgtgtttaagccctagctctcaatgtcatgggatctggaggtggggcctgcaggaggtaaccagtgttagatgaggtcgtgagagcgagaactatgcgatgtgattgatcggtgtccttataagaagagacccagggagcttccatattctctgccatgtaaggacacagcctgcaggaggccacctctgagccaggaggaggccctctgtggaactcgccctgccagcaccctggtctccgactcccagcttccagagccctgggacatgcgcttggctgttgaagcttcccattccgtggtgtttttgttacagcagcgtgatcagactaagacagctctgctctgatttggtgactccataattttttattaaaccaaaaatgtttaaccatttcaatgtactttacaagttgcatccacctttttcaacatgggcttttgtataatggataaaaatatctttctggtaaaaatagaaaacgacttaaatattttaatttgaaattttcaatgtaaactaaaaatatatataagccagmataaaatgaaaggacttattaatggattcagacaaaatgaaaaaaatcagagttagcaaagaatctgaagcagtcaaaagaatcattgatttatgggaggaaaacctcctgaatcccaagacgtgccgtgaaacaattaaacctaagcatctacctgcagtggccagaaattctgccctgtggagtgattgagatttgccaggataggtctttcctgatgagtaaactccaattgatcagtaagaacccggttgtggaagttcagcgaccacagtatgcagctggtccgcttctattacatcgttgttaagcactcagtaaatgccttttcaagaatcattctgtctttaattagcacacactggctgtcctattaaaccgaaattaagttcttatttgaagcagttaatttggagacttaaccaaatgtggacatctgcaaggtagtaatttcagttccagccactgtca

SEQ ID NO: 82465 - DNA, 1509 bp, Homo sapiens
ttggggacacccagagttggcctgcggtcatctagaagggcaaactaaagatttcggaacccaggagacccaggccaaggcaggcccatcagaaggatgaagcagctcctggacgcgtcagagcagggcagaagtgtctgtcctgaatccaagcaaaagaatagaacagcaattgttggtggtgatttctccttgctctgcaaagccaaagtaccgggtgtagttattatataaatgaagaacgtttgttgttacttaaaatatctgtatatatctggagccggtttcggtattcatacattcccagaactggggagggcacattctatccaggaatattctatgaaaccagctacgggaaaattcagtggagattggggaattatggtgctgtatttatgttttttctctcattcctttactttccataaaagcactttcatttttcctggcaaccactgtggatacagagtgaactgtgtttctccacaattcctgtgtttaagccctagctctcaatgtcatgggatctggaggtggggcctgcaggaggtaaccagtgttagatgaggtcgtgagagcgagaactatgcgatgtgattgatcggtgtccttataagaagagacccagggagcttccatattctctgccatgtaaggacacagcctgcaggaggccacctctgagccaggaggaggccctctgtggaactcgccctgccagcaccctggtctccgactcccagcttccagagccctgggacatgcgcttggctgttgaagcttcccattccgtggtgtttttgttacagcagcgtgatcagactaagacagctctgctctgatttggtgactccataattttttattaaaccaaaaatgtttaaccatttcaatgtactttacaagttgcatccacctttttcaacatgggcttttgtataatggataaaaatatctttctggtaaaaatagaaaacgacttaaatattttaatttgaaattttcaatgtaaactaaaaatatatataagccagcataaaatgaaaggacttattaatggattcagacaaaatgaaaaaaatcagagttagcaaagaatctgaagcagtcaaaagaatcattgatttatgggaggaaaacctcctgaatcccaagacgtgccgtgaaacaattaaacctaagcatctacctgcagtggccagaaattctgccctgtggagtgattgagatttgccaggataggtctttcctgatgagtaaactccaattgatcagtaagaacccggttgtggaagttcagcgaccacagtatgcagctggtccgcttctattacatcgttgttaarcactcagtaaatgccttttcaagaatcattctgtctttaattagcacacactggctgtcctattaaaccgaaattaagttcttatttgaagcagttaatttggagacttaaccaaatgtggacatctgcaaggtagtaatttcagttccagccactgtca

SEQ ID NO: 82466 - DNA, 1746 bp, Homo sapiens
cagttcaagcgctacaaattgcaaagaacattccactcctaagcctttctgatgttgctaactcgttggttgtggttgctgtgtgccctacaaaagtcgatttggccaaggttcctgccactgcagtggttatgtgtagcaaaaagcagcggtggggaggcctcaagttttgcctgatatccaggggcacaaaggagatggctgaggaagccatcggcattcagcagccttctgacctgcccgacgtctttgaaaggacgacctgctgacactggagactctgtacttgttatttaattaagagagaaaggatttcagtggagagaaggctttgagcttccttcgtaatttttgctgaccaatccaattatgtgggtaattgcaagtatattttcaaaagcatgggaatctgagagtcgtcagctgcaaaaaaaatcaagatctaatcaagtgcactgctgttgtgaaaaatattaaagaggagaatattaaaaataacaacagagtttcagtgttaaaaatgtgggaagttgtcacacattctccattctcatcacctgttcctagcatttgatttctgcctgcaggtctctgctgcacagtcatgagatttctgcttactccccgttggtggtggaagggtgtaggtggctcttttgcgactgtagtctgcaactggttctgcatgcattagaatccttaccacacaaagaggtggccacaataacaaagccattcctctctgcgaaggtgaatattaaaatagtttgtttaggtttcagttctacaatacgcaagggctgtatctttctgaatacatttatttcaaggtacttaaaaactgacttttatgagattatttaggcagtgattatttttgttgagaaatgtgtcctttatccctctcattcatccactgctaagatatttctgtttgtcagaatgccaccgtttctgataaatgactgaagactgactgctacactttattaaaaagtaataacaatttttgtatgcacccttcacattgtaagggggggacatgaatcaaaggacactgcctgtctgggcctgataaatgggccgtttaccagctgaggagttatttaggactggctattaatttaaatcacatttatcttccctgaatgggggaggtggctgtgatacggctacgaatgaccaatggagcagctaagtgcacattatttattaccaccgcctctgcagggctgcacaatatgttaaaaaaaaraaacagtgccaattaccgcagttaatctcgtcagggcaataacaaatttctttccaacacaaggcaatttttattcttgcactttttctcctctacatgcagactttgcttataattctccatcattaaactcaatgttctcattcttttctgagtgctcacgggaaatttttccacttctctgcctcacctttgtctggagaacagcacattcttaatacacaacccacaatgaagtgtgttcttttgaacatttaatgaacatttgttggtgagatggtgagatgatgggtattgcaaatcagattggccatattttattattaagtgtttcctcattcataataatgctttttgcagagctttccattcacctaattcttaatatgtgaagtagcaattgggaataactaatcattagcattgtttggtcaattaacttcaatttgatggatctaccacagaagatgaaaatatttctaataaaatgc

SEQ ID NO: 82467 - DNA, 1187 bp, Homo sapiens
taaaaataaatatttttttaaaaaagaagagtcttgtataaagttatgtatttcaatttaattatcaaaagctgtttagcataatagcagaatactttacaggtaaaatatatgccatagacatctgatattattctgtgaaaaattggatgattaccaatattcttaaaataatttccatgacttgaagtgaaaacctaaacaatggattctgttcttgagctgaaatacagtatatgctacttcaggaatagggaagagttgactagaattagaaattagtgagcataggtaattctaaaaaatctctggattaaaaaatatcatattatttattatgtaggtatgattttttttttaatgtcaagtaagcaaaaggaaaaaagatccatacgaagatgcaagcttcagatttggatcagagagtaacagtaatgatggataacatgcatagtagactctgctttctgggagaaaaaatgttttgatgacataccaatagttgttgaacttcattttcacatttttcttgtttgtgggtaaaacccattgaagtcttgaatatatctggaatttgtgtatggaataatcttagtggagcctaattccatctttcacaaaactaaattcagcaaatagcaacatgccttagaaattgaagggatagtcaattccaaatgtgttccctgggtagtcaccaaaaggacacattttttggcctgttttttttctttgatgattggttcatttctttaaatatatagcaaaccaaactgattttgtttagagttaatctcattattcaaatcattcattgargacaaatctgtacaatgcaaattaaacagtaatgtgaaacttaagataaacaatacttacactgacagatatatacatttttaaatttttgaacaatctaaaaaatgtaattattgaatagcaataatttgtgtgtaaaacatgctgagagagttaattttatgaagtaataaaaacttttattttatttttatttattgtgggaatgctgatgtaatatttttttggcagggtagaaaagctatagacttattttcctggaacatattacaaaaacttagaaataatttttttgatcgaatgagtgaaactcagggttcaaggcagtttaaagatttgtggtgggtatattttatataataaataaa

SEQ ID NO: 82468 - DNA, 714 bp, Homo sapiens
taggactcaccccgatatcccagcataatttccccttctcaaggcccttaatttaatcacatctgmaaagtccctttccctacagagtaacatattcacaggttctagtaattaggacatagatgtctttgggggaccattattctgcttaccgcaggtttgtttaaggagggaaatacaatgacaaatttgatgcttacttagctgctggtgttatagacatataagccatctaaatttaaacatacagttgtttagaaagcccattagaacactgtaaagcacaacatataaatcaattttatatacatctcaaattactaatggaattatacactatgtactcaatatcgatggattgtctttaattttttttttctttaagagacagggtcttgctctgtcacccaggctggagtgcagtggcgcaatcatagctcaccataacctcgaactcctgggctcaagtgatcctcctgtctcagcctcccaaattgctaggtttaaagtgtgagccactaggctcagctgaaatgtctaaatatcaatggaattatacagtacatacttctttcactcaacatcacttttgtgagatccattgatttattgcaagtagctgtaaattatttattctcattgttgtagagttttctatatcttatgaaaataccacaatttattcatctatttttgtttttttttttttttttt

SEQ ID NO: 82469 - DNA, 714 bp, Homo sapiens
taggactcaccccgatatcccagcataatttccccttctcaaggcccttaatttaatcacatctgaaaagtccctttccctacagagtaacatattcacaggttctagtaattaggacatrgatgtctttgggggaccattattctgcttaccgcaggtttgtttaaggagggaaatacaatgacaaatttgatgcttacttagctgctggtgttatagacatataagccatctaaatttaaacatacagttgtttagaaagcccattagaacactgtaaagcacaacatataaatcaattttatatacatctcaaattactaatggaattatacactatgtactcaatatcgatggattgtctttaattttttttttctttaagagacagggtcttgctctgtcacccaggctggagtgcagtggcgcaatcatagctcaccataacctcgaactcctgggctcaagtgatcctcctgtctcagcctcccaaattgctaggtttaaagtgtgagccactaggctcagctgaaatgtctaaatatcaatggaattatacagtacatacttctttcactcaacatcacttttgtgagatccattgatttattgcaagtagctgtaaattatttattctcattgttgtagagttttctatatcttatgaaaataccacaatttattcatctatttttgtttttttttttttttttt

SEQ ID NO: 82470 - DNA, 646 bp, Homo sapiens
actgaaacgatgttatgcagtgcatgactgcacagaatttttaaacagggaagagattcttgtaggaaaaagaaaagagcatgtgaaattgtttgcatattcaattctctacatattattttggaagtctgggtaagaagttaaagtttatgatattaaaattggacatatcctgaaaataagtcattattttattccattgaaaatcaragtgctactttgaaatatattctatcttttatggaaataaatacaatctgtgtgaattgtatttgtgtttggaaaagaaattttttttcaaactctctgaggttccagtgtaaaaaagaaagcagcatctaagcattctcacaagttttctctattcattaaaatgaaaaactgtgacaaggatctagcctgaatcagataggtcaggaaactgtaattccaatccaaaaaaccataaacattttatattactggccatttgactaaagcttcacagcagataaagaaaaaataatgcctctagagataaaaagtaaatcaatcacacatagaatattatttatttcacattgtactgtctttgctgtgatttatctcttataatttatttcagcaaatgtgtaaaaatacattgtgaatctggttctctaaagaa

SEQ ID NO: 82471 - DNA, 2438 bp, Homo sapiens
tctcaatgtgacaggcgactgagtaggggcagagactccagcaactgagtacccctctctccctctcatgctctctctaaggctggtagagcagggagctttcattccttggtggccatgtggcccgtcaggtccaataccctgttgctacaaccaacttcattgccattaccaggtaatgagcttgacaaagtggtctttgagagcaatgccagctctaacatcaaagccagaagggtgggtgtcactgttaaaatcggaggggaaaacctggtgttcagtgtaggccaggatgcacctgaggaagtgccccaatgcctgcttcaccaactttttgatgttatcatatttggcaactctcttcagatagcatgccagttccacaactgacacactggcagtggatacaaaaggccatgttaatgagcttctcattcaacacagagatgaccttgtccatagccttggcagtgccagtaggtgcagggataatgttctggagagccccacggtcatcacccctgtctcccagaggggccatccagcattttctgggtaacagtgatggcatggaatgtggttatgagtctctccatgaggccagagttgtcatagatgaccttggcaaggggactaagcagttggtgatgccagaggcacagctgaaaatcatatggttgttttcataccaattatggttcacacatcacaaacgtaggagaattggcgaaagggtcagagataatgacccttttagttctaccttctaagtgagcccaagccttctccaagatagtaaagacaccagtgtattcaacaacatagtcagcaccagcattatccatttgattttggtggaatctcactcctggaagatggaggtgggattcttgttgatgaccaacttcctgttctcagccttgacaatgccctgaaacttgccgtgggtgaaatcacacaggaacgtggaaatcatgtaactgaggtcaatgaaagtgtcattaatggtgacaatatccactttactggagttaaaagcaaccctggtgaccggacatcaacaccactaaattcatttaccctggccttcactgtcactatcgtttctcagggatgcagttggcactgtatgagaagatgtggctatctgttgaacagggaggagaacagagctttgctcataaaacttaatattcagatctataatgagagagattattaacccccatcaggaaacactttgatttttgtggaaaggaaagacttgccagactgacttcagaattatgtaaatgctatgcatacctggtattgattgtctgccctaaagctacctggcacatctaaaaggcaagccttctttagttaattgcaaggcccgcatcagcgtttatagtgaaaataaagagattatattatattatgttatttatattatattatagaggtgaaaacaaagagattatcaatgggctggcaggaacaggcaaagagaaaagccactgatgctataaagccttacacaagtgggtttcatagcactggttctggcttgcatttccttaaatttccagtttcatagacatccccaaatgccaaaaaataggacaagtarttcagaatgagatgctaggtcacctttgcagggcattctaatgggctgcattagagctgcttcacttacaggatgagattggacagcaaagcggaggctgaggattctcctggagcatcaggggcatgaaggggaggaggtgttttccctccgcctccaggtaaagggaaagggggtgctaaggccgctcttcaaaaaactttacatattttctctagagcttgagaagctaacatgtgactcttgccaagaaaagagtcttgatgccaggggagctgtgcctggaactgatactttctggctgcacaagggttaagtctgcattggagtaagctgagcttcccctgctggtgggacaagggtttgcgaatttacctatgaactaatcctgtttgaaagaaccagccctgtctcctccctacagaagactgcctggattcctgaagggacctttaaagaataaagcctgtgggttggaccaggggaggggatctttgaggttctagttacattggactggatgaaaggtattcaaatagttatttaaaaaggagtcaaatggaatgcggtggagaaacgtaacattttattttattttttgcttgtaccatatgtaatccagaggcttttcaacaaaatcgctacaatcagaaagtagttgcgtttgttcttcgatttttacagactagtaacataattttaaggaatattaacaattaagtttactctgtatcatcatatagcaaatatcaaaaaataaaaataaggtgttcaggccgggcgcggtggctcacgcctgtaatcccagcactttgggagacgg

SEQ ID NO: 82472 - DNA, 2438 bp, Homo sapiens
tctcaatgtgacaggcgactgagtaggggcagagactccagcaactgagtacccctctctccctctcatgctctctctaaggctggtagagcagggagctttcattccttggtggccatgtggcccgtcaggtccaataccctgttgctacaaccaacttcattgccattaccaggtaatgagcttgacaaagtggtctttgagagcaatgccagctctaacatcaaagccagaagggtgggtgtcactgttaaaatcggaggggaaaacctggtgttcagtgtaggccaggatgcacctgaggaagtgccccaatgcctgcttcaccaactttttgatgttatcatatttggcaactctcttcagatagcatgccagttccacaactgacacactggcagtggatacaaaaggccatgttaatgagcttctcattcaacacagagatgaccttgtccatagccttggcagtgccagtaggtgcagggataatgttctggagagccccacggtcatcacccctgtctcccagaggggccatccagcattttctgggtaacagtgatggcatggaatgtggttatgagtctctccatgaggccagagttgtcatagatgaccttggcaaggggactaagcagttggtgatgccagaggcacagctgaaaatcatatggttgttttcataccaattatggttcacacatcacaaacgtaggagaattggcgaaagggtcagagataatgacccttttagttctaccttctaagtgagcccaagccttctccaagatagtaaagacaccagtgtattcaacaacatagtcagcaccagcattatccatttgattttggtggaatctcactcctggaagatggaggtgggattcttgttgatgaccaacttcctgttctcagccttgacaatgccctgaaacttgccgtgggtgaaatcacacaggaacgtggaaatcatgtaactgaggtcaatgaaagtgtcattaatggtgacaatatccactttactggagttaaaagcaaccctggtgaccggacatcaacaccactaaattcatttaccctggccttcactgtcactatcgtttctcagggatgcagttggcactgtatgagaagatgtggctatctgttgaacagggaggagaacagagctttgctcataaaacttaatattcagatctataatgagagagattattaacccccatcaggaaacactttgatttttgtggaaaggaaagacttgccagactgacttcagaattatgtaaatgctatgcatacctggtattgattgtctgccctaaagctacctggcacatctaaaaggcaagccttctttagttaattgcaaggcccgcatcagcgtttatagtgaaaataaagagattatattatattatgttatttatattatattatagaggtgaaaacaaagagattatcaatgggctggcaggaacaggcaaagagaaaagccactgatgctataaagccttacacaagtgggtttcatagcactggttctggcttgcatttccttaaatttccagtttcatagacatccccaaatgccaaaaaataggacaagtaawtcagaatgagatgctaggtcacctttgcagggcattctaatgggctgcattagagctgcttcacttacaggatgagattggacagcaaagcggaggctgaggattctcctggagcatcaggggcatgaaggggaggaggtgttttccctccgcctccaggtaaagggaaagggggtgctaaggccgctcttcaaaaaactttacatattttctctagagcttgagaagctaacatgtgactcttgccaagaaaagagtcttgatgccaggggagctgtgcctggaactgatactttctggctgcacaagggttaagtctgcattggagtaagctgagcttcccctgctggtgggacaagggtttgcgaatttacctatgaactaatcctgtttgaaagaaccagccctgtctcctccctacagaagactgcctggattcctgaagggacctttaaagaataaagcctgtgggttggaccaggggaggggatctttgaggttctagttacattggactggatgaaaggtattcaaatagttatttaaaaaggagtcaaatggaatgcggtggagaaacgtaacattttattttattttttgcttgtaccatatgtaatccagaggcttttcaacaaaatcgctacaatcagaaagtagttgcgtttgttcttcgatttttacagactagtaacataattttaaggaatattaacaattaagtttactctgtatcatcatatagcaaatatcaaaaaataaaaataaggtgttcaggccgggcgcggtggctcacgcctgtaatcccagcactttgggagacgg

SEQ ID NO: 82473 - DNA, 2438 bp, Homo sapiens
tctcaatgtgacaggcgactgagtaggggcagagactccagcaactgagtacccctctctccctctcatgctctctctaaggctggtagagcagggagctttcattccttggtggccatgtggcccgtcaggtccaataccctgttgctacaaccaacttcattgccattaccaggtaatgagcttgacaaagtggtctttgagagcaatgccagctctaacatcaaagccagaagggtgggtgtcactgttaaaatcggaggggaaaacctggtgttcagtgtaggccaggatgcacctgaggaagtgccccaatgcctgcttcaccaactttttgatgttatcatatttggcaactctcttcagatagcatgccagttccacaactgacacactggcagtggatacaaaaggccatgttaatgagcttctcattcaacacagagatgaccttgtccatagccttggcagtgccagtaggtgcagggataatgttctggagagccccacggtcatcacccctgtctcccagaggggccatccagcattttctgggtaacagtgatggcatggaatgtggttatgagtctctccatgaggccagagttgtcatagatgaccttggcaaggggactaagcagttggtgatgccagaggcacagctgaaaatcatatggttgttttcataccaattatggttcacacatcacaaacgtaggagaattggcgaaagggtcagagataatgacccttttagttctaccttctaagtgagcccaagccttctccaagatagtaaagacaccagtgtattcaacaacatagtcagcaccagcattatccatttgattttggtggaatctcactcctggaagatggaggtgggattcttgttgatgaccaacttcctgttctcagccttgacaatgccctgaaacttgccgtgggtgaaatcacacaggaacgtggaaatcatgtaactgaggtcaatgaaagtgtcattaatggtgacaatatccactttactggagttaaaagcaaccctggtgaccggacatcaacaccactaaattcatttaccctggccttcactgtcactatcgtttctcagggatgcagttggcactgtatgagaagatgtggctatctgttgaacagggaggagaacagagctttgctcataaaacttaatattcagatctataatgagagagattattaacccccatcaggaaacactttgatttttgtggaaaggaaagacttgccagactgacttcagaattatgtaaatgctatgcatacctggtattgattgtctgccctaaagctacctggcacatctaaaaggcaagccttctttagttaattgcaaggcccgcatcagcgtttatagtgaaaataaagagattatattatattatgttatttatattatattatagaggtgaaaacaaagagattatcaatgggctggcaggaacaggcaaagagaaaagccactgatgctataaagccttacacaagtgggtttcatagcactggttctggcttgcatttccttaaatttccagtttcatagacatccccaaatgccaaaaaataggacaagtaattcagaatgagatgctaggtcacctttgcagggcattctaatgggctgcattagagctgcttcacttacaggatgagaytggacagcaaagcggaggctgaggattctcctggagcatcaggggcatgaaggggaggaggtgttttccctccgcctccaggtaaagggaaagggggtgctaaggccgctcttcaaaaaactttacatattttctctagagcttgagaagctaacatgtgactcttgccaagaaaagagtcttgatgccaggggagctgtgcctggaactgatactttctggctgcacaagggttaagtctgcattggagtaagctgagcttcccctgctggtgggacaagggtttgcgaatttacctatgaactaatcctgtttgaaagaaccagccctgtctcctccctacagaagactgcctggattcctgaagggacctttaaagaataaagcctgtgggttggaccaggggaggggatctttgaggttctagttacattggactggatgaaaggtattcaaatagttatttaaaaaggagtcaaatggaatgcggtggagaaacgtaacattttattttattttttgcttgtaccatatgtaatccagaggcttttcaacaaaatcgctacaatcagaaagtagttgcgtttgttcttcgatttttacagactagtaacataattttaaggaatattaacaattaagtttactctgtatcatcatatagcaaatatcaaaaaataaaaataaggtgttcaggccgggcgcggtggctcacgcctgtaatcccagcactttgggagacgg

SEQ ID NO: 82474 - DNA, 888 bp, Homo sapiens
agttcttacttcactctaaacatactgaaacaagacctctgtggatcaatcataaratttatgttaacaaacttgtcagttaatcttaaggacactaacattttagagccactgatctaatctataatatctctgacccacttgagtagatacagattgatacccaggctcatttgccactcagaatctctgagtaccaatggttgaccaatagaccagatggaaccattttctatcccccaaaccttctgtgcacttttatgtatttacatctttgttcactgtattctttctgcttggatgatttattttattttttatgagcattgaagtctacctcattcttaacggcacaccctccgcaatgcctgttgatgtttgtgtgtgtcttttgtatattgtttttagttattgcctccatacctatatttcctttcagatttgacctcttgaatgcaaggaaggcatgatttattttggagctcattttttcacatttgtaggtgctcaactaatagattaaatataatgacaaagttaaagcttacctttgtattctgctttcagataaatgtcttgccgaaagagttcagacatactttagtagagtcatgtatttctaaaaccaagccattcctagaatagagcttagacagacagggtttctgcagcctacccattgaaattaacataatgagtcccgttttagatcagggaccatcaacactgcagaattatttagcttaagaaaaaggcacatctagatgtccaattaatgctactgaataaggtgtgttctgatagcagggattgatctaaagcaggaggaagtggctaatgtatggataatccaagtctggagtaagaaaataggcttctttttagttc

SEQ ID NO: 82475 - DNA, 692 bp, Homo sapiens
aaggaggtaatccacataaagtgcttaacaccattgacaaatagtgctcaataaatggkgatagttcttgttggtagtattactggtatttcttttttctttttgcccatcctttactccttaatttttctttcatctgggttttgaataatattgtatatctctagattgtttttctctttttggactaggtcccctcagcctaaccagagtttctcagtctttgagaaatagcagtggataagagtgtggtttttgcatccaaaatatattgattttttaaaataattttttatttttaatttttgtgggtacatagtaggtatatatatttatggggtacatgagatgttttgatatgggcatacaatgtttaacactcatatcatggaaaatggtgtatccatcccttcaaacatttatcctttgtgttacaaacaatccagttattctcttttagttattttaaaatgcacaattaaattatttttgacattagtcatctgtcatgctagcaaaaactatgccttattcattcattctaacttttttttcttacccattaaccatctctgcccccttactactcttcccagcctctggtaaccattcttctcctctctctctccatgggttcagttgttttgatttttagatcccatatataagtgagaacatgtgatgtttgattg

SEQ ID NO: 82476 - DNA, 1092 bp, Homo sapiens
agaaagctactgtcaaatctttcagggctctaggtagcttctgtagagcagccctgcatgcttagaagcctggcgcgtgtgtgtgcatgtgcacacgtgcctgcgtgtgtctgtgtgtgcatgagcacgcgtacacacccacacccagatgctcggagcctgcacagtgagggtggtgctgacctcccctcatctatcgctgtaagtcactttctcatggggctgaaacctcggagtgtgaagcaaccatcttcaggaggctcattatttaatttccaagtaagcagctgcaaaagacagcatgtttgttgctgttagggagaacggagcacatggaagacaggagggaaaggcagttcctctgctcagggtagctctgcactgcgagtgcccatgtctcagtctcccttactgtaaacatttgtgcaacttcaaataaatatcctccccaagtctcacgcagccttcggctctgatggaaaccctatgtgtgccccagtgtgccagtgtgcacaggccagagaagcatgcaaatacaggggagaagtccagctccatgtgaggaacgccagagaaggcatcctggagagaagtgagcagtccagaatgtagactctccttccttacagcactcagccaggctactgaaaggcagcagctttctgtttcattaaaaaaaaaaccagcagaggagtaaaaagcccttagaaaaaacatagaattaaacatgatcatgagaacagtactgtaagccaaaccttcaaaggaaaaaagaatattccacggcattactggatgtgttcgaccaattcccttcttccctgagacctgtagctcgaggttctagactttgagcctctgggctaccgctgcacatttttgaacagcgatcaatttccttgtgtgttttaaaccctgggaatcatattctacatgtgagagatagtaaaatagattttaaaaattgaggtaactgaatatgtggagttatgtcaacatgtcagaataaatacctgaaatccttacttttctacatatgaaagggatctgatatctaatgagagggaaggaaaatgcamtttgttagcattc

SEQ ID NO: 82477 - DNA, 730 bp, Homo sapiens
gtttgtcgcaccttatgtaaatgaagcacctctcccgatcagcttgtttataaaatctcttgggcttttcactttaaaatggcaatcctttttcctgggagtcctctctgtgccagagagctttcttcctttcgcttattaaaattctgctctaacctcacctttggagtgtccgcacccttgatttcattggctctgagaccaagaacttcatgtgacatcccagataatgaggacagattcagtgccttctcaatagtgtcccaccagtgaccctcacagctaaagcacacatggggcagaaacatcaatcacctgcctgggacggccaggtgggcaggagcaagcagggactcggtgagaaaaccagaatgtgtgttcaagggcaggggccgaggattcagctgagttggaaaattccgtttctctttcagaatgtgctcctctcctggtatctgcttatctcctggaatctgagacacaacatagagcaacccccaggccagccatgactggagcctcccaagttgcagggaagggccctgtactaggccaagaacctatcctgaccagttcacccwccctgtccaccaggtgcaggcagaggccagggaccccaacttcagacagaggtaggcagcagggtcaccgcctccggcaatcccatgccagggattacagggtccctggggagacctagcagtggctgagttgagagattcaggcaggg

SEQ ID NO: 82478 - DNA, 730 bp, Homo sapiens
gtttgtcgcaccttatgtaaatgaagcacctctcccgatcagcttgtttataaaatctcttgggcttttcactttaaaatggcaatcctttttcctgggagtcctctctgtgccagagagctttcttcctttcgcttattaaaattctgctctaacctcacctttggagtgtccgcacccttgatttcattggctctgagaccaagaacttcatgtgacatcccagataatgaggacagattcagtgccttctcaatagtgtcccaccagtgaccctcacagctaaagcacacatggggcagaaacatcaatcacctgcctgggacggccaggtgggcaggagcaagcagggactcggtgagaaaaccagaatgtgtgttcaagggcaggggccgaggattcagctgagttggaaaattccgtttctctttcagaatgtgctcctctcctggtatctgcttatctcctggaatctgagacacaacatagagcaacccccaggccagccatgactggagcctcccaagttgcagggaagggccctgtactaggccaagaacctatcctgaccagttcacccaccctgtccaccaggtgcaggcagaggccagggaccccaacttcagacagaggtaggcagcagggtcaccgcctccggcaatcccatgccrgggattacagggtccctggggagacctagcagtggctgagttgagagattcaggcaggg

SEQ ID NO: 82479 - DNA, 591 bp, Homo sapiens
ggcttgactgctatacaattcatcacataaccaaaacctacttgtacccctaaagctattgaaatttgtttaaacgaaaaaaacttgaaagtgatacagttttaatcaaccagttactgaggatggacatattagtttattattgccgctgtcacaaattaccacayacttagggcttgaaacaacacatatttatcctatcgttttggaagtcagaagtctgaaatggctgtcactggggtaaaaccaaaaagtaagcagggctgtgttccttctgggggctctagttcagaatccattcccttactttgtccagcttctagaggaagcccacattcctcacctcatggtgccttcccacatcttcaaagccagcaacatcaggtcaagtcctgctcacaccacaacactcagacctctgcatccctcatcacaccttctctcactctgactcgcttgcctccctctttcatttataaggacccttgtgaatacattggacctacctgaataataccagataatccccctatcccaaaatttttaacctaatcacatctgcaaagcccatttggtcatgtaaggtaacat

SEQ ID NO: 82480 - DNA, 591 bp, Homo sapiens
ggcttgactgctatacaattcatcacataaccaaaacctacttgtacccctaaagctattgaaatttgtttaaacgaaaaaaacttgaaagtgatacagttttaatcaaccagttactgaggatggacatattagtttattattgccgctgtcacaaattaccacatacttagggcttgaaacaacacatatttatcctatcgttttggaagtcagaagtctgaaatggctgtcactggggtaaaaccaaaaagtaagcagggctgtgttccttctgggggctctagttcagaatccattcccttactttgtccagcttctagaggaagcccacattcctcacctcatggtgccttcccacatcttcaaagccagcaacatcaggtcaagtcctgctcacaccacaacactcagacctctgcatccctcatcacaccttctctcactctgaytcgcttgcctccctctttcatttataaggacccttgtgaatacattggacctacctgaataataccagataatccccctatcccaaaatttttaacctaatcacatctgcaaagcccatttggtcatgtaaggtaacat

SEQ ID NO: 82481 - DNA, 525 bp, Homo sapiens
ctaggatacagggtatctcattccactgcagtccagtggttgtggcwtcctgaaggtcaatgctgcaggcagttacacctcctacctgagctttttcagctggttggctgaccatgggtgcccaggttctggcagaatagctgaggtaggcaccatggtggggcatcatggaaaagaaccttgctggtcattccttcacctctgggtaattggctttgagccatgacctgatttgtcctgtagccccgtctgcagtcccccagatcgtcagccagggcctgtgctcaataccctgcgtacattccaatggagggaggccattagagagggaacagagaggaggtcaggtgagcagtctagggctggggactgagaggcctttgattcctggagttgtgccccacatggagaatctgagcctcagggaggtgactgcagtgagcaatcccaagccattcaaggggtggtggagaaatggccatcagagaactgtaacacccacattttaggattggggcacctgaa

SEQ ID NO: 82482 - DNA, 761 bp, Homo sapiens
tttctcccataatcagtggtgttttagtttattattcaatggtgcccctgatgtactcacctctatttctttccctccttatgtcttagctggagaagacctgttgttcagtctacttttaccctccattttcagggagcaacattatagtgttgggcaaatatgcacatatgtgtattcatgcaaatgcagttgcatacccttgcatcaaagtcaggtgctccttgttaaattttgttccctagaaagatccttcacaaaaaccttatgtagcaggggtagttctttaaagacctttccaaccccagacgggctgcttgtgttgcacttcacctttctggtagactcactaactagactgctggagccagaaggggccttggtgagagtttaataaaatgttcttattttattaaaagagtatgtaaccattgaagtctgaggtagtggtctaaattctttcagctaagtagctgaagagtcaaccctcaatctcagggctcgaaaatcttgcttgtgtgagcagcagtacctggcactgtgctggtcagactgcatgaatcatacatattgagagattgattgctatcttatttttaaacatgtctatagtttggctctcmaccttcttttgaaagctagactaatataccactgtgattttctgtaattactttgattcaataacccgcatcattcttggttgtctatgtgtatacaaattactgccaaacaagagagaagttcaggaatagagagag

SEQ ID NO: 82483 - DNA, 761 bp, Homo sapiens
tttctcccataatcagtggtgttttagtttattattcaatggtgcccctgatgtactcacctctatttctttccctccttatgtcttagctggagaagacctgttgttcagtctacttttaccctccattttcagggagcaacattatagtgttgggcaaatatgcacatatgtgtattcatgcaaatgcagttgcatacccttgcatcaaagtcaggtgctccttgttaaattttgttccctagaaagatccttcacaaaaaccttatgtagcaggggtagttctttaaagacctttccaaccccagacgggctgcttgtgttgcacttcacctttctggtagactcactaactagactgctggagccagaaggggccttggtgagagtttaataaaatgttcttattttattaaaagagtatgtaaccattgaagtctgaggtagtggtctaaattctttcagctaagtagctgaagagtcaaccctcaatctcagggctcgaaaatcttgcttgtgtgagcagcagtacctggcactgtgctggtcagactgcatgaatcatacatattgagagattgattgctatcttatttttaaacatgtctatagtttggctctcaaccttcttttgaaagctagactaatataccactgtgattttctgtaattactttgattcaataaccygcatcattcttggttgtctatgtgtatacaaattactgccaaacaagagagaagttcaggaatagagagag

SEQ ID NO: 82484 - DNA, 723 bp, Homo sapiens
ggccgaaaacccagaacctggtattttccacatttgcttcctccaatatttgtgtttgatcaagtgggcacttgcacaagatttataaaacataaaagaaaaaggaaaccattattttcagctatgtgcaggcaagtgtgcgttaacaggtagagtgtttttccagaagctttctggcatatacttgataatcactcacttccatgatcctggcagtcaagaccacaggcagaggctcctctgtgatccctggacatctgtatattctgaaatccaacagtgatcttcctaagtatcctgtcccaggctgttccaagttgtataagtctctctctctgttaaatcccttccttcctgaatgtcctaagtggcttcagtttccctaacagaactgcatggaagattataacaactaactcacataagtagatcatattattgagtcatactatttgtcaggtagtcttctaaatgctttatgagtattttcttgcttattcttcatgactaattattagcctcatttgttgatgaagaaattgggaacagagatgtgaagcaacttcctccacaaggtctcccaggagctgaatggaaaagccgagaggaagcaaagggcgtctgaaatctagacagagccagaktagtcacctagactgtctgggatgaaccatcccttggagaaggtgccgggagaaagtctaggcaggcagacaggacata

SEQ ID NO: 82485 - DNA, 713 bp, Homo sapiens
tctttgaaaatcagatacatactgaggaggaaacacaattgactctttaacgctgtaaaaaaatcagaggtgatttttttcccatcaaagttttctattggagaaatagaatatgcagtagaaaaaaaacaggaagaaatgcatggccttagtggaaacaaacttctgcattattttttctattcattgttctggctttagatatcagcccagaagataatgacctggaggtagtggctgcctgttgggtagaggcactctttgtacctgtggagttcattccaaaagaggcagatgcccttagaatcagcttttctaattaccattactacaatctacagattcaatgcaattcctgtcaaattacgaatgtcatttttcacagaattagaaaaaamaaatcctaaaattcatatgggaccaaacaagagcccaaatagccaaagcaatcctaagcaaaaagaacaaagttggaggcatcacattacctaactttgtttgctacaaggctgtagtaaccaaacagcatggactcgtgtaaaagtagacacttagaccagtggaacagagtagagaacaccaaaataaagccaaatacctacagccagctgctctttgacaaagcagacaaaacatgcactagggaaagggcactctattcaacaaatggtgttaggaaaattggatagacataggcagaagaattaaactgg

SEQ ID NO: 82486 - DNA, 713 bp, Homo sapiens
tctttgaaaatcagatacatactgaggaggaaacacaattgactctttaacgctgtaaaaaaatcagaggtgatttttttcccatcaaagttttctattggagaaatagaatatgcagtagaaaaaaaacaggaagaaatgcatggccttagtggaaacaaacttctgcattattttttctattcattgttctggctttagatatcagcccagaagataatgacctggaggtagtggctgcctgttgggtagaggcactctttgtacctgtggagttcattccaaaagaggcagatgcccttagaatcagcttttctaattaccattactacaatctacagattcaatgcaattcctgtcaaattacgaatgtcatttttcacagaattagaaaaaacaartcctaaaattcatatgggaccaaacaagagcccaaatagccaaagcaatcctaagcaaaaagaacaaagttggaggcatcacattacctaactttgtttgctacaaggctgtagtaaccaaacagcatggactcgtgtaaaagtagacacttagaccagtggaacagagtagagaacaccaaaataaagccaaatacctacagccagctgctctttgacaaagcagacaaaacatgcactagggaaagggcactctattcaacaaatggtgttaggaaaattggatagacataggcagaagaattaaactgg

SEQ ID NO: 82487 - DNA, 1534 bp, Homo sapiens
cgcacctgtccgcaggtggagctgtctgccagtcccacgccttgcgcccgcactcctcagcccttgggcggtcgatgggaccgggtaccatggagcagggggtgcttctcgtccaggaggctccggccgtgcmggagcccactgcaggggtgtggcaggaggctcaggcatggcaggctgcaggtcctgagccctgccccatggggaggcagctaaggtccggcgagaaatcaagtgcagcgccagtgggctggcaatgctaggggactgggtgcactgtccacagctgctggccctggtgctaagcccctcactgcctggggccggtggggcagccggccgctccgagtgtggggcccgctgagcccacgcccacctggaactcgcgctgtcccgcaagcgtgcaagcagtcccggttcccgcccgctctctttccacacctccccgcaagctgagggagccggctcctgcctcggccagcccagaaaggggctcccacagtgcaggggcaggctggagggctcctcaagtgcagccagagtgggtcccgaggccaaggaggcaccgagagcgagcgagggctgtgagggatgccaaacgctatcacctctcactttgattaaatttctgttacttattttgattattattgatgtccaaataaaatgagagaagggaagagatagaataaattaatgtgtttctatatgtctgataaggatgggatgggtaacgcacatcatgttggtgaagaatcagtatattttcatggagaaatattaattttcttttcaaacaataataaaaaatgcacattatgtagttacaaatgcatggtctggtaagggaaaagaatgaaattttaataagaatatctaattaagtagcaaaaacatggaataaatagcaacttgattaaaataatgcaagataataagggaatacaggaaaggattttttttaaaagaagttaacatgaagatgtaaggagcacagtaactgtataggattcttaccctatatatggatagaatgatgacttctatcaaaagacagagttcaaattcatccgtctaagtgcaggtcatacacaaaagaattaaaaccaatcataacagcaaaaacttgaaaataaaaagattgtcaattaagcacctcaaaaataaaatttagaaaataatggctctgttagcatcacacaagtatatgctgtagtttaaggttaaaggcatgaaacagtattgtgtcatgagaaaatgcacactttacaaaaagataaaacactagtaaacaggtatatagatttggtagctcagcagctaacttcataaagtgaaaatcattaaaaatgcaagaacttcattttccagaagactttagaaaggaaacttcgagagaacaggggaagttggcaaagaatatgcagattccttgaggaactggcagctgatagttggagtcccagaagctcacttatgaatagaggaagaagtcaagatgatctgccagttcagataatcagtggaaaatcct

SEQ ID NO: 82488 - DNA, 1534 bp, Homo sapiens
cgcacctgtccgcaggtggagctgtctgccagtcccacgccttgcgcccgcactcctcagcccttgggcggtcgatgggaccgggtaccatggagcagggggtgcttctcgtccaggaggctccggccgtgccggagcccactgcaggggtgtggcaggaggctcaggcatggcaggctgcaggtcctgagccctgccccatggggaggcagctaaggtccggcgagaaatcaagygcagcgccagtgggctggcaatgctaggggactgggtgcactgtccacagctgctggccctggtgctaagcccctcactgcctggggccggtggggcagccggccgctccgagtgtggggcccgctgagcccacgcccacctggaactcgcgctgtcccgcaagcgtgcaagcagtcccggttcccgcccgctctctttccacacctccccgcaagctgagggagccggctcctgcctcggccagcccagaaaggggctcccacagtgcaggggcaggctggagggctcctcaagtgcagccagagtgggtcccgaggccaaggaggcaccgagagcgagcgagggctgtgagggatgccaaacgctatcacctctcactttgattaaatttctgttacttattttgattattattgatgtccaaataaaatgagagaagggaagagatagaataaattaatgtgtttctatatgtctgataaggatgggatgggtaacgcacatcatgttggtgaagaatcagtatattttcatggagaaatattaattttcttttcaaacaataataaaaaatgcacattatgtagttacaaatgcatggtctggtaagggaaaagaatgaaattttaataagaatatctaattaagtagcaaaaacatggaataaatagcaacttgattaaaataatgcaagataataagggaatacaggaaaggattttttttaaaagaagttaacatgaagatgtaaggagcacagtaactgtataggattcttaccctatatatggatagaatgatgacttctatcaaaagacagagttcaaattcatccgtctaagtgcaggtcatacacaaaagaattaaaaccaatcataacagcaaaaacttgaaaataaaaagattgtcaattaagcacctcaaaaataaaatttagaaaataatggctctgttagcatcacacaagtatatgctgtagtttaaggttaaaggcatgaaacagtattgtgtcatgagaaaatgcacactttacaaaaagataaaacactagtaaacaggtatatagatttggtagctcagcagctaacttcataaagtgaaaatcattaaaaatgcaagaacttcattttccagaagactttagaaaggaaacttcgagagaacaggggaagttggcaaagaatatgcagattccttgaggaactggcagctgatagttggagtcccagaagctcacttatgaatagaggaagaagtcaagatgatctgccagttcagataatcagtggaaaatcct

SEQ ID NO: 82489 - DNA, 719 bp, Homo sapiens
tgcaataatctccctagttctttcaatgaaatagaaccaaaggctcaagccaactgagcagacagaggtgagttccataagttaaattttacagaaatgaatcaaacataattatgttttgtatttatgagtgtgtataaatacatagatatgtatagttctattagattgtttgctatattttagtatcaggttatgtcraccattaattcaaactgattgaaaaatattatttatcatctaactcacagtagaaaatgtagaacttaacgatatttttagtaatatattttcatatagtacgtgatttttttaaattagaaattctaattcaaacattaaattgtaagaacagcctgtgtgtttcatattaataattaagatattttgacttcatcattagtgaataaggcaattttacactgacactgtatgtttgagaggtggaatgaaatatgaatattttattaatataaaaaacaacagattaattcatcatgtattttgtgagttgttttgctgtgtaacttcttttgtttatattatacataatttttattattctataaataaattatattttaaatttttatgactagagttacttccttaagcataatgccttattcattaatatttaaagcaattttgtttgccaatttcaagagatcatgggataaattctgtagcattaatttacatttgcttcctgatttaaa

SEQ ID NO: 82490 - DNA, 719 bp, Homo sapiens
tgcaataatctccctagttctttcaatgaaatagaaccaaaggctcaagccaactgagcagacagaggtgagttccataagttaaattttacagaaatgaatcaaacataattatgttttgtatttatgagtgtgtataaatacatagatatgtatagttctattagattgtttgctatattttagtatcaggttatgtcaaccattaattcaaactgattgaaaaatattatttatcatctaactcacagtagaaaatgtagaacttaacgatatttttagtaatatattttcatatagtacgtgattttttwaaattagaaattctaattcaaacattaaattgtaagaacagcctgtgtgtttcatattaataattaagatattttgacttcatcattagtgaataaggcaattttacactgacactgtatgtttgagaggtggaatgaaatatgaatattttattaatataaaaaacaacagattaattcatcatgtattttgtgagttgttttgctgtgtaacttcttttgtttatattatacataatttttattattctataaataaattatattttaaatttttatgactagagttacttccttaagcataatgccttattcattaatatttaaagcaattttgtttgccaatttcaagagatcatgggataaattctgtagcattaatttacatttgcttcctgatttaaa

SEQ ID NO: 82491 - DNA, 1542 bp, Homo sapiens
gcatatgtaatggagaaagagtaaaataatgccctctgtgtactaacttaatctactcaaatgtagaaggtatgtaatggctatgctgctttgtgtaagaaaaatctgttaagcactttagttctctctctctctctcatctctctctctctcatatgccaatatgcctatgtgttcagaaacctaaggaaagtgaaatgtttacaatatagtagagcaattagactttggtcatacattttacaggcaacacttggggcaaacatatgcacatcatcatgagaaatggaagcatttcgttcccagtataaacctagcaagacctgcagttcttacttcagcttaccctgaaagccaaatattgtagttacctcttgacagaaaagaattcagggtaacattcccactagggttctaccaagagcagatataaagaagtgaagttgtaagctgagacatggcttcttgccactgtctagttaaaatagaattaatatttttctttactacataagaaagtagttttctaagggatcatacatttttaaaccagtgactgtctataatttctgacttttaaaaaaaaatcaaattattggcttcagcttccatttttaaactctgccctgctttgtacttacttagaacattcaaatttcagagcccttcatctgtgaattaatcatgtgtggagtatgtgcagttggaatttagctataaatataaatgaaattgctctagccatggctgggttcaaaaaactagagtgacttggagttttcagttaaaaaaaaaatagagaaattttaagggagcaaaaaaaagttaagttgagagaagcaattaaatagagtctttttgcattaaaatgttgggcttgtgttgtatatatacttagtttctaagactctgcaaatcagcttataagctctatgtcaaggtgaaaagaacagagtttgccaaactccagagtatctttctcacttgacctgcagaaattaatcaatgtgaggaatgaccacatgatgtgttatatagttactgcctggtgccagttggcaagaaggttcatcaagctagagagytgagaaaatgagacaggtagggatgaaaatgtatacacaatgcctgcttgaccaagggcacacaccttagactatgttctttccccagaaagtctgtggcagaagtggctagaaaacactttcatctacaatggtgtttcttatcagatctggttgacaccgtcttcctttatgatgacggagtgcaaaggagctggaatttaagtttggagctctgggctaaagttgtaggtagcccagcaagctacctaaccctctccaagactcaacttccttgtgtataaaatgagaagagaacatctgccatttaagagagctgtggagagcaattgaaatcagctgctttatttacagacatgtattgaatacctactgtgtgctatgatgctatgtgatgtgtttgggatacaagaaaagttacacttctcaaggaattcttccactaggggaagacaga

SEQ ID NO: 82492 - DNA, 668 bp, Homo sapiens
atggtggactcaaattactctcatttgaattttatatttagaaaatgagcatgcagtattggggattaggcagtattaagaaaatgtatgtagaaagattatctaggatggaatcaccgaaaatcctggaatatttagcagacacttgttgactgattttacctgcagcaaatatgaggcaataacaactgtgtaaattatttagagactagtcatccatatggggattccttaaaatcatttcagaaaacaatttggcagggtattttctttatacttattttttccaagttcatgtacaaaagagatatagatccacacaaagtggattatcactgattcttttaaaatgaaattaaatattttaaaacattcaagtgacgattgggtgatctttcctagctaaagctttctttggtagtttatttatcttaaatattatttttgtctttcaaagsgtattatatagtgaatgtaagagatttattaaaaaccttggattgcttgaaagtgctttaaaactttgccttaaaatctgcacataggcaaaattcctgatattatgagttgggatttccagtgtaagaggatttcaaatcgctgctgaaaaaagggcttgttacagatttctaagcatcctgtatcagaaaggcccagctacttacaca

SEQ ID NO: 82493 - DNA, 593 bp, Homo sapiens
atttattttctaccattttggaggcaggaagtccaagatcaaggtgccagaagatctggtgtctagtgacagcctgcttcctggttcataggcagcaatttacctgctgtgtcctcaagtggcagagagtagagagcgagagagagagcaagctctcaagtctctttttataagggcactaatcccattcatgagggcttcactctcataaccttattaccttccaaagcccttacttcctaatactattaaattggaggataggatttcaaaataggaatttgcagaaaacataaacatgtcgaccataacaattcataacaagaaactcatggcattacattaatgaactgaagttaatggttttttttttcaagtttatagaggaaagtcaggcaatctaaatgtatatacagtatttttttcaccccatatttcactggtaaaaagaaaaatatatattctcaagcattctttctgaaacattaggatgaaraaaaaggagaggtggaaagcagaaagtagggaagaggaataagagaccaaagagactaagaagtcagactttgaaagagtgaaagctggaggaataa

SEQ ID NO: 82494 - DNA, 730 bp, Homo sapiens
taggagtgtgatatatatggcttgcccaagggaacttgcagtataacaagggagacagacccatacacgatgaactctaatgcaatagcatccaccctgtaagagtagtgcaagcaaagttctgtggtgcactagagacctaatgtacagcataatgactatagtcaataatactgtattatataccaggaattttctaagagatgatttcaggtgctctcacaacaatgaaaaattgtagaaggatatggctatattagtttgcttaattgtggtaataatttcacyaagtatatgtatatcaaaacatattgtatatcttaaatacatagaatttttatgacaaaaatagaattaaaaaatataaaaagtacaacgaggcatggagaagcgggtgttgatgaagtctgctcttaatggaaaaagattgagcctgggaaagacttctttctaaccttctaaaagccttagttcttaaactcatgagagaaaacgctctaccacaatgtccttcaaatacaaagctttcaatagatatttgtaacttgaacagttgatgcaatgctggtaaatagcacaaatgtgacccatgatgtctgaatatctagcccacaggcacattattaaacctacagtttttcccatattttaataagtttccaccatcacaatctcaagtgactgcagcctgttttgtattatagagcaatctagaaatttgtccacaaaa

SEQ ID NO: 82495 - DNA, 730 bp, Homo sapiens
taggagtgtgatatatatggcttgcccaagggaacttgcagtataacaagggagacagacccatacacgatgaactctaatgcaatagcatccaccctgtaagagtagtgcaagcaaagttctgtggtgcactagagacctaatgtacagcataatgactatagtcaataatactgtattatataccaggaattttctaagagatgatttcaggtgctctcacaacaatgaaaaattgtagaaggatatggctatattagtttgcttaattgtggtaataatttcaccaagtatatgtatatcaaaacatattgtatatcttaaatacatagaatttttatgamaaaaatagaattaaaaaatataaaaagtacaacgaggcatggagaagcgggtgttgatgaagtctgctcttaatggaaaaagattgagcctgggaaagacttctttctaaccttctaaaagccttagttcttaaactcatgagagaaaacgctctaccacaatgtccttcaaatacaaagctttcaatagatatttgtaacttgaacagttgatgcaatgctggtaaatagcacaaatgtgacccatgatgtctgaatatctagcccacaggcacattattaaacctacagtttttcccatattttaataagtttccaccatcacaatctcaagtgactgcagcctgttttgtattatagagcaatctagaaatttgtccacaaaa

SEQ ID NO: 82496 - DNA, 652 bp, Homo sapiens
atctatctacaaatgatcagaaaaaaaataattatcaaatttagaacataggcagaaataaaggaggtaatttaacactaagaaagaatagtatgtgagatagaaataataagagtttattatcataaactgattttgagagtttcaataaaatggagtttacatctctggaaaatttaccaggaaggtataataaaatgagaaaaaaataaggctttttgggagaaaagtatttgcaaaagacatatctgataaagactatcatccaaaatatacacagaattcttgaaactcaacaataagaaaaaaaatcccgattttaaaaaataggcaaaagatcttaacataaccacctgaggaagatatacaaatgacatgtaagcatataaaaagatgctcaacatcatctgatattaggaaatttcaaattaaaacaacagcatgatgccacaacacacctgttagaaaggccaaaattcaaagtaatgaaaatattagggataaaagactatgcattgggttcaatgtwtaccgctcaggtgctggtaaacactgtatttttagggcagtaaaactattttctgagaaatcataatggtgattatatgtcatcatatatttgtcaaaatccatagaaaatacagcaccaata

SEQ ID NO: 82497 - DNA, 730 bp, Homo sapiens
catcatcatcatcatcatcatcatcatcatcatacacactttcctgtagcatttattctaccctctcggttatgtccccaagattgcagctatacattttcccacctctcattccctatttgtgattttccacccagaaatgcatctcatactctacttttattatctctagatccctctactcttaaaattctggagctcgatatgcatatgtttgtttacagaattaacattcttaagagtctgctttctattgtccaaaacaataactagtattaaaaacactttttataatctctatgtcaattcccatattggattttttaataaatttgataaaaggtcatctagagaaaaaaagtcaactaaaaaggaaatttattagttatagacttgaagtttgacaactatggaaggctactggartaatatttttgggcaggtggaaggttatattcttatcccttttaaaatgagaactgtaattacctccagaaaaagctatacattaataagaatgacttgtcagcaaatgctttaaacaatgatgacactatattcagaaatttattcactatattcagaaatgcctccaatcataaaatgtggatgactgctatggcttggtacgctgctaggtacattgcacatggcggtgatcaagccagacatatactcctaactattattatgcttccccagtgatgcactcagctctcgctgatcataa

SEQ ID NO: 82498 - DNA, 516 bp, Homo sapiens
tgaaccagctcactcacgtctgtgcaagtgctttaatgaaacgttacgtattactttacctcgacacacttttctttttttaatccactaattcttcacatttttcaaagtggaaaaaaagcaggaaacgggagcttaaaaatagaaggggttatcttccaagaggctggaaagtgtcctaggggccaaacagccgaatgggatttgctctcargcaggctggctgtggcacgtgttgattttcttaaactttaagaacccactaacttcagctaatgatgtctgggattatagcacccaaaatgtcacgatctactgtgttcacctgtctattgtcctttctcacatttttgcaccctacatgatacttggcaaaatccttcctggctttctcctttaggtgtcactctcaagaatgtgaagttatactgcaaaatgtgcagcctgaagcatcagaggttagaggcaaaaatctctatcctgctaataaagtttcaaactgaaggactcgccagt

SEQ ID NO: 82499 - DNA, 516 bp, Homo sapiens
tgaaccagctcactcacgtctgtgcaagtgctttaatgaaacgttacgtattactttacctcgacacacttttctttttttaatccactaattcttcacatttttcaaagtggaaaaaaagcaggaaacgggagcttaaaaatagaaggggttatcttccaagaggctggaaagtgtcctaggggccaaacagccgaatgggatttgctctcaggcaggctggctgtggcacgtgttgattttcttaaactttaagaacccactaacttcagctaatratgtctgggattatagcacccaaaatgtcacgatctactgtgttcacctgtctattgtcctttctcacatttttgcaccctacatgatacttggcaaaatccttcctggctttctcctttaggtgtcactctcaagaatgtgaagttatactgcaaaatgtgcagcctgaagcatcagaggttagaggcaaaaatctctatcctgctaataaagtttcaaactgaaggactcgccagt

SEQ ID NO: 82500 - DNA, 516 bp, Homo sapiens
tgaaccagctcactcacgtctgtgcaagtgctttaatgaaacgttacgtattactttacctcgacacacttttctttttttaatccactaattcttcacatttttcaaagtggaaaaaaagcaggaaacgggagcttaaaaatagaaggggttatcttccaagaggctggaaagtgtcctaggggccaaacagccgaatgggatttgctctcaggcaggctggctgtggcacgtgttgattttcttaaactttaagaacccactaacttcagctaatgatgtctgggattatagcacccaaaatgtcacgatctactgtrttcacctgtctattgtcctttctcacatttttgcaccctacatgatacttggcaaaatccttcctggctttctcctttaggtgtcactctcaagaatgtgaagttatactgcaaaatgtgcagcctgaagcatcagaggttagaggcaaaaatctctatcctgctaataaagtttcaaactgaaggactcgccagt

SEQ ID NO: 82501 - DNA, 770 bp, Homo sapiens
tcctgcctcagcctcccagagtaactgggactacagctgcacgccaccatacctggctgtttgtatttttagtagagacagggtttcgccatgttggtcaggctggtcttgaactcttgacctcaggtgatctgcctgcctcggcctcccaaagtgctgggattataggcgtgagccactgcaccaagccttytcctttgcttttactagagaagctttgtaatttgcttttctggcctcctctaaatttagtagtggctttacaacacagtgctgcccaaaggaaggtaagagaaactctgtttgagtggttttggagactgttacaaggtaaactgaggcacaacaaaatttttttttttttttaaagagtttattcgagcaaacagtgattcatgaatcaggaatctctgaactataagtggtttaggggcactaccaaggaggagaaagcttttatgggactaacatggaaataaagcaagaaaaatatttgattggttgcagttacacaattgccttagtgtgctggaaattctcttgtcatataagttagggaacagcttctgattgcttagccttaagtttgtttctttaatataagcatttacaaaaaatagcccaagttaaattacacctatgtttgcaaatcaaggaagattaaggtcacttatgaggacatattgggtttgtctactcaggattcttcaaatctggtctttattttaatttacttaaatgagaaactttaactttcctgaaaaaaaaaa

SEQ ID NO: 82502 - DNA, 766 bp, Homo sapiens
ttggatccattttacttacttgggtgaaatagcaatgtatgcttttaagtgaaagtcacttaaaaatttcagactgtccttagtaacgcaggaactcttgacacaaacttgtactattgacttaaggaaaaaatattctatttccttcctcttttgatcaccatggaatcttccttgaacagactgctttcacttctaaarctcaatgaactagaggtctaatgggcatgaatgtagaggatatttatcttgttgcaactgtagacagagtctttatcactgaaaggtgcatggcatgatggaggtaaaatcttggaatgttagaactagtccagaacattcggagtgtttttttaaagagtctcattttacatatgtaaaagctgagcctcaaatagacttagaagtacaccaaaaaacatactttcatgattcacaaaatatgtactagaatcaaataaggcaaaagtatcctctctagtgcacaacaaataaacaattttattatgagtaatatatcagtctctctacattttaataaatttctacagataatttgagccatggaatcttactttatggcatatagcacttttccccaccctactaaaaatgtcatgaaataatgaagaaggattcttccttccaccaagctgtctgaagatgttaaatccatgtaaatattttatggtatatttaccactcacgtgagtagattgcatgcatataccaagtgaggaaaaccaaccaacctcaaacacaaaac

SEQ ID NO: 82503 - DNA, 660 bp, Homo sapiens
caatggaagattgaacataaggcccaaggagagactcttcaggtagccaaattctgatagaggcttttgggaaagtgggctacttagatatttagataagaaagaccatatttagatatacagaggtattttatttttgaatatccttaggtccaagatgatttggaaacatttcaggatagaacaattaacagaaaagctgtagagttgtatgtcagaaaacatgatttaaatggcttaatataagtcgaagtccttcagtagattaggcttcagagctgtattgattcagacctggatcagttctaccttctcacttgcttctatagagccagtctcatcccaagactggattccccagtgaaaacaaatttgttgctacasttccagacttcacatctgcatatcaaccaccatcctgatgaagacaaagtgagcttttttcccagcatctctgacagagatccaaaatggactcattagattgcttaaactggatggttaatgagtgtggccaggagaatagaatgtgctgattggtttactcccagtgggtccctgaactggaccagtggtgaggccagaagtccaaatccttcaaagaacagaattgcaagaagtacagataccccaattaaaattaagtctgtgttcagggga

SEQ ID NO: 82504 - DNA, 660 bp, Homo sapiens
caatggaagattgaacataaggcccaaggagagactcttcaggtagccaaattctgatagaggcttttgggaaagtgggctacttagatatttagataagaaagaccatatttagatatacagaggtattttatttttgaatatccttaggtccaagatgatttggaaacatttcaggatagaacaattaacagaaaagctgtagagttgtatgtcagaaaacatgatttaaatggcttaatataagtcgaagtccttcagtagattaggcttcagagctgtattgattcagacctggatcagttctaccttctcacttgcttctatagagccagtctcatcccaagactggattccccagtgaaaacaaatttgttgctacacttccagacttcacatctgcatatcaaccaccatcctgatgaagacaaagtgagcttttttcccagcatctctgacagagatccaaaatggactcattagattgcttaaactggatggttaatgagtgtggccaggagaatagaatgtgctgattgrtttactcccagtgggtccctgaactggaccagtggtgaggccagaagtccaaatccttcaaagaacagaattgcaagaagtacagataccccaattaaaattaagtctgtgttcagggga

SEQ ID NO: 82505 - DNA, 879 bp, Homo sapiens
ttttaaagcagaaaaccacatactcagagcaagctttgacctagttcctttcattcaaggatctcaaagcccctttaaacccatgatccagattttgtttgtaaaggaagagatggagttgaaaaacaagatctaaggcagttcctatgaatcccttcaatgtaatttttcagagcatttcccttctcccttcaaactcatgtcgttctgattgggctgaattgaagagctgcccagcctctcccctggccctgagacccctgacctagagggactaactagagggacggcatggcaatggcaagtgtacccaagacagcatgcccggaggtttatccaggaatattcatccagagggaaagagcaatgggtgaggctgaagttcgtctgttctcttatatacaaaatgtgaacaaatcctgaatatcacagtctggccacaagggggatgttttggggtgggcagggtgacggaggcagggggtcctgacttggctccccaagaagtgggttctgttctgttcgcttaagctctctgcattcttttttccacgctagacgatgagcatgttggaccagatgggcacgtgtccaagtgcaccctatggaatgtatcagcatcggcctcgcctggaagcctgatagaaatgcagattcccaggccctgcccaggcctgctgtatccggatctcttggtggtggagcccagggatctgcatgtcacgagcttgctcagagtatctgtgaactgagttcaatccacagccctctactccaatgctagccagaccctggggccattgcctctccccccacrtgcccctccatactgtcagcacctctgcattgtggcctttctgccacccccaaccgacttgg

SEQ ID NO: 82506 - DNA, 636 bp, Homo sapiens
gagctggcagtgagccgagattgtgccactgcactccagcctggccgacagagagagactccatctcaaaacaaaacaaaacaaaacaaaaaaaaggttacaagcctcaacaacttgcacgggatattttcttctcccagcacagagagctccacccaagccagaggatcatctgaaaatggcctaaagtcaagtgcatcttaaaggcaacaacttaaatagtccaaagatggcaaaagcatgacttggcaaacactacgagttcacaagraaatttgagaatgagatggcctcaataaaggcaaagtcaaatttcaaagtgaccaggcaggatatccattattcatcaaaacgtaaatgtatgttacaagagtggagcgcaagctgtttgagaagtgttattattctcctgaggaggaagacacagttgctggggaaatgatggttgctttcacaggcggcgtaccttatctaatacagtggattgggtgtgatgacttagagatcaatagaggacaagagctggagccagatgatctggtttaaatcccagccccagcatctcacaacaggatcacctccagtatgcggtgcagcctttctgtgcctcaggatcctcatttgtgaaatggaaac

SEQ ID NO: 82507 - DNA, 649 bp, Homo sapiens
aaagcagctaaaaatacaactatctctctggaattgaaaatgtgtaaaataagaccacacactttcaatatgcacaaaatatattttaaatgtttaagttgtattggtaatttactatgttctcctgtagaaaatcataattaaagttggtgctcgtgttgctaaagttttttttctcatgtcaggaacttgcagcttgttctatatagtttggtgaaacaaacaaaacagtttttatctgctgtgacatttaagtttgttgttagctggagttaaatctacatacataaaagtaaaacaataaatatggaaacatcccaacagtctttcccacaatgtgtattattacattattctcagtaatgacacatacttaacatttcccaagctgttgttttaaaccttaaacatcaccacatttctaatttttatttaaaatctttcagaattcttagattttgtaacatatcaarcacaagtctctcattaaaatttttttttaatagtatttgcttttcttttaaactccataaaggagtattcgatgttaacagacgtaactctttaatgctcctctgttcatgattaagtatgctaagttttaagtaatttagactaatgtattaaagtgttcacttatgtctagtca

SEQ ID NO: 82508 - DNA, 1023 bp, Homo sapiens
cagcgctgctcctgccttagtaccgatcatccaccaagcgctccccagggcagagggccaatcctctgaaaacgcagataacctggagcccagctcttggcatgtggacaagtaatcctaatataggtggagcatcccaaatccaaaaatcccaaattcaaaatgttcctaagtccaaaactttttgaacaccaacgtgacattcaaaggaatgctcagtggagcattttgkacttcagatttccagatttgggatgttcagccagtaagtataatacaaatatttcaaaatccaaagaaatacaagacacttctggtcccaagaatttcagatcagagatgctcaaccatgatacgaacggcagatgacaaagtcgcattggcatagcttgtacgtccaggcagtgtggcagggatttgttgcattttgacccattcaattctggtgacaatgctggcagtgaccttctgcaaggacccaagaccctcagccttaggaacaggccacgagtgtggcctaggcagtggccctcagccagggacggtcaggaagtggtgactgaaacatccacgtccccacccttggggtagcgcatatctgagctgtgggacccacatcccagatcccagcccagctgagcttcaggtgccaccatggtaactgccttgataacagacccctcctcccgaacagctgcttcctgagacatctcacacaccccaaaataagccacgcacactagattcctggcttcagaatctgcttctaagggaatccaaccaaacagaacaaccctctgaagcctccattttacagaagggggaaacaagtcatggagtgcagagtgactagggccccacagccaggggatggggatgccaggtccgagccaccaccgtttgaccctggcttcaggctctgcacctccacaaggcgcaaggcccagccaatggtcagtatgcttacccatcctctttccaacctcatgaggccccacgtcctctctttccaagccatccatt

SEQ ID NO: 82509 - DNA, 1023 bp, Homo sapiens
cagcgctgctcctgccttagtaccgatcatccaccaagcgctccccagggcagagggccaatcctctgaaaacgcagataacctggagcccagctcttggcatgtggacaagtaatcctaatataggtggagcatcccaaatccaaaaatcccaaattcaaaatgttcctaagtccaaaactttttgaacaccaacgtgacattcaaaggaatgctcagtggagcattttgtacttcagatttccagatttgggatgttcagccagtaagtataatacaaatatttcaaaatccaaagaaatacaagacacttctggtcccaagaatttcagatcagagatgctcaaccatgatacgaacggcagatgacaaagtcgcattggcatagcttgtacgtccaggcagtgtggcagggatttgttgcattttgacccattcaattctggtgacaatgctggcagtgaccttctgcaaggacccaagaccctcagccttaggaacaggccacgagtgtggcctaggcagtggccctcagccagggacggtcaggaagtggtgactgaaacatccacgtccccacccttggggtagcgcayatctgagctgtgggacccacatcccagatcccagcccagctgagcttcaggtgccaccatggtaactgccttgataacagacccctcctcccgaacagctgcttcctgagacatctcacacaccccaaaataagccacgcacactagattcctggcttcagaatctgcttctaagggaatccaaccaaacagaacaaccctctgaagcctccattttacagaagggggaaacaagtcatggagtgcagagtgactagggccccacagccaggggatggggatgccaggtccgagccaccaccgtttgaccctggcttcaggctctgcacctccacaaggcgcaaggcccagccaatggtcagtatgcttacccatcctctttccaacctcatgaggccccacgtcctctctttccaagccatccatt

SEQ ID NO: 82510 - DNA, 1023 bp, Homo sapiens
cagcgctgctcctgccttagtaccgatcatccaccaagcgctccccagggcagagggccaatcctctgaaaacgcagataacctggagcccagctcttggcatgtggacaagtaatcctaatataggtggagcatcccaaatccaaaaatcccaaattcaaaatgttcctaagtccaaaactttttgaacaccaacgtgacattcaaaggaatgctcagtggagcattttgtacttcagatttccagatttgggatgttcagccagtaagtataatacaaatatttcaaaatccaaagaaatacaagacacttctggtcccaagaatttcagatcagagatgctcaaccatgatacgaacggcagatgacaaagtcgcattggcatagcttgtacgtccaggcagtgtggcagggatttgttgcattttgacccattcaattctggtgacaatgctggcagtgaccttctgcaaggacccaagaccctcagccttaggaacaggccacgagtgtggcctaggcagtggccctcagccagggacggtcaggaagtggtgactgaaacatccacgtccccacccttggggtagcgcatatctgagctgtgggacccacatcccagatcccagcccagctgagcttcaggtgccaccatggtaactgccttgataacagacccctcctcccgaacagctgcttcctgagacatctcacacaccccaaaataagccacgcacactagattcctggcttcagaatctgcttctaagggaatccaaccaaacagaacaaccctctgaagcctccattttacagaagggggaaacaagkcatggagtgcagagtgactagggccccacagccaggggatggggatgccaggtccgagccaccaccgtttgaccctggcttcaggctctgcacctccacaaggcgcaaggcccagccaatggtcagtatgcttacccatcctctttccaacctcatgaggccccacgtcctctctttccaagccatccatt

SEQ ID NO: 82511 - DNA, 1023 bp, Homo sapiens
cagcgctgctcctgccttagtaccgatcatccaccaagcgctccccagggcagagggccaatcctctgaaaacgcagataacctggagcccagctcttggcatgtggacaagtaatcctaatataggtggagcatcccaaatccaaaaatcccaaattcaaaatgttcctaagtccaaaactttttgaacaccaacgtgacattcaaaggaatgctcagtggagcattttgtacttcagatttccagatttgggatgttcagccagtaagtataatacaaatatttcaaaatccaaagaaatacaagacacttctggtcccaagaatttcagatcagagatgctcaaccatgatacgaacggcagatgacaaagtcgcattggcatagcttgtacgtccaggcagtgtggcagggatttgttgcattttgacccattcaattctggtgacaatgctggcagtgaccttctgcaaggacccaagaccctcagccttaggaacaggccacgagtgtggcctaggcagtggccctcagccagggacggtcaggaagtggtgactgaaacatccacgtccccacccttggggtagcgcatatctgagctgtgggacccacatcccagatcccagcccagctgagcttcaggtgccaccatggtaactgccttgataacagacccctcctcccgaacagctgcttcctgagacatctcacacaccccaaaataagccacgcacactagattcctggcttcagaatctgcttctaagggaatccaaccaaacagaacaaccctctgaagcctccattttacagaagggggaaacaagtcatggagtgcagagtgactagggccccacagccaggggatggggatgccaggtccgagccaccaccgtttgacyctggcttcaggctctgcacctccacaaggcgcaaggcccagccaatggtcagtatgcttacccatcctctttccaacctcatgaggccccacgtcctctctttccaagccatccatt

SEQ ID NO: 82512 - DNA, 684 bp, Homo sapiens
tgcgacgctgggggcctggagagagagtgtagatgtgtcagtgcctccactcgctgctcaacctaacccacgggagctcggctcagtgcctggggcgaggactctgtgggggtagggggacagacagaacccaggctggggtrcagtgggagaatggaactcaggctgtgccgagcagagatcctggctcctcgctctgggtttcatgcctgcctctgccacccagatcccccccaacacacacacacacctgagcccctgctgcagcttcctggccacctgcctgcactgccatccccccagtgagcagtcagggccaccctctccaacctaagtcaggtcacgccatctgtgctccagacgcactcctgattcactcaagcagagtgaaacccacgtcctgctgcacccaggggacctggcccattgcctctgacctcggtctatccctgtggcttcctcagctccagcacgctggcctgcgctgctctgtggtcccccagctgagctccacccaggccctggcacacgtggctccttctgcccggtgggctccccaaggggcacctagcaccgctctgtctcctcttccagcctttctcaaatgccaccttctcagaaagccaccgtgccagccttagtccatttgtgccacataagaaaaataccataggctgaataatt

SEQ ID NO: 82513 - DNA, 847 bp, Homo sapiens
gggcagagacgatggctgtaacagaagtgaaccaggcgccaaggtcaggaagggctcgaggtgggcctgtggagggcgagcaggagccgaagctgagccctgaggaaggggaggcagcagcgtgggaaggcctgggggagaccagctcgtgccaaggccctggggcagggaggagctggtggaggcctctgtcaggtctgactgagcagcacagagtcctaacttgaatgccagcaccaggactccatcagcccagccagggccagcgctcccctgctggggtgcatggcctccggactccagcctcctccactcagcttctccatggtgccccacaggacagcaggagctttctctctagagcgcacatctagtttgttgataaagcatcatagaatgtgttcagagtgaatgaatggctcctctgtggccagcaacatgagactgactcggggtacagctgggatggaagagtgagagacgggtgaacaccaaggagctgcagagggtccccggaggggtgatgctcagtgatttagacttttttccttgttcttccctttatttccaaagttttcaacagagatgatctatgatcaaaacccacggtgacaagtgagaagggaaaaggtgctggccctttactctgaagtgagtggcgtccataagacaaaaggcaaaggcagctgtgcacagmacgggactccagctggcgaggtcattcccctccgggggcggaatgaagcttctgcacggtttaccagaactgaacaagcaagtggttgacgagtgggaggagcaggtttctcgcagatggagagagaggccacaggtaagaagagaggaa

SEQ ID NO: 82514 - DNA, 614 bp, Homo sapiens
cctcagctccctcatctgtccccgtctgtgtctcggttgcctcgagtgctccctgcttccagatggaaggaaggcgcctgctggttccagtggtggaggcgtggtgtgcacagtcgaagcggacggatgtgtcccccatgagctgtgtgatcatgggctagtggctgcccctctctgggcctcctttccatctgcaggtcatgggaactcttcctcttataagcaccgtggtgatgkagcagtccccagccacatgctgcaggacctgagacgggttgaagttggctttgttgagccagaaatctcaggccttcttccttggagcagggggagggaggtgttacattttaatcaaaccagtttggggccccaaagtctgatcaagaactaaacagctgttttagtggcagcaggttgagaggccgagatgactcaacatcagagaggccagggaggagcgacaggaaaggcctcctgctcccctccacccccagcccaggggctgtattcatcatgggagctgctctcctccccctccccggggcccagggtgacctgtgacctctccgctgtgaccatggtacagccagagtggacaaggacagaggagaggg

SEQ ID NO: 82515 - DNA, 614 bp, Homo sapiens
cctcagctccctcatctgtccccgtctgtgtctcggttgcctcgagtgctccctgcttccagatggaaggaaggcgcctgctggttccagtggtggaggcgtggtgtgcacagtcgaagcggacggatgtgtcccccatgagctgtgtgatcatgggctagtggctgcccctctctgggcctcctttccatctgcaggtcatgggaactcttcctcttataagcaccgtggtgatggagcagtccccagccacatgctgcaggacctgagacgggttgaagttggctttgttgagccagaaatctcaggccttcttccttggagcagggggagggaggtgttacattttaatcaaaccagtttggggccccaaagtctgatcaagaactaaacagctgttttagtggcagcaggttgagaggccgagatgactcaacatcagagaggccagggaggagcgacaggaaaggcctcctgctcccctccacccccagcccaggggctgtattcatcatgggagctgctctcctccccctccccggggcccakggtgacctgtgacctctccgctgtgaccatggtacagccagagtggacaaggacagaggagaggg

SEQ ID NO: 82516 - DNA, 1083 bp, Homo sapiens
aatcatgccccctgactgatgtcccccatggcctccagggcacctgagataaacccccaaaggcctcatgggccggcaagcctgggggatgtggccctcaacttaccctctcctttcacgcccgcctcgccctccatggccctccctcacttcccttggttaacagctgcagccatgtgggtttcaatttttcctgctgtccacattcttctctgcacaggaacttggcacatgcttcctggtgccctgtgctggcaagcttcttgggggccccttgatcttactttaaatatctttccctggtccccagttcagctcaggaccagttcttttattttctcctgtgtcctgttcccttcttcagagggctctcatagcacagtggttgggagcaagactgaggctctggtaccaggtgcctgggttcaaatccttgctccatgcctcacctgctgtgtgaccctgggcatgttacttaacctctctgtgctcagtttcatcacacatagagtgagagcggtgataataatagcaccaatagttatgaggtgccaacctaaataacacagagggaggctctctcaaacaagatgatgtttatttgggaataggcattattgggaatccccawgccacagaaagctatgtgtatcttcagggaggtaaaggaagacgaaagtttttaaaggaaaaatgaggaggattatgtaattgttttgggacaattatccttggctaccaaaatcaataacaagggtggcgtcagtctgaatttggacaggaagttgccgggcagatgtccttgcaaaagtgtttgatgagaccctgagattgaacatcagcaggcgagggggtccctcttccctgctctgttctggtctcaaaggcttgctgcgtccaccgggacaatgtgacttctggcatgtggggttctacccgtgcaccaggcatgctctagctgctttgagggtcttatcccgctgagcctcatggcaaccctgtgagagggccaaagcacagagagggtaaggaatctgcccaaggtcacacagcatattagtggcagagtcaaagtttgaacca

SEQ ID NO: 82517 - DNA, 764 bp, Homo sapiens
tccaaagagcataggcattttaacttttaattagaatattgccaaattgtcctctgaaccttatgatttttaatgccgtggacaccagacccatccattcacagattcacaaccaggtcatttcctccacacatttcctgcctcttctcctaattttagctctgattgcataatgcctgtggctgatccatagctcagcaggcaaacagttgttatctgaataggggtccaaagtttccccaaagtaggaagaggaggggtgggggaggcatgacgggaacacaaagaggaactaatatgtactgaacatcttccaggagttggagctttccctgtgaatctcatctgagcttcacagcagccatgtgaagtgggtcacagttctgtctctttcagctgagaaagctgtggctcagagaggttaatcaacttcatcaaagtcacacatagtgctatgggtggaattgtctccccacaaaagatatgttgaaaccctaacccctactccctcctcagtacctgagaatgtgaccttatttggaaatagggttgttgcagatgtaactagttcagatgaggtcacatggagtccaktgggccctaagtccaacatgactgctgtccttataaaaagagaaagatttggacttggacacagagacagagaagacagtcatatgaagacaggggccaagattggagtgatgccgccacaagcaaggaatccctccctggggctgccagaaactggaagaggcagggaa

SEQ ID NO: 82518 - DNA, 1476 bp, Homo sapiens
aagtatacttacctgtcatctaccatgtgatattaagcccatctagtaatgttttaatttcaaatattttaattttcaattatacaacacccattggcttcttcacactttccatttcactgttgatgttacacatctgtttattcatgatgagtatatttttctttaaattcttgaccatgttttaaatagatgctttacagtatagtctattgattccactatcttatagtttctattgcctgctttttcttttgactgtggaatacatttttctgtttctatacttgtctgatccctttttactgattgcaagacattgtgagtgagatattgtagacattaaagattctgttattagaagagcacttgggtaccatgcagtccatctttctacatttataaattataaaagagaatcagtccatagggagaaggcaatttaccaagtgctcagttagtattactcactgtagcagaactgaaactataattaaatttccaaccctgagttcagtgttttcccaactttccaacttcccatcttactgttttttcaatactttttccaaacttacttcatgggaataatattttctccttttaaggagggaatgctgatccctttcctgatttttgtgcctgaagatcacttattcactcttctagatctaggggtgccactactgttgctgctgacaatgatatctgcgatcattggacacctactgcttgccaagtactatgtttacactactatgtttcagtgaccatgcaggaattgtacttactttatctcatgctaaaccatgtcttcctcttttggcagcttaccatacaccactttgtctaccagcagaattaaatactcatttttcttatgtatccaaagcacatacatgtatagcaaattactcattataatatatcacaattgttaatacatgtggatatctctgacgttaggctctaagtctttcaagggccagtggagccctctaggtccataactcccagcatagcaccaggaacatatgttggggttcagttgcctccaatgaaagaggaaagccccctctctgggctagtatacatgccagtattgccagccttgtcagcaagtggcagctcagaggtcatcctatccttggccctatgaggcagagggccaactctactcagcatccactcaggactttgttgccatggacacctgacaaagttcttcagggaaagccaagacaatcgctaccctcccacccaggctgttttatccgtggccagacctgcagtgctgacaggtgtagaatgtccatcagacccttgcagctgggccagcccagaggctcatgggttctgggccctaaagctgaagtatcaggtcacaaacaagctggaaccaagggctcctcaggtcaggctgcccagagtagggaggaggaggaatagagatatyagccatcagggccgccagtc

SEQ ID NO: 82519 - DNA, 831 bp, Homo sapiens
cagcatatgtcctacctcaaagctataggagagctcaagacacatcacctcatattgcatcagttcctcttcaggtcggtcaagaccaggtttggaactcagcttgttcacrtctgtttccaagtcatcatcctaaaatggaatagtcatagaagagattacagtcaggaaatccaccctgagaagcatcaagacatgatatgtatgtgcttcttcagaatcttaggacatggttttcttgcctccaaattatagcactggcccatccagtgaagaatttgttatgctggattgtatttttaaaataaaaagaaagaagataaaggacttgtctcagcatttatgtcagtatttatcagccttcatcagaaataaaaatttgtataaaatgagataaactacataattgataaagcacattataaaagaaattctttatctcattgccactatcgtcagcatcattgtaattattgtccctctttatctatctttgacatttaggtttgtcagtcttttcacaaacatttaatcagcaccgactgtgagcaggtactcttcccggtactgaagtttcggtcacaatggaacagacaaacatccatgcttccatggtatttgccttttagcgagagaagaaaaacagtaaagaagaaagtaaacaaatgaataagttaatttccaacagttataactcctcttgaaatgataaaagagaatgatgttactaagactggggaatgggaggctgtttggattaggagatctcaggaggactcataaggaggtaaagttttaactgagacctaaatggcaaaaaaaaaaaaaaaa

SEQ ID NO: 82520 - DNA, 556 bp, Homo sapiens
tgatagatcaccatttcgaaaccttttaatgatgatggkgactctcctctgaatacttgtgtgttttccaagggttgtagggtcttacagagaaaagacaccaggaatgaaccagcccagtctcttcatcttttcatatcctagattaagtttccttaatgaaatagagaaaaaaaaaataccatatgttttacaagtatatttcattagttaaggaaaaacctggcagtactgaaaggttaaatccaataaacgtggaaaataaatgtttgtatttctgatccaaggggcaaaaaaatgcaatgttccatctatgtttcacaatttttctccaaacttcaaattaaaagaaaagtaattcccatgagtttcatttaatgatattttcaggtacagtatacacaccatgaccaactccatggcccccactcttgtgctttgcagcttcatccatcaattcctgcttgccttcaccccctccactgcaacctcagccatggcccagggtggtactaagggaaacacaacctggaaggccactgggaaggatgtcccc

SEQ ID NO: 82521 - DNA, 3814 bp, Homo sapiens
ctaaaaatacaaaaattagccaggcatggtggcatgcctgtaatcccagctacctgggaggctgaatcaggagactcactcgaacccaagaggtggaggttgcagtgagctgagattgtacaactacactccagcctgggggacaagtgcaaaactccatcaaaaaaaaataaaaaataaaaaatgaaaagaagtcctattctataaaatcagtgcagctaccagaaccatgggtgtcagatgtgcacatccagcagaaggcagtcttgcactccaaaggcactgactgtgggcccccagttcacgcactcaatacaatgggcttggctcttggagtggaagtaactgaatgccttcttagttgtttaagttttagcagcttaagcttttgctttttgtgggcttagcagttggttgacagagtagttgcctcggctctgataggttttacttctttcttcatgcttcgctgtgggagcagacaagtggcagagcagcaatgatgagagtggaccagcgctgcagacatgtaaccactgaataaaccaaaaatcaagagcctcttggtgacatgcacatgagcgactcgatgtctggatccttggcactgcgtatgggagatgaagtgctttcagtttgctcattagttgatttcagatgtttattcttatacagatcttatgtggacactacatccaaaacaacatatttacaaacttttttttttttaaggaaagcacttatatcacattcccagtaggtacacaagtgtatgttcatgcattgaagtgaaaatttcttagatcactgctaacctttgctacatgaaatgactctgatatattaaatttcattttgatttctatttcattaaaaactatagttgatacctataaaattgacttcacaatgcactattgggtcaaaatttccagtttgaaaaacagtgtgcctagacagtctggtgaagttcagtttccaaactaatcatccgcaggtctcctagttcctcaaatgcacatcttctgactcctttaggggtttcctatcctctagtgttgwtgtcttcctggggcagccctctattctgctcttgattgaatttcctctcagatatcacctgcttgcctggctatgatgatcattgctgctgtagtgattcataaatgtatattcctaactgtggttgcgttcctgaattctgtatgatgtttccagcagcattccaaacagtttcatgtagccttctgttgtacccttcatcttgaactcagcaccaaaatcaaaatcattattttgtctaaacactgcaacttctcttcttagtctattaatggctctcttattcccctatctacctagcctaactattccaggccatcactgactcttcactctccttcaccctccgcagctcacctttcctcagctctcgttaattttttgctcacaacttctctctcacttttccattttgacaccacatcatctcaatttaaaaaaccaaatggcttctcattacctacagagttgaatgttaactctttagaatattggactttggcctcaaatcttatctccatcattgccctaaatgtgccctttgctgcactaaacattgatctcctacttatgccctaggaagaaataaatattttctagtttctcaggaataagcctcaatttttttgatgaatgtgacacttatcatgcatttccagctatataatgtcactgtttggattaatatttatttaggttagcatattattaggtactttttagagagttgtgatctgggagtcaccttgaattgctctctcaacatcgaaagggtaactaagccatactgatactgtcccctaaaccaattatcctaaaactttcatgtgcatataaattatctgttagaataaagattcttattcagcaggccagggatgtggtttgagattctgcgtttctatctggctttcagaaaatgtgaggctgctggttagagacccacactttgagtagcaagattcaaatgtggctttaacccatcccttcttcctccatgccactttttgggtttaagaccttattattacttattctcctgactggtctatttgccacctgtccctccccaccactagtctgtctcataaaaccattatctaatggatcattacttcatttgtgaacttcctaaaacaaaagtgcaatggaaattagaaatgcgatccttagagacctggcctctgaactaggattgggttaggcgccttgcttgggacatccttattctattcctgtttctgtggtttccttcttctctgctcattcattttgatgaaattaattaggctgttctgcttttcccaaaacactgattttctttttgccccagcccaagccaggccccatatactatggcacctggatttttcacacaacttgaattttcagaaacaccttccatgtgttccgttttcaatccactgttgtgaaaactctgtgggattcaacaacagtgggattgaagaagctgaaagttgataagaggaaaaccgtttgaaggataaatgaagtagtccatccatgaaagctagcctcgccctcttttaactgccctatggtcattttggtctccctgagtgggggtgtcatcccagttgtgggtttgcacaggggcctgtgaatttcaggcttttgctcttgtggaactgccttgtaggttatggggagcaatgctttcacatgtactgcttttctactgtattttactttatatttattctttcatttatcttcctttttactgctggctctgttgttcagtattagctaatatattgcaaagtgagctttcattgaccaggcagaggccagggtagggccactgagagattctggagaacaacagatggggaggaagcagaggtgtgcagcgagattcctgggattgggatcccagctctgctgacatgtctgtacagtcttggaagtgtgatctagcctctttggcctgttcctccaatcctgagagaggtggtggaaacagatcactgcttagcaggccttagggataagttactagggccacacagaatcttgtatttttttaaaaaagcaaacacaactctcctccctataattatactacactgccctcaatgccagtgaagttttcctttgccctgtaggtagatttttgtgtgaccttctcagaagcaggaaacagattgaaaagccactaagatgtgggtcaaaaagtatttttcattctcatatgtgtccctttgttgcaaagactgtgacattcctccatggcagaaaggaatgaatttggaagaaaaatcccaacataactattttccaccctaaggaaacagcctctctttgcaatgtgtgaatgcattttccactgcatccccaggggtatgagtgtttcaagaagtttgcactgtgctgctacattcactaagcccccaagccccactccttcccagaccatcctccagagtccctgcaagtttccagaaacaaacaaatcaagagactgacaagagctctgcctggtatgaataatagaaaaatgagccactctgtgcaaggaagttggtggaaggtgggaggcaagcaggggagagaaagagattttcagcagcagaggggacctcagagacccatctacaagacggacacttcgctcagcgttatttctgcatttatgcctctttaatggtcagcggggcaatcaatagattgcctgctacctggttaatcatgggtctgttatggggtggcaatgggcatgctggctgtg

SEQ ID NO: 82522 - DNA, 3814 bp, Homo sapiens
ctaaaaatacaaaaattagccaggcatggtggcatgcctgtaatcccagctacctgggaggctgaatcaggagactcactcgaacccaagaggtggaggttgcagtgagctgagattgtacaactacactccagcctgggggacaagtgcaaaactccatcaaaaaaaaataaaaaataaaaaatgaaaagaagtcctattctataaaatcagtgcagctaccagaaccatgggtgtcagatgtgcacatccagcagaaggcagtcttgcactccaaaggcactgactgtgggcccccagttcacgcactcaatacaatgggcttggctcttggagtggaagtaactgaatgccttcttagttgtttaagttttagcagcttaagcttttgctttttgtgggcttagcagttggttgacagagtagttgcctcggctctgataggttttacttctttcttcatgcttcgctgtgggagcagacaagtggcagagcagcaatgatgagagtggaccagcgctgcagacatgtaaccactgaataaaccaaaaatcaagagcctcttggtgacatgcacatgagcgactcgatgtctggatccttggcactgcgtatgggagatgaagtgctttcagtttgctcattagttgatttcagatgtttattcttatacagatcttatgtggacactacatccaaaacaacatatttacaaacttttttttttttaaggaaagcacttatatcacattcccagtaggtacacaagtgtatgttcatgcattgaagtgaaaatttcttagatcactgctaacctttgctacatgaaatgactctgatatattaaatttcattttgatttctatttcattaaaaactatagttgatacctataaaattgacttcacaatgcactattgggtcaaaatttccagtttgaaaaacagtgtgcctagacagtctggtgaagttcagtttccaaactaatcatccgcaggtctcctagttcctcaaatgcacatcttctgactcctttaggggtttcctatcctctagtgttgttgtcttcctggggcagccctctattctgctcttgattgaatttcctctcagatatcacctgcttgcctggctatgatgatcattgctgctgtagtgattcataaatgtatattcctaactgtggttgcgttcctgaattctgtatgatgtttccagcagcattccaaacagtttcatgtagccttctgttgtacccttcatcttgaactcagcaccaaaatcaaaatcattattttgtctaaacactgcaacttctcttcttagtctattaatggctctcttattcccctatctacctagcctaactattccaggccatcactgactcttcactctccttcaccctccgcagctcacctttcctcagctctcgttaattttttgctcacaacttctctctcacttttccattttgacaccacatcatctcaatttaaaaaaccaaatggcttctcattacctacagagttgaatgttaactctttagaatattggactttggcctcaaatcttatctccatcattgccctaaatgtgccctttgctgcactaaacattgatctcctacytatgccctaggaagaaataaatattttctagtttctcaggaataagcctcaatttttttgatgaatgtgacacttatcatgcatttccagctatataatgtcactgtttggattaatatttatttaggttagcatattattaggtactttttagagagttgtgatctgggagtcaccttgaattgctctctcaacatcgaaagggtaactaagccatactgatactgtcccctaaaccaattatcctaaaactttcatgtgcatataaattatctgttagaataaagattcttattcagcaggccagggatgtggtttgagattctgcgtttctatctggctttcagaaaatgtgaggctgctggttagagacccacactttgagtagcaagattcaaatgtggctttaacccatcccttcttcctccatgccactttttgggtttaagaccttattattacttattctcctgactggtctatttgccacctgtccctccccaccactagtctgtctcataaaaccattatctaatggatcattacttcatttgtgaacttcctaaaacaaaagtgcaatggaaattagaaatgcgatccttagagacctggcctctgaactaggattgggttaggcgccttgcttgggacatccttattctattcctgtttctgtggtttccttcttctctgctcattcattttgatgaaattaattaggctgttctgcttttcccaaaacactgattttctttttgccccagcccaagccaggccccatatactatggcacctggatttttcacacaacttgaattttcagaaacaccttccatgtgttccgttttcaatccactgttgtgaaaactctgtgggattcaacaacagtgggattgaagaagctgaaagttgataagaggaaaaccgtttgaaggataaatgaagtagtccatccatgaaagctagcctcgccctcttttaactgccctatggtcattttggtctccctgagtgggggtgtcatcccagttgtgggtttgcacaggggcctgtgaatttcaggcttttgctcttgtggaactgccttgtaggttatggggagcaatgctttcacatgtactgcttttctactgtattttactttatatttattctttcatttatcttcctttttactgctggctctgttgttcagtattagctaatatattgcaaagtgagctttcattgaccaggcagaggccagggtagggccactgagagattctggagaacaacagatggggaggaagcagaggtgtgcagcgagattcctgggattgggatcccagctctgctgacatgtctgtacagtcttggaagtgtgatctagcctctttggcctgttcctccaatcctgagagaggtggtggaaacagatcactgcttagcaggccttagggataagttactagggccacacagaatcttgtatttttttaaaaaagcaaacacaactctcctccctataattatactacactgccctcaatgccagtgaagttttcctttgccctgtaggtagatttttgtgtgaccttctcagaagcaggaaacagattgaaaagccactaagatgtgggtcaaaaagtatttttcattctcatatgtgtccctttgttgcaaagactgtgacattcctccatggcagaaaggaatgaatttggaagaaaaatcccaacataactattttccaccctaaggaaacagcctctctttgcaatgtgtgaatgcattttccactgcatccccaggggtatgagtgtttcaagaagtttgcactgtgctgctacattcactaagcccccaagccccactccttcccagaccatcctccagagtccctgcaagtttccagaaacaaacaaatcaagagactgacaagagctctgcctggtatgaataatagaaaaatgagccactctgtgcaaggaagttggtggaaggtgggaggcaagcaggggagagaaagagattttcagcagcagaggggacctcagagacccatctacaagacggacacttcgctcagcgttatttctgcatttatgcctctttaatggtcagcggggcaatcaatagattgcctgctacctggttaatcatgggtctgttatggggtggcaatgggcatgctggctgtg

SEQ ID NO: 82523 - DNA, 3814 bp, Homo sapiens
ctaaaaatacaaaaattagccaggcatggtggcatgcctgtaatcccagctacctgggaggctgaatcaggagactcactcgaacccaagaggtggaggttgcagtgagctgagattgtacaactacactccagcctgggggacaagtgcaaaactccatcaaaaaaaaataaaaaataaaaaatgaaaagaagtcctattctataaaatcagtgcagctaccagaaccatgggtgtcagatgtgcacatccagcagaaggcagtcttgcactccaaaggcactgactgtgggcccccagttcacgcactcaatacaatgggcttggctcttggagtggaagtaactgaatgccttcttagttgtttaagttttagcagcttaagcttttgctttttgtgggcttagcagttggttgacagagtagttgcctcggctctgataggttttacttctttcttcatgcttcgctgtgggagcagacaagtggcagagcagcaatgatgagagtggaccagcgctgcagacatgtaaccactgaataaaccaaaaatcaagagcctcttggtgacatgcacatgagcgactcgatgtctggatccttggcactgcgtatgggagatgaagtgctttcagtttgctcattagttgatttcagatgtttattcttatacagatcttatgtggacactacatccaaaacaacatatttacaaacttttttttttttaaggaaagcacttatatcacattcccagtaggtacacaagtgtatgttcatgcattgaagtgaaaatttcttagatcactgctaacctttgctacatgaaatgactctgatatattaaatttcattttgatttctatttcattaaaaactatagttgatacctataaaattgacttcacaatgcactattgggtcaaaatttccagtttgaaaaacagtgtgcctagacagtctggtgaagttcagtttccaaactaatcatccgcaggtctcctagttcctcaaatgcacatcttctgactcctttaggggtttcctatcctctagtgttgttgtcttcctggggcagccctctattctgctcttgattgaatttcctctcagatatcacctgcttgcctggctatgatgatcattgctgctgtagtgattcataaatgtatattcctaactgtggttgcgttcctgaattctgtatgatgtttccagcagcattccaaacagtttcatgtagccttctgttgtacccttcatcttgaactcagcaccaaaatcaaaatcattattttgtctaaacactgcaacttctcttcttagtctattaatggctctcttattcccctatctacctagcctaactattccaggccatcactgactcttcactctccttcaccctccgcagctcacctttcctcagctctcgttaattttttgctcacaacttctctctcacttttccattttgacaccacatcatctcaatttaaaaaaccaaatggcttctcattacctacagagttgaatgttaactctttagaatattggactttggcctcaaatcttatctccatcattgccctaaatgtgccctttgctgcactaaacattgatctcctacttatgccctaggaagaaataaatattttctagtttctcaggaataagcctcaatttttttgatgaatgtgacacttatcatgcatttccagctatataatgtcactgtttggattaatatttatttaggttagcatattattaggtactttttagagagttgtgatctgggagtcaccttgaattgctctctcaacatcgaaagggtaactaagccatactgatactgtcccctaaaccaattatcctaaaactttcatgtgcatataaattatctgttagaataaagattcttattcagcaggccagggatgtggtttgagattctgcgtttctatctggctttcagaaaatgtgaggctgctggttagagacccacactttgagtagcaagattcaaatgtggctttaacccatcccttcttcctccatgccactttttgggtttaagaccttattattacttattctcctgactggtctatttgccacctgtccctccccaccactagtctgtctcataaaaccattatctaatggatcattacttcatttgtgaacttcctaaaacaaaagtgcaatggaaattagaaatgcgatccttagagacctggcctctgaactaggattgggttaggcgccttgcttgggacatccttattctattcctgtttctgtggtttccttcttctctgctcattcattttgatgaaattaattaggctgttctgcttttcccaaaacactgattttctttttgccccagcccaagccaggccccatatactatggcacctggatttttcacacaacttgaattttcagaaacaccttccatgtgttccgttttcaatccactgttgygaaaactctgtgggattcaacaacagtgggattgaagaagctgaaagttgataagaggaaaaccgtttgaaggataaatgaagtagtccatccatgaaagctagcctcgccctcttttaactgccctatggtcattttggtctccctgagtgggggtgtcatcccagttgtgggtttgcacaggggcctgtgaatttcaggcttttgctcttgtggaactgccttgtaggttatggggagcaatgctttcacatgtactgcttttctactgtattttactttatatttattctttcatttatcttcctttttactgctggctctgttgttcagtattagctaatatattgcaaagtgagctttcattgaccaggcagaggccagggtagggccactgagagattctggagaacaacagatggggaggaagcagaggtgtgcagcgagattcctgggattgggatcccagctctgctgacatgtctgtacagtcttggaagtgtgatctagcctctttggcctgttcctccaatcctgagagaggtggtggaaacagatcactgcttagcaggccttagggataagttactagggccacacagaatcttgtatttttttaaaaaagcaaacacaactctcctccctataattatactacactgccctcaatgccagtgaagttttcctttgccctgtaggtagatttttgtgtgaccttctcagaagcaggaaacagattgaaaagccactaagatgtgggtcaaaaagtatttttcattctcatatgtgtccctttgttgcaaagactgtgacattcctccatggcagaaaggaatgaatttggaagaaaaatcccaacataactattttccaccctaaggaaacagcctctctttgcaatgtgtgaatgcattttccactgcatccccaggggtatgagtgtttcaagaagtttgcactgtgctgctacattcactaagcccccaagccccactccttcccagaccatcctccagagtccctgcaagtttccagaaacaaacaaatcaagagactgacaagagctctgcctggtatgaataatagaaaaatgagccactctgtgcaaggaagttggtggaaggtgggaggcaagcaggggagagaaagagattttcagcagcagaggggacctcagagacccatctacaagacggacacttcgctcagcgttatttctgcatttatgcctctttaatggtcagcggggcaatcaatagattgcctgctacctggttaatcatgggtctgttatggggtggcaatgggcatgctggctgtg

SEQ ID NO: 82524 - DNA, 1861 bp, Homo sapiens
  misc_feature (1)...(1861): n = A,T,C or G
atatgtatatacatatacacacacaattagtaagtactcagcccaaaaaagaaaaaaaatggcaaagtgacttgacttggtctgagaagaaacagaacaggcaactgagctgaaaagaccatgtgaccacacttgagatgaaaaagcaactctataattaaccactcctaattatgatctgagcatcacttaggagaaccactgtgtggaaaaactaaaagtgcaaatgattaaatgtatgtcatttttgctttggtgagaagtgtgcatttttaagatgtaaaaattatttttcaaactaaaataaactacactgtcagtaattcatcaaaaacttaatgagcttttttcttcttaaagattgggtaaaatgattttattacttgtgaaggaatccttcccatatttataggttactcaaaaattttgactaattccacaaaaatttcctgaggctttgtggcagacagtgtgctaagtgctgataaatagtggtatattcctccttataagctgtctatagactataagctatatttaccaattttgataaatgctattggttctttctagacattgtcactttcttcttaattatgttgttaatttctgttgctgagctctttccatagacaacgcaaacataaacttgaattgggctcttcaattatttgttactggaatactaataaaaggttgtacatttattgatctagaggcattatcgccaagtatttatatatttatatatttatatattagacatatatccaagtatgccattataaaatgtgtcttctaaacaacagatgcagaataacagcaataaaaaccacagtagagacttcaatgacttttcattaaccagtcaacctctccagctaaactatgattttgcttcaaaagaatagcaggttttagatttcaataaaaattgaccccttgtagagatgtttatgtgactattacatttaatttattttttgctttattttatcagaatctttttctgccaaacattgcaattcaatgttttatagatcacacattctgagaccgagttttagttgaggttagtgattaatttgaaaaataaactcactgaagttgcagagtatgggagatacctgatttatagatatagaaaaacaccaccaaaactttggaattcctrgataactcttagtctctttccaaagcacaatggggtaaacagaaaatatggcttaaatgtcacattcggttcaattataagatgtggaagagattaagataaagaaataatcagtaatagaagcatcatcttctaaccagagattccttatgcatttgaaaatataaactatgagatggactttcagtaactacatctacatactgaatattaaggttttcagcaagaagtaagttttcatcatctgaataaattccaaaagttggctaaaatcataagtggtggtgttgaggtggcagagaaaaaatgagaaggccacaatgacaaccatctaagtaagagatgttgaggcctccactgaaagagagtcagtgttattagaaagtgagaaacagtgtgcagtagcattggacagagtgaatcgatttggaggctgagggagaaagggaagaacaaggtaactgtgtggttcaagcctgggtgataaatactgaaaaaacggacagaaatgagcaggaaggaagcagtttggaaagagggggttaatcctgttgaaatgggtgcattctgggtcatgcagattnnnnnnnnnnnnnnnnnnnnnnnnnnnnnnnnnnnnnnnnnnnnnnnnnnnnnnnnnnnnnnnnnnnnnnnnnnnnnnnnnnnnnnnnnnnnnnnnnnnntttt

SEQ ID NO: 82525 - DNA, 1290 bp, Homo sapiens
aattcctctctatttggattgtgaacatgcattaatgcttacataaaatggggctgtgcggctggatgcggtggctctcgtctgtaatcccagcactttgggaggcggaggcgggcggatcacgaggtcaggagatcgagaccatcctggctaacatggtgaaaccctgtctctactaaaaatacaaaaaattagccgggcgaggtggcgggcacctgtagtcccagctactcgggaggctgaggcaggagaatggcatgaacctggggggcggagcctgcagtgagccaagatcgggccactgcattccatcctgggcgacagcaagactccatctcaaaaaataaataaataaaataaataaataaaatggggctgtgcattatatattggcaaaatactccaaaacaaaacaaaacaaaagagagccacccagtaaaagcagtgtctggaggagcctaaaatatgcttaaatgtatatggtcccacaataggttgtctgcaggctgaggatcaaggagagccagtctgagttccaaaactgaagaatttggagtctgatgttcgagggcaggaaacatccagcacgggagaaaggtgtaggatggggagctaggccagtctctcttttcacattcttctgcctgcttacattctagccgtgctggcagctgattagattgtgcccacccacattaagggtgggtctgcctttcccagcccactgactcaaatgttaatctcctttggcaacaccctcacagacacacaaaggatcaatacttgcatccttcaatccaaccaagttgacactgagtgttaaccatcacagccatttattatgtttacttggtaatatcagagactgaaacattttcactcttttagcaatgacatcgggttgtccagccaacayggaggtgattttggtggggaattcttatcaaaattattcttaatagaaagacataacaatgtttattaatatatttcagatttaccgaatgtatttaaacatagctttgaaaaaaatctccatatttccgtagacttctgatagttttagagaatcattttctcagagccctagagtttattctagaccagggctctgagtttttcctaaggcagatgatgctgttccccaaactcttcattttcttgtccaaagattgtgtggctaccatatgtgaatggtggccccctcaagtctttgaataaaatgatgttagtgtccctggatggatagtggctgctttcctgcagggaatgattactatgacttatgga

SEQ ID NO: 82526 - DNA, 1290 bp, Homo sapiens
aattcctctctatttggattgtgaacatgcattaatgcttacataaaatggggctgtgcggctggatgcggtggctctcgtctgtaatcccagcactttgggaggcggaggcgggcggatcacgaggtcaggagatcgagaccatcctggctaacatggtgaaaccctgtctctactaaaaatacaaaaaattagccgggcgaggtggcgggcacctgtagtcccagctactcgggaggctgaggcaggagaatggcatgaacctggggggcggagcctgcagtgagccaagatcgggccactgcattccatcctgggcgacagcaagactccatctcaaaaaataaataaataaaataaataaataaaatggggctgtgcattatatattggcaaaatactccaaaacaaaacaaaacaaaagagagccacccagtaaaagcagtgtctggaggagcctaaaatatgcttaaatgtatatggtcccacaataggttgtctgcaggctgaggatcaaggagagccagtctgagttccaaaactgaagaatttggagtctgatgttcgagggcaggaaacatccagcacgggagaaaggtgtaggatggggagctaggccagtctctcttttcacattcttctgcctgcttacattctagccgtgctggcagctgattagattgtgcccacccacattaagggtgggtctgcctttcccagcccactgactcaaatgttaatctcctttggcaacaccctcacagacacacaaaggatcaatacttgcatccttcaatccaaccaagttgacactgagtgttaaccatcacagccatttattatgtttacttggtaatatcagagactgaaacattttcactcttttagcaatgacatcgggttgtccagccaacatggaggtgattttggtggggaattcttatcamaattattcttaatagaaagacataacaatgtttattaatatatttcagatttaccgaatgtatttaaacatagctttgaaaaaaatctccatatttccgtagacttctgatagttttagagaatcattttctcagagccctagagtttattctagaccagggctctgagtttttcctaaggcagatgatgctgttccccaaactcttcattttcttgtccaaagattgtgtggctaccatatgtgaatggtggccccctcaagtctttgaataaaatgatgttagtgtccctggatggatagtggctgctttcctgcagggaatgattactatgacttatgga

SEQ ID NO: 82527 - DNA, 232 bp, Homo sapiens
cccacactctctgaacgggtggcaccggtgaaaagcagagtgagggtaagcagcatttcctcccatttcttggacatattacttatctccaagcagtctgggtcagtacawctgtctgctcaatagcttgactttgagagcagccacgtcaaactgttcctacaaattgaggtttaaaacaacttaaatatttcattcaacggccgtttgcactttgcatttttgtgctttt

SEQ ID NO: 82528 - DNA, 544 bp, Homo sapiens
acacacacacatatatttatttcacagtgacaactattagagtatgtttacatggtttcctagataataatggcctggatactcacaacttgtttgcttcctgttggagaatagaattttatctaattagtgattgtgtttstatatggcaccctaaacaaaaataccttcttttctgctccatggactgagcgagatgagaccacgtgggaggatgcaatagaggcctattggccacattgttttgctaacactgaatctcagagctaaacgggcttcccccttcccatcccagaagccctccatctcccaaggagtgcagtttctaaataaacagcccagcccggcatcaagcagcaattcacttagcaaagaatggatgagagggctgaacagagtattcagttttctgaaatttttcagtaaggccatcactctcccttcccaggggcaaagttagtaaagggaaggacatcagtagtagggcaaaaacctatccactttaagaactgcaattaattaataaatgttccagttcatgctg

SEQ ID NO: 82529 - DNA, 544 bp, Homo sapiens
acacacacacatatatttatttcacagtgacaactattagagtatgtttacatggtttcctagataataatggcctggatactcacaacttgtttgcttcctgttggagaatagaattttatctaattagtgattgtgtttgtatatggcaccctaaacaaaaataccttcttttctgctccatggactgagcgagatgagaccacgtgggaggatgcaatagaggcctattggccacaytgttttgctaacactgaatctcagagctaaacgggcttcccccttcccatcccagaagccctccatctcccaaggagtgcagtttctaaataaacagcccagcccggcatcaagcagcaattcacttagcaaagaatggatgagagggctgaacagagtattcagttttctgaaatttttcagtaaggccatcactctcccttcccaggggcaaagttagtaaagggaaggacatcagtagtagggcaaaaacctatccactttaagaactgcaattaattaataaatgttccagttcatgctg

SEQ ID NO: 82530 - DNA, 544 bp, Homo sapiens
acacacacacatatatttatttcacagtgacaactattagagtatgtttacatggtttcctagataataatggcctggatactcacaacttgtttgcttcctgttggagaatagaattttatctaattagtgattgtgtttgtatatggcaccctaaacaaaaataccttcttttctgctccatggactgagcgagatgagaccacgtgggaggatgcaatagaggcctattggccacattgttttgctaacactgaatctcagagctaaacgggcttcccccytcccatcccagaagccctccatctcccaaggagtgcagtttctaaataaacagcccagcccggcatcaagcagcaattcacttagcaaagaatggatgagagggctgaacagagtattcagttttctgaaatttttcagtaaggccatcactctcccttcccaggggcaaagttagtaaagggaaggacatcagtagtagggcaaaaacctatccactttaagaactgcaattaattaataaatgttccagttcatgctg

SEQ ID NO: 82531 - DNA, 646 bp, Homo sapiens
ctgtactagactgtaagatccctaaggacagcattcagttttcataataggtgaacagactagagtaccttaaaaataagctaaaatatctaagaagtagcatcaggtrtatctcagccttccataaatacatgctcagtgaatggcaacagagataaaggacatgttgaagtagggctgggcacagtgactcacacctgtaatcccagcactttgggaggctgaggcaggtggatcacatgaggtctggagttcaagaccagcctggccaaaatggagaaaccctgtctctactaaaaatacaaaatttagccaggcatgctggtggttgcctgtaatcccagctacttgggaggctgaggtgggagaatctcttgcacccgggaggcagaggttgcagtgagctgaggtcatgccactgcattacagcctgggcgacaagagcgagactccatctcaaaaaaaaaaaaaaaagcactttgaaaataaaaaaacgtatactaaaatagtatacaactgtacctaaattaaaataatttttaaaagttgaacagagggtagggaatttctagtcattgactcattacttaccctgtacacaccccaaggtgaatatgtagccaggatttaaactgtgttttttgtg

SEQ ID NO: 82532 - DNA, 936 bp, Homo sapiens
cttctattctggtttttctaaagcttaataataaaatacagagttagactgtggttttggatcacaaaacttcactttctgttaacagtaatatattttctattcaaagagcagatatctgcaaatcttactaattcaaattaaagcactttaaaagaatctcactgttcagatgcagcacagaaggaatctgagcagtcacaatacatgacaaaataattttgacaaaaattttaaaaattattcatgaacagccctaacaattttagatattattgacttctaaaaccatgaactcatgttgcaaatatattcattagatttaaaaatttttctctcgtttactatatactacatgctattccactactttatgtggtagggaaaattgtttaacctgcagctcacaggccacatgcggcccaggacagctttgaatgcagcccaacacaaattcataaactttttaaaaacattatgagattttttaatgtgcttttaaagcttatcagctattgttagtgtatttttgtgtgacccaaggcaattcttcttctttcagtgtggcccagggaagccacagtgtataaaacagaccaatatccttgcctactagcaaggggaaaaagaaaaaaaagcgtaataaataagtgaagtatattgcgggttctaagatgatcaatacttcagataaaatagagcagagtaccagaggtgcgagtagtggagagtgcacacgtgacaactttaaataggggcatgggtcaggttagatatcactgtgaaggtgaaatttcagcaaaggctaaaagagtgcaaacaagttcggcaggggkatagctggggaagagcattttaggaagaggaagtagccgttaggaagaggaaatagccgttaggaagaggaaatagccattaggaagaggaaatagccat

SEQ ID NO: 82533 - DNA, 936 bp, Homo sapiens
cttctattctggtttttctaaagcttaataataaaatacagagttagactgtggttttggatcacaaaacttcactttctgttaacagtaatatattttctattcaaagagcagatatctgcaaatcttactaattcaaattaaagcactttaaaagaatctcactgttcagatgcagcacagaaggaatctgagcagtcacaatacatgacaaaataattttgacaaaaattttaaaaattattcatgaacagccctaacaattttagatattattgacttctaaaaccatgaactcatgttgcaaatatattcattagatttaaaaatttttctctcgtttactatatactacatgctattccactactttatgtggtagggaaaattgtttaacctgcagctcacaggccacatgcggcccaggacagctttgaatgcagcccaacacaaattcataaactttttaaaaacattatgagattttttaatgtgcttttaaagcttatcagctattgttagtgtatttttgtgtgacccaaggcaattcttcttctttcagtgtggcccagggaagccacagtgtataaaacagaccaatatccttgcctactagcaaggggaaaaagaaaaaaaagcgtaataaataagtgaagtatattgcgggttctaagatgatcaatacttcagataaaatagagcagagtaccagaggtgcgagtagtggagagtgcacacgtgacaactttaaataggggcatgggtcaggttagatatcactgtgaaggtgaaatttcagcaaaggctaaaagagtgcaaacaagttcggcagggggatagctggggaagagcattttaggaagaggaagtagccgttaggaagaggaartagccgttaggaagaggaaatagccattaggaagaggaaatagccat

SEQ ID NO: 82534 - DNA, 2731 bp, Homo sapiens
agaggaccccacagagccctaagaagatatgattttgtattgtgattctgtttctcccttaatgacttctcaccatgcaaggagataaacacatgtcataaatctgtttatattcctacagtcctaccacaaaaaaaagtygctattcaatttatgtgtttttaaaacgtgtaatgatagggacttcaccattctgattatttcaagcagacagaatatccgatctcagtattctaagaagacacctagaatccagaaaaaaaataatgaaagaaggaaaaccaatataatgaataacagctatctcccaagcttgcattaatttacaagttatctcatttaatttttacaagaaccttaaatatttgaatttaaaaatcaggtcaagcaacaaatgttctagtattggcaacatgtaaacacgtatcgtcaggtatggctgaaacaaagtaaccttttcatggaaggacagacaggtaaattagtggacatttaattaatgttcatattgaggttaatttccagaatctgttaaacagaagcagctgcataaagtgaccagcaagactccaattgcaagagaggagtggaagggtagacataagtttcagaagttcagcagagtgtcgggagaggataaggttcttttggatatcaggatcctttgatttgaagagactggtgctaaggatggaaaataaagggaccacagcttcaacatcaggaatccgagtgacttggaaactgtgataccaaaagcatgtacaggtccaagacagcattgacatgtctacattataatcagggccgccaacgtgtgcagagtgtgtacaggtctaagacagcattgacatgtctacgttataatcagggccaacgtgtgtagagcgtgtacaggtccaagacagcattgatgtgtctacgttataatcagggccaatgtgtgaagagcgtgtacagctctaagacagcattgacgtgtctacattataatcagggccaacgtgtgtagagtgtgtacaggtctaagacaacattgatgtgtctacattataatcagggccgccaacgtgtgcagagcgtgtacaggtctaagacagcattgatgtgtctacattataatcagggccaacgtgtgaagagcgtgtacagctctaagacagcattgacgtgtctacgttataatcagggccaatgtgtgaagagcgtgtacaggtctaagacagcattgatgtgtctactttataatcagggccaatgtgtgaagagtgtgtacaggtctaagacagtattgacgtgtctacgttataatcagggccaacgtgtgtagagtgtgtacaggtctaagacacattgacatgtctacattataatcagggccaatgtgtgaagagtgtgtacaggtctaagacagcattgatgtgtctacattataatcagggccaacgtgtgaagagcatgtacaggtctaagacagcattgatgtgtctacattataatcagggccaacgtgtgaagagcatgtacaggtctaagagagcattgatgtgtctacattataatcagggccaacgtgtgaagagcgtgtacaggtctaagacagcattgacatgtctacgttataatcagggccaatgtgtgcagagcgtgtacaggtctaagacagcattgatgtgtctacattataatcagggccaatgtgtgtctcagggtttgcagtagagcagacactttcaggtggtttatgagtccaaagactaagagtcaaacagctcctgacagttcagatggttagaggttatttataaggaggaagaggcatacctttatagaacaaagaagctctgggagaaaagaaactcacttgtgctaatttaaagtgagtagaatgcaagagaaacagagcagtgactggaaaatggtttgacagacctgagttgtgtctgtttggagcaactaaatttcacctgtttaggttggagcgtttcgttgttgtcattgctattttaagagctagtttcacataggaagattggctgcttctgtgtatatcgtatagttactaaaatcactacccaggaagctgtagcacagcactcattaatgaactggactgttggaatggcctaaatttggtgggcttgttcagcatgagataactgaaaccctcatactggttttgcagtcgaatccagtgtgtagggcaaatcgattcatcacgtgtctgtgttgttgctaaagtcgacttactcctgaatagcatggaagaagtcatatttgactttatgtgttaaaaccaaggtacctattgggtttggtatggttcagccacacctggaattaataggacttgtactgagtggccattttaggtaaagaaataagtacttattgcagtatttgtagatatcaaatttatgtagaattctacattcatctatatgcaaatgtagaattatatatattatatatttatatatatatatatattgagttccctgagcatattttgtatttttaatctgtttattcttcactgctattttgtgtattttctgatgtcaccttatccttcttccctctttgtagatcaagaaattgaatcagagagactaatatccttctcagtgtcactgattttttgtgtttacttaatatctcttaagcacccaccgtatacaaagtaccttgtgagtcattgggaataaaaagatgtataaattaatcccca

SEQ ID NO: 82535 - DNA, 719 bp, Homo sapiens
aaattatggagattgaagagataatttccattatttaatctctctgtgccttagttcctcatttgtaaaaaaggaataaatagtatctccctcataagactattcataggattaatttacaaatgtaaattgtgaattatgttatacacaggaartgtgtggagcacggtaattaatcaaaatgttagctcatgatgttatgattgttgtagtcgttatgccttttctttgcattttggaagtttacgtgtctaaaagtttgcatattaaggtaagcatacatacacaatccaccctgacatttagtcttgatgttgaggactttgatattggtgaccaactttgagacccacttccaaaaataaagtacataaaaaacctactgttaatgttactgaacggatcgtgggtctgccgactagacgcagcgaaaccaaacactgacattgagattgcagcgagagaaagtgaggcgtttactgcagggcgccaggcagggagacttgtgccgctcattcctaagactgcaactccccagctgcttgcagctaagggttttcaaggcagggaggcagaggtttcaagcaatgaaggatatgcactgacgtgaccgaagcaggccggacatctcaaagcggaggccacgggccatcggcagattcgattcttttctgatttgcagttggttaagaaggcaaagcgttgtctgaatatgtggg

SEQ ID NO: 82536 - DNA, 719 bp, Homo sapiens
aaattatggagattgaagagataatttccattatttaatctctctgtgccttagttcctcatttgtaaaaaaggaataaatagtatctccctcataagactattcataggattaatttacaaatgtaaattgtgaattatgttatacacaggaagtgtgtggagcacggtaattaatcaaaatgttagctcatgatgttatgattgttgtagtcgttatgcmttttctttgcattttggaagtttacgtgtctaaaagtttgcatattaaggtaagcatacatacacaatccaccctgacatttagtcttgatgttgaggactttgatattggtgaccaactttgagacccacttccaaaaataaagtacataaaaaacctactgttaatgttactgaacggatcgtgggtctgccgactagacgcagcgaaaccaaacactgacattgagattgcagcgagagaaagtgaggcgtttactgcagggcgccaggcagggagacttgtgccgctcattcctaagactgcaactccccagctgcttgcagctaagggttttcaaggcagggaggcagaggtttcaagcaatgaaggatatgcactgacgtgaccgaagcaggccggacatctcaaagcggaggccacgggccatcggcagattcgattcttttctgatttgcagttggttaagaaggcaaagcgttgtctgaatatgtggg

SEQ ID NO: 82537 - DNA, 719 bp, Homo sapiens
aaattatggagattgaagagataatttccattatttaatctctctgtgccttagttcctcatttgtaaaaaaggaataaatagtatctccctcataagactattcataggattaatttacaaatgtaaattgtgaattatgttatacacaggaagtgtgtggagcacggtaattaatcaaaatgttagctcatgatgttatgattgttgtagtcgttatgccttttctttgcattttggaagtttacgtgtctaaaagtttgcatattaaggtaagcatacatacacaatccaccytgacatttagtcttgatgttgaggactttgatattggtgaccaactttgagacccacttccaaaaataaagtacataaaaaacctactgttaatgttactgaacggatcgtgggtctgccgactagacgcagcgaaaccaaacactgacattgagattgcagcgagagaaagtgaggcgtttactgcagggcgccaggcagggagacttgtgccgctcattcctaagactgcaactccccagctgcttgcagctaagggttttcaaggcagggaggcagaggtttcaagcaatgaaggatatgcactgacgtgaccgaagcaggccggacatctcaaagcggaggccacgggccatcggcagattcgattcttttctgatttgcagttggttaagaaggcaaagcgttgtctgaatatgtggg

SEQ ID NO: 82538 - DNA, 719 bp, Homo sapiens
aaattatggagattgaagagataatttccattatttaatctctctgtgccttagttcctcatttgtaaaaaaggaataaatagtatctccctcataagactattcataggattaatttacaaatgtaaattgtgaattatgttatacacaggaagtgtgtggagcacggtaattaatcaaaatgttagctcatgatgttatgattgttgtagtcgttatgccttttctttgcattttggaagtttacgtgtctaaaagtttgcatattaaggtaagcatacatacacaatccaccctgacatttagtcttgatgttgaggactttgatattggtgaccaactttgagacccacttccaaaaataaagtacataaaaaacctactgttaatgttactgaacggatcgtgggtctgccgactagacgcagcgaaaccaaacactgacattgagattgcagcgagagaaagtgaggcgtttactgcagggcgccaggcagggagacttgtgccgctcattcctaagactscaactccccagctgcttgcagctaagggttttcaaggcagggaggcagaggtttcaagcaatgaaggatatgcactgacgtgaccgaagcaggccggacatctcaaagcggaggccacgggccatcggcagattcgattcttttctgatttgcagttggttaagaaggcaaagcgttgtctgaatatgtggg

SEQ ID NO: 82539 - DNA, 580 bp, Homo sapiens
cctgtagtcccagctactcaggaggctgaggcagaagaattgcttgaacctggaaggcggaggttgcagtgagccaagactgcaccactgcactccagcctgactccatctcaaaaaaaaaaaaaaaaaaaaaaagaaagaaaaacctttaggttctaacccagtagggaagcacgaatggggtaaagaagtgggagatgaaaacacagtatcaaaatatatgtgtttgcttctgctgcttccagaaaacccaccagaatgacaataagcaatgaaaatggcatcaataaaataatctagggagcaaggaaaaaactgctgcacatacataccagaaaaccagaaacaaaaacaatgaaatactcccaaacagatgagtgaagttagtgtatgcgttagaaagactgctatttaagaagaacaytcagacaatgagtggctcacagaaatttaaaaaatgatagtacaaatagatctttttacagaaggactgaaacgtaaggtttacagaaatcttcgtatctgctagcacactccccttcaaacaatgccacacaatctcctacctcagggccttcgc

SEQ ID NO: 82540 - DNA, 1674 bp, Homo sapiens
tgaaagaaataaccataaacctagagttctatattagcaaaaatctttcaggaatgaaggtgaaataaagacattctcatatgaaagaaaactaagagaatttgtcaccagcagacccaccctgttaagtcattgtaatatcagagccagaactcttaatgtttttaaacaatgctggttacttagacatcaagagtataactagcacgaagaaggatttatccaggaaataaagaatggttcactattaagaatctattactatcatattaataggtcataggtcatatgatcaacctgatagatgsttcagaagtattcaactggtatccttcatccattcgtgttcaaaaacaaaaatattagcattgcaccaagaatacaaataaagccctagaagaattctctctaataacagaaccaaggaaaaggtgcttactattactactactatttaatgttattccagaagtgtgaccaatatggccactgagatggggggaaatttttaatttttcccagattatataactgtctacctacaaaatgaaaaacggttaggggggctttactcagaattgatggagtattgtgggcttggagcctgagcagtataggtcagaaactgtagctcttccaggattaaacaatgtttcagatccttgacattttactatctcattaaataaggactttataaagcacaaagcattatgcttggatgtaataaggatccagtgattattagctgttatcattaccatcattactattttacattaagcaacatacagttctctctgcctttccttttttcctaaacaagacttttgagtaataatactggaaatactcaatactcccttaacggcttggaatgctttttctgccttcactcgttaacttataggatttatataactctgatactcaccaggacatgaactagagtctccagaccaaggtgtctggtctgtcacagaccccttagtacacacggctggcacaagccatagcagaggctgggagcttgcacagtatgggtgtgtgggatgggactgggcagcaagcaggtcccatgcttcttgaaaagggcaagttgatttatttattttctccttttatatttcttccatcctctgggtaacagttagctactcctaacacccaactagactatttctatacccacctgtctggattttctatttaaactcttgctaccctacaatgcattctctccatatagcagtcaaactggttttatgaacacgataaatcattcattcaataaatacttatcaagccaggtactgttctgggtgctcaggatatagcaataaacagaaaaaatgtctgcccttatgaaacatattttagcaagagaaagggagacaataagtaagtggtataccttacagaaaaacaataaaagcatttaaatggatatagggaacatgatgggtgagagaaaacgtctgcaattttaaagtgggtcataagaaaaggcctcactgaaaaggtgacatttaaaccaagactttaagggactaagagaggaagtcataggactatctaagggaaagcttcccagacagggtaacagccagtgctaaggccctgaggcagcagtgggcctgtcttatttaaggaagaatgaactttttgaatact

SEQ ID NO: 82541 - DNA, 2323 bp, Homo sapiens
acagagacttgctcaaggtcaccttgataaaaagtgaccaggccaagatttagacctgggctctgtagccctgagtgtgcactgaaccacccccctatagtcccactgggtgccctttgctctttcccctggatgcctcaggcccagtcagagggtctatggagggagttatgtccccaaattcttacgcggaagccctactggcaatatcagtgctgtaagagtggacggagctgtaacaggggatgaggttagatgaggtcgcgagggtggagcccgaatccgataggcctggtggcctcatgagcagaggacaagaggactctccctcctcctgcacacaccaagaaaaggccacatgaggacgcaaggagaagaggatggtctgcaagccagggagaggcccgccccagaacccaccacgatggcaccctgatctcagacgcccagcctccagagcagtgggaagacaaatctctgttctttaaccctctgtctgtggggctttgttatggccgcccagctgaggaaaacagccacagggtctgcaaagctatggggtgtgaccacagggcagtgcgtttgtggcatccagacccacacttgtgccgtggtgaagttcaatgaacagaagcttgtgacagactcctttgacgacactgtggcttgctgggaatggagttccggagccaggatccggcactttcgcgggcacacgcgggcagtgtttagcgtggactacaatgataccttggtgagcggctctgcggccttcactgtgaaaggatggactttatctactggggcatgcctgagcacactcactgggcacacgccatgggtcaccaaggtagttctgcagaagtgcaaagtcaagtctctcttgcacacagtcctgaaggatacctcctcttaagtgcagacaaatatgagattaagatttggccaactgggacagaaatcaactgcaagtgcttaaagacatcctcttgtctctgaggttagaagtatccgcctgcagccaagacttcgtgttgatggcaaatacactgtttgtagttcagccctccgtctctagcagcgggactttgccaacagttatgatattctcagggtcatcaagactcctgagatagcaaacttggccttgcttggctttggaaatactgttgccctactgtttggcagctgccacctgtacatcatggacttgcagacccagagcctcattaatcgctggcctcttccagagtacaagaaatcaaagagaggctcaagcttcctggcaggcgaagcatcctggctgaatggagcagatgggcacaatgacacgggcttggcctttgccaccagtattcctgaccacagtattcacctggtgtggaaggaacacagctgacaccatgagcccccaccaccgactgactatgggtgctagggcgggggttttggggtgcaacctctatgccagctgactgcatgaaccaaagttctcacctatggtatcatcacgcagtgcacgtcatttatctgtttgccagggggccagggcttggggtgggggagggcttgttttactgacacacatgtagcatgctaacggggtacatcatggacttcatttgtactcagttaggttggtgagtgtaaaaggatccattytggttcatctttcttgagtggaatattggttttatataaagaaagttaaatgatttgttaatctgctgattggttgcgtatgaaatcacattgtctgttattaaagcttttcaccataaaaaaaaaaaaatctctgttctttgactgtctgtgtggaactctgccatagcagcccagctgaggaaaacagtcccagggtcagggaacagcaggacttcttcttggggcaaccttttaaatgacgtcctgtgcattttgtacaaattctgtgctacctcatcgagcctgagcagctgtatcaggatgctgtaagagggccctatggcctgtgcgaggtgcactttggccttctgcccctgcacggggctgaataaattatgctgaatgttccctccttcctcaatccttgtttctgggcccctctggtgcctacgctcctgcttctcctctaactcctcggccaccccctcccagtctccttacttctgctcagacctgcatgttggggttcctggggctccagcctcactgtctgtccacactctcagccccagggaactcctgcgtcccacggctttaaacgcctccgtggcgatcccacctcagctttctctcccgccctggcctcttccctcagttccaggctcatgaaccacgaagc

SEQ ID NO: 82542 - DNA, 707 bp, Homo sapiens
gtcacacagctgccragtggcttccatccctggccgagcccgcgaggctgactctggtcacacagctgccgagtggcttccatccctggccgagcccgcgaggctgactctggtcacacagctgccgagtggcttccatccctggccgagcccgcgaggctgactctagctattgcctgtgatggtgtctgtgccacaggggcagaggtcaaaagttatgacagaggggcaaagccaaacatgtttactcactggttttctattggtgctgtaacaagttaccacaaactcagttcatgacaacaacgcaaattgattctctcacagtctgaaaccagtttcaggggatggaaatcagggtgtcagcaggactgcccccatccaggtgctctcggggagatccacttccttgcctttcccaggtgtcagaggggcattccttggccctttctgcatcttcaaaggctacatttagcattgttgcatcactccctgctgccatcttcatggcaccttctcttattcctgagggccctacgattacatggggcccacgtgacaattcaggatctcacaaccttaatctgatcacgtctataaagtcccctttgctatataaggcagcactcacaggttctgggaattagaacttcgacagaagcaagggtattattcagcctacacatgtccctttaggaaaaagtttt

SEQ ID NO: 82543 - DNA, 1316 bp, Homo sapiens
agagcctttgcaaaccactacttgagcttattatttatgaactctttgctctttaaaattgagaacaaagcaattaactgtaatttcacaccttcagaagactaagaacacagtctgccatctattgtaaattccaaagtgtattctttcacttaaatttatagtttccattttgtggaaattttcctcttactccaaagactgtttaaaatgaatcttgtattttgttcactgaaaatgggcagtgccgattttgttctttagaaaaatgagcttaatagatcccattgtaaaaacaattgcaggtccagtatttgagaacatgatccatacaggccgactgtgtcaagagagatgagatgctccttggtttgtcacttgaatgtggtgctcagaatttgagaaacatgaatctggataacaactggcatcctagttagtgagcatgagcacttactacgtactcagtgcttcgtggatacccctcaatcctcaaagggaccatactatactcatgctgcccactaacctaatgtgctctcaaaccagctgagactggagaggttaacttttagcctcaagtcacacaggtgggaaggcaccgatttgaacctaggtagtctgaccaaaattggagcactttcttccatgctacattctaccgaaaatgaatagctgtcaaggactgtgaaaggctaaacaagatcaatgacattttatcaacatactgaaattcaacacctgttccaccaaaggaaagtaacatgaggttcattcttgatgtcaacaacagaaataactcacttgattttcacacttaagagaggcttaaggaattagaatttaacttctttacccttgttcataggatcttaatgttgtcatctctttcttcttcctactgcttggactagaccttgtaacctcctcctaagctattatarcatcctacctcctttaaccacctgaataactatatttttcaaagagcagttctgttcattaccactctgctgctcaaaaacactttcagtggtggctcaggactataggatgaaacccatataaccctgatttcttgtgtctgtcccccagctgtgttttcaacacttcccttccttttcccatcaagaggtaatttctaattcaaccattttcatataattcacttcctctcaacctcaatcccaggactattcaacaaatactaagatctcaccatgtttagtagcctgtggcaggcactttaataatacaaactcttcatagatcctgccctcaagaagcaaatgttaagtagtcaagtaagccatgca

SEQ ID NO: 82544 - DNA, 1316 bp, Homo sapiens
agagcctttgcaaaccactacttgagcttattatttatgaactctttgctctttaaaattgagaacaaagcaattaactgtaatttcacaccttcagaagactaagaacacagtctgccatctattgtaaattccaaagtgtattctttcacttaaatttatagtttccattttgtggaaattttcctcttactccaaagactgtttaaaatgaatcttgtattttgttcactgaaaatgggcagtgccgattttgttctttagaaaaatgagcttaatagatcccattgtaaaaacaattgcaggtccagtatttgagaacatgatccatacaggccgactgtgtcaagagagatgagatgctccttggtttgtcacttgaatgtggtgctcagaatttgagaaacatgaatctggataacaactggcatcctagttagtgagcatgagcacttactacgtactcagtgcttcgtggatacccctcaatcctcaaagggaccatactatactcatgctgcccactaacctaatgtgctctcaaaccagctgagactggagaggttaacttttagcctcaagtcacacaggtgggaaggcaccgatttgaacctaggtagtctgaccaaaattggagcactttcttccatgctacattctaccgaaaatgaatagctgtcaaggactgtgaaaggctaaacaagatcaatgacattttatcaacatactgaaattcaacacctgttccaccaaaggaaagtaacatgaggttcattcttgatgtcaacaacagaaataactcacttgattttcacacttaagagaggcttaaggaattagaatttaacttctttacccttgttcataggatcttaatgttgtcatctctttcttcttcctactgcttggactagaccttgtaacctcctcctaagctattatagcatcctacctcctttaaccacctgaataactatatttttcaaagagcagttctgttcattaccactctsctgctcaaaaacactttcagtggtggctcaggactataggatgaaacccatataaccctgatttcttgtgtctgtcccccagctgtgttttcaacacttcccttccttttcccatcaagaggtaatttctaattcaaccattttcatataattcacttcctctcaacctcaatcccaggactattcaacaaatactaagatctcaccatgtttagtagcctgtggcaggcactttaataatacaaactcttcatagatcctgccctcaagaagcaaatgttaagtagtcaagtaagccatgca

SEQ ID NO: 82545 - DNA, 1316 bp, Homo sapiens
agagcctttgcaaaccactacttgagcttattatttatgaactctttgctctttaaaattgagaacaaagcaattaactgtaatttcacaccttcagaagactaagaacacagtctgccatctattgtaaattccaaagtgtattctttcacttaaatttatagtttccattttgtggaaattttcctcttactccaaagactgtttaaaatgaatcttgtattttgttcactgaaaatgggcagtgccgattttgttctttagaaaaatgagcttaatagatcccattgtaaaaacaattgcaggtccagtatttgagaacatgatccatacaggccgactgtgtcaagagagatgagatgctccttggtttgtcacttgaatgtggtgctcagaatttgagaaacatgaatctggataacaactggcatcctagttagtgagcatgagcacttactacgtactcagtgcttcgtggatacccctcaatcctcaaagggaccatactatactcatgctgcccactaacctaatgtgctctcaaaccagctgagactggagaggttaacttttagcctcaagtcacacaggtgggaaggcaccgatttgaacctaggtagtctgaccaaaattggagcactttcttccatgctacattctaccgaaaatgaatagctgtcaaggactgtgaaaggctaaacaagatcaatgacattttatcaacatactgaaattcaacacctgttccaccaaaggaaagtaacatgaggttcattcttgatgtcaacaacagaaataactcacttgattttcacacttaagagaggcttaaggaattagaatttaacttctttacccttgttcataggatcttaatgttgtcatctctttcttcttcctactgcttggactagaccttgtaacctcctcctaagctattatagcatcctacctcctttaaccacctgaataactatatttttcaaagagcagttctgttcattaccactctgctgctcaaaaacactttcagtggtggctcaggactataggatgaaacccatataaccctgatttcttgtgtctgtcccccagctgtgttttcaacacttcccttccttttcccatcaagaggtaatttctaattcaaccattttcatataattcacttcctctcaacctcaatcccaggactattcaacaaatactaagatctcaccatgtttagtagcctgtggcaggcactttaataatacaaactcttcatagatcctgccctcaagaagcaratgttaagtagtcaagtaagccatgca

SEQ ID NO: 82546 - DNA, 673 bp, Homo sapiens
tttaaaggagctgaggggaaaaacagagtataatatatacacagagtttgttctataaaccttatttactttttccagttctgttcatttattcatggatttgagttatcttcttgcrtaattttcttattccaatgaagcttttctccaacttgtctcattttggtcattgtcaaatatattacatttttttaagttagagggtcatactatagtcatatacatataccgacacatagtcagtacatagataacatatataaattattttatgcaattactttttaaataagttaaatgaaaaaagaagaaatatacaattaaaccatcatttatagttacctttgctggcaatctttaattttttgtatagatgagaattattttctggtgtccctccttttagattgacatagttccttacatattacttgaaaggcaggtctgatagcaacgcattctgctttcatttatctgggaagagttttttgtcttttttgaaaggtagttttgccaaaataacacttttggttgggaggttttcttttttgtttttgctttttactttcagcactttgaatacgacttccttccatctagtcccacaataggggccatcccactactttctggcccccattgtctctgatgagaaatcagctgttaagcttgt

SEQ ID NO: 82547 - DNA, 1674 bp, Homo sapiens
taaagagtcaaatcaataggcgctctctctatatatctatatacacttttttcctccatgtatatattttttaactcaacatacaaatggagaaaaacattggaaggaaccaatgcctatttaatattgctgaggatattaatgcctttaatgattgtaaatttagatctgattaatttggattttcctacaattttacactcatctagtaaaagggttctgtccttgttcttgacacaactaacaaaatccaaatcatgttaggttgtttctgagaatgggcccactgagctttctttgcttgactcctttatcatctgcctcctaaatggagtctttgatgctcaataaaacaatcttattgaattttgctttgcatcttttatgtataaaagtaaatttgtttgaaaaatatgacaatagtgattttaaaaaatatttgataccttcttacaaatacatctcaaatgattggagctgggtcttttatatgtctcagtgtgccatctaagtatcaacattgtatgtggatgtaaagtatcaacatagcatagctttctggtaaaaagagaaaaattcccaactgaacaccatccaactataccgttaccaacaagtcatccaaaaacaggcccaaatccttgtatctatcactgattacatgaatctgttcttatagtattacaacagaaagtctggtcaagaatagaagaaatgacacataaacaagaaaataaacattgataaggttttggttagaggaagcaaaataccaatatacaagatgaaattatccttacaggcacagatattttcacatcattctgtcagaaaaataagagcacatgcttcagctaagtctttggaggatccagagagaaatattgatgcaaagaacaaaccacgtatacataatactccttcaaaactgatgcagatgacgtttaaacaccaatgggtaaaaatgtcatgtcattcatatgaagctcttatattgtttgcattgtacttttttgtgagccttgtcatgttctcaaataaggtagccttttcaggaagaccagatatatcttgcatagcaacaagagctaatgttgccaaactcacttgaaagttgatgtgcaagtgaagaacaggtgtgcckgttcctttactccaaaaataaagacaaataatgcttctagcttgtcagcatttcaagctgactagaagaattgtttcattcttcatatataaagagacatgtaattgatagttacatacacatatggttatagtcacatatatatgatactgtttaatatttatgatgttgctttatatacatgatatacatatataatatatatgatatatgtgatgagaagacagttacttaaggaaacactcagatggtattgtattgcttataatacaatggataaatgcttcaggtaatggatatcccatttaccctgatatgattattacacgttgcatgcctgtatcaaaatatctaatgtaatccataaatatatacacctactatgtacccacaaaaattagaaagaaaacacttagaaaattatgttcaggttatttttaatgatggattcttttcttcttcccactgatcatacttaaaaattagagcaattaggttagaaggatagcaaaactaagaaactatggaaa

SEQ ID NO: 82548 - DNA, 706 bp, Homo sapiens
cccacttatgagtgagaaccggcagtgtttggttttctgttcctgtgttagtttgttcagtatacatttttattattaaaattagttgtattgtgaaaataaatacttataatgaattaaatgctataaacgtacattgtccaatctggtagccagtagtcacatgtcactactgagcacttgaaatgtggctggtccacagtgattgactataaactatacaatggagttaatcattttatattgattacacagataattttgatgtaagttaaacatacatttaagttaaatttcacctgttttttaaaakgcaactactaaaaatttagaatcacatgtggttctcacattttgatttgtattgaaatggtttagaagaatgcaataaataaaaatcaataaaattaaaaagtgtaaacataaaaagttctattttatcatctcctcccaaccccaatgcctcccctgagaactgagatttgtcctgcatttaaaactccccacacatatgtacataaactatgaaatatatataaagctttgcaatttgccttttactgttaaaaatatataatggaggttttttcataaaatctactttttcaaatttgctcttttcatttacatgtgtaaggaaaccagcaggcctgaggaagagtgcatttagtgccttgggggcatcttcccagatggccctggcagt

SEQ ID NO: 82549 - DNA, 1070 bp, Homo sapiens
attttctctcttttctctttctggaactccarttacatatatttaggccactcacaattttccatctgtatcatatatttcatacttttcattcttttttttccctttgtgcattaatctggatagtttttgctggcctatcttccaattaaacaatccttttactgagttctaatctgttattaaaccatctattgaattattaaacttagtaacaggaatttgaattagacaatttctatttgattcatttttattggttcttgctctctgtgaaatttttaattttcttctctattttgttgagcacattaatcatacttatttgaacacatgcctgtgtctgacaaccccaaatctgaatcatttgtaggtcttgttttcccccttgggtttttgttttgtttgttgttttgggggtttgttttgtttggagttttaggggtgtggcagtttgttttggttttagtcttttggtcctgtttcctatcatgccagctaattttttctatgttaatgtataagcaaccctctctgtgtataagtccacagagaagatttaatttttttttcttgaagacagatggagaactattagatcatctcgatccaggcaaggtaagtctacttctggttttcccttgttcctagttcttgaccctttgggaatctcaactgaaagcctagagtatttaccagagtccctcctcctgaattccagttgagccttctcagcacagtgactctaccctctctgcttagctttttaccgtcttgcagctactttctgcttagttaatcagcatctcatcccacatatgtacttcttaaaatgtgacaaatgactgtaggggaaattgcaggtagaatacggggctcaatattttatagtaaactttcctctagtatcctgctcttcaagtcctgactgcctcaggaaacttgaaccctaatatttgactcctagcccaatgagtatccttctacgacccttctgttcagattctgcaccctgccccacaacttgtaaacgtcccaaaaggaaaaattgatagggaatgtaggcctca

SEQ ID NO: 82550 - DNA, 638 bp, Homo sapiens
aacagaagtcaaataattcaacaaagttcacaaaacatgcccaccttggccaggaaatgtgcctgggtgtctccaccactgattcaatgagttactgattagtattacctttctgcttactgttattccctacactgttagcttcatagaacaaatcctaactgctgaactacttcgaatatagttgtctaacatcattgtactgttcttagatttgcacattgaccacatctagtaaaagtcttctattgcacagcttacttgttgtatcccattcaggaataagcaataaaccaaaaatatgtaagtgaggaatagggggagaattgcaggcttatttcactcttgcatktacacatacacaaaaaagttcccactttgttgggtgtttctagtaggttatcatctgcatgatgaaggctcaaggcagcaggaatgatagggcacttagcacaacaatcagattagaaaagaacagtttagaccctaaacaactgaccacttcatgaagcttaaagaatccaaaggaaaaaatttagaaattatctgagtatcatttgagttatgtagtgaataaatcaaatacttataatttcttcacttccttattatatttgcccacattccacagtgggaga

SEQ ID NO: 82551 - DNA, 621 bp, Homo sapiens
caaatctaactcttggctatactgcatcagtttgcttcccaaattagagatggttttaatgaaatgcttctaagatacattagatatggtaaaatggaacaggtgaaacaaaccctaccttttcacttaattattttttcttktcattaaaaaccataaatgtgcaacaggtttttaaaactactgcttaatattccattctttggatatgtcataacttgcttcactatcatcatacctcaggatatctcacttttttctattttatataaacctctttcttcttaaatctttgctcacaatttaaaaaaattccataggatctatttcctaagtggcaattgtgagccaaagagtataaacactaaaatcagaaaggcaatgcattcattgacaatgagaaatgtaatgatcaaaaagaccattcatcaacacattttccccttgtcacacagaagtgcagatattttgaaggctcataatatattttgtgaagttttcttccagaggatttatacaagtgtacatttgtaccgaagaggtagcatctgaacaccagcaccaccgcagaccttgtgatggggcatctgtgtggtgggacagctattggaatgggtgggt

SEQ ID NO: 82552 - DNA, 1543 bp, Homo sapiens
tcacacagaggtactctgctgggagagagagaaacttgaaaagattttgacagtcatgcagggctattgtaataatttggaaatgtcacgagctctaaacatgtaattaggatttcccgatagtgcccttactatttttcagtaatgcagagatagtgactcaccggctctcagtaaaaagcttagataggacatatcagaagaaagaaaagtcaaagatatatacagtctsaacaaacctgcaattcaaccctgactcaacccagttactacctagattgaggtgatcagctcttgccctgtctctctaatataagaagaccaaggctttctggtaaaaggtagtatcatttggagcttcaacacaaagtctccttaaacaaaaagcccagatgggggataagatggctgtctagacacagccaggaaatgcctctcctactgagagaaaataaactgttgagtagatcatgacactttgaacagatctcttgagaaaaacactgaaagccaatagaaagatgactcagataccaaggttgaagaggcaggaagctgggaagcttgcatggaattgccaaggaccagaaccagttacaggacctgaacaggacttaaataaggagtgagtgaaaaaactgtggggcaccacactcctgcaacggacctctgggatcctagctacaagagagcccacaacccccagagacatttgaattggcagaggagccgcctggagagtaggcaaaggcaggggctcaaacctgtgcagtgtccaggaggttttctctgtggcaggtgcggtaaaaagcaatcatggtgcccatcccccaaggctctctgtcttgctctgagtgactctatcccctgctgaaagctgggctgggagagagtagggctacctttcccctgggagaggtgagcatctgatctgtgtagccccttgtcccctggtcccttccaaggctcctgcctgactgctcctgcaagagtatgcacggagcacagcctccacttccctgcctaattgttttgccagcagcctgggagtagtttacatcccccaccccacccaaagcacaaagtacagagctcaacctcaaggaaccagaggacaaagctgccacagcctggtcccaaccttctagggttcaagcacactgcactcaggggtatccagcctgggtgtgggagaagtctccaatctcagaacaccgagaagagtgaggtgcaagtttaagtgctggcatgagagctgagtgtttctccctccacaagactggtccaagaagggtgtagcctactggccagctgcagcctctacccaagaatgccccatggccctgaacacctaatagcccagcgatctggacaaaactagcttgggaaaaaactagaaagttgggcctgctcctgggacagacaccagagggaggcctggttggggaagcatgagctgggcagtccccaaggagctgtctgctgggcaaaaatctccggcccatggctgcaaacctatagcaccaccaccctgcctgtggat

SEQ ID NO: 82553 - DNA, 1543 bp, Homo sapiens
tcacacagaggtactctgctgggagagagagaaacttgaaaagattttgacagtcatgcagggctattgtaataatttggaaatgtcacgagctctaaacatgtaattaggatttcccgatagtgcccttactatttttcagtaatgcagagatagtgactcaccggctctcagtaaaaagcttagataggacatatcagaagaaagaaaagtcaaagatatatacagtctgaacaaacctgcaattcaaccctgactcaacccagttactacctagattgaggtgatcagctcttgccctgtctctctaatataagaagaccaaggctttctggtaaaaggtagtatcatttggagcttcaacacaaagtctccttaaacaaaaagcccagatgggggataagatggctgtctagacacagccaggaaatgcctctcctactgagagaaaataaactgttgagtagatcatgacactttgaacagatctcttgagaaaaacactgaaagccaatagaaagatgactcagataccaaggttgaagaggcaggaagctgggaagcttgcatggaattgccaaggaccagaaccagttacaggacctgaacaggacytaaataaggagtgagtgaaaaaactgtggggcaccacactcctgcaacggacctctgggatcctagctacaagagagcccacaacccccagagacatttgaattggcagaggagccgcctggagagtaggcaaaggcaggggctcaaacctgtgcagtgtccaggaggttttctctgtggcaggtgcggtaaaaagcaatcatggtgcccatcccccaaggctctctgtcttgctctgagtgactctatcccctgctgaaagctgggctgggagagagtagggctacctttcccctgggagaggtgagcatctgatctgtgtagccccttgtcccctggtcccttccaaggctcctgcctgactgctcctgcaagagtatgcacggagcacagcctccacttccctgcctaattgttttgccagcagcctgggagtagtttacatcccccaccccacccaaagcacaaagtacagagctcaacctcaaggaaccagaggacaaagctgccacagcctggtcccaaccttctagggttcaagcacactgcactcaggggtatccagcctgggtgtgggagaagtctccaatctcagaacaccgagaagagtgaggtgcaagtttaagtgctggcatgagagctgagtgtttctccctccacaagactggtccaagaagggtgtagcctactggccagctgcagcctctacccaagaatgccccatggccctgaacacctaatagcccagcgatctggacaaaactagcttgggaaaaaactagaaagttgggcctgctcctgggacagacaccagagggaggcctggttggggaagcatgagctgggcagtccccaaggagctgtctgctgggcaaaaatctccggcccatggctgcaaacctatagcaccaccaccctgcctgtggat

SEQ ID NO: 82554 - DNA, 613 bp, Homo sapiens
tcagcccttgtagaatttttacttcaaggccaggaccctattctggaaatagtaagatattaaaacttggaaaatctatgagagtgcagtggcagatcccctgaacccactaygcctgaagtagaggccactcacctctcttagtagattgtagctcctccttactgaagattataaagaagcttcatatgaggcaggtgacataatgcagtgctcctttttctcagcatctaccatcctggctgagaatgaatgtctaattgtcaaaccctggcacagatgtgctatgcctgataagggaggaaaggagctacaggaatttgactaatctgcactgccaagggctagatagaatacatggactggaccctgctggggatggggcaatactagatcccaagggtacttgatactgtatgtggacctggctcccaggggtgcctgttaatgcacaaggaactggtccctgagtgctctggatactgacgggagagtttatctggaagagcacattctcatggtagagaatttaacactctggtgaagacctcaagagaaagtgcaaatgtgctgcaaaagtgacacttagaagcttggaaaaagtgacggacac

SEQ ID NO: 82555 - DNA, 613 bp, Homo sapiens
tcagcccttgtagaatttttacttcaaggccaggaccctattctggaaatagtaagatattaaaacttggaaaatctatgagagtgcagtggcagatcccctgaacccactacgcctgaagtagaggccactcacctctcttagtagattgtagctcctccttactgaagattataaagaagcttcatatgaggcaggtgacataatgcagtgctcctttttctcagcatctaccatcctggctgagaatgaatgtctaattgtcaaaccctggcacagatgtgctrtgcctgataagggaggaaaggagctacaggaatttgactaatctgcactgccaagggctagatagaatacatggactggaccctgctggggatggggcaatactagatcccaagggtacttgatactgtatgtggacctggctcccaggggtgcctgttaatgcacaaggaactggtccctgagtgctctggatactgacgggagagtttatctggaagagcacattctcatggtagagaatttaacactctggtgaagacctcaagagaaagtgcaaatgtgctgcaaaagtgacacttagaagcttggaaaaagtgacggacac

SEQ ID NO: 82556 - DNA, 1373 bp, Homo sapiens
cctaaaaattgttatcagccagcagcatctaaacggtatgctaaacccttaaggggtgagtgtcctggggtagcaggtttgaatggcaggtacccagagagggaggtaaggaacctgaaaaagagggaagaaggggtttttgttgggggattgggagggcaatgggaatgagtctcacaagcttcctgacaggggacccaagccacaccacctgccccctctagcttacagctaactggttgttggggcctcttctctatcttctttttccaacagctaccaagttagaagtctaaatgaaacctttcagtgatgtccataatggaaaacagaggcaactttattccatgaagaatgagaccaggagtgtatgtttaggtgaagaggggtagaggaaggggagaaagtatccatggaacagaggaagaccctcgttagagcataatggagccaagtctgaggtccaaacttgatcttgccactcattagatctgtaactctggatagagcaataaataaacacaacagcgctggtcaagttttcatatccttaaaatggaggtatagattcttttccatgagaaagtstgagagtgcaggaggatgatgtatgtggccaatagtgcactctgaataaatgcatttcatgtgaaaactctttgaaccttgctcccacctgacccatctggagtcctgatgactcttcctccttccccatgcaggttcctctggctcacaatatttttggtctcattggccccaatgcagggcttggccttgccataggtaagaagtgccctcaaagaaaacaataagcccctgcatgttggctttgggtctgatgcctttcctcccccttttctcatcagaggaggtaggtgcagaggcagaaggatcaggagggcagctggcagggttgtggagagatgagctcgtaattcccacctggaacaggtgttagtccgaggcagaagacagcagacaaagcaaatggactaaatggaggaggagaggcggggtggtactaactgtgggtggggctgactgtgtcctgtttgctctggccacaggcatggtggattcttctatgatgcccatcatggggcacctggtggatctacgccacacctcggtgtatgggagtgtctacgccatcgctgatgtggctttttgcatgggctttgctataggtatgttggcaggacctggtgccccactttcccctgtctactctttaccagctggaagtgcagccaggaagctatcctcctagggttctggagatctttgacgctgagacatcctctgggtcacccactgcccctagcatagtgtcctacgtggaggatgctccatatggaggctccatagac

SEQ ID NO: 82557 - DNA, 2820 bp, Homo sapiens
tcccgatgaggacacagcagccccagtgagttaggtatcctgtctaacaatctcacacccttcttttcatcagctgctgtgatctctgggccacgtaaatttctaagtggaggtacagtgagttcctaagaagccaggcctttccttatctgtgctattagagctgtgttgctataaatttcagagacagagtcaacatcccatctcggatggaggggaggagtggaaaaccagccctcaacttttttggggtgtttttctttcccatgttgtagtaagcatgctaagaaaagataaagttttgcagatgtgaactgattggagaagaaaacttgttctgtaaaatacacatattgttaaacctcactaattctgttttaatttcctgagaaatcacagtggatcagatgaaggatgaattgatttatgattggttataaaggaagtgtggttcttgctgttgttaaaaacagcagacgtattaaaagagttttaattgagcaaagaataattcgagaatcgggcagcctctggagccagaatagactcagagactccagcacagccacgtggtggaagaagatttatggacagaagaaggaaagtgacttaaagagaacagatgtgaggaacaaacaggtggattcgttacagcttggcgcttgccttatttgcacactttgaatagatggccacgtttgattggccgaaactcagtgacaggcacaaagtaggctacagtctgtttacacctccatttaggttataattcatgatgtatagagaaacctttaggctgatcataaaatacgtaaggaggtagctttaggccaaacttgattcaacactgaatgtaatgtaatgtaaacacgatggcaggttggagattcagaatacttcagaggcatgaaaagcccacgtaagcattgtcaagagtaagaaaaacccattaaaatccaactaagtcaacaatttctatttatacgttaaagactcaaaaggagttctctcaaatgatacgtttagaaaatgattttagttagaatacaattttaaaaatataaaactagatctcttgaattatattcagaaacatactttctcacaaatgtagacaggcctttcctcaactggtctgaaatgctgaactggattgaatgagacaaatccctatttgagtgtcagttcctgggaaggatgctaaggtgggtacgaccttgctctccaggagagggcactatcctgtcgggaattagagagtaaaacaagagaaaaagaagttacttagcaaaagacttgaaatattatctgctttagtcagctcaggctgccataacaaaataccatagcctgggattcacgtggagagatgagtctcagcaggagtgggcagatgcaagcctactgaggtgacagcatggccactggcatttgcagggccccaagggaccccagaggccctctcaatgacttggggaggttttattaatgggcttggcttcagaaagctagatccagttattttgtttttgtttttaattttatatctcctcaaattccctttaccatggacatagttttgaggtggtggcaaaagaggccttcaggtctgtgcttaatgtttgctttgtagaaaaactcactggaatgcatcaactcttgattataacacatgaaaagtagaaaatctgttctgggatgtaagcagactccagagatgatcaggtgaggcaaagcgaaacaggccatgcctgctaacagctgcccaacttcaaggaaatagaaaatagacgacaacatgatgttggccaaaacttttccatcactaaggtagcaataatatccaatcaggcacagcatgtggaaaatactacagagtaggcatactggctaccattgatcagggcgatcgtagtatcatcagtggtgtgccagaacasactggtgaaaggtagaccatgacaagtttttctcgaaaaaaccttgctagagcttattttttaagaaaacagaataggctgggcacagtggctcacgtctgtaatcccagtactttgggaggccaaggcaggcggatcacgaggtcaggagttcgagaccagcctggccaacatggtgaaaccccatctctactaaaaatacaaaaatattagccaggcatggtggcggcaagtgctgtaatcccagctactcaggaggctgaggcaggagaattgtttgaacctgggaggcggaggttgcagtgagccgagagtgccactgcactccagcctgggtaacataatgagactctgtcttcaaaacaaaacaaaacaaaaacctatagattggatggcctacattctggaggctggaaggctgagagcaaggtgccagcgtggctgggttttggcaagggccccctttctggcctgcagatggctgctatcactccaccttctcctgtggactttctttagtatacactcctggagaaagggagagagaaagctctctgatatcccttcttctaagggcactaagtccaccagaccagggtctcatcctcctgaactcatttaatcctaatcatctcccagaggacccatctccaaatatcatccccttgggtgttaatgcttcaatatataaacttggcaagtgggggacagaagcattcagctcctagcattatcaaggttgataattgcaggagactgattgaagtgagaaagagcgaaatgtttctgaaacagttaaagggaagaagtgggcccaggaaagtgctgtggaagccagagtttgggctgtactccttagaagggactgggtttaagtcgg

SEQ ID NO: 82558 - DNA, 2820 bp, Homo sapiens
tcccgatgaggacacagcagccccagtgagttaggtatcctgtctaacaatctcacacccttcttttcatcagctgctgtgatctctgggccacgtaaatttctaagtggaggtacagtgagttcctaagaagccaggcctttccttatctgtgctattagagctgtgttgctataaatttcagagacagagtcaacatcccatctcggatggaggggaggagtggaaaaccagccctcaacttttttggggtgtttttctttcccatgttgtagtaagcatgctaagaaaagataaagttttgcagatgtgaactgattggagaagaaaacttgttctgtaaaatacacatattgttaaacctcactaattctgttttaatttcctgagaaatcacagtggatcagatgaaggatgaattgatttatgattggttataaaggaagtgtggttcttgctgttgttaaaaacagcagacgtattaaaagagttttaattgagcaaagaataattcgagaatcgggcagcctctggagccagaatagactcagagactccagcacagccacgtggtggaagaagatttatggacagaagaaggaaagtgacttaaagagaacagatgtgaggaacaaacaggtggattcgttacagcttggcgcttgccttatttgcacactttgaatagatggccacgtttgattggccgaaactcagtgacaggcacaaagtaggctacagtctgtttacacctccatttaggttataattcatgatgtatagagaaacctttaggctgatcataaaatacgtaaggaggtagctttaggccaaacttgattcaacactgaatgtaatgtaatgtaaacacgatggcaggttggagattcagaatacttcagaggcatgaaaagcccacgtaagcattgtcaagagtaagaaaaacccattaaaatccaactaagtcaacaatttctatttatacgttaaagactcaaaaggagttctctcaaatgatacgtttagaaaatgattttagttagaatacaattttaaaaatataaaactagatctcttgaattatattcagaaacatactttctcacaaatgtagacaggcctttcctcaactggtctgaaatgctgaactggattgaatgagacaaatccctatttgagtgtcagttcctgggaaggatgctaaggtgggtacgaccttgctctccaggagagggcactatcctgtcgggaattagagagtaaaacaagagaaaaagaagttacttagcaaaagacttgaaatattatctgctttagtcagctcaggctgccataacaaaataccatagcctgggattcacgtggagagatgagtctcagcaggagtgggcagatgcaagcctactgaggtgacagcatggccactggcatttgcagggccccaagggaccccagaggccctctcaatgacttggggaggttttattaatgggcttggcttcagaaagctagatccagttattttgtttttgtttttaattttatatctcctcaaattccctttaccatggacatagttttgaggtggtggcaaaagaggccttcaggtctgtgcttaatgtttgctttgtagaaaaactcactggaatgcatcaactcttgattataacacatgaaaagtagaaaatctgttctgggatgtaagcagactccagagatgatcaggtgaggcaaagcgaaacaggccatgcctgctaacagctgcccaacttcaaggaaatagaaaatagacgacaacatgatgttggccaaaacttttccatcactaaggtagcaataatatccaatcaggcacagcatgtggaaaatactacagagtaggcatactggctaccattgatcagggcgatcgtagtatcatcagtggtgtgccagaacagactggtgaaaggtagaccatgacaagtttttctcgaaaaaaccttgctagagcttattttttaagaaaacagaataggctgggcacagtggctcacgtctgtaatcccagtactttgggaggccaaggcaggcggatcacgaggtcaggagttcgagaccagcctggccaacatggtgaaaccccatctctactaaaaatacaaaaatattagccaggcatggtggcggcaagtgctgtaatcccagctactcaggaggctgaggcaggagaattgtttgaacctgggaggcggaggttgcagtgagccgagagtgccactgcactccagcctgggtaacataatgagactctgtcttcaaaacaaaacaaaacaaaaacctatagattggatggcctacattctggaggctggaaggctgagagcaaggtgccagcgtggctgggttttggcaagggccccctttctggcctgcagatggctgctatcactccaccttctcctgtggactttctttagtatacrctcctggagaaagggagagagaaagctctctgatatcccttcttctaagggcactaagtccaccagaccagggtctcatcctcctgaactcatttaatcctaatcatctcccagaggacccatctccaaatatcatccccttgggtgttaatgcttcaatatataaacttggcaagtgggggacagaagcattcagctcctagcattatcaaggttgataattgcaggagactgattgaagtgagaaagagcgaaatgtttctgaaacagttaaagggaagaagtgggcccaggaaagtgctgtggaagccagagtttgggctgtactccttagaagggactgggtttaagtcgg

SEQ ID NO: 82559 - DNA, 705 bp, Homo sapiens
cattaacttgaccccagagctagtcaattcatttctacccttgtaaaacacaagtttctcccctaacacaaaatactcactctacattagtacagttctccattttttcatctatcattctcttttcttttgtttaagaaacktcttttctttctgaatttataaattattcattgctactttaaaattatataatgaacattcctcatgaatatttgtctgcagctttaattaaagtagattttctgggtgaaacaacatggaaattcttaaaggtttttgaaatctgatgccaaattgctctctaaaaatgtattcatttacttttctattagcagtgcctaagaccattggtttcacctaccacataagcatcaattattcaactttaaaagatattctttctaatttgttgataaaaataccatatccttttgctatttgcattgatttgaatagtcaagagattgagcattttgcatatttatttttgtttatatttcttaatttgtaaattgttcatgactcatctatttttaaaaaatcaggatttcaaatttgtcttattattcataacaggtctttatatttaaggtaattaaaaataaatgtgatttacaaattacttttggaatatcaactataatgtacaaaatattaagtatataaatatataacaaatacaatattataaattatgcatgt

SEQ ID NO: 82560 - DNA, 705 bp, Homo sapiens
cattaacttgaccccagagctagtcaattcatttctacccttgtaaaacacaagtttctcccctaacacaaaatactcactctacattagtacagttctccattttttcatctatcattctcttttcttttgtttaagaaacttcttttctttctgaatttataaattattcattgctactttaaaattatataatgaacattcctcatgaatatttgtctkcagctttaattaaagtagattttctgggtgaaacaacatggaaattcttaaaggtttttgaaatctgatgccaaattgctctctaaaaatgtattcatttacttttctattagcagtgcctaagaccattggtttcacctaccacataagcatcaattattcaactttaaaagatattctttctaatttgttgataaaaataccatatccttttgctatttgcattgatttgaatagtcaagagattgagcattttgcatatttatttttgtttatatttcttaatttgtaaattgttcatgactcatctatttttaaaaaatcaggatttcaaatttgtcttattattcataacaggtctttatatttaaggtaattaaaaataaatgtgatttacaaattacttttggaatatcaactataatgtacaaaatattaagtatataaatatataacaaatacaatattataaattatgcatgt

SEQ ID NO: 82561 - DNA, 705 bp, Homo sapiens
cattaacttgaccccagagctagtcaattcatttctacccttgtaaaacacaagtttctcccctaacacaaaatactcactctacattagtacagttctccattttttcatctatcattctcttttcttttgtttaagaaacttcttttctttctgaatttataaattattcattgctactttaaaattatataatgaacattcctcatgaatatttgtctgcagctttaattaaagtagattttctgggtgaaacaacatggaaattcttaaaggtttttgaaatctgatgccaaattgctctctaaaaatgtattcatttactttkctattagcagtgcctaagaccattggtttcacctaccacataagcatcaattattcaactttaaaagatattctttctaatttgttgataaaaataccatatccttttgctatttgcattgatttgaatagtcaagagattgagcattttgcatatttatttttgtttatatttcttaatttgtaaattgttcatgactcatctatttttaaaaaatcaggatttcaaatttgtcttattattcataacaggtctttatatttaaggtaattaaaaataaatgtgatttacaaattacttttggaatatcaactataatgtacaaaatattaagtatataaatatataacaaatacaatattataaattatgcatgt

SEQ ID NO: 82562 - DNA, 713 bp, Homo sapiens
cagacctctataaggagctcataagatggccaaaatggggaggacacagccagaaccaggataactctcccctctctcatccttagagtgtgacagaaggtatgcagagcagagtgcttgacatgcgttatggctatttgatggaattttccatcagtgtcattatagaaatcacttttgagaggtaaaaatcacttttgaaacaaaagaaacaggctaggcgcggtggttcaccactgtaatcctagcactttgggaggctgaggcaggcagatcacctgaggtcgggagttccagaccagcctggcccaaatggtgaaacccagtctctactaaaaatacaaaaattagctgggcgtggtggttcacgcgcctgtaatcccagctacttgagaggctgaggcaggagaatcgcttgagcccgggaggtggaggttgcggtgagccaaaatcacgccattgcactccaacccgggcaagattccatctcaaaagaaaagaaaagaaaaaaagaaataggccaggcgcagtggctcacgcctgtaatcccagcactttgggaggccaaggcaggcggatcacgacgttggaagttcaagaccagcctggccaacatggtgaaaccccgtctctactaaaaatacaaaaattagctgggtgtggcrttgcgggcctgtaatcccagctactcgagcgctgaggcaggaggatcc

SEQ ID NO: 82563 - DNA, 665 bp, Homo sapiens
tcctaatttaagcacttactatatgttaacttttaaattagctcaggtacttgcacacaggttccatctaattttcatctgttttggggcggcggcagagtctctattttgcacacaagactaagggttcraaggttaggcaccagctgacaagtagccaatctgagatctgaacccacagctgcctggcttctaaggtccattccacttcataataacagctttgggaagcagccccagccttggagagttgaacccagctcagtctggcttccaagggttctgtctactacccatatcggcttcttggagaagccccagactttattctcggttaccctatattatcctttatagagcctgtaagtccctggtctcagctacagacacctggttacccactctgccagctgggaaggaacagacactatttctccttccctcacccccagctgaattcagatattttcctgggtttatgcctgagaagacgatacggaaatacagcccaagcagcccaggacctccagccttggagtgggcagggtggagggggtgtgagtgagtggtgccatacacttgtctgcccatcatgagctgggaaccacgctaagtgctttacacatctgattgtgccaattcctcccaaccacccagagggaaac

SEQ ID NO: 82564 - DNA, 665 bp, Homo sapiens
tcctaatttaagcacttactatatgttaacttttaaattagctcaggtacttgcacacaggttccatctaattttcatctgttttggggcggcggcagagtctctattttgcacacaagactaagggttcgaaggttaggcaccagctgacaagtagccaatctgagatctgaacccacrgctgcctggcttctaaggtccattccacttcataataacagctttgggaagcagccccagccttggagagttgaacccagctcagtctggcttccaagggttctgtctactacccatatcggcttcttggagaagccccagactttattctcggttaccctatattatcctttatagagcctgtaagtccctggtctcagctacagacacctggttacccactctgccagctgggaaggaacagacactatttctccttccctcacccccagctgaattcagatattttcctgggtttatgcctgagaagacgatacggaaatacagcccaagcagcccaggacctccagccttggagtgggcagggtggagggggtgtgagtgagtggtgccatacacttgtctgcccatcatgagctgggaaccacgctaagtgctttacacatctgattgtgccaattcctcccaaccacccagagggaaac

SEQ ID NO: 82565 - DNA, 1107 bp, Homo sapiens
gcggcggctgctttcgaaaagcgccggcactccgcgattctgatccggcctttagtctctgttagcggctcaggtccgcagtggaggccacatcaactcggcgccttgggaaccgctcgagcctaccaggtgagatgccactgacatggaagaatagggtgaagggcaaggggacctgtagggaaaaggttgccctcctgacctcggggcagagagagcaccaagaagaaagtcatggctaactgggagcagcagtaagtgaaggaaattaacgtcagtaatttgaggaaagggcgaagaagaaaacctttgagttcagcaaagggaaacggggcaggaggttctgggcagaggacacctggagcgctggaggctctcggagtcatagtttttctctcatattaagagttggggtagacaccattcccagcctgcttgcctttctaaagacgaggaagactggattattttccccaattagtaatggaatttgggacagtttatctgtggttcagattttactcagttggaattagcaattcggagagcactgtaatgacagcaagctatctataaacargtggcgccagttaactcccttgctgacaggcgtgcttcttgataggccaaaaccgtaactatctttccaaaacatagaccgccctaaattcttgtataaatatgactgtcctagatctgaaaaatacagtgatgttctctgtgcacaggtcattttggaagccataggctacttatccttaacttatgaatgtagctatggttgtagtgcctcctaaaatttgagtccattattacctctcactcaggaacggttttttaaaaaattatttgtacttaactgtactaaagtatatctttttattttctgtgtattgacaagaggtttaattgccaccacgtatttatcactatcactttaaaatattgtcagttttgtatgagaaacaacctcttaaattttgattcttcatctacaaatatttaacgtctaccttgtacatagccctgtgctagatgatagggtactaagagagacatacagttatgccttcaaggattgtacagtttagttaaggagattggatc

SEQ ID NO: 82566 - DNA, 1496 bp, Homo sapiens
aagctggaaaaaaagagtaaaattttatatacataaacatatgtgttatatgtaataaaatatccatagaaaagatattctgaattaacaaagtaacacaaaataaaaggcataattaaaatttctactaaaaatamaaaaagtaaattactagactctaatagattattttaaatcagaaacaaagtttatgatagtatttccttaatcttgagaataatggaaaaagatacatacatatacacacacaaataaagactagagagagcaggagaaaacacattacatgagagtcccagattagttgttttttatgcagacagtaaacagtattacagtgtatcataatgacactgacttacactaaattttatgggcttataatatgaatgtctgaaattatgtactgtgaataaacaacagttactcagcataggtattgtattattttaatgtctaatcctttaacctctagacatgaacatattaatttatgcaggaagttgattagctgttttacatcatgtagacacagtctaagttcagccatcatttactttattttattcttcctgttttccaggattgataatcaaatgcaaacaaaagctctatgacaacactacctatatcatgtgcagtttatgataagcaaagtgcatctatcataaatattagagaatatcaggatccttatatcacttgatcttcaggaaaaaagtgaggctttggagaaatgaatgttttattaaaatttgacagcatcaatcagctcaatttacactagctactgctaatggattatgacagtcatttcaaactaggaatacactggccccagtcactacccataaactagagttggctctgtttgtgataccagttttaagtgaaaacaaaaaaagtacaagaaaaatccttcactttctatgcttttatacttgtcaagtttaaatgcttaggaaaaaaagcataacaaacaaaacatattttcaaaaccagaacaaatattaggttggtcaactaacgaattcacataggattattaatggatttaattatttgatgcttggtcctagcctagctgcaattctatacttccaccagactgcagaaggtggacacatctcagaacaagtcatgatgtgccaaattcagagaacaagcaatcaaacgtgcctggcactagaccaacagatgggccttaatagagctggtaaaggtgagaaaaaatgaaagttaatgtcagagagaagcaggagagaacaaaatattgaacatgtagtctcgaaagttgaagttcaacagggattatgattaaagtcaaatccacaaagtgtgtgaatgtatagaaaatggagtttctcaacaaatcttgatttaatatactggctcattgggtcctaatccttcttttttaaaaatattttaatcaattcactcttctcaaacagtcactaaataactcatcatatctcaagtaattaaaaaaaatc

SEQ ID NO: 82567 - DNA, 890 bp, Homo sapiens
tgggccaggcccgagctggagatggagccttaataatgtcggccagaccctttccctgccctcctggggcatctagtccagggatgcctctctagggggtttgtggctgcatcagggctaacactggacctgcaggaagctgctgagctggccttcctagctggtcctggttgccctgagcaatactcaggcttactcccttcaggtgaagcctctgcrgaggtaggtgctctgggcctgcaggaagaatggagcctcctggcaccagcaggaagtgggtggcagtcccccagggtcccctgggccttgttagaggcactgataatgactctggaaagtgccctcttgagggaggccttgaggaagaggtgtgcagaacccaagggattaccttccacctttccctgcacgctgcatccagctaagccctcctgcccatccagccctgagggggccctctacagatgtggggaaactgaggcaggtagctcttcagcatcggctagagtgatgtgtctcaacacccatcacagcaaaactgacaggagagtatttcctgatctgggtggtaaattgcttagttttaaaacattaaaactcagtttatctattctggctatctgtatagatcaaagacaagctcctggcttctccctgcttactatgatatgtgtagaccagcttcttcctcattgactcagtaaatattatttgagggtccatcatgtgcatgcaccccgcagcaaggcaaggcactcgaccagctgaggtgcttgctgagggcaaagcgagcatgaactggccagtggaagaggtggtcataagcccctgctagggccacatggctggttgtagaaacaaggactgtatttcctaatgaatatgttttt

SEQ ID NO: 82568 - DNA, 776 bp, Homo sapiens
gtcgccatggtgaccgggccatgtgaccagccactcttcattcatgacaggttgcagtgtcctggattgggggtggggtagcaaaacacggctggagggagagccaaagagagggagaacraggatgaacaatgaataaagataaagtttccagccttgggggagactgcagagctctaggtttagtgcaaggatgctctgacagaattatctatttccccaggctggctgtcaggagaggaatatatttattcaagaagccttgcctttgagtcagagaatcaaaggtttagacctggaaagcatcgtaacaatcctctaggccaccacccttgattatacagatgaaaacaagaagactcagaaaggtggactaactcttccaaggtcacacagcaagtcagttgcaaaactggggcaagaaccaggctatttgtcattgtcagattcctctccatctaactggggcctctgggctggggtctgtggtgggccacagatttaagtgtgactctgatgagtggaactttaggtacctttgcacccaggtgattcaacacagctggagtcataggtcctccaaaggaggtaaaaacagatcatttcatctgtgcgaaggctcagtcctggccccttggccaataaatgtgggagacagtggctaataaatcgtgagaggtcttgcattattgagcaaagttagacgtcatccttggtaatctatggaaatctctttttgatcagaatgtctcagatctgcctccactgctgaatcc

SEQ ID NO: 82569 - DNA, 721 bp, Homo sapiens
aagccatgatagggacatgaaaatgaccaccgaaaagaaaaagtgccacttttcctcgggtgggtttattgcacatctcatctagctgggatccagatcttgattcccagccttcaagaagttcagcctctttgaatttcactgcaattcccatagaaatttgagcagtcacgttggccggaggtctggcttttctcgccctggataaatagctgcacgtgggctcagcaccgttctagctccaggtctcccccttcttcagggaagggctatctggctgctgtgcgtctgtattacyttcactaaagaatcttcacgttgtattcttgtggatggatgcccaaatgggccgtaagcactgagctcagcttctcaggtggccagaaatgagcacgagaaatttcctaacattctgcccaccccaggagctgccaattggtcagattaaatttgttaacgacattgatgagcaacacctagctcagaaatccaaggcttgttgtatcccaagccttctatcaacaccaattggtgtgagaatcactggcggggtggctaaagtgtagattgctaggatgcacccagagagtggaactggtaggtctaaggtgggccctcagaatttgcatttttaacagaaatctcaggtgatcctgatgcagtggtctctggaatccaccgggagaaatgcagctctccgtgtgaaggactgcatggtgct

SEQ ID NO: 82570 - DNA, 721 bp, Homo sapiens
aagccatgatagggacatgaaaatgaccaccgaaaagaaaaagtgccacttttcctcgggtgggtttattgcacatctcatctagctgggatccagatcttgattcccagccttcaagaagttcagcctctttgaatttcactgcaattcccatagaaatttgagcagtcacgttggccggaggtctggcttttctcgccctggataaatagctgcacgtgggctcagcaccgttctagctccaggtctcccccttcttcagggaagggctatctggctgctgtgcgtctgtattactttcactaaagaatcttcacgttgtattcttgtggatggatgcccaaatgggccgtaagcactgagctcrgcttctcaggtggccagaaatgagcacgagaaatttcctaacattctgcccaccccaggagctgccaattggtcagattaaatttgttaacgacattgatgagcaacacctagctcagaaatccaaggcttgttgtatcccaagccttctatcaacaccaattggtgtgagaatcactggcggggtggctaaagtgtagattgctaggatgcacccagagagtggaactggtaggtctaaggtgggccctcagaatttgcatttttaacagaaatctcaggtgatcctgatgcagtggtctctggaatccaccgggagaaatgcagctctccgtgtgaaggactgcatggtgct

SEQ ID NO: 82571 - DNA, 721 bp, Homo sapiens
aagccatgatagggacatgaaaatgaccaccgaaaagaaaaagtgccacttttcctcgggtgggtttattgcacatctcatctagctgggatccagatcttgattcccagccttcaagaagttcagcctctttgaatttcactgcaattcccatagaaatttgagcagtcacgttggccggaggtctggcttttctcgccctggataaatagctgcacgtgggctcagcaccgttctagctccaggtctcccccttcttcagggaagggctatctggctgctgtgcgtctgtattactttcactaaagaatcttcacgttgtattcttgtggatggatgcccaaatgggccgtaagcactgagctcagcttctcaggtggccagaaatgagcacgagaaatttcctaacattctgcccacccyaggagctgccaattggtcagattaaatttgttaacgacattgatgagcaacacctagctcagaaatccaaggcttgttgtatcccaagccttctatcaacaccaattggtgtgagaatcactggcggggtggctaaagtgtagattgctaggatgcacccagagagtggaactggtaggtctaaggtgggccctcagaatttgcatttttaacagaaatctcaggtgatcctgatgcagtggtctctggaatccaccgggagaaatgcagctctccgtgtgaaggactgcatggtgct

SEQ ID NO: 82572 - DNA, 721 bp, Homo sapiens
aagccatgatagggacatgaaaatgaccaccgaaaagaaaaagtgccacttttcctcgggtgggtttattgcacatctcatctagctgggatccagatcttgattcccagccttcaagaagttcagcctctttgaatttcactgcaattcccatagaaatttgagcagtcacgttggccggaggtctggcttttctcgccctggataaatagctgcacgtgggctcagcaccgttctagctccaggtctcccccttcttcagggaagggctatctggctgctgtgcgtctgtattactttcactaaagaatcttcacgttgtattcttgtggatggatgcccaaatgggccgtaagcactgagctcagcttctcaggtggccagaaatgagcacgagaaatttcctaacattctgcccaccccaggagctgccaattggtcagattaaatttgttaacgacattgatgagcaacacctagctcagaaatccaaggcttgttgtatcccaagccttctatcaacaccaattggtgtgagaatcactggcggggtggctaaagtgtagattgctaggatgcacccagagagtggaaytggtaggtctaaggtgggccctcagaatttgcatttttaacagaaatctcaggtgatcctgatgcagtggtctctggaatccaccgggagaaatgcagctctccgtgtgaaggactgcatggtgct

SEQ ID NO: 82573 - DNA, 460 bp, Homo sapiens
tttatatcacttttctgtttaagttaagcttgtcactttcttgtttaaataaagttgagtcatgcctaattttctatttttatcaaactggaatttcttagccaagtcatcaaggccctatactaaatcttgagtcataacttcattcctactatgttctaatcagattttccacttgaacctacactgtctgtcctgccaaccctcagcttgctgctttcccaaggatctgcaggcagcactccagtactgttcaaaagctaatgccgctgctgctactctcatttcttacctgtgctgtttttcaacatgctgtaatagtcatctcgataatcttccctgcttgcttctaccattaaacccagtttataaagtatgactcgaattatacttgaagtctgtgctgattaaccccagacatgtgrtgacccctaatctagtgctcatgatctccgtactt

SEQ ID NO: 82574 - DNA, 2243 bp, Homo sapiens
  misc_feature (1)...(2243): n = A,T,C or G
cagtggtgttgctttcatgtggaaatgtgttattttatgtaaaaatttgaccccaaatggcattccccaggttgatcatttacctagtccccagatgtagctatagatgacttttagtttatttcctgaaactaaatccacgctctaatgtagtaaaaatttcctctggtgaagatggttgaaggaaggtactacagggaactcataacaagcagctacaaatatgttgtaagaaatgacagcatcgccagaatcagtgacgacctcccagtgaaatatcactaaagggcacaatgcttggttaaagtcacaggtataaattttaatatatatgaagtataaaaatatgttctatatagtgtgtgtatacatagatatatctcctgatgcatctgcttaaaaagggaaattgacatggttttaggcatccctagcacaattcctgaagcagagagtcacgactacaaaatgataataatggctagcctgtgtggaaagcttgctatgtgccagacactaaatgatttacagggattttttcatttaacccttgttaccagggctgggaccagggtggggcaatgagatatcggagcacaaaagtgaaggagggccgggcacagtggctcacgtctgtaatcccagcactttcggaagccgagacaggtggatcacttgagtccaggagttcaagaccagcctggccaacgtggtgaaaccctgtctctaccaaaagtacaaaaaattagccaggcaccatggcacacacctgtagtcccagctactagggtggctgaggcaagataattgcttgaacccaggaggcagaggttgcagtgagccaagatcaagccactgcactccagcctgggcaacagagcgagactgcatctcaaaaaaaaaaaaaaaaaaaaaaaaaaaagaaaaaacaaatgaaggagacagccacctgcggggctatggaagtgcagggttgacacctgcatgcccctgccagcgagtgcctccttcggttctgcaccctaagtgcctcactcaccttaacctagtcccagacttgctggcaacaatcctgtgaggtcagtgtcatcaactttcttctttgcagatgaggaagcagaagcttttagaggctgagtatcttgcttcatggagcaaggatttgatgccaggacattgggctctaaagccttgggccttgactgactgtaccagactccagtgttggttgtttttgtctccctttccaggtgtccaaggcagctgcagatttgatggcctactgtgaagcacatgccaaggaagaccccctcctgacccctgttccggcttcagaaaacccgtttagggagaagaagtttttctgtgccatcctttaagtctttgagaggggcctgaagagcctccgggctcctgggacattgatgtagagtttttagtgaagtgggcacctttctagtccacggcatttgaagagagcgaggagaaccattctggaaactctaggctatgcatgtttaaagatctggtcccctttatgagaatgcaagccgatccacatcctgacttaagagatctgattctgacgaactgcctggaggaggggaatatataaaaataaaattggtgtcacttcttttctgctatcccccagccccccccccaaaaacctcatgtttctgcttcatattttgaaaaataacaattaaaacagacagctgtactgaggtaagatatgtgtgaccttcttggaatgaatattgtctttagaataccctttgataagctgagctgtcccgtgtagatgcaattcggtnnnnnnnnnnnnnnnnnnnnnnnnnnnnnnnnnnnnnnnnnnnnnnnnnnnnnnnnnnnnnnnnnnnnnnnnnnnnnnnnnnnnnnnnnnnnnnnnnnnncttgagcgcaggaggcagaggttgcagagaactgacagcatgctagtgcattccagcctaggtaatagagtgagactctgtctcaaaaaaamaaaaaaaaaaacaacaaaatctctcaaagctatggctcagtttcagccctgtttattttcactgtttttccctaaatagatatttttggtgttgagttattgaaggatgcccacctcagttgggatttctggcccagtcatgtaacaagatgatgaacttcactagtaaacacctccagctctttagatagagcctaaagtatttttcaaattagaagagatggatttataattc

SEQ ID NO: 82575 - DNA, 790 bp, Homo sapiens
  misc_feature (1)...(790): n = A,T,C or G
ttaaannnnnnnnnnnnnnnnnnnnnnnnnnnnnnnnnnnnnnnnnnnnnnnnnnnnnnnnnnnnnnnnnnnnnnnnnnnnnnnnnnnnnnnnnnnnnnnnnnnngaattcttttctcttcccagattcctgaaggaggagggttttgattcaagccttaaagatgagaaggtgttggcttgaaattgaccaagaaattgaccttttactgtaggtaaaaggacttacctgtgaggatgttgtattggagaattaaagtctcagcttcaggtgagacttcagggtggctgtgacgggagataaagttagagacataaactagagctactttccaaagggccttgctgcaatataatttagtggttaggagtggaggtttagagatcagacagaattgggttcaaatctcagctttggtacttaccagccatgtgataataactgatttttttaaaatcccatctgagctttagtttccttaacacaacgactrcctgttatcagttgtctattgctgcataacaaattatcccaaaatgtaatagcttaaagcaacacacagcttcttcagcttctgaagctgaagctgtaattctcagttttggttggtctggaatcccaccaaaactataattataatctaaccaaaactataattctcagttttggtgggtctggaatctgcacctggcttagctgggtcctctgcttcagggtctcttgcaaggctgcaatcaaatgtcagccagcgctgagataccatctcaagacccaactggggaaggatccg

SEQ ID NO: 82576 - DNA, 1138 bp, Homo sapiens
ttcctacatctagaaatttataggaaaataatctgaaagtctgcaaagatatatatatagatakatagatagatagatagatagatagatagatagatagatagatgctgactatagtactctttataaaaaaggaaaatgtcagcaaattcaatatacagtaatacagaattgtctgagtatatgatagaatttgtatataatggagtattatgcaaccttttaaatgaatgatataaagagctacagtacatagttaagtgaaaattaaggtattttcacatcgtataatcatgtaatatatgattcccactttgtattctcatattattagattttattataatcatttctatccatctatcagtctacctgggaagctacattccaaaagtcagcaatactcaggctgcaaatgattttcattctcttatttctctattttatttttattatatttattttatgatataaaaatgtaaagccattttatgtcacaaaaaagaaaaaattaataagggccctgaaacaagaagtgagcactgagaaataaattttatgagattttgaaaaaatgttggatacccacaagtaaaaagtctagaaaaatccaagtcagacacaatcccaaatatcctcagctcccactgtaaatactttatactataattcatttgctttgattatttaaaaaatgtatagttggccaggctcagtgactcatgcctgtaatcccagcagttcgagaggccaagatgggtagatcacttgaggccaggagtttgagaccagcctggccaacatagtgaaagcaccttttagaggaattgttctacctttatacaaggaaaaagtgaaacctgcagaacaatttaaatcaatgttgaaagaaagaattggcaaaactctgcagtatcccttaaaatatatacttataaatttaaaattattttatttttctatggtgatgacacccaatacacaaataatgaagacattttattcttctttccattaaggacatcttaagtcaatacacatcaagtttgaatcctggctctgataagaccttggcaaagtcacctagtcagcttgtttcctccacatatcttttctcttttactgaatagaggtactg

SEQ ID NO: 82577 - DNA, 560 bp, Homo sapiens
tccacagattctcaagggatcagtgctccccttcccttcctcctaagaaacttaaaaacctcttcatctgttcaacaacttttcagtatattcagattatccataaaatacattcttctggagctgtgtaaarccatcatgtccttcaagagattataaaggtctatttttataaaaaatgtacaatttctaccatataaagagaaagaatctctctataacatggagagaatcaatctgttcctaacacatccaagcgttttttggaaataggagccacagagagttacaacagatcctgacaaaaaggattgcaggaagtcaaagtcctgtggttttcagtttttctttttgaaatttttctgcctccttaatttttctctctggggaaaataagtgactttcagctttgagagttgcataaaattccagaatacaagaaatcttaataagacatcaaatttaatccttatcttcagataggactgcaccaaagccctcagaatccccaatgagaaagagtctccagtcattcttgttaacaaatcattttaaatttg

SEQ ID NO: 82578 - DNA, 560 bp, Homo sapiens
tccacagattctcaagggatcagtgctccccttcccttcctcctaagaaacttaaaaacctcttcatctgttcaacaacttttcagtatattcagattatccataaaatacattcttctggagctgtgtaaagccatcatgtccttcaagagattataaaggtctatttttataaaaaatgtacaatttctaccatataaagagaaagaatctctctataacatggagagaatcaatctgttcctaacacatccaagcgttttttgraaataggagccacagagagttacaacagatcctgacaaaaaggattgcaggaagtcaaagtcctgtggttttcagtttttctttttgaaatttttctgcctccttaatttttctctctggggaaaataagtgactttcagctttgagagttgcataaaattccagaatacaagaaatcttaataagacatcaaatttaatccttatcttcagataggactgcaccaaagccctcagaatccccaatgagaaagagtctccagtcattcttgttaacaaatcattttaaatttg

SEQ ID NO: 82579 - DNA, 512 bp, Homo sapiens
attgttttgggaacaacgggtaaaacaattaatttacataagttgaaattctgtcacatagaagacaatgtcttggattgtcttacgttgtttaaaatttatcatccacttaagatgctcccaccctcacagagaaytctattctgcgtcggaaagttggggagaggggagaaaacctgatgttgtttcatatcaatgttgccttgtttaattcaggagaaaagaaattacaaaggaggaggtcagcagggaaatgggtagatgaggagggggccgagagcctcatgtcctgtaattggctggtttgtccatgatttattgcctataccactcctggcatctctttttttaaagtacctcattgatgtgtcagttataaagctattttaaactaaaagtatttcctcttaaaccaacaaaaatacacacttatctttaaaatttatagcatttagctcatcttgctgctctactgcttcctcttattacattctaattctcttgtgtgaaga

SEQ ID NO: 82580 - DNA, 512 bp, Homo sapiens
attgttttgggaacaacgggtaaaacaattaatttacataagttgaaattctgtcacatagaagacaatgtcttggattgtcttacgttgtttaaaatttatcatccacttaagatgctcccaccctcacagagaactctattctgcgtcrgaaagttggggagaggggagaaaacctgatgttgtttcatatcaatgttgccttgtttaattcaggagaaaagaaattacaaaggaggaggtcagcagggaaatgggtagatgaggagggggccgagagcctcatgtcctgtaattggctggtttgtccatgatttattgcctataccactcctggcatctctttttttaaagtacctcattgatgtgtcagttataaagctattttaaactaaaagtatttcctcttaaaccaacaaaaatacacacttatctttaaaatttatagcatttagctcatcttgctgctctactgcttcctcttattacattctaattctcttgtgtgaaga

SEQ ID NO: 82581 - DNA, 512 bp, Homo sapiens
attgttttgggaacaacgggtaaaacaattaatttacataagttgaaattctgtcacatagaagacaatgtcttggattgtcttacgttgtttaaaatttatcatccacttaagatgctcccaccctcacagagaactctattctgcgtcggaaagttggggagaggggagaaaacctgatgttgtttcatatcaatgttgccttgtttaattcaggagaaaagaaattacaaaggaggaggtcagcagggaaatgggtagatgaggagggggccgagagcctcatgtcctgtaattggctggtttgtccatgatttattgcctataccactcctggcatctctttttttaaagtacctcattgaygtgtcagttataaagctattttaaactaaaagtatttcctcttaaaccaacaaaaatacacacttatctttaaaatttatagcatttagctcatcttgctgctctactgcttcctcttattacattctaattctcttgtgtgaaga

SEQ ID NO: 82582 - DNA, 609 bp, Homo sapiens
tggcagcaatggatggccaggaaacagccacacaacccaggggaggggatgaagtggtaaaatagagggttataggaagaggggctgattttaaacaaagaccagttcttaagattaagtcactaattgaagagtatcagaaagtagctgtagacaccaaagaaagtagtaaattcttaatcacagcattcataatatgagggaattttaaggacgactagcccagttccctcattttactgaaaatgaggatgaagaggaagtagataataagagttaatgttatttaagtaccttccatatgtcaggtattgtgctaggtattatttaatccgatgaggttggtaaaaattgtatccccattttgatgatgaggaagtcaaggcccagagaratggagattcattcaaagtggcacagctatttaggggtagaggtagggttgggattcaagcacctgatgcctaatcctggctatttttctctgtactgcatagccagtttctcttccaacgagaatgcatgcaaatagtctttggaagaaccaggcaaatccacacctaaatccctctttaccttggattgtatgaccatctctctctgagttca

SEQ ID NO: 82583 - DNA, 542 bp, Homo sapiens
gaataggttttgggagtgacacttctctctttcattaaccatgatccagtcacatggggacacctggttgcaagggaagttggacaaatttactctgtgtgcactgatgagcatccagccaattcttccaaaacatacaattaatttatcccattttcatttctgccactgttgtattatttttcttatgcaggttttgatgatgattctttctcacctgtgtactttgagttctcataatttatttttctcactcttatgtgtaacctgcctttagactgtgttttcccaaaggtatgacttgatccatacccttcaggcatctaaaacttggtatctccttagtgaagttctatagattgcctaaactagaatagtaatcaccaccgattcctatcattctctatacctttacccaatttaatttttcataacatttcttcattaaatggattgtaccatttatttatttgtatagtattttattttmttttattgcctgtctctctcattataatgtgcatactgtggccatatagtgg

SEQ ID NO: 82584 - DNA, 1008 bp, Homo sapiens
aatgagatattactgcttacctattagcttacactgttggtagaaatgtgcactgtcctaggtttctgacaagaaatttgtgatatttattaaaatttacaaaatgcatgtcccaagcaatatcacacttgggaatcaactccataattataagtatctatgtgaaaggatacagaaacaaggctacttaccgcagccttacttgtagaagaaacaaaaatttttaaactatctgtttgattgacagaataaggaatgataactccctattttgaatggtaagtggatcttattaaaaaaaaaaaaacagggggccaggcgtggtggctcatgcccattatcccaacactttggaaagccaaggcaggtggatcccttgagctagggagttcaagaccagcctgggcaacatggcaaaaacctgtctctacaaaaaaacacaaaaattagccaggcatagtggcacccaactgttgtcccagctacttgggaggctgaagcgggaggattgctggcatccagaaggcacaggttgcagtgaaccatgatggcaccactgcactccagcttgggcaacaaagcaagtccycatgtcaaaaacaaaagcaaaaacaaattatatcttaaaacctagagaaattaatatgatacattagaaagtataaacagcaaggtaaagaataatgtgtattatatgatccaattttgtgaaagacaaaatgaaacaaattaaaattcttatttattggtatataggtcgatatgagcatagagaaagatatagaaatgtacaaaacaggctgttcacctcagaaacctggatctgaaaagagttgaagaactaaagttaatttttgaaccataactgtttcaaactaacattatgtaatttctttacatactattcttgaaagtcttgaatagaggcaggaaaatcaaatttatttaataatttcttcaacaatgccaatcacattctttaacaatttatagaaacctgaaatcgag

SEQ ID NO: 82585 - DNA, 631 bp, Homo sapiens
atcctggaaaatcaatatgggccacattactcggaagtccatatatcagtaggcaggtatgaaagaggctcaagtatgtgaaaaggttgctaatattttcttctgaagtttaaatcttatagctgcagttcacagggctttataaaagcacagatgagttttcggtgactccaaattaggaaaaatggtggaaagaagaagaagaaaaaaactgaagacaatcttttgaagacctgtagccaagaaaaattagaattcagtccaaactgtaaaaattaataaaaatggaaaaacattaggcaagactagaatctaacaacaggtgtactatcattttttgaaacaattcttctctctcccatttaccatttttactaaagacaaatcatggcagagctgatttgctttattatacttgacctgattattgtayacagcacagtcatagtaatagtaataatttttttgcataagcttttaaattctctttgatggaagtgaagcaggatgtttccctgacccttctgtgggacttgtgacagggcctcatttattcagcctgccactctcacctccttgcaggagagagcatgcaagcaaatgaggcaggaactggagtgcatgagtgctg

SEQ ID NO: 82586 - DNA, 631 bp, Homo sapiens
atcctggaaaatcaatatgggccacattactcggaagtccatatatcagtaggcaggtatgaaagaggctcaagtatgtgaaaaggttgctaatattttcttctgaagtttaaatcttatagctgcagttcacagggctttataaaagcacagatgagttttcggtgactccaaattaggaaaaatggtggaaagaagaagaagaaaaaaactgaagacaatcttttgaagacctgtagccaagaaaaattagaattcagtccaaactgtaaaaattaataaaaatggaaaaacattaggcaagactagaatctaacaacaggtgtactatcattttttgaaacaattcttctctctcccatttaccatttttactaaagacaaatcatggcagagctgatttgctttattatacttgacctgattattgtacacagcacagtcatagtaatagtaataatttttttgcataagcttttaaattctctttgatggaagygaagcaggatgtttccctgacccttctgtgggacttgtgacagggcctcatttattcagcctgccactctcacctccttgcaggagagagcatgcaagcaaatgaggcaggaactggagtgcatgagtgctg

SEQ ID NO: 82587 - DNA, 444 bp, Homo sapiens
tataagatatagtaattttccctacatgctcctcctaggagagaagcaattcaaaataaaatacccagccacaaatacccraaagacatttctgtctaacctaaattatgacttaaaacagtgatataaactcttcaaaaattatttttcccaacaaccatattactaggttagtgctgaatgcaccaaagtcctccaaatattagccataattagataggccacaggaataaatacaacctgcatttttatacttctggcaacacatcttgcctgttttgtgcctatgttcatttcaaaatttaactgagacataagctaatgtttacccagaaaagtgtatttagattctcataagaatagagcgatacccttacaagaaagactaaaatattagaactctttcatccagaaagaaaatagaaggttggctaagaaactctt

SEQ ID NO: 82588 - DNA, 1335 bp, Homo sapiens
ttttaggaagctcctgtgcctcacatatcttgatgtgatctccagagcccaacagtgcaatgaacatgacagatgatcaataatttcattgactgaataagaaacttttgttagttaaatacagcgagttatcttattttgaaaaatttatgaagtcctttctataatataagcattacattatatttacaaaatcagttttctttcctggtcgtgggaacccaaatttgtctttatcttgagagaagtaatgctaaaaaataaactgacaactaattctcaaaaaaattgaaaaaagagaaaagaattactgatattaagrtaatatttattgaagaacagttaatatgtaattttgaaggtcaaatcaagcataacagtcagagacttagaggcttagtctaactgcatcatgcatctgaggtctgaatgctgggaagagatccatgggaaaaatgagtggtattaaatgtagatggatgccctttcaccagttacttagtggaataacaggataataaagctgatggccatttaacacatggacaaattgatataaatgacactttcatatcatgggatggtgactggctcatggttgatagtccaatatgaggttcaacaagaggatccacagcagctggggcggcagcaagttgtacggcagcaggtggtctgacagcagagtggacggcagcagctggacacaccacagcgggggcggcaggtggtctgacaacagagtggacggcagcagctggacacaccacagctggggcggcaggtggtctgacaacagactgggcggcagcagctggggcgacagcaagtggtctggcagcaggtagtctgagagcaggatgggcggcagcagctggatacaacacagctggggcagcaacaggtggtctggcagcagctggggcggcagcaggtctcttggcagaggccttgatcacagccctggtcagagcagacagagccacaacaagagttaaccatggtgtcagagggtggaggttctaggtaggtttccaagacagtgagtttttcaaatgtgggaatctccttatcccatgtccacttttatactcagctgaggagctgttgtcaccacataaaagctatttccttgttattgtttatcttaatagataggcagttatcaagttagctaattgtgggaaaaaatctgtataaaaggtggaatgcacttttattctttctctgtgttagagtttagccaatccagtctttcctcctcctcttgtcttcagttaatttagtgtgtcatttaatttcaaagacttgtaatcttactcatccagtcgattg

SEQ ID NO: 82589 - DNA, 1335 bp, Homo sapiens
ttttaggaagctcctgtgcctcacatatcttgatgtgatctccagagcccaacagtgcaatgaacatgacagatgatcaataatttcattgactgaataagaaacttttgttagttaaatacagcgagttatcttattttgaaaaatttatgaagtcctttctataatataagcattacattatatttacaaaatcagttttctttcctggtcgtgggaacccaaatttgtctttatcttgagagaagtaatgctaaaaaataaactgacaactaattctcaaaaaaattgaaaaaagagaaaagaattactgatattaagataatatttattgaagaacagttaatatgtaattttgaaggtcaaatcaagcataacagtcagagacttagaggcttagtctaactgcatcatgcatctgaggtctgaatgctgggaagagatccatgggaaaaatgagtggtattaaatgtagatggatgccctttcaccagttacttagtggaataacaggataataaagctgatggccatttaacacatggacaarttgatataaatgacactttcatatcatgggatggtgactggctcatggttgatagtccaatatgaggttcaacaagaggatccacagcagctggggcggcagcaagttgtacggcagcaggtggtctgacagcagagtggacggcagcagctggacacaccacagcgggggcggcaggtggtctgacaacagagtggacggcagcagctggacacaccacagctggggcggcaggtggtctgacaacagactgggcggcagcagctggggcgacagcaagtggtctggcagcaggtagtctgagagcaggatgggcggcagcagctggatacaacacagctggggcagcaacaggtggtctggcagcagctggggcggcagcaggtctcttggcagaggccttgatcacagccctggtcagagcagacagagccacaacaagagttaaccatggtgtcagagggtggaggttctaggtaggtttccaagacagtgagtttttcaaatgtgggaatctccttatcccatgtccacttttatactcagctgaggagctgttgtcaccacataaaagctatttccttgttattgtttatcttaatagataggcagttatcaagttagctaattgtgggaaaaaatctgtataaaaggtggaatgcacttttattctttctctgtgttagagtttagccaatccagtctttcctcctcctcttgtcttcagttaatttagtgtgtcatttaatttcaaagacttgtaatcttactcatccagtcgattg

SEQ ID NO: 82590 - DNA, 1335 bp, Homo sapiens
ttttaggaagctcctgtgcctcacatatcttgatgtgatctccagagcccaacagtgcaatgaacatgacagatgatcaataatttcattgactgaataagaaacttttgttagttaaatacagcgagttatcttattttgaaaaatttatgaagtcctttctataatataagcattacattatatttacaaaatcagttttctttcctggtcgtgggaacccaaatttgtctttatcttgagagaagtaatgctaaaaaataaactgacaactaattctcaaaaaaattgaaaaaagagaaaagaattactgatattaagataatatttattgaagaacagttaatatgtaattttgaaggtcaaatcaagcataacagtcagagacttagaggcttagtctaactgcatcatgcatctgaggtctgaatgctgggaagagatccatgggaaaaatgagtggtattaaatgtagatggatgccctttcaccagttacttagtggaataacaggataataaagctgatggccatttaacacatggacaaattgatataaatgacactttcatatcatgggatggtgactggctcatggttgatagtccaatatgaggttcaacaagaggatccacagcagctggggcggcagcaagttgtacggcagcaggtggtctgacagcagagtggacggcagcagctggacacaccacagckggggcggcaggtggtctgacaacagagtggacggcagcagctggacacaccacagctggggcggcaggtggtctgacaacagactgggcggcagcagctggggcgacagcaagtggtctggcagcaggtagtctgagagcaggatgggcggcagcagctggatacaacacagctggggcagcaacaggtggtctggcagcagctggggcggcagcaggtctcttggcagaggccttgatcacagccctggtcagagcagacagagccacaacaagagttaaccatggtgtcagagggtggaggttctaggtaggtttccaagacagtgagtttttcaaatgtgggaatctccttatcccatgtccacttttatactcagctgaggagctgttgtcaccacataaaagctatttccttgttattgtttatcttaatagataggcagttatcaagttagctaattgtgggaaaaaatctgtataaaaggtggaatgcacttttattctttctctgtgttagagtttagccaatccagtctttcctcctcctcttgtcttcagttaatttagtgtgtcatttaatttcaaagacttgtaatcttactcatccagtcgattg

SEQ ID NO: 82591 - DNA, 511 bp, Homo sapiens
aatcaattattttaataatctttgtgtgaggcttggaaaagacttctagaagatcaaattagattatgtctatttcattagaaattctattttgggatgggagtggtggctcatgcctgtaatcccagcactttgggaggccgaggtgggctgatcatttgaggtcaggagttcaacaccagcctggccaacatggttaaatcctgkctctactaaagatacaaaaattagctggccatggtggcaggtgcctgtaatcccagctactcaggataataatcaagtgacacagcatatccaagagcattgcctagaaatctatatttattaaaaacaaaactgcctgagatgttctaggaagatgccaagaagagtccaaggccatgaccttctcatcaactccttgctgggtgcaattccatccataagactgtggcctaaattcaaatataactgcgactttgtattctcaagaagatgaatcaggagtagggctctgtgaagtacggca

SEQ ID NO: 82592 - DNA, 511 bp, Homo sapiens
aatcaattattttaataatctttgtgtgaggcttggaaaagacttctagaagatcaaattagattatgtctatttcattagaaattctattttgggatgggagtggtggctcatgcctgtaatcccagcactttgggaggccgaggtgggctgatcatttgaggtcaggagttcaacaccagcctggccaacatggttaaatcctggctctactaaagatacaaaaattagctggccatggtggcaggtgcctgtaatcccagctactcaggataataatcaagtgacacagcatatccaagagcattgcctagaaatctatatttattaaaaacaaaactgcctgagatgttctaggaagatgccaagaagagtccaaggccatgaccttctcatcaactccttgctgggtgcaattccatccataagactgtggcctaaattcaaatataactgcgactttgtattctcaagaagatgaatcaggagtagggctctgtgaagtayggca

SEQ ID NO: 82593 - DNA, 673 bp, Homo sapiens
atgacttctcatcatgtagttcaatgttatttaaaaccaagtctacacacctcttacaattatctcgtgtactcccggtggtattcaccccacgctttcaagcctagggagtagtctgtaaaaccctccttggagcaagtggataatcaagagaccaatgttatcatctcaaggaccaaggcctaccaaaattgattcaagatgtaacaaaaagcctgcctagtccaataatcattaaagaatgcaaatcccataatttaaaaatttcccaccagaaaaacattaggcccagattattttaaggcaagttctacacaaccttgaaggaacacactcttccaaccttattaaaattatctgagaaagtagaacaggatgcttcctccaactcatttgacactaggttcatctgtatcaaaatgagacaagaaccagacaagaaaggcaaagtgtaggccaatctcacttgtaaacataaatgaaaaatcccaagatggtaacaaaagaacccaatgatatatcagtggtgacgcatgaaatgtttcttaaagcacgtatttygggggatgaaatataaagtacgccctagcattcctgcagcaggcaagttcacggtgtttatggtggaacattttgtgtgggtctgaaaaaacaaggagcacaagatgatcaa

SEQ ID NO: 82594 - DNA, 660 bp, Homo sapiens
aggcacatgaaagccctcgtggatcttgagttaaaagaatgccaggccgggcgaggtggctcacacctgtaatyccagctttgggaggccaaagcgggcagatcacgaggtcaggagttcgagaccagtctggccaacagggtgaaaccccgtctctactaaaaacacaaaaaattagccaggcgtggtggcatgcgcctgtaatcccagctactcaggaggctgaggcaggaaaatcgcttgaacccaggaggcggaggttgcagtgagccgagattgcagcattgcactccagcctgggtgacagagcaagactccatctcaaggaagaaaaaaaaaaaaaaaaaagagagaatgccaggaactaggagaaaggtaaaataggcacaagctcaagaaggagaagactgccttgccctgatgagaataagtaatggacagtcaaaagcaaaataatagggccctggcatttcataaaaatgcagttcctcactcataatctaggacaaggtgactccccagcacaacccaaagacgggagagctgtgatgatgactcaggaatgccctgaaatgcccggagtgggaaagtggtttcatgtcagttgtataaatgacttgtatgaatatctctttaatctgtttatttaccattttacta

SEQ ID NO: 82595 - DNA, 1337 bp, Homo sapiens
aaagtgttggggcagcaacaatttttgggggtggtatcatatctcctgtgacctgcacatgtatgtccagatcacctgaagcaactgaagatccacaaaagaagtgaaaatagccttaactgatgacattccaccattgtaatttgtttctgccccaccctaactgatcaatgtactttgtaatctccctcaccattaagaaggttctttgtaattctccccacacttcagaatgtactttgtgagatccaccccctgcctgcaaaacattgcttctaactccaccgcctatcccaaaacctataagaactaatgataatccmcccccctttgctgactcctttttcggactcagccggcctgcacccaggtgaaataaacagccttgttgctcacaaaaaaaaaaaagtgttttctcacattaaaaaatgacaaccataaattttgcataaaatattaaagaataaatggctctaataaaatattattagaggcagctatttctaaattaaaagacgcattgagttttagcataagaataactaaggtaaatcacataaattaaaaagaagaaataaagtgaaacatgattatataatgactattttagtttacgtaggcaaatcgtcaccaataatctatgtgcagcttaacatcatcatgcatggtgcctgatggaataaaaataggaggattcagtgtgaatttgagttcaactgaacaaagattttcttacagcatcttacagggatacaatgtgttggggattgctctagacccagaaatgcaaaaataaataagacatagtcaataagaaagaaagagtgaaagtttgtcagtatctctgtcagcaaaatgctatgtaacaaaccaatatattcactggctaaaagcaagtcctatttgctgtatcagtcagggcctgaagagaaacagatggtgaactcaaaatggtttagctgaagaggattaaaggaaaggaccatttatagagccataggaaggtcaaaggatgcaagaagtgctagtgaaacaccaaacaatgtacccaaagaatgtgatcagtactgctcacccctactgggaagggttaaggggaagaaccatatgtactaaaaacttgctgagagctgaagccaaaagtagggctgcaggaccagacaggaactgtggcaggagaggaaagcagccaatcccagaacctcagcaggggtgggggctataaatagtgtgtatgtatacatgtaatatgtgtgtgtgtgtgtgtgtgtgtgtgtgtgtgtgtgtgtgtgccagtcattagagaaaatctaatttgacttcgttatgttcttttt

SEQ ID NO: 82596 - DNA, 723 bp, Homo sapiens
ttttaaatcatttgaaaacctcagcctctgtctcttaatggtagaatttggttcaaacatttggtgtaataatcgacaatattattttactccttcataaaaattctaactcttataactcaattttagctgaatcactttcaagaagaaaaaaagacccatttaaagaggaaagaaaaaagatggggggagaaaagcttagtcatgaagcctgctctgaccttacagagcccagtgacctcatatttacaggaatctggaacacattaaggcagacagaggcaaagatgatggcggggaggcgggagagagctgtaaaggaggggatgatgacaagcagctgagtaaagctctatctggaggccgggtgcagtggctcacccctataatcccagcactttgggaggccaaggagggaggatcrctcgagcccaggagttcgagatcagcctgggcaacatagtgagaccttgcctctattcagaaaataaaaaaataaaaaaacattagctagagatgaatgatgctgccctaatcacagaattttagatctagaagattccctggatttgataatcccggttctgggccgttccgccacaaggaaacagcttgacaagatcacacagcctgctggcagcagaagtgggaccacagtcacattgtctgggtcaccatgtccccaaaccctggacaaccagagggaacagacaatgttctgca

SEQ ID NO: 82597 - DNA, 592 bp, Homo sapiens
gatccatggctagaaaacaagcataaagtctgctggtgctgttgaactttctcattttactcaaaggaaacccaagaccagagatgaggggggagttagccaaggtgtgtgcaacgcagccactaaacctccaattccttaacgtcccgcttatctcagcaaagaagctgccagagagagggratgagccagccctccaaaggttggcctgcattccacaaatgctctgcctcatggccatttccagaaaaagtcacccattgaaaatccacattgctgtggagatttccgctgtcacaggccctggccacaccacgccacggcttcctccatgtgaactcactaatgcccaagcctcattccccaaggagagtctgaatgaattggcccttttctgggcccagtgtgtcatctatagaggccccagtggaaaatcaatagaggtcccaatgggaaatttgtggccctggggacattcagacaagaaaggcagacccttggcccccctccaacctctccctcaacagaagcatttcccaaaagctccgcgggtgatcctgatatgcagccaggggatgtgcaccccgggtcc

SEQ ID NO: 82598 - DNA, 573 bp, Homo sapiens
tgcacccagggccagaacacagtaggagctcaccgagtatatggccttggagttttctacgcagggcctccaaagcaaactgtgctcccatcctgtgagattaaccactaccatttgcaagagggaccagaggtggcccagcaacggcccaacctccgctaaagcattcattcgctcatgcattcatgcagcagacacttcctagggacctactatgtgccaggcctatcctggaccctgggcaggggtgggggcgggagcaggtgctgtgggggtgatgggcccagatgacaaggtctcagcacttgtcctcctggagcttacaacccactggtttttaaaccggatgtcaggtttcttctgggattcaaccaaatgcagactccttgccccacctgcggaactgcaaatcgagtgawtctggggtcaggccgggggtcctgtctccttcaccgtggtctgagcgcttttccagggaccacaatttgagaccttcaagtgtgtgggaaactgctgctttttcagcacctccaactgtataggttagaaacgtcctgtgcaggtagcgtagga

SEQ ID NO: 82599 - DNA, 573 bp, Homo sapiens
tgcacccagggccagaacacagtaggagctcaccgagtatatggccttggagttttctacgcagggcctccaaagcaaactgtgctcccatcctgtgagattaaccactaccatttgcaagagggaccagaggtggcccagcaacggcccaacctccgctaaagcattcattcgctcatgcattcatgcagcagacacttcctagggacctactatgtgccaggcctatcctggaccctgggcaggggtgggggcgggagcaggtgctgtgggggtgatgggcccagatgacaaggtctcagcacttgtcctcctggagcttacaacccactggtttttaaaccggatgtcaggtttcttctgggattcaaccaaatgcagactccttgccccacctgcggaactgcaaatcgagtgaatctggggtcaggccgggggtcctgtctccttcaccgtggtctgarcgcttttccagggaccacaatttgagaccttcaagtgtgtgggaaactgctgctttttcagcacctccaactgtataggttagaaacgtcctgtgcaggtagcgtagga

SEQ ID NO: 82600 - DNA, 758 bp, Homo sapiens
aaaaaaaaaaaaaaaaaggtacatcttatttagtcgagcatggtggcaggcacctgtaattccagctacttgggaggctaagtcagggagaattgcttgaacccaggagatggaggttgcagtgatctgagatcgcaccactgcactccaggctgggtgacagagtgagactctgtctcaaaaaaaaaaaaaawaaaaaatggtatatcttataactggaattgtatttatttatttttaactggcactttaaatttgatgagtatagcaataacaatgacaatcacagttacggcttaagggatgcttattgatgccaaggccttcagtttttcacactactctatgaggcaggtgctacaactgttcccattttatagatgaaaaaaccgaggcacaggtttgttaagcgatttagcctaggttgcaaagctgcaagtggtggaggggagattcaggccccgagtctagcctaaaagtatgctgacaggggtactgacctgaatgctggcacttgacatgaacctgcagcaaggctggcgtggggaagagctccttacactggtcacattcatggaacttcatatctgtgaagtgcataaagaaagacgtgctgggaaagaacaaatggttggctctccaggctgaagagtaacagggctggggttggggcgatggccaatacttagcaagcatctaccaagtgccaggaatcttataacctatggtatatttgtacaatctagtggaaagagcat

SEQ ID NO: 82601 - DNA, 1407 bp, Homo sapiens
gggagaggagaacaggaagtgactgacaacagatacgaggcttctttctggggcaaagagaatgtttgatggatacagagcttcagtatgaaatgatgaaaaagttctggagacaggtggtaatggtggttgcaccagtaagaatgtacttaatgctactaaacatgacacttaaaaatggttaaaaaggtagactttgttacatatattttatcagaaaaaagtaataaaaagacatgaacacacatgaccacatgctcaatactatgggttgtacaaagtatgggaggagtccagggaaggagttccctggctgaggtcacagaggccactttctgcagtgggagacatttgggctgcgcttgcaggactggggggaagctgggtgggaaaggctggcagagggtgtgggttggtggatggggaggaggatggccctgagtgtgtgtgcttggctgggggtactcacagttccatgttgggaacctcgaggctctgtgccccctgcccccctggcagtctaggtccaggtccccaggaaggcctgtgagaaaggttctgaccagaagatgggagtgacccatggtgtccaggggatcctatcctcagggctcctgagtggtcagatgaggaagccctccccaaacctggggttctggtcttgttcactcggccagccaggcgtaacccgagagacttggactccagcatccccagacctcaggccctggttctcccagttggcgccgaggtcacagccttcccgaggtcagcagtggggatcgcagcagactcactcctctctgttgcctcatggacaccagaggccagagcacccagcacagmcttctcctgcaacagctgggtcaggccccaggaaactaataaccactactgagcccactctggctggcatcacacaggggccttcctgggtattacattctaccccctaccctccccatttcacagaagatgcaaataaggctcagagagcttaaatggcgtgctcagtcacagtgccgggcagcaacagtgttgacatttgaccatctgactccatatccctgactgtcagcctgggggctatcctggactctaggcttgcttcagaccagggctggcagggatggctgagccactgtcctcgtgccctgctcctctcttgagccatgccctcccctcagctctgggaaacctccctcttccaggactaaatgcttctgttacctgtcccttccagatcctcccagctgtgccactggtgggcacagcccccaaggcccacacccactaaggtgagggggcaaggctgccctgcagtgaaagctgccacaggaggctctttggtgctgttctcagcactggtgccaccatcttggcccgaagagggcatgtttctcctcc

SEQ ID NO: 82602 - DNA, 1123 bp, Homo sapiens
ttctcttaatcctcaagctcaatggatggttctattctttactcttcttctaagtcagagttatcctccatcatcctccgtgattccttcatccctcagatcctgtcaggcatgcagttctgtcaatgctgcttcctgagcarcttcggaagccatccctctcctccatgccactgcattgcctcagtgcgggtcctcctccctcacctggactactcagcctcccgacactaactcctacagccctgggtcatcctcaccccactcatcctaaccacatcccaaaccagcctttgggtactgtactctcatggaagctaattttctcaaacacaagtctgattttttcccctctttgtatgttcctcttcatttacaaattaaaatcctacattttcagcactgtattcaaggccctccgtgttctggatgcatcgtctgccttgcatgtttaatggtgcctgacacttctcatggatccttgaacatagcatatggcttcacatctctgggcctctgcacacgatgtttcctctatctagaatgctctttcccctaatctgcctagaagacactcacatggtctttcatgtcaacagacgtttatcgagtgtctactatgagccccaagactgctaggcagtggagacagaaaagtgagaaggtgtggtcctcttcttggccatccagttgaaacatcagctcttgaagctccccgtaaatctcccctctccaaccctaccacctatgcacagtagaccatttttccttactgtgcttctttccacttggtgcataattccttcgctgcacttacatggtataacttttgtttgtctgctgaggctcagaccaatgttcattgctttgggggaggaagtatgtagtttaagaatatatgggcactagcatctgtgtggtaggtagaattctaaaattgtccaaagattcctgacccttggtgtgcatgccttccccttgatgtaggcaggagtggtgaatatgatggaattttactccagtgaatagattacattatatagcaaaggtgaagaggttttgcagattaattaaggttggctttgagttcattgaaagggaatttatcctgggtaggcctgac

SEQ ID NO: 82603 - DNA, 1123 bp, Homo sapiens
ttctcttaatcctcaagctcaatggatggttctattctttactcttcttctaagtcagagttatcctccatcatcctccgtgattccttcatccctcagatcctgtcaggcatgcagttctgtcaatgctgcttcctgagcagcttcggaagccatccctctcctccatgccactgcattgcctcagtgcgggtcctcctccctcacctggactactcagcctcccgacactaactcctacagccctgggtcatcctcaccccactcatcctaaccacatcccaaaccagcctttgggtactgtactctcatggaagctaattttctcaaacacaagtctgattttttcccctctttgtatgttcctcttcatttacaaattaaaatcctacattttcagcactgtattcaaggccctccgtgttctggatgcatcgtctgccttgcatgtttaatggtgcctgacacttctcatggatccttgaacatagcatrtggcttcacatctctgggcctctgcacacgatgtttcctctatctagaatgctctttcccctaatctgcctagaagacactcacatggtctttcatgtcaacagacgtttatcgagtgtctactatgagccccaagactgctaggcagtggagacagaaaagtgagaaggtgtggtcctcttcttggccatccagttgaaacatcagctcttgaagctccccgtaaatctcccctctccaaccctaccacctatgcacagtagaccatttttccttactgtgcttctttccacttggtgcataattccttcgctgcacttacatggtataacttttgtttgtctgctgaggctcagaccaatgttcattgctttgggggaggaagtatgtagtttaagaatatatgggcactagcatctgtgtggtaggtagaattctaaaattgtccaaagattcctgacccttggtgtgcatgccttccccttgatgtaggcaggagtggtgaatatgatggaattttactccagtgaatagattacattatatagcaaaggtgaagaggttttgcagattaattaaggttggctttgagttcattgaaagggaatttatcctgggtaggcctgac

SEQ ID NO: 82604 - DNA, 1123 bp, Homo sapiens
ttctcttaatcctcaagctcaatggatggttctattctttactcttcttctaagtcagagttatcctccatcatcctccgtgattccttcatccctcagatcctgtcaggcatgcagttctgtcaatgctgcttcctgagcagcttcggaagccatccctctcctccatgccactgcattgcctcagtgcgggtcctcctccctcacctggactactcagcctcccgacactaactcctacagccctgggtcatcctcaccccactcatcctaaccacatcccaaaccagcctttgggtactgtactctcatggaagctaattttctcaaacacaagtctgattttttcccctctttgtatgttcctcttcatttacaaattaaaatcctacattttcagcactgtattcaaggccctccgtgttctggatgcatcgtctgccttgcatgtttaatggtgcctgacacttctcatggatccttgaacatagcatatggcttcacatctctgggcctctgcacaygatgtttcctctatctagaatgctctttcccctaatctgcctagaagacactcacatggtctttcatgtcaacagacgtttatcgagtgtctactatgagccccaagactgctaggcagtggagacagaaaagtgagaaggtgtggtcctcttcttggccatccagttgaaacatcagctcttgaagctccccgtaaatctcccctctccaaccctaccacctatgcacagtagaccatttttccttactgtgcttctttccacttggtgcataattccttcgctgcacttacatggtataacttttgtttgtctgctgaggctcagaccaatgttcattgctttgggggaggaagtatgtagtttaagaatatatgggcactagcatctgtgtggtaggtagaattctaaaattgtccaaagattcctgacccttggtgtgcatgccttccccttgatgtaggcaggagtggtgaatatgatggaattttactccagtgaatagattacattatatagcaaaggtgaagaggttttgcagattaattaaggttggctttgagttcattgaaagggaatttatcctgggtaggcctgac

SEQ ID NO: 82605 - DNA, 1123 bp, Homo sapiens
ttctcttaatcctcaagctcaatggatggttctattctttactcttcttctaagtcagagttatcctccatcatcctccgtgattccttcatccctcagatcctgtcaggcatgcagttctgtcaatgctgcttcctgagcagcttcggaagccatccctctcctccatgccactgcattgcctcagtgcgggtcctcctccctcacctggactactcagcctcccgacactaactcctacagccctgggtcatcctcaccccactcatcctaaccacatcccaaaccagcctttgggtactgtactctcatggaagctaattttctcaaacacaagtctgattttttcccctctttgtatgttcctcttcatttacaaattaaaatcctacattttcagcactgtattcaaggccctccgtgttctggatgcatcgtctgccttgcatgtttaatggtgcctgacacttctcatggatccttgaacatagcatatggcttcacatctctgggcctctgcacacgatgtttcctctatctagaatgctctttcccctaatctgcctagaagacactcacatggtctttcatgtcaacagacgtttatcgagtgtctactatgagccccaagactgctaggcagtggagacagaaaagtgagaaggtgtggtcctcttcttggccatccagttgaaacatcagctcttgaagctccccktaaatctcccctctccaaccctaccacctatgcacagtagaccatttttccttactgtgcttctttccacttggtgcataattccttcgctgcacttacatggtataacttttgtttgtctgctgaggctcagaccaatgttcattgctttgggggaggaagtatgtagtttaagaatatatgggcactagcatctgtgtggtaggtagaattctaaaattgtccaaagattcctgacccttggtgtgcatgccttccccttgatgtaggcaggagtggtgaatatgatggaattttactccagtgaatagattacattatatagcaaaggtgaagaggttttgcagattaattaaggttggctttgagttcattgaaagggaatttatcctgggtaggcctgac

SEQ ID NO: 82606 - DNA, 728 bp, Homo sapiens
accatcaggtattaatatccagatgtctgcactgacattgatagcattagtgcaaaggttttgccagctgaaaatgcaaaatagtctttgatcaaatgttaaagacacatttggatttctttgatttttttttttttttttaaatggagtttccctgttgcccaggctggagtacagtggcatgatctcggcttgctgcaacatccgcctcccggatgttcaagcgattcttttgcctcagcctcccaagaggcttgggctgcaggcacgcaccaccgcacctggctaatttttatatttttagtagagacaggttttgccaggttggccaggctggtcttgaactcctgacctcaaatgatccacccacctcggccaaagtgctgagattacaggtgtgagccaccgcacccggcctctttgaatattaatatatcctagtaatatgaggaatatgacctaaaagtagaaataaagaagtacatatacttaacaggtgatgagattttgttttacttatgctttacttatgcttttctctgaaatgccatgggagattcagtccctaatatttggcagagggaggygataaggaatccttctataactgttgctgctgctgtttgggcaagtggaatatatatacatacattttattatgaacacaaatgtaaatactgacttaccattgggatgttggcaactgtctgtcaactaagatcccaaag

SEQ ID NO: 82607 - DNA, 792 bp, Homo sapiens
tagatgaggtgactccagcaaaattggaaaaaacacatagagccaggcctatctctgtaagagcacttaagagtaggggcatgactggggtattctgtctcgctttactgcttggcacattcagtaaatacttgttgaatgaattcagtaaatacttgaatgaatggttcaaacatgagataccatttttcttcagggtatgcatttctgaaattagaaactgattactaagacttggcatacttttgttttttacttttcattgaaataattcaaacttaaaattgcaagaataatattcagaatttttatatatcctttacccaaatttaccaatgtttaacattttgccacatatacttttttcgttcccttcatatatatatatatatatatattttctgaaccattttagaataggttgcatatatcatttccctttacctcttattatctttaaaaattttatatatatataaatagatagagatggaggtcttgctacattgtccaggctggtcttgaactcctgggctcaagcaattctcccacctcggcctcccaaagtgttgagrttacaggcatgagccactgcgcctagccccatcatcttatttgtgtatttcctgagaacaaaggtattctcttatatagctataaatcagttattacattcaggaatttaacattgagaaaatcataagtcttgtacctcaactttttcaatttttttccctccagtccaggatcatgttttgcattttgttgtttttttttgttttgttttcttta

SEQ ID NO: 82608 - DNA, 884 bp, Homo sapiens
tgcattgatacatcctgcctaaggttgacaagaactgttatgaagtgacatttggagttactgcttacagagcaaaagggcaggaaacctgcagtgcagttttacaacttctggctctgtgtcactcaatattctgcttccaaaatcagtatcaactttacacagtgaagagctgatcagtaacctaagttctactgaatgaatgttaataggagcttaaattccacccttaaggccttttctaataaaaatgaattcttcatatttcgattatttgacatgtattcaagtggccagcctgtagggggggaaaaaggcaaaattgggccgtaaaatggaattaagctgacttctcaaagccaaytgatctaaagacaaatcctagcaactcaacagaccacagatattatctgtttacaaaattgtgtttctgttaactgtttagcttcaaaataaaagcacaaagttagctgcatttcccccataaatttcaagctcaatttaatctccgttattttgtactcagtcatttcccaagatttacaggtatcatgggccacttttaaaaataaaagagaaacttgaacttcttgcatgctacagataagactggtccagttggaattacactaaagtaacattttatagccaaagttgactattttataaagaaaagcccctcaaaacgacaggaactatttcagaaggtaacataatatactcgaaaaccaccagtactgtgaatctaagataaaatttgactaaaaatggtctaagttgcctgagaaaactggccttcaaagtggtcggctgccacatcccctcctcccactctgcccttttaatgttagagaaatgcttgatctaggggaaaccccaaatgc

SEQ ID NO: 82609 - DNA, 600 bp, Homo sapiens
agcactttgggaggctgaggcaggcagatcacttgaggtcaggagttcgagaccagcctggccaacataatgaaacccsgtctctactaaaaatacaaaaattagctgggcatggtgccacacacctgtaatcccagcaactcgggaggctgaggcatgagaatcacttgaacccaggaggcggagcttgcagtgagctgagatagtgccactgcacttcagtctgggcgacagagcaagactctgtctcaaaataataataataataattgaaggcaacatatgatattatttttataatagcagaatagagaaggctttcctagatatgatatatgtgaaaaagaaggaggagaaatagaagcaaagactccccaaatgaaaagattgatacatttgactacttggaaaataaaatgtttctacatagaaaaaaaaatagcattggccaggcacagtggctcatgcctattaaccccacctgttaggaggttgaggtaggaggatcacttgaagccaggagtttgagaccatcctgggcaagacagcaagaccccttcttaacaacaacaacaacaatgacaattagctggggatggt

SEQ ID NO: 82610 - DNA, 962 bp, Homo sapiens
ttagggctatctacatacatgtacacaggtttgcttttctaatgtcattgtataatattcaatcctaaatgtattttatagcatcctcatactctatcaaaatccattttaacttccctaacctggactataaatctccttttcctatatccacaaggcaatctcaatttttaatgttctgcatggtattaagtaaaagtcaaatggaaattacaatataatatgaaagtttagaaataagtgatcagtcaaccccgtatcaaaccagaaggtcattcatgtttgtcttatgtagacttctgtgctgtgctcacccttttccctttgaaagcttcctttttctctgcgggtctgtatcattttgttgcctcctggcttcctgggacaagagaagtctcaaaagttttgaccactgtccaatgaaggacagtaaaagactctgagacctgcctactctacatgttctcattttccagtataaagaagagagatgaaagaaattgtaataagttcgttcctaacaactcatttcagtggttgttgttttttttttgcttatttttacttaatcattatttaatttacaagggaaratttcaactccgtttacgtgctgctatattagtccgttttcatgctgttgataaagacaaacctgaaactgggtaatttataaagaaaaagaggtttaatgtactcactcttccacatagctgggtaagcctcacaatcacggtggaagagcaagggacgtcttacatggtggcaggaaagagagaacatctgcagtgaaactccctcttataaaaccatcagatctcgtgaggcttattcactgtcataagaaaagcacgggaaagacccaccctcatgattcaattacttcccactgggtccctcccgcaacatgtggggattgtgggagctacaattcaagatgagatttgggtggggacacagcc

SEQ ID NO: 82611 - DNA, 1005 bp, Homo sapiens
gaaaatatctatccaaagcttccttagctaaaaatgagaagggagaagagggaggtggtaacaaaagcctgaaaccaaaattagcaactacgtagcactgtcaaaatcagcagcgacaaagcaggtggcagaaaggcccagcacacccatgctttcaggggcccacggtaacgaatgaaagatccactgctgctcactgccatttacaggcagcagatgtgtgacagaaaagtggctggagcataattcttttagatgccgagcaaagcaaaaagtggagtgagatgtttttgtgggggttcatttggttttatttaaaaaaatacaaatattaaccactgaaaatcaaatcatgtaatattgtaaagctggaatcctgagtggttgctaacgatgccctaggtatattaatggaatcaaggcctgttaacagaatcaaccttcatctcaaaggcgagagtctccctgccacataccaaacagggccagatcttatggaggacaaaaaatgccccaaccagactgccctcgcattacatgcctgactcacattcctgataaacaagcatctattcaatgtgactgtcaaaatgggcaaacattaacatatgcaaaygaaaaccaatggtaacactggtcctctcctcttcccctgccttaggtgcccaggactaggaaccttttcatttcagagtgtttctacctacaaattccttcacagattcaaacacaggtcaccaggttcccagaatctaacatgataaactatgaaaaatacagattcttaagacagcatcttttattcacagaagtaaaaaagcaaacagtagcatctactatttaatactaagaaagggacccatctctgtaaacatgtttctaattaatggatgctgcagaaagtaagaggaatgaaaatggacacatgtaaatataaaaaatatatttttaaaacttcattttgcctgaatggtctagaaaatgtatatttggagaaataatgca

SEQ ID NO: 82612 - DNA, 703 bp, Homo sapiens
aattatttagagcaggagtcttaattgtcttctgggctaataatagctgaattttctataacaatgtaataaaagagctccaagaattttaaaatatattggaatcaaaagcattgattaagggatttaaaaataattaaatgaatatttattgttgctrtgtctatacaaggtcacagagaagaagaagatgcttagttttcaagaaagaaatagatttttgctcaattttctttctcttttactcttattaaatgctttataacaatggtttggtaaccaaattaggtatttcagcagaagattaaattacaacactgttgactggggaagcaggaaaaaaaagaattagttatagttctttttacttttttagtcttttatagttcttgtatggttttcattggtatccctcctttttcccctctttagtgctacaaaattagggctctgtagtgcagctgatagtttagtcatcccacctaggagagtttaagagctggatattagggcaggggattaggtaatttttcttgtcattatccagagttctgttaaagtaatttgcacatcaggaaaatagatatacttgttattgcttttattgtctagtaggtatttaatattaattatttgggttaaataatatgcagtatgtcttatagtttttagatcataatagattatattatataataagtta

SEQ ID NO: 82613 - DNA, 654 bp, Homo sapiens
tagtaagtatggagatggaagaaaacaggttatctacaaaggaaagaagaaataaggctgccttcaaatttctattcataagcattaactctcrtgaagcaaaatagcaatacggtgatagtttaaagaaaaaaagatcatgactcaagattatgttctctatttagctggtggttcattgtgtttaaaaagaaaaaaaaaatcctgagtccttgctagaatatgtgagaatgtctaccaactttacaaagaagtaacaagtatatctgttgacaataagtgtatatatattaaacaatttattaaaggaaaaagtactgacacagcgagtcaaaaacaattcaatcatatgctgtttcttagccacttttaattctctaataaaagttaaataaaaagataaagaaacaacaaccaaccaaaagaaagcagaagtcacaatactaatattagacaaaacaaactacaaagtaaaaagcatttaacacaacgaagcagataaatttgaccaaagcaggtacactccatatgaaggcttatgtgatcagtaacagcactgaaatgtacataacaaagactacagaaaatacaagggcaaagacagttgcagtgggaacactttacttcaactctagcagtccttaatagatctca

SEQ ID NO: 82614 - DNA, 956 bp, Homo sapiens
ttagcatgttaagagatgctcccacctgcaccacgacagtttacaaatgccttggcaacatgaggaagttaccttatatagtctaaaagggaaaggaatcctcagttccaggaattgcccamccccttcccagaaaactcatgaataatccaccccttgtttagcatacaattaagaaataactatacatgtactcagttgagtggcccatgctactcttccgtttatggagtaaccattctttattcctttactttcctaataaacttgcttttgctttactctatggacccaccctaaattccttcttgttgtgaggtccaagaacctgctcttggggtctggattgggacccctttccagtaacagtaccactgcacttcagcctgggtgacagagtgaaatcccatgtctaaacaaatgaacaaacaaagaaaacaaaacaacaagatctcatcccagcaactaaggcccactattaaactgagagttaatcataagattatgttttccttttccacactttaccaccaccaaaatagtgcttgggtataataacagggggttacaatttagagctacaaaacataaactctatttagatttcctagaaactttaatttgaactacaaaaaaaaaactaaaataacatcatacttttaaaaagacatttccactggtgttcagaaaaaatgtagtagataaaaattgtttttaaaaagacatgtccccctaagatgaagaaggcaatgatgttccctttcaccactccaattcaacatcctactggaagttctagctaatgcaatacagcaagaaaaggaaataagagttatacaaataggaaaggaagaaacaaaactatctttgttcatagatgacatgacttcgctatgaagaaagtcccccaaaataaaaaacttctggaactaagaaacaattatagtaagtgggag

SEQ ID NO: 82615 - DNA, 956 bp, Homo sapiens
ttagcatgttaagagatgctcccacctgcaccacgacagtttacaaatgccttggcaacatgaggaagttaccttatatagtctaaaagggaaaggaatcctcagttccaggaattgcccaaccccttcccagaaaactcatgaataatccaccccttgtttagcatayaattaagaaataactatacatgtactcagttgagtggcccatgctactcttccgtttatggagtaaccattctttattcctttactttcctaataaacttgcttttgctttactctatggacccaccctaaattccttcttgttgtgaggtccaagaacctgctcttggggtctggattgggacccctttccagtaacagtaccactgcacttcagcctgggtgacagagtgaaatcccatgtctaaacaaatgaacaaacaaagaaaacaaaacaacaagatctcatcccagcaactaaggcccactattaaactgagagttaatcataagattatgttttccttttccacactttaccaccaccaaaatagtgcttgggtataataacagggggttacaatttagagctacaaaacataaactctatttagatttcctagaaactttaatttgaactacaaaaaaaaaactaaaataacatcatacttttaaaaagacatttccactggtgttcagaaaaaatgtagtagataaaaattgtttttaaaaagacatgtccccctaagatgaagaaggcaatgatgttccctttcaccactccaattcaacatcctactggaagttctagctaatgcaatacagcaagaaaaggaaataagagttatacaaataggaaaggaagaaacaaaactatctttgttcatagatgacatgacttcgctatgaagaaagtcccccaaaataaaaaacttctggaactaagaaacaattatagtaagtgggag

SEQ ID NO: 82616 - DNA, 956 bp, Homo sapiens
ttagcatgttaagagatgctcccacctgcaccacgacagtttacaaatgccttggcaacatgaggaagttaccttatatagtctaaaagggaaaggaatcctcagttccaggaattgcccaaccccttcccagaaaactcatgaataatccaccccttgtttagcatacaattaagaaataactatacatgtactcagttgagtggcccatgctactcttccgtttatggagtaaccattctttattcctttactttcctaataaacttgcttttgctttactctatggacccaccctaaattccttcttgttgtgaggtccaagaacctgctcttggggtctggattgggacccctttccagtaacagtaccactgcacttcagcctgggtgacagagtgaaatcccatgtctaaacaaatgaacaaacaaagaaaacaaaacaacaagatctcatcccagcaactaaggcccactattaaactgagagttaatcataagattatgttttccttttccacactttaccaccaccaaaatagtgcttgggtataataacagggggttacaatttagagctacaaaacataaactctatttagatttcctagaaactttaatttgaactacaaaaaaaaaactaaaataacatcatacttttaaaaagacatttccactggtgttcagaaaaaatgtagtagataaaaattgtttttaaaaagacatgtccccctaagatgaagaaggcaatgatgttccctttcaccactccaattcaacatcctactggaagttcyagctaatgcaatacagcaagaaaaggaaataagagttatacaaataggaaaggaagaaacaaaactatctttgttcatagatgacatgacttcgctatgaagaaagtcccccaaaataaaaaacttctggaactaagaaacaattatagtaagtgggag

SEQ ID NO: 82617 - DNA, 636 bp, Homo sapiens
tctcatctctacaacaaatttacaaattaactgggcatagtggtgagcacctgtagtcccagctactcaggaggctgaggtgggaggatcacttgagtcttgggggaggaggttgcagtgagctgagatcatgccactgcactccagcctgagcaacagagcgagaccctgtctcaaaaaaaaaaaaaaaaaaaaggaggggggtaattaaggactcacttttttttccatttctccagtggaagccatccccagtggaagcttcattctcagggaggtagcaagatggctgtagcacttccagatcgcaacagaagcatgactattttgaggaaaaagagagaccacctcgtcctgtaggtctctcctaagagcaagagaacttcatggaagctttccagcacatttcccctcatgcctcatctgccagaattaggtcacatgcaaatacctgaagcaatcatttagaaccattcctgacagtttcctccaacatacttggctaaacagatgggtccctgaacaaaactgtggttctgttaggaagsaaaaagagggaattggactctgggtgggaccctgggtggagggtacattgcttatcagtttctaggactacaaagacatgtttactta

SEQ ID NO: 82618 - DNA, 1225 bp, Homo sapiens
aaccaggatgggaagggatttagtagtggctgctaatgggtacagggtttctttaggggcaatcacgttctggagttaagatagtgctgatgatcacgcaactttatgaatatattaaaaatcaccgaattgtatactttagaaggtgaattttgtggtatatgaattgtttctcaatttaaaaaacctaccgggaattagctcagattttctacaaattctcttaattctttgcttatctgtttatatcgatagaatttttaaaaattaatttgaatttccttttacgaatggtaaggagatttgccctttggggtttcactccgtccagtgctcttgctgtcgattctgtctgtttgccttttttgttgttttcgtttgtccactcagcatctcagttggccttagctgcagccgtctgcagccgcctcctccacttgggggttaggttgcaaatctgtcccagagtagctcatctcactggttatcacattagcagtcactcatgtcagcagtccccgaagaaaagatagctggttggctggggataaagcatctgaaactttgctggtctgatgatatctttctgttgtttcagtacatgtgtcactgacaacttgcttaggtaaaagtgcccatagttccttcatttgttcaacaaccatttactgagggcagaatcctcattcacttagtgaatacttagtaattgttgaatacctgggtactagggcaggagcagccaaatgagaaaaaggactctgtccacatggagcctacctgctggtggacgatacacaataaacatagcgaacaaggtaagacttttcgccctctgcacctgtaaggccattgaggactaacctgggctgggaatgggtaggaagagctgcttcagaggggtgtctagatataccccagaggatgccagccatgtgaagacctaggggaaggaagtgtctcatagaggttgggtaatagaggatcagcgtggcaatagctgagtgagtgagtgaagggtgtggtatgtgcagcagatgcacctaggtggggtcttcagaacatggtgaagaactcagacttttttcttctagcaagggaacccattttagggwctcatgtgcatgtttcaaggatcactgcagcagtggtcatacttgtgtgtttgtagcccctatttcttacgtcgtgcttggcgcattcatagcaggcactgggttctggt

SEQ ID NO: 82619 - DNA, 549 bp, Homo sapiens
agagtgaggatctggatcatttgctcttagggtagttctgctcctccctgcttgctcactgcttccagctctaatttctacttatagtttgctccatttcatgtggaggagtcccttggcaacatcctctatctcctacaagcccatctcatctatgttttatctaggatgtaattgttttgcagaaggagagctgtattagtccrttctcatgctactaatacagacatacctgagactgggtaatgtataaaggagagaagtgtaattgactcatagctccacagggctgaggaagcctcaggaaacttataatcctggtggaaggggaaacaagcacatccttcttcacatggcggcagcaaggagaagtgccgagcaaaagggggcaaagttccttataaaaccatcagatcttgtgagaactcactcactgtcaggagaacagcatgagggtaaccgcctccatgattcaattacctcccaccgggtctcatatgtggggattatgggattacaattcaagatgagatttaggtggggacacag

SEQ ID NO: 82620 - DNA, 549 bp, Homo sapiens
agagtgaggatctggatcatttgctcttagggtagttctgctcctccctgcttgctcactgcttccagctctaatttctacttatagtttgctccatttcatgtggaggagtcccttggcaacatcctctatctcctacaagcccatctcatctatgttttatctaggatgtaattgttttgcagaaggagagctgtattagtccattctcatgctactaatamagacatacctgagactgggtaatgtataaaggagagaagtgtaattgactcatagctccacagggctgaggaagcctcaggaaacttataatcctggtggaaggggaaacaagcacatccttcttcacatggcggcagcaaggagaagtgccgagcaaaagggggcaaagttccttataaaaccatcagatcttgtgagaactcactcactgtcaggagaacagcatgagggtaaccgcctccatgattcaattacctcccaccgggtctcatatgtggggattatgggattacaattcaagatgagatttaggtggggacacag

SEQ ID NO: 82621 - DNA, 549 bp, Homo sapiens
agagtgaggatctggatcatttgctcttagggtagttctgctcctccctgcttgctcactgcttccagctctaatttctacttatagtttgctccatttcatgtggaggagtcccttggcaacatcctctatctcctacaagcccatctcatctatgttttatctaggatgtaattgttttgcagaaggagagctgtattagtccattctcatgctactaatacrgacatacctgagactgggtaatgtataaaggagagaagtgtaattgactcatagctccacagggctgaggaagcctcaggaaacttataatcctggtggaaggggaaacaagcacatccttcttcacatggcggcagcaaggagaagtgccgagcaaaagggggcaaagttccttataaaaccatcagatcttgtgagaactcactcactgtcaggagaacagcatgagggtaaccgcctccatgattcaattacctcccaccgggtctcatatgtggggattatgggattacaattcaagatgagatttaggtggggacacag

SEQ ID NO: 82622 - DNA, 549 bp, Homo sapiens
agagtgaggatctggatcatttgctcttagggtagttctgctcctccctgcttgctcactgcttccagctctaatttctacttatagtttgctccatttcatgtggaggagtcccttggcaacatcctctatctcctacaagcccatctcatctatgttttatctaggatgtaattgttttgcagaaggagagctgtattagtccattctcatgctactaatacagacatacctgagactgggtaatgtataaaggagagaagtgtaattgactcatagctccacagggctgaggaagcctcaggaaacttataatcctggtggaaggggaaacaagcacatccttcttcacatggcggcagcaaggagaagtgccgagcaaaagggggmaaagttccttataaaaccatcagatcttgtgagaactcactcactgtcaggagaacagcatgagggtaaccgcctccatgattcaattacctcccaccgggtctcatatgtggggattatgggattacaattcaagatgagatttaggtggggacacag

SEQ ID NO: 82623 - DNA, 1559 bp, Homo sapiens
gccagactctgcttacatcatatagaaaataaaacatattagcatgtgtttatacatgttgtatgtttgattttttaaaaaatattttgttagagaagttatggrtttagagaaaaatgcatagcaaatgtcatgttcccagataacctgacactcaggttttcccattattcacatcttgcattagtgtgcacttgttacaattgataaaccaatattgacacattatgattaactatatccatggtttatattagggttcactctttgtgttgtactttctatgggttttcattttgtgtagcacaaaaacagatcccttcctaatttcagaagtacaccttagatatctgagacaaataaaaagtacaatagaagtacaatgcaataaaaccagaaatgacatataaatactcaaacatgaacatataagtatatgtaaagtacggagttgctaaatacaagacaaccagtcacatttaacttttgttggttatctgaaatccaaatttgactaggcattcttaaatttcatttaccaaaatctagaaaacttaatattgatgaaacatattgaaaaatatttgccaagtgagacttttctttatgcatagcttggagctctggagtgcagtagggggaagctgggtcagaattcacataactaaactcacacatccgaacatcttttatggatggagatgaagggttacacagcctttgttcatccagaatcaccctatggtaacatacaaagtagagaaactttgtctttcagcacaggaatcccaatattgatttcaacatttctcttcgcttggtggacttcccaagccttcccgttctttcctttctctaagaaagcctgttcttgaatcatgtactcttctaatgaataagtaaatgctaccatttaaacatgatcattttagctcagcatggatttactgacagtcagcatgtgtgccactcaccgttcacattcggtgccttcatgtctcaagccagggtccttaagcctggttggacatttgggccaccgggaagcagattggagctcagtgggcttggagtggacccaggaattggtactttttttttttttctaaaagttgacgaaccaaggctgagaaaataagaaataaaatcctccaggtgaaaatttaggcagcattctggcagccaggcaaaatgaggtggaacttggtccttcccagcatccttggaacagtctcttcccatggcaggaggcagatctagaatacaatgcctcactcactcttgaaatggactccagactttttcatataaccctgaggtctccttgacttacgaggatgcaagattcatagtccagggagaattgctaggtttgcactgacctgaaataaacacagcatatatttgtggactcactccaagcagcctctccaactgagaggatgtttttaagtgttcacagatagaaaaggggagagacaatttgatgcaatcaaaggaacagctctgggcatgagggttttcaatgagatttggcacttggagccacctgtgcaagc

SEQ ID NO: 82624 - DNA, 1559 bp, Homo sapiens
gccagactctgcttacatcatatagaaaataaaacatattagcatgtgtttatacatgttgtatgtttgattttttaaaaaatattttgttagagaagttatggatttagagaaaaatgcatagcaaatgtcatgttcccagataacctgacactcaggttttcccattattcacatcttgcattagtgtgcacttgttacaattgataaaccaatattgacacattatgattaactatatccatggtttatattagggttcactctttgtgttgtactttctatgggttttcattttgtgtagcacaaaaacagatcccttcctaatttcagaagtacaccttagatatctgagacaaataaaaagtacaatagaagtacaatgcaataaaaccagaaatgacatataaatactcaaacatgaacatrtaagtatatgtaaagtacggagttgctaaatacaagacaaccagtcacatttaacttttgttggttatctgaaatccaaatttgactaggcattcttaaatttcatttaccaaaatctagaaaacttaatattgatgaaacatattgaaaaatatttgccaagtgagacttttctttatgcatagcttggagctctggagtgcagtagggggaagctgggtcagaattcacataactaaactcacacatccgaacatcttttatggatggagatgaagggttacacagcctttgttcatccagaatcaccctatggtaacatacaaagtagagaaactttgtctttcagcacaggaatcccaatattgatttcaacatttctcttcgcttggtggacttcccaagccttcccgttctttcctttctctaagaaagcctgttcttgaatcatgtactcttctaatgaataagtaaatgctaccatttaaacatgatcattttagctcagcatggatttactgacagtcagcatgtgtgccactcaccgttcacattcggtgccttcatgtctcaagccagggtccttaagcctggttggacatttgggccaccgggaagcagattggagctcagtgggcttggagtggacccaggaattggtactttttttttttttctaaaagttgacgaaccaaggctgagaaaataagaaataaaatcctccaggtgaaaatttaggcagcattctggcagccaggcaaaatgaggtggaacttggtccttcccagcatccttggaacagtctcttcccatggcaggaggcagatctagaatacaatgcctcactcactcttgaaatggactccagactttttcatataaccctgaggtctccttgacttacgaggatgcaagattcatagtccagggagaattgctaggtttgcactgacctgaaataaacacagcatatatttgtggactcactccaagcagcctctccaactgagaggatgtttttaagtgttcacagatagaaaaggggagagacaatttgatgcaatcaaaggaacagctctgggcatgagggttttcaatgagatttggcacttggagccacctgtgcaagc

SEQ ID NO: 82625 - DNA, 1559 bp, Homo sapiens
gccagactctgcttacatcatatagaaaataaaacatattagcatgtgtttatacatgttgtatgtttgattttttaaaaaatattttgttagagaagttatggatttagagaaaaatgcatagcaaatgtcatgttcccagataacctgacactcaggttttcccattattcacatcttgcattagtgtgcacttgttacaattgataaaccaatattgacacattatgattaactatatccatggtttatattagggttcactctttgtgttgtactttctatgggttttcattttgtgtagcacaaaaacagatcccttcctaatttcagaagtacaccttagatatctgagacaaataaaaagtacaatagaagtacaatgcaataaaaccagaaatgacatataaatactcaaacatgaacatataagtatatgtaaagtacggagttgctaaatacaagacaaccagtcacatttaacttttgttggttatctgaaatccaaatttgactaggcattcttaawtttcatttaccaaaatctagaaaacttaatattgatgaaacatattgaaaaatatttgccaagtgagacttttctttatgcatagcttggagctctggagtgcagtagggggaagctgggtcagaattcacataactaaactcacacatccgaacatcttttatggatggagatgaagggttacacagcctttgttcatccagaatcaccctatggtaacatacaaagtagagaaactttgtctttcagcacaggaatcccaatattgatttcaacatttctcttcgcttggtggacttcccaagccttcccgttctttcctttctctaagaaagcctgttcttgaatcatgtactcttctaatgaataagtaaatgctaccatttaaacatgatcattttagctcagcatggatttactgacagtcagcatgtgtgccactcaccgttcacattcggtgccttcatgtctcaagccagggtccttaagcctggttggacatttgggccaccgggaagcagattggagctcagtgggcttggagtggacccaggaattggtactttttttttttttctaaaagttgacgaaccaaggctgagaaaataagaaataaaatcctccaggtgaaaatttaggcagcattctggcagccaggcaaaatgaggtggaacttggtccttcccagcatccttggaacagtctcttcccatggcaggaggcagatctagaatacaatgcctcactcactcttgaaatggactccagactttttcatataaccctgaggtctccttgacttacgaggatgcaagattcatagtccagggagaattgctaggtttgcactgacctgaaataaacacagcatatatttgtggactcactccaagcagcctctccaactgagaggatgtttttaagtgttcacagatagaaaaggggagagacaatttgatgcaatcaaaggaacagctctgggcatgagggttttcaatgagatttggcacttggagccacctgtgcaagc

SEQ ID NO: 82626 - DNA, 982 bp, Homo sapiens
tagtacacacagtgcagtcctggagcttgtagaagtcacttcgagctaggtctttgttttgtcaaccaccttcaccccttaaattcactgaacgtaatgtagcagcatggctggggaaagaaactgtagctagtacgccgtgttcatttgcaactcatggctccttcgcatgcctagtgtctaacacaggctgcagaaacttttcctgccgctttgttttaggagatgaagaattcttttcccgaacaactgctgctccagggcactgtgctcacttttctaggggaagtgactctgaaacccaaaattccctggataccaccagagaatggctgaacaggaagttttcttctttatttaaattagtaaattcgactgttcatgcgagccaaaggcagtgtcataggtgtctgtgtggacccgaaggtgaccttgtcccatgagagggatgctgtccaccagggaagggaccatcccagattgatgggactctgggtttcgctatgagcacccacgtcattttccacaggtaaattcctttggatgtttcttattcttaggcaggttaatggtcactttgtaccacggcaagaagtaactgcgtgagtgcatgtggccggggctttgtgtttctgttttaatcggttaggaatcttctcctgtataatgttctaacgacatgttagtccacgcagtttgctctgtggtggtaaacctggctattcctctcaatcaggaggctccatggccaataaagtgagggctcctcgatgagccaggagatgaggctcagcagtgtgctgagcagggctgcrgcatcagacagtccttggacccagagttcaagaacaggctggaaacctcgaactcgtctttttatgtttatatattttccaaattaagtatgataattttctacgactgaaaaatccaataaatgtcaacagtgatcactggatggggttcccggttctctcagcac

SEQ ID NO: 82627 - DNA, 601 bp, Homo sapiens
tggggtatttttctaaatttacattttatcaattattatctgtaaactaaacttaatggattctgggtgttttatagatgctttaccacgtaaatattctgattattttgaatgcatataagattagaaacttaaattaaaagttatcatcatagactgtaaacttttcaggcagaaatcttgtaaacggtggctaatgagtattaatatattttatgaaatgaatcaatgatgactgaatgtgttatcaagaagctaaggctttagtgcctttttctgtacagttgatctttgctgggttccttaacctctctgagtcatatgtttttactttaagaycttaataattattaatagcttcactttctacaattcaatgatacttgcgagcacttcaagggtgcaaagatccacagaatttatgcataatcataactaatgaagaaaatatttatgtagtgtttttctattaaactaaaaataaatgtttacttctcagattttggagaacagtgttaatcaggatgctttataaaatgtgaccataaatttacccgcttaatttttaatatttgtattacttgccatgtgcctggaatgt

SEQ ID NO: 82628 - DNA, 505 bp, Homo sapiens
aaaaagtaactgtagctgggcatggtgactcacatctttaatcccagctctttgggaggctgaggcagccagatctcttgagctcaggaattcaagaccagcctgggcaacatggtgaaaccctgtctctaccagaaatacaaaaactagtcaggcgtggtggcacgcaccygtattcccagctactatggaggctgaagcaggaaaatcacttgaacccaggaggcataggttgcagtgagctgaaatggcaccactgcactccagcatgggcgacagagccagaccctgtctcaaaaaaaaaggtaactttagttgttttcctcttcttatctataaaatagtgatagccatatcagtccttcttaactcatagacacttttaaaagtgataaaattactgtatgtactatcaattcaaagaggcataggcgtatttcatgagaatttgttgcttgtttcaatgattttaaaaaaacacaatcttggagatatagtttcaaat

SEQ ID NO: 82629 - DNA, 2927 bp, Homo sapiens
  misc_feature (1)...(2927): n = A,T,C or G
aaacagtgaattcatacatttgtgttattttgagcctcaagtaacttctgagtctaggttaacttctacctcattcttacaaggctgtctttcagtatgctacattttggaacacagccatcatgctctaagaatcccaagccacatagagaagccatgtttaggtgccccaatcaggaggctcaagtgaacctggccttacagtcattcctgcccaagtatcagacatatgattgaagaagcctctaggtgacattagaggcttgtgtttttgtgttccagtcttgccagctggggcttcagacattgtggakcagagacaagcaacacccgttcaggaaacaaaatctatgagcataacattattgctgatttatactcctttttaaaacaaacaaatagtaagcagagcagaaaggaaggaaaaaaaatctctttcaaataaaaatagggataatctattaatttttttagagacagtatttcactctgtcatccatgctggggtgcagtggcataatcatagctcactgcagcttctaactcctgggttccagtgatcatcctccctcagccttccaagtagctgggactacaggtgcacaccaccacatgaaactaatgttttttatttttgtagagatggggtcttgctaggttgcccaggctgattccaaactgctgggtgcaagggatccacctgctttagcctcccaaaatatgggattataggtgtgagccaccacactcagccaaaagaggataattttcaaagatcccatatctagattggaaataaagataaaattctctctagaatagttatggggaagaatttcagtctcagagtataattggattgaattgcagaggaaaataaatctttttttagtgcactattttataactgggtctgtagctgctatgtgataaatgctgcttcatatagttaaccaaagataaacatctaatattnnnnnnnnnnnnnnnnnnnnnnnnnnnnnnnnnnnnnnnnnnnnnnnnnnnnnnnnnnnnnnnnnnnnnnnnnnnnnnnnnnnnnnnnnnnnnnnnnnnnggtagagacaatattccatctttgatcttgctcactgttcccacaataccagttagaagaaatatctttcatgaaagacaccaagatgtatatgcatcagccataaataggtgtctggactatgtggtgtataaaaacacttctagtgctaaactttgatgaattgtatgcttagaattcacttcataataccatatctcctttattttgaataagacacacactctttttcatgtcttgtgaaacaagtaaatctacagacccaatttaaattttcgttacagttatttaagtgctcaggtaagactatacccttttaaaatttaacaatggaaattaatatcatcaagggggtatctgttctaataagcaaaaaaaaagatgatatatataaatcctaaacactaaatattaaattaatacaatgcaatgccttgaaaaagtgaaatattagacaaatatctataaaatttttactaatatttttagaactttttttttggtggggaggggggatggagttccactcttataggccagactggagtgcaatggcatgatctcagctcactgcaacctccacctccaaggttcaagtgattctccagtctcagcttcccaagttgctgggattacaggtgcccgccaccacacctggctaatttttgtatttttagtagagacggggtttcgccatgttggccaggctggtcttgaactcctcacctcaggtgatccacctgtctcagcatccccaagtgctggtattacaggtgtgagccaccttgtctggcctagaacttttaaagtaaaatactattaagtaaggccacaaaaccagaggtatagatccagttaatatcatccaaatcttccactgatctgaccaacaagactcctgtatcagccccaagcaccactgaactttgaacattgtcatcctcacttagctcaaataataatgtggttgaaagtcaggtcatggcagtatttggaaatgaaatagcaaaacacctttaaaccaaagctctgtttacaaatttaaagccactaaattccactgatgcctcttgtctctcactctcaagccccaaataaactgtttcctctaatcactaatcctctttcgcaatccctcgcttacacagctatgcactttttcccttttggttcatgctctccaccctaccacactccttttgatgtccttctcaaccttgtccattgtacactctatgactcccattttttaataagcaaacttccttattcctgagacattagtttgtctccaaattgttttctccttaaaagcctgatttatataagtcatcgtcttcatgcattcagatcaagatagaggctcagaataatcctacttccattttgtggcttttgtgtcattacttttccactttcatgcaaaaaattcttctttttcacttacattcacttcactaatctgtatcactctgaatactaggactcatcaacttttaggttattccttcaaaatccatttctcctgattccaaaatcccaccaaaatcaatattgataatcaatacctatgcaccacaatcaataatctatccatagaattcatgatctctacttcaactctcatttcagaaaaccatttccaacttggatctcatggccactctgaatgcctctatcactagaggcttaaacattgatgttctacttaccaattagttccctgtatttcacgcaatctaaaatattttatttcaatcaatcctgtcctggaatcctcttgagactggttagtctcttgatacatcttctcctaaactatgagccctttttagcctcactttttttctct

SEQ ID NO: 82630 - DNA, 554 bp, Homo sapiens
tcactttcatctgcctctcctggatctgttttacacttacatggccagaaaagaacgctagttatagtagaaactagttacaataactagttaaggcggtaactgatagagttataaagatctttatgtacccaggaaaggggttacactgaaagctgtaacttcacatcaaccctgtgaggtaatgaaattgttttttaacaagatgataaatattaatagaataatgagctaagatcttctgaatcaagcaccatatttgtaggtagagtacaggaagcatctttattaacttaaggtgttgagaaacatcctattacagaacaggtcataaatttatctttgagtgttttaaattatctgattttagtgyctttgacacattcaaaggaatgacttttgaattgatctaccagtttgaaatatgaaaattgatttacctatttttttcttgtttaacaattagttctttcttgaggggaaaaagcatagattttggaaagcaacatgatagcattctctgtcaatgcattaaaatttctaaatcaagctta

SEQ ID NO: 82631 - DNA, 849 bp, Homo sapiens
aagcctaacacttttgaaggatctccgtaatttcttataatattggtaagagagaaattatttttcatattattatttttaatgaaagtctaaaatgctatttaatttataataattttgtatttgatttacagcataccaaaattgccaggggcaaatggaacaaaagaagtgaataatcttcctattttattatctagataaccaaaataactaaaatctatgtctaaaatcttatctaaaatctagataagcaaaataactataaaataaaattttgaacccttatatattatcttttaaacccaactctaatgactatgtaaggtaaattctggataactagaacattaaatgctttaaaactgggtttaaagctttaattcatttctatggttatataagaaatctttctgatgattctgacataaaggtttattctgtgtagtcaacatttctgattaaaacttttaagatctgttaattaaatattaactcctctatatcatcaccacttatggcagtaatttcattgatcatattaaatataggcatataaataaatatataaaattagtacaaagaaataaatatatttttattgagtattttatttataaataatactagtaattcacatatatacatctcagaaaatatacagcaaatatacttcccctaccttttttgacatttatagttttaaaaagtacctgcataaattgactttgagaatgtgtgattatattgttaattgggtttgaatggaataaaccaattatataaaaatttacataamaagcggaattattgccctttgttctttatatagtctgcctcaggatcccg

SEQ ID NO: 82632 - DNA, 849 bp, Homo sapiens
aagcctaacacttttgaaggatctccgtaatttcttataatattggtaagagagaaattatttttcatattattatttttaatgaaagtctaaaatgctatttaatttataataattttgtatttgatttacagcataccaaaattgccaggggcaaatggaacaaaagaagtgaataatcttcctattttattatctagataaccaaaataactaaaatctatgtctaaaatcttatctaaaatctagataagcaaaataactataaaataaaattttgaacccttatatattatcttttaaacccaactctaatgactatgtaaggtaaattctggataactagaacattaaatgctttaaaactgggtttaaagctttaattcatttctatggttatataagaaatctttctgatgattctgacataaaggtttattctgtgtagtcaacatttctgattaaaacttttaagatctgttaattaaatattaactcctctatatcatcaccacttatggcagtaatttcattgatcatattaaatataggcatataaataaatatataaaattagtacaaagaaataaatatatttttattgagtattttatttataaataatactagtaattcacatatatacatctcagaaaatatacagcaaatatacttcccctaccttttttgacatttatagttttaaaaagtacctgcataaattgactttgagaatgtgtgattatattgttaattgggtttgaatggaataaaccaattatataaaaatttacataaaaagyggaattattgccctttgttctttatatagtctgcctcaggatcccg

SEQ ID NO: 82633 - DNA, 2560 bp, Homo sapiens
tttcactcctaataataagaagaaactagacaaatgccctataaagtcagtttctccgattaaccaggtctgcttgcctttttttttttttttttttttttttttgagacagagtctcgctctcttacacagcctggagtccagtggtgcaacctcagctcactgcaacctccacctcccggattcaagcaattctcctgcttcagcttcctgagtagctgggattacaggcatgcgtcaccacacctggctaatttttttgtatttttagtagaggcagagtttctccatgttggccaggctggtcttgaactcctgacctcaggtcatctgctcgccttggcctcccaaagtgctgggattacaggtgtgagccactgtgcccgtcccaggcctgccttctttaactacatttacaggttggacaaaatctggctcagagcaatggtgaaaaatgtccctgtgatgcaggattgtttttgctgtcacttcaccagccagagacctctgcagccagtgacacccatgcctgggccttgcttgggtcctgggcttgctgcaggagacaccccacccactcagcctggtgggctgtgcttgccttgccctcctgcctggatcctacactcgctgcagaatccgtgcttagcctgcagctgggccaggtgtgctgtgacctgtgtccaccttaggagccagcatctggacaagaggaatgtgatggcacctgaacagagattccctgaagccccagagtgggtgttacaacatgctaataactcttttagtcttgccatccacagcccaacaaatggggcatgttaacagctctgtcagtttcattgccctgctatggcctrcagccctggggctgggtccggccctgcctctgcttcccattgcaaggggcagccactgagtgctggcaggagcagaggactataatcttacaggctttttcatacctgcattcagcaagtccctagttcttgtctcatatccaagaagaatgaggttatgctgacagctgatgggtgcacaaggtgaagagttttattgagtgacaaacagctcttagtggagaggtggacctgagttgggtacccccttacctgaagtcagagggtctctcttctctcgcccataggtgggtagtccctaagtgtagctgaatcaggttcttttatgggctcagaatgggggagtgcatgctgattggtttgtgagtatgcaaaataggctaaagtcaccactcaaaggtgggcatgacagtgtaaaaaaccaattagggaagggtagttatttgtaaaataggtgaagggtgaggattaatcagaggaaagtgcaccaaatgggaagagaggttctcaatccagtccatggatttatctgagacttgtagcttggatttcaggctttaatctgtctttggtttgaaggtggggtttcatcagggaccttcccctgtctgcctatgaatttgtctgcctcctgctgctatcacctgttccaaacaaaagccccagaaattttctgtgaaattttgaattcttcttggatcacatgatccaggactctgtgatcttcaccaattcattcaaatgatactggaagctggtgaagctggtagcagaagcaaaatgtgtggtacctaagataggtagcaaagatctacccctcagtcttccagagaaagacaaaaagtgctgggaaaataacaaataacctcttagaatccaccctcaaattatttcttcaacaactcactggtctgtcatgcaatcttgtaaagaaacaaggatgaactagtctttgactctaaggaaagattagaaatactatttgtaaaacattctggtcaatccatgttgagtgcaggcacagaaaatacttgtcctatttattaatgggatccatgctgaattcattgatctaattactaaacaaagctggattgggaagctggccaaattaatacccaaaatattttgcctctctggcataaagactatttcaagctggttattttaaggtagcattagaagagaaatttaaaggaatttccatttttaggatgtctccctttctggtccagaaagagatggaggactaaatcactaaataatggagaaagaattgattcaatctacaccacaaacctgacctttttaaggtgtttgtcttggttattttgtcttaactgggcttttaccaacacattttttatttttttgttttcacagatgactgtacctaagcctgaattctaagcattgtgcctttgtaatattaaattttctagcctgtctgtgctagggcatgagggtaaacaggttaaaaatctatatgcaaatttcaagaagatgacacgtttgaaagaaaaaaaaaggtatttgtaaattgggcaagtgaaaaatagtaaaagtattttccacaaatattagtaaaaagctttagtcaactgggcaagacatcttaacttgttccaactaccagaaacacaattcaaatctaggtattcttctataaactagtgagttcagcattattatacctgaca

SEQ ID NO: 82634 - DNA, 2560 bp, Homo sapiens
tttcactcctaataataagaagaaactagacaaatgccctataaagtcagtttctccgattaaccaggtctgcttgcctttttttttttttttttttttttttttgagacagagtctcgctctcttacacagcctggagtccagtggtgcaacctcagctcactgcaacctccacctcccggattcaagcaattctcctgcttcagcttcctgagtagctgggattacaggcatgcgtcaccacacctggctaatttttttgtatttttagtagaggcagagtttctccatgttggccaggctggtcttgaactcctgacctcaggtcatctgctcgccttggcctcccaaagtgctgggattacaggtgtgagccactgtgcccgtcccaggcctgccttctttaactacatttacaggttggacaaaatctggctcagagcaatggtgaaaaatgtccctgtgatgcaggattgtttttgctgtcacttcaccagccagagacctctgcagccagtgacacccatgcctgggccttgcttgggtcctgggcttgctgcaggagacaccccacccactcagcctggtgggctgtgcttgccttgccctcctgcctggatcctacactcgctgcagaatccgtgcttagcctgcagctgggccaggtgtgctgtgacctgtgtccaccttaggagccagcatctggacaagaggaatgtgatggcacctgaacagagattccctgaagccccagagtgggtgttacaacatgctaataactcttttagtcttgccatccacagcccaacaaatggggcatgttaacagctctgtcagtttcattgccctgctatggcctgcagccctggggctgggtccggccctgcctctgcttcccattgcaaggggcagccactgagtgctggcaggagcagaggactataatcttacaggctttttcatacctgcattcagcaagtccctagttcttgtctcatatccaagaagaatgaggttatgctgacagctgatgggtgcacaaggtgaagagttttattgagtgacaaacagctcttagtggagaggtggacctgagttgggtacccccttacctgaagtcagagggtctctcttctctcgcccataggtgggtagtccctaagtgtagctgaatcaggttcttttatgggctcagaatgggggagtgcatgctgattggtttgtgagtatgcaaaataggctaaagtcaccactcaaaggtgggcatgacagtgtaaaaaaccaattagggaagggtagttatttgtaaaataggtgaagggtgaggattaatcagaggaaagtgcaccaaatgggaagagaggttctcaatccagtccatggatttatctgagacttgtagcttggatttcaggctttaatctgtctttggtttgaaggtggggtttcatcagggaccttcccctgtctgcctatgaatttgtctgcctcctgctgctatcacctgttccaaacaaaagccccagaaattttytgtgaaattttgaattcttcttggatcacatgatccaggactctgtgatcttcaccaattcattcaaatgatactggaagctggtgaagctggtagcagaagcaaaatgtgtggtacctaagataggtagcaaagatctacccctcagtcttccagagaaagacaaaaagtgctgggaaaataacaaataacctcttagaatccaccctcaaattatttcttcaacaactcactggtctgtcatgcaatcttgtaaagaaacaaggatgaactagtctttgactctaaggaaagattagaaatactatttgtaaaacattctggtcaatccatgttgagtgcaggcacagaaaatacttgtcctatttattaatgggatccatgctgaattcattgatctaattactaaacaaagctggattgggaagctggccaaattaatacccaaaatattttgcctctctggcataaagactatttcaagctggttattttaaggtagcattagaagagaaatttaaaggaatttccatttttaggatgtctccctttctggtccagaaagagatggaggactaaatcactaaataatggagaaagaattgattcaatctacaccacaaacctgacctttttaaggtgtttgtcttggttattttgtcttaactgggcttttaccaacacattttttatttttttgttttcacagatgactgtacctaagcctgaattctaagcattgtgcctttgtaatattaaattttctagcctgtctgtgctagggcatgagggtaaacaggttaaaaatctatatgcaaatttcaagaagatgacacgtttgaaagaaaaaaaaaggtatttgtaaattgggcaagtgaaaaatagtaaaagtattttccacaaatattagtaaaaagctttagtcaactgggcaagacatcttaacttgttccaactaccagaaacacaattcaaatctaggtattcttctataaactagtgagttcagcattattatacctgaca

SEQ ID NO: 82635 - DNA, 2560 bp, Homo sapiens
tttcactcctaataataagaagaaactagacaaatgccctataaagtcagtttctccgattaaccaggtctgcttgcctttttttttttttttttttttttttttgagacagagtctcgctctcttacacagcctggagtccagtggtgcaacctcagctcactgcaacctccacctcccggattcaagcaattctcctgcttcagcttcctgagtagctgggattacaggcatgcgtcaccacacctggctaatttttttgtatttttagtagaggcagagtttctccatgttggccaggctggtcttgaactcctgacctcaggtcatctgctcgccttggcctcccaaagtgctgggattacaggtgtgagccactgtgcccgtcccaggcctgccttctttaactacatttacaggttggacaaaatctggctcagagcaatggtgaaaaatgtccctgtgatgcaggattgtttttgctgtcacttcaccagccagagacctctgcagccagtgacacccatgcctgggccttgcttgggtcctgggcttgctgcaggagacaccccacccactcagcctggtgggctgtgcttgccttgccctcctgcctggatcctacactcgctgcagaatccgtgcttagcctgcagctgggccaggtgtgctgtgacctgtgtccaccttaggagccagcatctggacaagaggaatgtgatggcacctgaacagagattccctgaagccccagagtgggtgttacaacatgctaataactcttttagtcttgccatccacagcccaacaaatggggcatgttaacagctctgtcagtttcattgccctgctatggcctgcagccctggggctgggtccggccctgcctctgcttcccattgcaaggggcagccactgagtgctggcaggagcagaggactataatcttacaggctttttcatacctgcattcagcaagtccctagttcttgtctcatatccaagaagaatgaggttatgctgacagctgatgggtgcacaaggtgaagagttttattgagtgacaaacagctcttagtggagaggtggacctgagttgggtacccccttacctgaagtcagagggtctctcttctctcgcccataggtgggtagtccctaagtgtagctgaatcaggttcttttatgggctcagaatgggggagtgcatgctgattggtttgtgagtatgcaaaataggctaaagtcaccactcaaaggtgggcatgacagtgtaaaaaaccaattagggaagggtagttatttgtaaaataggtgaagggtgaggattaatcagaggaaagtgcaccaaatgggaagagaggttctcaatccagtccatggatttatctgagacttgtagcttggatttcaggctttaatctgtctttggtttgaaggtggggtttcatcagggaccttcccctgtctgcctatgaatttgtctgcctcctgctgctatcacctgttccaaacaaaagccccagaaattttctgtgaaattttgaattcttcttggatcacatgatccaggactctgtgatcttcaccaattcattcaaatgatactggaagctggtgaagctggtagcagaagcaaaatgtgtggtacctaagataggtagcaaagatctacccctcagtcttccagagaaagacaaaaagtgctgggaaaataacaaataacctcttagaatccaccctcaaattatttcttcaacaactcactggtctgtcatgcaatcytgtaaagaaacaaggatgaactagtctttgactctaaggaaagattagaaatactatttgtaaaacattctggtcaatccatgttgagtgcaggcacagaaaatacttgtcctatttattaatgggatccatgctgaattcattgatctaattactaaacaaagctggattgggaagctggccaaattaatacccaaaatattttgcctctctggcataaagactatttcaagctggttattttaaggtagcattagaagagaaatttaaaggaatttccatttttaggatgtctccctttctggtccagaaagagatggaggactaaatcactaaataatggagaaagaattgattcaatctacaccacaaacctgacctttttaaggtgtttgtcttggttattttgtcttaactgggcttttaccaacacattttttatttttttgttttcacagatgactgtacctaagcctgaattctaagcattgtgcctttgtaatattaaattttctagcctgtctgtgctagggcatgagggtaaacaggttaaaaatctatatgcaaatttcaagaagatgacacgtttgaaagaaaaaaaaaggtatttgtaaattgggcaagtgaaaaatagtaaaagtattttccacaaatattagtaaaaagctttagtcaactgggcaagacatcttaacttgttccaactaccagaaacacaattcaaatctaggtattcttctataaactagtgagttcagcattattatacctgaca

SEQ ID NO: 82636 - DNA, 759 bp, Homo sapiens
ctagaaatttcactgaaatagaaagtccctgaatatttgtgaaatttatttccaactctctggcatgcaaatatattaccaataagtcttgagtagttgctatttcttgcttaataggacaatcagcatgtcatcagaataatcagcacaatgtcatcagtatatcatcagtggaatatgtcgtggaaaagaaagaggatcaagttcccgaatatttgcaactcatatatccgacaaaagaattgtatccagaatatacagcaagcyctcaaaatcaatgaaaagaaacctaataacccaattttattaaataagcaaaatattttaacagaagaaacttcaccaaaaataatacagatatgccaaataaggtcataaatacatgctggatcattagtcatcttggaaatgcaaattaaaacctcaatgagatgctatgagccacatatttaaattaacaaaattgaaaagattatttatactgaaaacaatgatgcagacttctgttagtaaaaactaggaaacaagttgggagataattacataacatttaaaggggtagtcaatttaagtcaaattttggttgggtgaatagctaactcggcacatcatattgtttactcaacctttctgcggcgcattcacagttactttgcttctatataggcaattttcttctgtatatttttttcactagaaaaattctaagaaagtcagataattgattaataaacctaccaaaagttatgccctttgctt

SEQ ID NO: 82637 - DNA, 1312 bp, Homo sapiens
ttagccaggctagtctcatatggtctcaaatgatccgtccgcctcagcctcccaaagtgctgggattacaggcgtgagtcaccgcgcaggcctaaacaagatgactcttgagccccacctcagaactactgaaacagaatttgcattttaacagtgtctccaggaaattcataggcattgaaatttgggaagcacagatctatgctccctccacagaggtcctttgtcttttattttctttgctcctccccctaacttttgcctagaaaaatttctccwcagacttttggggagctaagtatatttggggagctaggtatatttaggtaaacttggggagctaggtatatgtctggaatttgagctgcagtttgcatgaggaggacaacttggtgtttgcttctgaaaggaatttagatctttggttttattaaaatcatgttttaattaactcagatgagaccatactaaccaaagaactcagagcatcaaattatgtaagtaaaccaaagtttgtacaaatatgtcagtagtgtcatctgtggttaaaaaaaaaaaaaaaaggcataaagtataatttcaattcttaaaactagaactgtctacagtaacttgatgtttatgattctaaagtctgtaatcccctgtggaacaatctgaacttttcatacatgtccaatcctacaatgcccagtagaacccctaactttgtccttaaggggatcctcaagctctcttgggacaatttcagttctccactttttcctgttttggcaaaagtgcacagttgtacaattagttgacttggtgttcaaggaaaatttatacacacgtttcttcaacttgggaaataaaacctctgaaacgaatcagggtgccacgatttctacttatgtttttgtcattttagtgctataattatgtttatttctactttagaaaacctaacacctttaaaggatctccacaatttcctccaataaatgggtaagagtaaaatgatttctatagtatttattattctttaggtagaaagtttaaaatttgtttaataataatttaagattaggtttataagatgtcagaataggtagatatgaaaagtattagtgaattatctgcacactttattttttttatttttttgcatactttatttttacaattaaagtctgttccctacttctctagtagttagaaaataaaaataattaataaagcctcaacaagcaaaatagctgtaatactgatttgctcccttcagtgatgttttattaccttgttaacctaattatagtgactttataaggta

SEQ ID NO: 82638 - DNA, 762 bp, Homo sapiens
gttaggcccaaattaggtcccaggagaattaaaagatagccatcacacaaaatatcttttctgaacacaatgaattaaagtgagaaatcaataacagaagtaaaactggaaaactgacaaaatcgtggaaattaaacacactcttacaccatcagttgattaaagaagaaaccacagtagaaattagaaaatatttacagactaatgaaaatgacaacacagcataccaaaactaatgggatacagcaaaagcagtactaaggagaaaatttatagtgataaatgtatacattctgaaaacaaagtttttttttttttttcaagctgactggggaaattacatgccagctcttctcagaaagatcaaagttaccagtgaatgaacaagttttgaatggaaaatatagagaagtgaggacctgttggagtaaccacgcgaagaagttgaagcccagaagaagaatgcagcaagactctggctgatatcaacctctgagcaacacagagctcagccaaaatggtaggtagaagttgcttctttctacacccctctgaccacctgccgagtgctaaacggttggggagcscctttgcccttgctagccagggcaacacaatcagtgatgattagagaatttcctgagaacacagaaccagtggccagctcgcacagccatacccactctccccttggacctgaactgagatggtgggcaccatactggttgtgcaccagtgtgtcactttccttcccaaggatcc

SEQ ID NO: 82639 - DNA, 1089 bp, Homo sapiens
  misc_feature (1)...(1089): n = A,T,C or G
tttttagtcacttcctgacgctgcacaattcagctgcttttttgagttccgctcaacgatgacttcactgtgagcatctcaatatacccagggcaggagcccagagtggaaggatttgttgcccttcctcaaataaacaggcccggatgggnnnnnnnnnnnnnnnnnnnnnnnnnnnnnnnnnnnnnnnnnnnnnnnnnnnnnnnnnnnnnnnnnnnnnnnnnnnnnnnnnnnnnnnnnnnnnnnnnnnntctctcttctgggtccccaaattttattaccaccatgttccagctacagatgtcacctcctccaagaagccctcccttacctccaagctgagtcaggagttatctctgcgctcccccacccagcactgcgcactctgggtttttaccatctggggacaggtctttctctcctactggactctgagccccaagaaggcagggcagggcagagccaaggctgtcttggtcacagccatgtccctagcattgcccagcgctggtcagagagtaggtactcagggagtgtttggaagaatgaatgagtgaatgaacaagtgagcagggaaaaagtgcagggctttaggacagaagtgggcctgcggtagaggggaaccaggtgtgaaaacaggagtcgttaagggggtgagaagtgtgggatggggactggggaccctaagaatgtccaagccagtggggaggagaggagagaggatggcggaggggytcagggagcactggagtacccccgtcagcgctctgttaccgcctagctttgtgactctgaataaaggacttcctttggctcagtttcctcttgggtatcatacaagtagttagctgtcttctggggctgtcgggaccattaagttcaggatcgaccgtggaggagagagcaccgaatactcatctcctccgaagctttggtggagtcgtactccctccacgtccaaccctacccccaacacacacactcagaaggaatgagaacggacacagcttcccctacggtggccccaagctctgtgcgtgcctcagtctccctgaaagcacaggcaccaccacagttaccaagtttatt

SEQ ID NO: 82640 - DNA, 1172 bp, Homo sapiens
tctgtaccgtcctctcaggtttactgtgaagctaaaactgctctaaagtctattatgagacacaaccataatgattactgtaaaacattaaaaataactaatgatgttgaaaaggtagagacatgaagactaatactcagatacgaaagaatgcacactgcatgattctatctatgtaagttgaaaaagcagataaatgaaatttcacgtttaggttgtaaaactataaagaagagcgagaaagcaaagatggtggttactttagtggaaaagaaagagtgggccgtgactggaaaaaatattctaagatgctggcaagtggtggccacttgggtgattctttttcatgggaagttattgaactacacatttttgcttcatgaattattccatatatacgttatgttttaaattaaaataattatttgattttaatcttttaagagcaaggaaataaaattaatgtttaccaatttagggaatactaatgttatatagttttggttttgttgctttattgtttgaatgatcatattccattccgtaaattcagaacattataatattttggcaactcacaaacaactggtaattggcatttctcaatacaagtcttcaaaaattctaataaaatgctgcttaatttaaatttagcctgttctctgctagatatgaagtagggcatttgagttaatcaactactctgaataatagagttactatctatatcatacatacaatgggttacacatttttaagatgttagaatccatttttaaaatgttagaatccatttttaaaaatcattttgtacaaacaatactgagcataattaaactgttagtgattcaacaaacacaaaattacctcatttgagtacctttaaattcataatgagcatcaattgtcaatgtactattagtgtacagaagggctggggaagctaagttttggtggacaggatttcacctaagagcatttctagttagtgtcccaaagggcaagggtagtgtcagcttacctgggaarttggagtttcatttaaacaatgttcaaaacacattttgtattgagtctcagtgataagaggattgcctttattttcacctctttcctcctccacgacaacctatcccaatctaatttgtaaagccttattagtgcatgcacac

SEQ ID NO: 82641 - DNA, 1172 bp, Homo sapiens
tctgtaccgtcctctcaggtttactgtgaagctaaaactgctctaaagtctattatgagacacaaccataatgattactgtaaaacattaaaaataactaatgatgttgaaaaggtagagacatgaagactaatactcagatacgaaagaatgcacactgcatgattctatctatgtaagttgaaaaagcagataaatgaaatttcacgtttaggttgtaaaactataaagaagagcgagaaagcaaagatggtggttactttagtggaaaagaaagagtgggccgtgactggaaaaaatattctaagatgctggcaagtggtggccacttgggtgattctttttcatgggaagttattgaactacacatttttgcttcatgaattattccatatatacgttatgttttaaattaaaataattatttgattttaatcttttaagagcaaggaaataaaattaatgtttaccaatttagggaatactaatgttatatagttttggttttgttgctttattgtttgaatgatcatattccattccgtaaattcagaacattataatattttggcaactcacaaacaactggtaattggcatttctcaatacaagtcttcaaaaattctaataaaatgctgcttaatttaaatttagcctgttctctgctagatatgaagtagggcatttgagttaatcaactactctgaataatagagttactatctatatcatacatacaatgggttacacatttttaagatgttagaatccatttttaaaatgttagaatccatttttaaaaatcattttgtacaaacaatactgagcataattaaactgttagtgattcaacaaacacaaaattacctcatttgagtacctttaaattcataatgagcatcaattgtcaatgtactattagtgtacagaagggctggggaagctaagttttggtggacaggatttcacctaagagcatttctagttagtgtcccaaagggcaagggtagtgtcagcttacctgggaaattggagtttcatttaaacaatgttcaaaacacattttgtattgagtctcagtgataagaggattgcctttattttcacctctttcctcctccacgacaacctatcccaatctaatttgtaaagccttattagkgcatgcacac

SEQ ID NO: 82642 - DNA, 1479 bp, Homo sapiens
ccaagatagaataatgcaaattttcccatattcattaatttgaaaagtcatatttatttaaactattgctctcgtggttttttcttgtacatttggcatctgccactcttcgtctatgggagaatctagcataagatggcatctgatttagcacaaaatggtacattacataattttaagctttatatgtcaacaatttatgatgttcggtaaatgccatcatgatttccagatgcttcaccacctgaatcagatttaaatcatggcaaaatctttgatacagatgcttgagaaatagagaggagtacatatgttcaaatatgtcatctcagctcaagctcaaagaataccttctctccagccaggctgccagtttggaaatgcattagttgtcacttgtatgagagctaaaaaaaagttgatctcatggaggtagagagtgaagtgataagttaccagaggctgcgaaaggtgtgtgggttgaaggagagatgaagagaggttggccaatgggtacaaacatacagttaaataaaagttataagttctaatgttccatagcagagtatggtaactatggttagccacaatatattgtatatttcaaagtgtgtagaagagagaacttgaaatgttcccaacacacagaaatgataaatacttacacattctatgcatgtaacaagatatcacatgtactgcatgagtatgtaaaagattatgtatcaataaaaacatagatcctccccagtgggaactgaatcctactctctgtgttagtgcagcaacatttacctgtgttagtgcagcaacatttacctgagggccaccaaagggaatagttatcttcattgtcataagaaatactagtagacagaaattaacaacttaatcaagtcaaattaccaaagaactaccaaacaactggtttgtgcaaggtamggtgtcctgaaggttacaaagaagtgaaaaatacaatgcctgcccccaacgagcccagagcccagttggcaaaatgccatgtaaagataaccaggttaacagtacaatacttaatgagatatcaatttaagagatggtgagaagatacacatatatgcactttgacaatatatcaccacacaaatttgaaatgagaaaagataatggtcaaaggagaaatgcaagaaatgaaaagagaagagaagaaagatgagaaatggagaaatatttccagcttctgcctacccatgtgttatagagttcagtgactgccccattacaaatttcattatctttactatttgatttataaatttaaattcatttcttggttttatcattgcttgtggtcagtactacctactaagaactagtctatctactaaaaataaattataaagagtatcaagaccatgttggatctacctcctcaacccagcagagagttggaaatacagtaggggctcagtaaatggtgaattagttagttaaccaaat

SEQ ID NO: 82643 - DNA, 627 bp, Homo sapiens
tggccaggctagtctcgatctcctgacctcaggtgatccacccgcctcagcctcccagaatgctgggattacaggcatgagccaccgctcccagccaggatcttctttttaaagctatcaccacccactctcattccccaggactctcctcacccctccggctgcaaaggcagctggtgtccctactggctccttcctttctgcccctaaagacaggcacacaggtgattttccttttaagtgtttttctgtggattactgcggggaaattgacaggggctacaggggctgataaaaggaataatctttgatattctttcagttgggtcgctgattttcttgctgggctgacaagagcaatcttccctacttggaatcttggttttattccttagcatgggccttatcaaaccyactttttaatgaagggagaatgaagaagccattgaagcagacctctagctgccagtcaggtctgctctgaaggctgcctatctgtggggacatgtgacttctggggctttccagattaagtaatgctcaccccacatgtctgaaattctccaaacactattccggccctgctgtgattcttagagcagaggttctttgcctttttagtgtaat

SEQ ID NO: 82644 - DNA, 515 bp, Homo sapiens
tgacagtcatgagaactccttttccaagggccaagaaaactagggagctgccccaaaactataatgaaactgggacgggaaccactgtttattggcagattgcacaataacaaagttattatcttattagtttcctctgatataaaacatctagcaatttctggattgatctctgatgagatcttagaagaaatctttgctatttcttttatcctagaacatgtctacaagatacaggcgtaaagcatggtaaaatatcaagcaaatgctaatcatctcacatcgtataaataggcaagattaagttgaatttttcctttttaaacttttcaaccaacttttttggaatagaggactatagactcatgtctataaattctatacattttctaaattatrgatgatgtttatagaattcacagctaatctttttctatccctagatttcaagaacatttaaacaagctaagtattcaaaatatgttaaagttaaattcaaaaaccacagtttgaat

SEQ ID NO: 82645 - DNA, 532 bp, Homo sapiens
tcaggktttatcactacagcagctgtgttgccttaactaatattcatatcacttctgctttcctcttcttccactccttctccccctccttttccctcctcctatttttcttctccctttcttcctcctccacctctttttccaccctcttttgcatgtgccaggcatttaattgactgtcccattattttcaatattttaaaatcactttttataaatatgttccttgtaaatagcataattgagtttggctttttaactcaatatgccattgtctttcattagaagaattcaacccgttcatctttagcataacaacttatttttattttttataattccactagtgtttacttttctattaacaaccataattaatcacatatttatatactattttatgaaaactacatacctattgttgttccctctattttctttcttccactgctcctgcccatctcaatgagactttcggaaaatttttgctgatccagtccacagcatccacaccgtcccccatgaatacaat

SEQ ID NO: 82646 - DNA, 532 bp, Homo sapiens
tcaggttttatcactacagcagctgtgttgccttaactaatattcatatcacttctgctttcctcttcttccactccttctccccctccttttccctcctcctatttttcttctccctttcttcctcctccacctctttttccaccctcttttgcatgtgccaggcatttaattgactgtcccattattttcaatattttaaaatcactttttataaatatgttccttgtaaatagcataattgagtttggctttttaactmaatatgccattgtctttcattagaagaattcaacccgttcatctttagcataacaacttatttttattttttataattccactagtgtttacttttctattaacaaccataattaatcacatatttatatactattttatgaaaactacatacctattgttgttccctctattttctttcttccactgctcctgcccatctcaatgagactttcggaaaatttttgctgatccagtccacagcatccacaccgtcccccatgaatacaat

SEQ ID NO: 82647 - DNA, 583 bp, Homo sapiens
aaccaccccgatccctaggcattcatagctcaactcacactgaaggattttagtgtctttgtaaaagaaatacccttttgaaatgatttggcctgtaaggagtggaaagggtctagtaaagataagaagagataagaaaaagaatttgaagttgaaatggaaaaaatgagttggaagttgaatgggaaagaactatattactttcaatctgggatgggacaaggagaatctaggtgcctgcacatgattcataaatgttttcggtcacagttaagtttgattaaagcatctagaaatatatgttagcaaaatagttaagcagtgaacatatttttaaaaatataatttaggaggtctataaagcattcagaaatcacctgtttgtatactgatgaattccaggtttatatcttcatgcttgactgctttaatgagctccaaacttgattattaaacttctcacttgacagtcccacttgragatccaaaaggcaaatcaaatttactgtcttaaacagaactcttgatccctattcccactccatagtcctactcttcatttcttctttataacctctataaa

SEQ ID NO: 82648 - DNA, 602 bp, Homo sapiens
gcctcccaaagtgctgggattacaggcatgagccaccgtgcccagcctgatatttcagtctggatgcttcctatcaagtttatatgtcagaattagtcctcaccaaatatccacatgctcccctactatctacagcttctctgcaattcagctgggcccgtgtgggcaattctgaccaacaggtcatgaacagaagtgacctcatgtctctcaccactccctgacctcccaccccarcccaaagcagttaagtgctaatgtacctcttctatccccttttccctgccacagcaaaattgggagcaaataggtactaaatactcttttgtttcacaggcttgcagtaatatatacccacctgataagtggaccatgaagactctttctgcttgattcctactaagcagagactcattactttccacacctgacattttaagtagtagccctggggtgccgctcccccttgttcctgtgcatctctgagcttttcatgatcagctaaacttccacattcttttactataactggcttgggaatgggggagaaataatcttccaaagaggaacacaaggaaaagcatttgatttctactctccaa

SEQ ID NO: 82649 - DNA, 602 bp, Homo sapiens
gcctcccaaagtgctgggattacaggcatgagccaccgtgcccagcctgatatttcagtctggatgcttcctatcaagtttatatgtcagaattagtcctcaccaaatatccacatgctcccctactatctacagcttctctgcaattcagctgggcccgtgtgggcaattctgaccaacaggtcatgaacagaagtgacctcatgtctctcaccactccctgacctcccaccccagcccaaagcagttaagtgctaatgtacctcttctatccccttttccctgccacagcaaaattgggagcaaataggtactaaatactcttttgtttcacaggcttgcagtaatatatacccacctgataaktggaccatgaagactctttctgcttgattcctactaagcagagactcattactttccacacctgacattttaagtagtagccctggggtgccgctcccccttgttcctgtgcatctctgagcttttcatgatcagctaaacttccacattcttttactataactggcttgggaatgggggagaaataatcttccaaagaggaacacaaggaaaagcatttgatttctactctccaa

SEQ ID NO: 82650 - DNA, 602 bp, Homo sapiens
gcctcccaaagtgctgggattacaggcatgagccaccgtgcccagcctgatatttcagtctggatgcttcctatcaagtttatatgtcagaattagtcctcaccaaatatccacatgctcccctactatctacagcttctctgcaattcagctgggcccgtgtgggcaattctgaccaacaggtcatgaacagaagtgacctcatgtctctcaccactccctgacctcccaccccagcccaaagcagttaagtgctaatgtacctcttctatccccttttccctgccacagcaaaattgggagcaaataggtactaaatactcttttgtttcacaggcttgcagtaatatatacccacctgataagtggaccatgaagactctttctgcttgattcctactaagcagagactcattactttccacacctgacattttaagtagtagccctggggtgccgckcccccttgttcctgtgcatctctgagcttttcatgatcagctaaacttccacattcttttactataactggcttgggaatgggggagaaataatcttccaaagaggaacacaaggaaaagcatttgatttctactctccaa

SEQ ID NO: 82651 - DNA, 1925 bp, Homo sapiens
ttaaatctttcactaaatttctcatttggtcacatggaggaaaatgatttcaccaaatagatactctcattaattttttaatgtaatttatcaaagaaatgaaatatttagataaattccaggtttcccccaccatgagcttctccgaaagtatactccatcacagactgctcactaagaagctctactgcagtcaaagtgaccgaatttaaggggacataatgactacttctgctacacagaaacattatccatctctaacacttccctatgagacggaagacggacttctaatcaggtaccagagagggctctgccaacttcagggctttgatgaataagaatggttgagagcgctcatcataaatgaattcagtataactgagtgagaaagtgagagaaccagagaaataaatccacatgtagaaaatttagtggtgtgaaatgccaaatgccagttaaccaaagctttctttgtcataaagcaacttctataaaaattgctgaaaataaattcttcatggctcaatgtgaatcagtaatttccatttctattacactgttgtttacccaaaaactatttttaatgactaagactcagagtttgccaragtgttttccacaaaacaactgttttgagatactccagatctgtaatcaagtaagtctgaaaaaccccaaatacctcactcacctcttggatacgcataaagcacactaatatataacgttctaaaaagccaatcattaaaactgttttatattgtttaagcatttcctagacatatttggctacaaatctaacatctaattaaacagtctgggaaatgccatcacataatgtaggaatattactagtcatttaagaaactagaaaatatttactatattctaggcagttggctagcagttggagttctagtctctaaacaaaatactgacttatttctgtgacttttttcttttaatgtgacatcactcttttaagcagctctgtgcttcacaatttttttttttcctggtttgttttccacttttgtctgtactttattccttcacagatgtgaaaggctaacaaatgtaaactagttatattaatcagcctctgcctcagttctacacttcaaatacagtatatactctatcaacaattcttggataataacaacctgtacttgtttttcaaacaataaaacaggccgggcaccgtggctggctcacgcccataatcccaacactttgggaggccgaggcgggcggatcacctgaggccaatatggtgagttcgagaccaacctggccaatatggtgagttctcgtctcgactaaaaatacaaaataattagctggccgtggtggtgtgtgcctgtaatcccagttacttgagagactgagacgagagaatcgcttgaacccggggggcagaggttgcagtgagccaagatcgcaccaactgcactccagcctgggcaacaagagcgaaaactccaccttaaaaataaaataaacaataaaacgatgaaaacacaaataactacagcacttcagagttagttgacaaatccaccttttcaatctacatttcaaaatgttcagaaagacaccatcctaggggaggtcaaccagcagcaacctctctgctaatttttgtacacagaaacttgacctgactgcacaaaggtttcaatagatgtctccctctaaaattaatattgaatgatttgtcatcttccatttaataccaaaagggtatcagccacaaactgaaatatcactcatatgcaaataaataacattcaagacttttatcgttgtggttattaatcttgtaatggatggacataaatctattcacattctcatcctatcctcaaatttcactattctctcctctcattcttactttgttctactcatattctcac

SEQ ID NO: 82652 - DNA, 1925 bp, Homo sapiens
ttaaatctttcactaaatttctcatttggtcacatggaggaaaatgatttcaccaaatagatactctcattaattttttaatgtaatttatcaaagaaatgaaatatttagataaattccaggtttcccccaccatgagcttctccgaaagtatactccatcacagactgctcactaagaagctctactgcagtcaaagtgaccgaatttaaggggacataatgactacttctgctacacagaaacattatccatctctaacacttccctatgagacggaagacggacttctaatcaggtaccagagagggctctgccaacttcagggctttgatgaataagaatggttgagagcgctcatcataaatgaattcagtataactgagtgagaaagtgagagaaccagagaaataaatccacatgtagaaaatttagtggtgtgaaatgccaaatgccagttaaccaaagctttctttgtcataaagcaacttctataaaaattgctgaaaataaattcttcatggctcaatgtgaatcagtaatttccatttctattacactgttgtttacccaaaaactatttttaatgactaagactcagagtttgccagagtgttttccacaaaacaactgttttgagatactccagatctgtaatcaagtaagtctgaaaaaccccaaatacctcactcacctcttggataygcataaagcacactaatatataacgttctaaaaagccaatcattaaaactgttttatattgtttaagcatttcctagacatatttggctacaaatctaacatctaattaaacagtctgggaaatgccatcacataatgtaggaatattactagtcatttaagaaactagaaaatatttactatattctaggcagttggctagcagttggagttctagtctctaaacaaaatactgacttatttctgtgacttttttcttttaatgtgacatcactcttttaagcagctctgtgcttcacaatttttttttttcctggtttgttttccacttttgtctgtactttattccttcacagatgtgaaaggctaacaaatgtaaactagttatattaatcagcctctgcctcagttctacacttcaaatacagtatatactctatcaacaattcttggataataacaacctgtacttgtttttcaaacaataaaacaggccgggcaccgtggctggctcacgcccataatcccaacactttgggaggccgaggcgggcggatcacctgaggccaatatggtgagttcgagaccaacctggccaatatggtgagttctcgtctcgactaaaaatacaaaataattagctggccgtggtggtgtgtgcctgtaatcccagttacttgagagactgagacgagagaatcgcttgaacccggggggcagaggttgcagtgagccaagatcgcaccaactgcactccagcctgggcaacaagagcgaaaactccaccttaaaaataaaataaacaataaaacgatgaaaacacaaataactacagcacttcagagttagttgacaaatccaccttttcaatctacatttcaaaatgttcagaaagacaccatcctaggggaggtcaaccagcagcaacctctctgctaatttttgtacacagaaacttgacctgactgcacaaaggtttcaatagatgtctccctctaaaattaatattgaatgatttgtcatcttccatttaataccaaaagggtatcagccacaaactgaaatatcactcatatgcaaataaataacattcaagacttttatcgttgtggttattaatcttgtaatggatggacataaatctattcacattctcatcctatcctcaaatttcactattctctcctctcattcttactttgttctactcatattctcac

SEQ ID NO: 82653 - DNA, 1925 bp, Homo sapiens
ttaaatctttcactaaatttctcatttggtcacatggaggaaaatgatttcaccaaatagatactctcattaattttttaatgtaatttatcaaagaaatgaaatatttagataaattccaggtttcccccaccatgagcttctccgaaagtatactccatcacagactgctcactaagaagctctactgcagtcaaagtgaccgaatttaaggggacataatgactacttctgctacacagaaacattatccatctctaacacttccctatgagacggaagacggacttctaatcaggtaccagagagggctctgccaacttcagggctttgatgaataagaatggttgagagcgctcatcataaatgaattcagtataactgagtgagaaagtgagagaaccagagaaataaatccacatgtagaaaatttagtggtgtgaaatgccaaatgccagttaaccaaagctttctttgtcataaagcaacttctataaaaattgctgaaaataaattcttcatggctcaatgtgaatcagtaatttccatttctattacactgttgtttacccaaaaactatttttaatgactaagactcagagtttgccagagtgttttccacaaaacaactgttttgagatactccagatctgtaatcaagtaagtctgaaaaaccccaaatacctcactcacctcttggatacgcataaagcacactaatatataacgttctaaaaagccaatcattaaaactgttttatattgtttaagcatttcctagacatatttggctacaaatctaacatctaattaaacagtytgggaaatgccatcacataatgtaggaatattactagtcatttaagaaactagaaaatatttactatattctaggcagttggctagcagttggagttctagtctctaaacaaaatactgacttatttctgtgacttttttcttttaatgtgacatcactcttttaagcagctctgtgcttcacaatttttttttttcctggtttgttttccacttttgtctgtactttattccttcacagatgtgaaaggctaacaaatgtaaactagttatattaatcagcctctgcctcagttctacacttcaaatacagtatatactctatcaacaattcttggataataacaacctgtacttgtttttcaaacaataaaacaggccgggcaccgtggctggctcacgcccataatcccaacactttgggaggccgaggcgggcggatcacctgaggccaatatggtgagttcgagaccaacctggccaatatggtgagttctcgtctcgactaaaaatacaaaataattagctggccgtggtggtgtgtgcctgtaatcccagttacttgagagactgagacgagagaatcgcttgaacccggggggcagaggttgcagtgagccaagatcgcaccaactgcactccagcctgggcaacaagagcgaaaactccaccttaaaaataaaataaacaataaaacgatgaaaacacaaataactacagcacttcagagttagttgacaaatccaccttttcaatctacatttcaaaatgttcagaaagacaccatcctaggggaggtcaaccagcagcaacctctctgctaatttttgtacacagaaacttgacctgactgcacaaaggtttcaatagatgtctccctctaaaattaatattgaatgatttgtcatcttccatttaataccaaaagggtatcagccacaaactgaaatatcactcatatgcaaataaataacattcaagacttttatcgttgtggttattaatcttgtaatggatggacataaatctattcacattctcatcctatcctcaaatttcactattctctcctctcattcttactttgttctactcatattctcac

SEQ ID NO: 82654 - DNA, 806 bp, Homo sapiens
attaattaactgtagttcccatacctcttttgccaatgcattgccaaacagatggggattgtcctaaaaccttggggacaggacagtccaggtaagctgagatgcagcatgagtgtctggattagtccattcaaatgcaaaaatgtattgggtgtccaggtgtaaaggtgtgtgaaagaaaacatcttttaaatttaatactatgaaccaataagcatcttcagggacttgagttattattgtataaagattaggaactattgggtgactggaactaatgcctcattaactgccctaagatcctgaacaaatctatattccccgtttggcttattaacaggaaaaatgggggtgttacgttgggactgataggattgtaataatccatacttcattatcaggggatggatgccccttggagccaaaggtctaaaaggatactggatttttctttttttttttttttttgagtcagagtcttgctctgttatccaggctggagtgcggyggcgcaaggctcactgctacctctgccttccgggttcaagcaattctcctgccacagccttctgagtagttgggattgcagatgtacaccaccatacctagctaatttttgtgtttttagtagagatggggttttgccttgttggccaggctggtctcaaactcctagcttccagtgatatgcccaccttggcctccgaaagtgcagagattaaaagcatgggccaccacacttaaaaggatattttttttcccatagataattaacactgggtttcaaaataacctggactgggaga

SEQ ID NO: 82655 - DNA, 752 bp, Homo sapiens
gtggttgtttttgttctgtgccttcaaaaataatttcttacagaattttctgtgtgaactggtgacatcatatgctgtagtgtaaagcttgtagagaagggggcattggtgtctttttgttgttgttgacactttatcactccttataactgacacaaaccctgagaagagaaacaggaaggaaactccctgttcttaccatgatgcttttgttcaaaatagctgaaaacagcagagctgacggaaaccaatttgagtgtgacagctgatttgagaaagaatgaattaagagattcaggctcttctgctatgttgaaatcatttttactgaaagattagctgtttggaacagggattgactttgtctctctgaaagtaggcatgaagagttcggttagaggaaccgttacagatggaggagaaacttgaggaaaggtctttcctgtagtgtgactacagtattaacattcccagattatatgaaagagaaaggaagcttcattaaatgaaacattggaatcaggaagactccggcttggctccctgagcattctaacttgttctgagcctagtctcgacagaagtagcctgacacaagtggctcagatcaagggtccatattacgggcagagtaaaaataggtcccagtttcattagacttctcatacatttaaggaaaaaaagatttgttgccataggaacagaccagttgttktctgtcttgtgggattttaggagctggggagatagga

SEQ ID NO: 82656 - DNA, 767 bp, Homo sapiens
gaaacaaatgtacaaaaaggagagccaagagaacaggaggagtcgttataatggacagaaaaacttcacaacatttctggaaaaccgaagatggacaaaaacttacagatagatgaaatgaccaaagaggtccacagcccagacataattatgaggaggcagcagtatagatgacaagaaatgccctgttgtaactcctgcaggatggaagtgagaagttacactttcatcctcctccccaaatcctgcatctaaagcaaagtctgttagcattttcccctaaagactgaataaaacatttgaagataattaaactttttagcttagtgactcaaaatgaaaactctctctttctaacatgtgaacctctgtagcctaacaactgacttcttacacatttacctgaacacaaatgctattagtcaacaccacacagagtttctagacagaattcatactgagaagagagattttgaggtaggaaatcttaaacaagagcagagaaaactcaaatatatgcagtctttctgacttaaaacaagtgcataagcaatggttaccaggtattgaactagcagcagtaaagaaaatcaataacataaataaaaaatgacactggaagaaatagagataattcaggaaaaagaagaaaacttttaagaaatattcaaatgtatatgctttttaaaagatgagccataaaacatgaacaggataytatgaaaaaagaacaaaaccttcttgtattagttatccatcattgcata

SEQ ID NO: 82657 - DNA, 1811 bp, Homo sapiens
gcatccaatctggttaaattatattgtacaatataacacaaaaattaaaacacaagtgagtagaaacacaaattgcaaaacaatctttctacaggtaaaatttactgtattatcaaagtataccttgaatctctataattggatctccatctttacggccaccaccttattttctggccatcatcctaccttgcccgaactactataatatctttgtaactggtttttctgcttcttttttgcccccttcaatctattctccacacttcagcaaaaataatttgaaagttgtcctttcctctttaagacactctaattgcttcccattgtacagaatgtaaacccctccctgtatgaccaagccctgactgtgctctgacatcgcttggattcctcttcctcacgaccacagctgctctgaagcactgcttttctttaatatgttgactttccaccaattttatagccggccatttgcatgtgctgattttatctataattttttttttttttttttttttgagacagagtcttgctctgtcacctggctggagcgcagtggcacaatctcggctcactgcaatctccacctcctggattcaagcaattcccctgcctcagcytcccaagtagctgggactacaggcacgcaccaccgcgcccagctaattttttgtattttactagagacagagtttaccatgttggccaggatggtctcgatctgctgacctcatgatccacctgcctcagtgtcccaaagtgctgggattacaggcgtaagccatcgttgactcttccattttcctctcgttcggtccttattctttggagggtcattatagagggtcaatttggcaactaaggcctgagaagttttcttaaaatgcttgttgcttgtcaggtgaagatgaacttgactttcttaggacatttacttggtgagatttaatttaaaagattagattccttttattctttatttttatctccatatcagtcatatgaagtctttcctgatcctctcatctaatggaggcttcttttgcaaatctgttctctatttcaaccatttgcttcctttatagcacttagaaggtatcacaactgttttaagtatttgtctcctcaactggaatatgggaacaacacagtgcctgatgcataatagatgcttaagctattttgttgcatggattagcaaaagaaagatctgaaccatttgtaaatatattcccagtctcacaaactgggatgatgagagagagtcacacaaatcacaatacaccaccctttcataaacctgaccttgatgctgaagatggataacttcactctcaggctgatgttaagggtccagcattgccaggtttgcctaatatggtgagaacagcacaggaggaagcagataatctattacggcatctgtgaaccatagcaggtaatgagtcatcattatattcttttgtattctcacctattttttttttttttgagatggagttttgctcttgttgcccaggctgaagtgcgatggtgcgatctcggctcaccacaacctccgcctcctgggttcaaacgattctcctgcctcagcctctcaagtagctggaattacaggcatgagccaccacgcctgccgaattttttgtatttttagtagagacagggtttctccatgttggtcaggctggtctcgaactcccaacctcaggtgatctacccaccttggcctcccaaagtgctaggattacaggagtgagccactgcccctggcctgtactctcacctttaatccccatgtgatgcca

SEQ ID NO: 82658 - DNA, 1811 bp, Homo sapiens
gcatccaatctggttaaattatattgtacaatataacacaaaaattaaaacacaagtgagtagaaacacaaattgcaaaacaatctttctacaggtaaaatttactgtattatcaaagtataccttgaatctctataattggatctccatctttacggccaccaccttattttctggccatcatcctaccttgcccgaactactataatatctttgtaactggtttttctgcttcttttttgcccccttcaatctattctccacacttcagcaaaaataatttgaaagttgtcctttcctctttaagacactctaattgcttcccattgtacagaatgtaaacccctccctgtatgaccaagccctgactgtgctctgacatcgcttggattcctcttcctcacgaccacagctgctctgaagcactgcttttctttaatatgttgactttccaccaattttatagccggccatttgcatgtgctgattttatctataattttttttttttttttttttttgagacagagtcttgctctgtcacctggctggagcgcagtggcacaatctcggctcactgcaatctccacctcctggattcaagcaattcccctgcctcagcctcccaagtagctgggactacaggcacgcaccaccgcgcccagctaattttttgtattttactagagacagagtttaccatgttggccaggatggtctcgatctgctgacctcatgatccacctgcctcagtgtcccaaagtgctgggattacaggcgtaagccatcgttgactcttccattttcctctcgttcggtccttattctttggagggtcattatagagggtcaatttggcaactaaggcctgagaagttttcttaaaatgcttgttgcttgtcaggtgaagatgaacttgactttcttaggacatttacttggtgagatttaatttaaaagattagattccttttattctttatttttatctccatatcagtcatatgaagtctttcctgatcctctcatctaatggaggcttcttttgcaaatctgttctctatttcaaccatttgcttcctttatagcacttagaaggtatcacaactgttttaagtatttgtctcctcaactggaatatgggaacaacacagtgcctgatgcataatagatgcttaagctattttgttgcatggattagcaaaagaaagatctgaaccatttgtaaatatattcccagtctcacaaactgggatgatgagagagagtcacacaaatcacaatacaccaccctttcataaacctgaccttgatgctgaagatggataacttcactctcaggctgatgttaagggtccagcattgccaggtttgyctaatatggtgagaacagcacaggaggaagcagataatctattacggcatctgtgaaccatagcaggtaatgagtcatcattatattcttttgtattctcacctattttttttttttttgagatggagttttgctcttgttgcccaggctgaagtgcgatggtgcgatctcggctcaccacaacctccgcctcctgggttcaaacgattctcctgcctcagcctctcaagtagctggaattacaggcatgagccaccacgcctgccgaattttttgtatttttagtagagacagggtttctccatgttggtcaggctggtctcgaactcccaacctcaggtgatctacccaccttggcctcccaaagtgctaggattacaggagtgagccactgcccctggcctgtactctcacctttaatccccatgtgatgcca

SEQ ID NO: 82659 - DNA, 976 bp, Homo sapiens
tgggttatcttttatgactgtgcagatgggcgctttcatttggggaaactctacaccattcctgtcggcctctggatagcagcttagaagctctattcatcgagtttcttagctgtgtcactagtttagaacaccttgtcatctattttacagggtctgaagatrttttccattcgtaaccagtacaggtttggaatgttactgagttaaacagctcagcaagttttacaactgggcacagaagaggatggcatctataattatagactataattataaggttcttgaaaaggtgggatgagacagcttcagtacacaatgttgtcatattctggcatcagaacatatttggtgcttgacctggatggagttggagaccgttattctaagtgaagtaactcagaaatggaaaaccaaacatcatatgctctcatttataagtgggagctaagctatgaggaagcaaaggcataagaatgatacaatgaactttgaacttggagaggaaaggtgggaagggggttgagggataaaagactacacattgggtacagtgtacactgctcgggtgacaggtgcatggaaatctcagaaatcaccacaaaggaactcatccccaaaactactgatataaaataaaatttggtgccggaagttattctctagtgactctagtcacagtggttctcaactacgagtgattttttttccatggtaatggtaagtggtaaatataaatggtaaatagctccaaagatatttggccatgtcttgagacattttgggtggccactggatgggacacagtgctggcatctagtgggtaaagaccagggaggctgcaaaacatcctcctatgcacaaacaaaccctccatgacggagaattatctagtctaaaatgtcaatagttccaaggttgagaaacctcaaagatcagctatatttccataccagtattttattacaatattata

SEQ ID NO: 82660 - DNA, 836 bp, Homo sapiens
tgcatttattttctctcctatgctcctatacgtttatctctaattgttagtgattgagctattgatggacaagaaattgcctctgtgtcactgattaaataataagttggttagggtttgtctcaatctggtaacctggaatttggatgtcctgttatagaatcttaaatggagtattcaaactccaagtgctcaaataggagaaagagaggacagttgatgtacatgaaccttctccaaggagtattcggttatctccttctcagacaagctaggagcctagagttcagagctctaggaatgaagataggtcatttgcagcatcaagtccaagggtgcaggaagacagcaaaagatagcaggccagagggttatcaagaggaacaggagcatcatggtcatgactataggctctgaagccaaactctctaggtttgaatcctagctctactacattttagatttttcatctaatctctttatgcctcggtttgtttttttgtttgtttgtttgttttgttttttgtttttttgagacagggtctcactctgtcactcaggctgaagtgcagtggcacaatcatggctcactgcagcctcagcctcccgggcccaagctatcctcccacctcaagctcctgaatagctgggaccataggcatgcaccattatgccaagctaatttttaattttttgtacagatgaggyctcactgtgttgcccaggctggtctcaaactcctaagctcaaattatcctcccaccttggcctcccaatgtgctgaagttataggtgtgagccacttttcccagcctgtgccttggttttcacatgca

SEQ ID NO: 82661 - DNA, 728 bp, Homo sapiens
aaattagcaaatggtcccttgcttaccatcttcactcttttctttttcatcccgaacatcaaagtcgttcagtggttttgagatcacatgttccacttaatgtttaaagcaggtgccaataggaggagtagaaacatccctgtgaggaaaaccacaactatgccttgttatttgaaatttgctctagtttcacattcttaaaatgttaaaaactggagtgagaactggcttgtttgctgaggtgatgctgaagcatgacggtggcccagtgagctgtggctatctgggaggtgaaggtagttttgttgagtggtgcctgctgggtttgattcactacgacggccacctgcagctgccccgccaaggggtgccagattccaccttctcctcatcctcaacactgccttgggctggctgtgatctggcctcatggctgcaaccacgacagtgctgtgacagggctttggctctgttagccatgtggggtacagayccaagtgcccctgtggccaaagcctgctacatttatccagctcctgtaaacacactttcttgtagaatcacaaagatgtaggaagtcctgcatcttccatctgcttctttcccatcctgtagccactcctgggtctcctgttttagtccctgtgtggttccagtgtctaagaaatgaacgcatgggagttataacccctttttaagtatcttctgcctacgtatcttgcgtagct

SEQ ID NO: 82662 - DNA, 733 bp, Homo sapiens
gcaggataaacctaactctggtgggctttctggagagcctctctccttattaaagaacaattagcttagctgtccaagacattattttacccacagccacaaagaagctacatcatcctttgctataacaaacacataacttaaatctgcttgcgaagtttatatgaaaacactttagcacctgaaggccatccatatcatcattgcaccatyatgataacttgctggttaaaatagaggatgcatccatcagataaaagtgttctttgctccatcttgcttttaacccagatacaagcaaacccatgaagacacaggagttgtgctaggcaattgtcgtgctccatgaaatgggccacattttgttttctggtctttgtttttgcacttgtctaccactcaccagcatttttaaaggatatgcatgtcaggtttatggatgagggttttacatcattcactccacaagaaaaaacaaacgacatgaccaaaatgcctcttttcacccaacctttaagaatctatttgctgcctttgtgctatgcactgtcaataattttttgctgtctctgaaaacctagaaataaatatagcttcactgttagttttccagttttcaaggaatagctattatgtaaggagtttggactgagacagtcccagaatgtggacaatgtctaagaaatgagcactataaggataaaataaacaagaatccacataaaatggatcc

SEQ ID NO: 82663 - DNA, 733 bp, Homo sapiens
gcaggataaacctaactctggtgggctttctggagagcctctctccttattaaagaacaattagcttagctgtccaagacattattttacccacagccacaaagaagctacatcatcctttgctataacaaacacataacttaaatctgcttgcgaagtttatatgaaaacactttagcacctgaaggccatccatatcatcattgcaccatcatgataacttgctggttaaaatagaggatgcatccatcagataaaagtgttctttgctccatcttgcttttaacccagatacaagcaaacccatgaagacacaggagttgtgctaggcaattgtcgtgctccatgaaatgggccacattttgttttctggtctttgtttttgcacttgtctaccactcaccagcwtttttaaaggatatgcatgtcaggtttatggatgagggttttacatcattcactccacaagaaaaaacaaacgacatgaccaaaatgcctcttttcacccaacctttaagaatctatttgctgcctttgtgctatgcactgtcaataattttttgctgtctctgaaaacctagaaataaatatagcttcactgttagttttccagttttcaaggaatagctattatgtaaggagtttggactgagacagtcccagaatgtggacaatgtctaagaaatgagcactataaggataaaataaacaagaatccacataaaatggatcc

SEQ ID NO: 82664 - DNA, 733 bp, Homo sapiens
gcaggataaacctaactctggtgggctttctggagagcctctctccttattaaagaacaattagcttagctgtccaagacattattttacccacagccacaaagaagctacatcatcctttgctataacaaacacataacttaaatctgcttgcgaagtttatatgaaaacactttagcacctgaaggccatccatatcatcattgcaccatcatgataacttgctggttaaaatagaggatgcatccatcagataaaagtgttctttgctccatcttgcttttaacccagatacaagcaaacccatgaagacacaggagttgtgctaggcaattgtcgtgctccatgaaatgggccacattttgttttctggtctttgtttttgcacttgtctaccactcaccagcayttttaaaggatatgcatgtcaggtttatggatgagggttttacatcattcactccacaagaaaaaacaaacgacatgaccaaaatgcctcttttcacccaacctttaagaatctatttgctgcctttgtgctatgcactgtcaataattttttgctgtctctgaaaacctagaaataaatatagcttcactgttagttttccagttttcaaggaatagctattatgtaaggagtttggactgagacagtcccagaatgtggacaatgtctaagaaatgagcactataaggataaaataaacaagaatccacataaaatggatcc

SEQ ID NO: 82665 - DNA, 733 bp, Homo sapiens
gcaggataaacctaactctggtgggctttctggagagcctctctccttattaaagaacaattagcttagctgtccaagacattattttacccacagccacaaagaagctacatcatcctttgctataacaaacacataacttaaatctgcttgcgaagtttatatgaaaacactttagcacctgaaggccatccatatcatcattgcaccatcatgataacttgctggttaaaatagaggatgcatccatcagataaaagtgttctttgctccatcttgcttttaacccagatacaagcaaacccatgaagacacaggagttgtgctaggcaattgtcgtgctccatgaaatgggccacattttgttttctggtctttgtttttgcacttgtctaccactcaccagcatttttamaggatatgcatgtcaggtttatggatgagggttttacatcattcactccacaagaaaaaacaaacgacatgaccaaaatgcctcttttcacccaacctttaagaatctatttgctgcctttgtgctatgcactgtcaataattttttgctgtctctgaaaacctagaaataaatatagcttcactgttagttttccagttttcaaggaatagctattatgtaaggagtttggactgagacagtcccagaatgtggacaatgtctaagaaatgagcactataaggataaaataaacaagaatccacataaaatggatcc

SEQ ID NO: 82666 - DNA, 733 bp, Homo sapiens
gcaggataaacctaactctggtgggctttctggagagcctctctccttattaaagaacaattagcttagctgtccaagacattattttacccacagccacaaagaagctacatcatcctttgctataacaaacacataacttaaatctgcttgcgaagtttatatgaaaacactttagcacctgaaggccatccatatcatcattgcaccatcatgataacttgctggttaaaatagaggatgcatccatcagataaaagtgttctttgctccatcttgcttttaacccagatacaagcaaacccatgaagacacaggagttgtgctaggcaattgtcgtgctccatgaaatgggccacattttgttttctggtctttgtttttgcacttgtctaccactcaccagcatttttaamggatatgcatgtcaggtttatggatgagggttttacatcattcactccacaagaaaaaacaaacgacatgaccaaaatgcctcttttcacccaacctttaagaatctatttgctgcctttgtgctatgcactgtcaataattttttgctgtctctgaaaacctagaaataaatatagcttcactgttagttttccagttttcaaggaatagctattatgtaaggagtttggactgagacagtcccagaatgtggacaatgtctaagaaatgagcactataaggataaaataaacaagaatccacataaaatggatcc

SEQ ID NO: 82667 - DNA, 733 bp, Homo sapiens
gcaggataaacctaactctggtgggctttctggagagcctctctccttattaaagaacaattagcttagctgtccaagacattattttacccacagccacaaagaagctacatcatcctttgctataacaaacacataacttaaatctgcttgcgaagtttatatgaaaacactttagcacctgaaggccatccatatcatcattgcaccatcatgataacttgctggttaaaatagaggatgcatccatcagataaaagtgttctttgctccatcttgcttttaacccagatacaagcaaacccatgaagacacaggagttgtgctaggcaattgtcgtgctccatgaaatgggccacattttgttttctggtctttgtttttgcacttgtctaccactcaccagcatttttaaakgatatgcatgtcaggtttatggatgagggttttacatcattcactccacaagaaaaaacaaacgacatgaccaaaatgcctcttttcacccaacctttaagaatctatttgctgcctttgtgctatgcactgtcaataattttttgctgtctctgaaaacctagaaataaatatagcttcactgttagttttccagttttcaaggaatagctattatgtaaggagtttggactgagacagtcccagaatgtggacaatgtctaagaaatgagcactataaggataaaataaacaagaatccacataaaatggatcc

SEQ ID NO: 82668 - DNA, 615 bp, Homo sapiens
agccttttgtctataatatcaattatagataattatttatagcttatttttccttttacctagcttatgggatttagttttccatgcagttgttttctggttttactgcagtcaaatctatcaattttttttaaaagcccttcaagttcgagtcatagttttaaaaaagactttccagccaggtgcagtggctcatgcctgtaatcccaacactttaggaggccgaggtgggtggatcayctgaggtcaggagttccagaccagcctggccaacatggtgaaaccccgtttctactaaaaatataaaaagtagccaggtgtggtggcaggcgcctgtaatcccagctactcaggagactgaggtgggagaatctcttgaatctgggaggcagaggttgcagtgagccgagatcatgctactgcactccaggctggcctcctgagtagctgggactacagatgtgtgccagtgtgcccagctaatttttttatttttaggtcttactatgttacccatactggtcttgaacttctggtttcaaatgatcctcccatctcggcctcccaaagtgctgggattataggtataagccactgtgccaagtctctatttgg

SEQ ID NO: 82669 - DNA, 702 bp, Homo sapiens
catcctaagtgcctatcaatggatgaataaagaaaataggatatacgtacacactggagtattattcatccataaaaaaaagaataaaatcccgtcatttgcagcaacatagatgaatctggaggccaattatgtcaagcaaaataatctaagcacagaaagacaaatatgttctcactcatatatagaagctaaaaaaaatgaatctcatgaagacagagagtagaatggtggttaccacaggccattaaggatagaggagagggaaggatattgggtgaaaaaaggaatataaatgtatttattaccaataaaccgtacacttaaaagtggtaaagatggtaaattttatatgtatattttacctcaaaaaaagtgaaaaaaaatagtgtatagttgcagtctctgcaaatgtaaaatgatttaataataaagattcactttatatgctaaatatgaaataacacaaattccccaaattaataattcatcaagaattaaagttgcagccagacgcaatggcttgcaactacaatsccagctacttgggaggctgaggtgggaggatcacctgagcccaggagttcaagaccagcctgggcaacatagtgagaccatgtgtccaaaaaaaatgttttttaattagctgactgtgatggcacaggcctgtagtcccagctactccagaggctgaggtgggag

SEQ ID NO: 82670 - DNA, 858 bp, Homo sapiens
gaaaggaggcagttccatgctgaacatttgtgtcaggggaagaagaaaatacacgatagagtrgatttcatcaagaaaaataggatcctttgcccctgctgaggctggggtagcaagcatgcaagctgatgtttctatagtggggtgagattgtgagcatgtacaaagccacttatttcttgcctggtatagatgaacaatgccggcagttggcacgctgttcggaaagtgaggccacagtgatgccttcatcctccaaacagccaggcttctggcaggacttgcaatttcagaaagagctcttcaaatattcagtataaacaaaaataaaaatgatagtatttctcatgtatttgcagctatatcttctattttacccatgcttgttatttcttttactttgattttaacatacattttccactattcctcttcacagcttgtgaaagtctatgtttctaggctcttaggtaccttattagtgcactgctgatagttctaacagctccagaaaaaagtaactttatattttacttttataagagtccaagcatcattgcattacctctctcctttcactagctctttgcctctacttcccttccatcagaaagaacagagaaagaacggtcaagttaggcatggtaaacatggtgattttttttcttccaattaggagattttcctgtggtaggcttgcctcctctacccatttcagtttttaatatttaagctacaatttatagaagccattatcatcatttgttttctacaagcctccagctcttcataaacttgcatataatttttaaggtaagtgcaacttacaaagaaatgagctttcaagtcatggagaga

SEQ ID NO: 82671 - DNA, 858 bp, Homo sapiens
gaaaggaggcagttccatgctgaacatttgtgtcaggggaagaagaaaatacacgatagagtagatttcatcaagaaaaataggatcctttgcccctgctgaggctggggtagcaagcatgcaagctgatgtttctatagtggggtgagattgtgagcatgtacaaagccacttatttcttgcctggtatagatgaacaatgccggcagttggcacgctgttcggaaagtgaggccacagtgatgccttcatcctccaaacagccaggcttctggcaggacttgcaatttcagaaagagctcttcaaatattcagtataaacaaaaataaaaatgatagtatttctcatgtatttgcagctatatcttctattttacccatgcttgttatttcttttactttgattttaacatacattttccactattcctcttcacagcttgtgaaagtctatgtttctaggctcttaggtaccttattagtgcactgctgatagttctaacagctccagaaaaaagtaactttatattttacttttataagagtccaagcatcattgcattacctctctcctttcactagctctttgcctctacttcccttccatcagaaagaacagagaaagaacggtcaagttaggcatggtaaacatkgtgattttttttcttccaattaggagattttcctgtggtaggcttgcctcctctacccatttcagtttttaatatttaagctacaatttatagaagccattatcatcatttgttttctacaagcctccagctcttcataaacttgcatataatttttaaggtaagtgcaacttacaaagaaatgagctttcaagtcatggagaga

SEQ ID NO: 82672 - DNA, 858 bp, Homo sapiens
gaaaggaggcagttccatgctgaacatttgtgtcaggggaagaagaaaatacacgatagagtagatttcatcaagaaaaataggatcctttgcccctgctgaggctggggtagcaagcatgcaagctgatgtttctatagtggggtgagattgtgagcatgtacaaagccacttatttcttgcctggtatagatgaacaatgccggcagttggcacgctgttcggaaagtgaggccacagtgatgccttcatcctccaaacagccaggcttctggcaggacttgcaatttcagaaagagctcttcaaatattcagtataaacaaaaataaaaatgatagtatttctcatgtatttgcagctatatcttctattttacccatgcttgttatttcttttactttgattttaacatacattttccactattcctcttcacagcttgtgaaagtctatgtttctaggctcttaggtaccttattagtgcactgctgatagttctaacagctccagaaaaaagtaactttatattttacttttataagagtccaagcatcattgcattacctctctcctttcactagctctttgcctctacttcccttccatcagaaagaacagagaaagaacggtcaagttaggcatggtaaacatggtgattttttttcttccaattaggagattttcctgtggtaggcttgcctcctctacccatttcagtttttaatatttaagctacaatttatagaagccattatcatcatttgttttctacaagcctccagctcttcataaacttgcatataatttttaaggtaagtgcarcttacaaagaaatgagctttcaagtcatggagaga

SEQ ID NO: 82673 - DNA, 594 bp, Homo sapiens
tttcttagttaaatttaaaaatgtttttcccaggccaatcaggaacttctgggatttgagcatggctactcccttttaatgttatgaagttatatattaaagttgataaatagtatctttattaattttaccccagttatttgcacccctggacatgtacctgtagtagaattcactgcagaagctcaatttaaacgcccttgtttctgaccctcactcaaaatctgtcctttatgtcacttgcaggtcaagtttagtaggtgttatctcttgcaggataagaaaataggaatgtgtcaaataggacacattcccgtagggtcaaataggaatgtgctctaaaatattttttaatttttaaatttgctttctacaaacatataagcttttaaatctataacatttcaaaaacaaaatagtagaaaaacaaagctctttggatgacaccatcattcacagaggaaaacaacaataatgtactcttataaataaagatgaaaagwtgtgggtttcacatcagtaactttcagagtcaggtgataatattcaatggcaatatttttgttagacctccatcaccattttattgtcttc

SEQ ID NO: 82674 - DNA, 560 bp, Homo sapiens
tccgttttcagggctgggataatcgacaagaatgcaaaaggtaaaaatccctactctccttgtgcttatattgtactggagagaaatcaacagtgaacagggttgcccaatacctgatgcctcaagtttggttttagagtctaggcaacctatgaaacatcaactaattcctttctgtgctgttagaaagacaggataaagccagtaaatagtaatatcatactccatttggtgtatatccattytcatcattaatttcttttccccactacttgactccgaaatgatagttaatttactattaattgacattcatagtgatgagtgagaagctgaatatggagcattcaagagaagaaaatgaaggcattgatagaatggctgaaatagccttagacaacaatgttaattgtgaagcgtgtcttccattggtcagggattgagtcaataaagtgtctccaacagttctccagaaaaaaaaaaaatccttcattttttcatttctagctaaaaattacaaagctctaaagtaagaaaaactgcaaaagataatcttgaat

SEQ ID NO: 82675 - DNA, 560 bp, Homo sapiens
tccgttttcagggctgggataatcgacaagaatgcaaaaggtaaaaatccctactctccttgtgcttatattgtactggagagaaatcaacagtgaacagggttgcccaatacctgatgcctcaagtttggttttagagtctaggcaacctatgaaacatcaactaattcctttctgtgctgttagaaagacaggataaagccagtaaatagtaatatcatactccatttggtgtatatccattttcatcattaatttcttttccccactacttgactccgaaatgatagttaatttactattaattgacattcatagtgatgagtgagaagctgaatatggagcattcaagagaagaaaatgaaggcattgatagaatggctgaaatagccttagacaacaatgttaattgtgaagcgtgtcttccattggtcagggattgagtcaataaagtgtctccaayagttctccagaaaaaaaaaaaatccttcattttttcatttctagctaaaaattacaaagctctaaagtaagaaaaactgcaaaagataatcttgaat

SEQ ID NO: 82676 - DNA, 722 bp, Homo sapiens
tgcttcatatattttgcttattaaaggcaaggagatggatagttttctttcctatttgttttctcagcagattaactcatcagttaatcagaagagggaattaatcaacacatttcattccttagggctaatcaaatctttgctgtaatctgaaaaacaaaagtggcttttttgtttttagagtttgggtttcagtcactgattacttcaggctggctgtactttatatcatttcagatattcaaagaacwcaactatgtgatttgacacaatgtcctaaaagtttaaaaaatgaggatggttacaaaatgcaacaggcatagcctccctaacgtctggtcttcgcacagcagcctaagagatcccgttaaaaccaaagtcatatgctgtaactcttctgcatcaaacctgctgagggcttcccgtttcacatgaaatgaaaaccagagtccttccagcggcctccctgaccttgtccctctccccgacaagcctggctcttttcctgttcctagtatacgccaggcacagctcacttcctgcagcgtttgcatttgctgtttcctctgcctggatttctcttccccagatatgggcgtagtctgtccacttgttcccaatcggtttcacttcctgttttatccctagtgcctaggcagtgcccacagcagaatatatgctcaggaaatatttatgaattaatgatttttgactagtgggat

SEQ ID NO: 82677 - DNA, 722 bp, Homo sapiens
tgcttcatatattttgcttattaaaggcaaggagatggatagttttctttcctatttgttttctcagcagattaactcatcagttaatcagaagagggaattaatcaacacatttcattccttagggctaatcaaatctttgctgtaatctgaaaaacaaaagtggcttttttgtttttagagtttgggtttcagtcactgattacttcaggctggctgtactttatatcatttcagatattcaaagaacacaactatgtgatttgacacaatgtcctaaaagtttaaaaaatgaggatggttacaaaatgcaacaggcatagcctccctaamgtctggtcttcgcacagcagcctaagagatcccgttaaaaccaaagtcatatgctgtaactcttctgcatcaaacctgctgagggcttcccgtttcacatgaaatgaaaaccagagtccttccagcggcctccctgaccttgtccctctccccgacaagcctggctcttttcctgttcctagtatacgccaggcacagctcacttcctgcagcgtttgcatttgctgtttcctctgcctggatttctcttccccagatatgggcgtagtctgtccacttgttcccaatcggtttcacttcctgttttatccctagtgcctaggcagtgcccacagcagaatatatgctcaggaaatatttatgaattaatgatttttgactagtgggat

SEQ ID NO: 82678 - DNA, 722 bp, Homo sapiens
tgcttcatatattttgcttattaaaggcaaggagatggatagttttctttcctatttgttttctcagcagattaactcatcagttaatcagaagagggaattaatcaacacatttcattccttagggctaatcaaatctttgctgtaatctgaaaaacaaaagtggcttttttgtttttagagtttgggtttcagtcactgattacttcaggctggctgtactttatatcatttcagatattcaaagaacacaactatgtgatttgacacaatgtcctaaaagtttaaaaaatgaggatggttacaaaatgcaacaggcatagcctccctaacgtctggtcttcgcacagcagcctaagagatcccgttaaaaccaaagtcatatgctgtaactcttctgcatcaaacctgctgagggcttcccgtttcacatgaaatgaaaaccagagtccttccagcggcctccctgaccttgtccctctccccgacaagcctggctcttttcctgttcctagtatacgccaggcacagctcacttcctgcagcgtttgcatttgctgttkcctctgcctggatttctcttccccagatatgggcgtagtctgtccacttgttcccaatcggtttcacttcctgttttatccctagtgcctaggcagtgcccacagcagaatatatgctcaggaaatatttatgaattaatgatttttgactagtgggat

SEQ ID NO: 82679 - DNA, 1007 bp, Homo sapiens
ctcctgaatacaggtagacaatggagagaaaaggacagatgctaacatggattttcttaaaaactggtataataaaggactcatagttaagcatcaagcctacctgtgtggctgagagattagacccatgcccccatcttagtgcaaaatcagaatgccctcagtgttctgtatggagaaaagaatcagctgagaaaaagctcctctgaccccagttttcctttcaggttttgtgtcaaaaagtattgtttgtaagtagcagagcctaactgacacgagtgtaaggaaaaaggagagagtttaacaaaaccataggatcacagagggggagctggcactggacaacttcgccaggtgctctcaccacctcagagtctctcttgctctcattctgattgtcctccctgggttagtttccctcaagcmtgcaccacacagcaggcagtgcattgcaagaaactctaaactcacattcttctaacttatgcagccccaggagggaaaatcctactctccacttccaccagctccagttagaaacactccagagaagtttaccattgtcctggcttaggttacatgtccgcctgttagaccaaaccatgtggctcacaggttaggactcattgctcttgcttccattacacatccccatttgtggctgagaagacaggatatgccacattaaaattggaagagccagtggcaaggagacaaggacattgggaagtagccataccttttatttttgagctgactagagactttgggattataccacacagaagtgttatattcctgggcatgtgctttcttcacctactagtgaaaggcagtgcgtaagttacaaaaatccacatcattgtatctcacaattactacatcaagaagttcaacatttaataaagaaaatagcaacaacaacaaaactcgaactgaaggggttgccaagtgctctaagaaaaatacaagaatctattgtaggtaaatgaatttggagaaccatc

SEQ ID NO: 82680 - DNA, 651 bp, Homo sapiens
atgaacacactactgtggggaggaccccaagccatatatgagggatcctcccccatgacccaaacacctcccaccaggytccacctctaatgctggggactacatttcaacatgagatttggaggggacaaaaatccaaactatcaccctttcttactccctgtattctctgtcatttcttattacctcctcaaaaccaaggcaaagtatcttgtgccatgaatcactccatttgtgtaatgttttatgttctattttaatggtggcattaaaggaaattgaaatgtatcatcacccacatttctataaactggaaaatagaagatagatcaagaggactgtatctttcacccattatttttcttcctggcccctataaacattttaatgtttgagctctggtgctcaataatttttatgttgaaaaaagtgtgaattatactgtcaatatacatatgaagaaatatattgaatagtagtaatagtgctttactttgttcaaagggttgtatatgtattacctcatttgtgttcttacttcataggtcatattgaaattatattgcccctttatttgtactgattgacttagtctattctctatattcactttcaccagttttcttttttctccccacctgtcaccacttc

SEQ ID NO: 82681 - DNA, 540 bp, Homo sapiens
tctacaggctgccttaattccatgactggcagccccttcttccatcttcaaagccagcagtggggcattttcacaactctctgactctgactcttccgtttattctcaactctccttctcttaccctaaccttctgccttccccttccagtatttaagcaccyttgtgattacatagggtccaccaggataatcttcctatctcaagatccttaccttaatcacatctgcaaggtccctcctgcaaagtgaggtgacagattcacaggtttgtgggggttaggacatgaacatctttggaggttcattatttagcctgccacacctcacataattccttataaacatcgtcctcctgaacaaagataaactgctcctggaggaaggctgaaaaaggaattaaactgcagagtcaccagaaactttctatatctgcctgcctaaacgccaatggttaacattctgaagagagccacaggaaggctagttcaggctgttgtccatttcatcaactctccaccaagtttttgagacgaaatac

SEQ ID NO: 82682 - DNA, 1152 bp, Homo sapiens
cctcacaactacctatgaggaggcaagtactatgatcccattttacaagtgaggagactgaggctcagagaggtgatgttrgtggctcacccaagtcctccaggtgagtaagtagcagatcctggcctcaaaacggggcctgcctctggcccacctgagcagagtcagagttgcaactcgcctgtgcagcccatgttgcaggcgcccctcctgggaacccaccaggcccagctgctgcagctccagcacaccaggcggtctaagccagttctgacagatgactgatttactggagaggctcagtagggaacagccgggcacctgagtgaatttgtgaccccacaaccaggtgttcctgctgcctgttgacagcacctggattacgtgtggcaggaagaggaacaggccccggccattcaacaccatatcgcagcaccgacctgctttggctcttggggatctcccgctctcaaatatttgtgaccgctgactcccttgcttctcaaagggtggtccatggaccagcatcatcgcatcagaaccagctgggagctcactggaaatgtggaaactcaggatccagccaggaccttcggagtcagccttcgcatttgatctccaggcagctgcagtacacgttgatacagtcgaaagaacacaagaccacaaagtccagagacctcggtaggagtcctgaccagccactgagaggctctggaaccttgggtgagtctcttctgagcctcggtttgctcatccataaaatgagagtgtttagaccagatagtctccaatgtcagccagaaaacactcagatctgctggtggagggaacaaaggcctggggagtcagactcaaagctccataaatattttaattaaataagcacataattaacttcacaaatttttacggcacacctacaatgtgctaggcattctagcccctattgataaagaagtccttgctctaatgggacttgtattaattttctaactaatgaaatggggttaaaactccaactctagtccttagtagctgtgtgaccttaggaacatgatttaacttcaccactgtctagttttcccacttataaaataataacaacaataacaagagcagctaacctttattgagcacttattgtcagac

SEQ ID NO: 82683 - DNA, 1152 bp, Homo sapiens
cctcacaactacctatgaggaggcaagtactatgatcccattttacaagtgaggagactgaggctcagagaggtgatgttggtggctcacccaagtcctscaggtgagtaagtagcagatcctggcctcaaaacggggcctgcctctggcccacctgagcagagtcagagttgcaactcgcctgtgcagcccatgttgcaggcgcccctcctgggaacccaccaggcccagctgctgcagctccagcacaccaggcggtctaagccagttctgacagatgactgatttactggagaggctcagtagggaacagccgggcacctgagtgaatttgtgaccccacaaccaggtgttcctgctgcctgttgacagcacctggattacgtgtggcaggaagaggaacaggccccggccattcaacaccatatcgcagcaccgacctgctttggctcttggggatctcccgctctcaaatatttgtgaccgctgactcccttgcttctcaaagggtggtccatggaccagcatcatcgcatcagaaccagctgggagctcactggaaatgtggaaactcaggatccagccaggaccttcggagtcagccttcgcatttgatctccaggcagctgcagtacacgttgatacagtcgaaagaacacaagaccacaaagtccagagacctcggtaggagtcctgaccagccactgagaggctctggaaccttgggtgagtctcttctgagcctcggtttgctcatccataaaatgagagtgtttagaccagatagtctccaatgtcagccagaaaacactcagatctgctggtggagggaacaaaggcctggggagtcagactcaaagctccataaatattttaattaaataagcacataattaacttcacaaatttttacggcacacctacaatgtgctaggcattctagcccctattgataaagaagtccttgctctaatgggacttgtattaattttctaactaatgaaatggggttaaaactccaactctagtccttagtagctgtgtgaccttaggaacatgatttaacttcaccactgtctagttttcccacttataaaataataacaacaataacaagagcagctaacctttattgagcacttattgtcagac

SEQ ID NO: 82684 - DNA, 1152 bp, Homo sapiens
cctcacaactacctatgaggaggcaagtactatgatcccattttacaagtgaggagactgaggctcagagaggtgatgttggtggctcacccaagtcctccaggtgagtaagtagcagatcctggcctcaaaackgggcctgcctctggcccacctgagcagagtcagagttgcaactcgcctgtgcagcccatgttgcaggcgcccctcctgggaacccaccaggcccagctgctgcagctccagcacaccaggcggtctaagccagttctgacagatgactgatttactggagaggctcagtagggaacagccgggcacctgagtgaatttgtgaccccacaaccaggtgttcctgctgcctgttgacagcacctggattacgtgtggcaggaagaggaacaggccccggccattcaacaccatatcgcagcaccgacctgctttggctcttggggatctcccgctctcaaatatttgtgaccgctgactcccttgcttctcaaagggtggtccatggaccagcatcatcgcatcagaaccagctgggagctcactggaaatgtggaaactcaggatccagccaggaccttcggagtcagccttcgcatttgatctccaggcagctgcagtacacgttgatacagtcgaaagaacacaagaccacaaagtccagagacctcggtaggagtcctgaccagccactgagaggctctggaaccttgggtgagtctcttctgagcctcggtttgctcatccataaaatgagagtgtttagaccagatagtctccaatgtcagccagaaaacactcagatctgctggtggagggaacaaaggcctggggagtcagactcaaagctccataaatattttaattaaataagcacataattaacttcacaaatttttacggcacacctacaatgtgctaggcattctagcccctattgataaagaagtccttgctctaatgggacttgtattaattttctaactaatgaaatggggttaaaactccaactctagtccttagtagctgtgtgaccttaggaacatgatttaacttcaccactgtctagttttcccacttataaaataataacaacaataacaagagcagctaacctttattgagcacttattgtcagac

SEQ ID NO: 82685 - DNA, 1152 bp, Homo sapiens
cctcacaactacctatgaggaggcaagtactatgatcccattttacaagtgaggagactgaggctcagagaggtgatgttggtggctcacccaagtcctccaggtgagtaagtagcagatcctggcctcaaaacggggcctgcctctggcccacctgagcagagtcagagttgcaactcgcctgtgcagcccatgttgcaggcgcccctcctgggaacccaccaggcccagctgctgcagctccagcacaccaggcggtctaagccagttctgacagatgactgatttactggagaggctcagtagggaacagccgggcacctgagtgaatttgtgaccccacaaccaggtgttcctgctgcctgttgacagcacctggattacgtgtggcaggaagaggaacaggccccggccattcaacaccawatcgcagcaccgacctgctttggctcttggggatctcccgctctcaaatatttgtgaccgctgactcccttgcttctcaaagggtggtccatggaccagcatcatcgcatcagaaccagctgggagctcactggaaatgtggaaactcaggatccagccaggaccttcggagtcagccttcgcatttgatctccaggcagctgcagtacacgttgatacagtcgaaagaacacaagaccacaaagtccagagacctcggtaggagtcctgaccagccactgagaggctctggaaccttgggtgagtctcttctgagcctcggtttgctcatccataaaatgagagtgtttagaccagatagtctccaatgtcagccagaaaacactcagatctgctggtggagggaacaaaggcctggggagtcagactcaaagctccataaatattttaattaaataagcacataattaacttcacaaatttttacggcacacctacaatgtgctaggcattctagcccctattgataaagaagtccttgctctaatgggacttgtattaattttctaactaatgaaatggggttaaaactccaactctagtccttagtagctgtgtgaccttaggaacatgatttaacttcaccactgtctagttttcccacttataaaataataacaacaataacaagagcagctaacctttattgagcacttattgtcagac

SEQ ID NO: 82686 - DNA, 1152 bp, Homo sapiens
cctcacaactacctatgaggaggcaagtactatgatcccattttacaagtgaggagactgaggctcagagaggtgatgttggtggctcacccaagtcctccaggtgagtaagtagcagatcctggcctcaaaacggggcctgcctctggcccacctgagcagagtcagagttgcaactcgcctgtgcagcccatgttgcaggcgcccctcctgggaacccaccaggcccagctgctgcagctccagcacaccaggcggtctaagccagttctgacagatgactgatttactggagaggctcagtagggaacagccgggcacctgagtgaatttgtgaccccacaaccaggtgttcctgctgcctgttgacagcacctggattacgtgtggcaggaagaggaacaggccccggccattcaacaccatatcgcagcaccgacctgctttggctcttggggatctccygctctcaaatatttgtgaccgctgactcccttgcttctcaaagggtggtccatggaccagcatcatcgcatcagaaccagctgggagctcactggaaatgtggaaactcaggatccagccaggaccttcggagtcagccttcgcatttgatctccaggcagctgcagtacacgttgatacagtcgaaagaacacaagaccacaaagtccagagacctcggtaggagtcctgaccagccactgagaggctctggaaccttgggtgagtctcttctgagcctcggtttgctcatccataaaatgagagtgtttagaccagatagtctccaatgtcagccagaaaacactcagatctgctggtggagggaacaaaggcctggggagtcagactcaaagctccataaatattttaattaaataagcacataattaacttcacaaatttttacggcacacctacaatgtgctaggcattctagcccctattgataaagaagtccttgctctaatgggacttgtattaattttctaactaatgaaatggggttaaaactccaactctagtccttagtagctgtgtgaccttaggaacatgatttaacttcaccactgtctagttttcccacttataaaataataacaacaataacaagagcagctaacctttattgagcacttattgtcagac

SEQ ID NO: 82687 - DNA, 1152 bp, Homo sapiens
cctcacaactacctatgaggaggcaagtactatgatcccattttacaagtgaggagactgaggctcagagaggtgatgttggtggctcacccaagtcctccaggtgagtaagtagcagatcctggcctcaaaacggggcctgcctctggcccacctgagcagagtcagagttgcaactcgcctgtgcagcccatgttgcaggcgcccctcctgggaacccaccaggcccagctgctgcagctccagcacaccaggcggtctaagccagttctgacagatgactgatttactggagaggctcagtagggaacagccgggcacctgagtgaatttgtgaccccacaaccaggtgttcctgctgcctgttgacagcacctggattacgtgtggcaggaagaggaacaggccccggccattcaacaccatatcgcagcaccgacctgctttggctcttggggatctcccgctctcaaatatttgtgaccgctgactcccttgcttctcaaagggtggtccatggaccagcatcatcgcatcagaaccagctgggagctcactggaaatgtggaaactcaggatccagccaggaccttcggagtcagccttcgcatttgatctccaggcagctgcagtacacgttgatacagtcgaaagaacacaagaccacaaagtccagagacctcggtaggagtcctgaccagccactgagaggctctggaaccttgggtgagtctcttctgagcctcggtttgctcatccataaaatgrgagtgtttagaccagatagtctccaatgtcagccagaaaacactcagatctgctggtggagggaacaaaggcctggggagtcagactcaaagctccataaatattttaattaaataagcacataattaacttcacaaatttttacggcacacctacaatgtgctaggcattctagcccctattgataaagaagtccttgctctaatgggacttgtattaattttctaactaatgaaatggggttaaaactccaactctagtccttagtagctgtgtgaccttaggaacatgatttaacttcaccactgtctagttttcccacttataaaataataacaacaataacaagagcagctaacctttattgagcacttattgtcagac

SEQ ID NO: 82688 - DNA, 1072 bp, Homo sapiens
tatgcatgtgcgtttgtgcatgtttgtatttatataagtgcttagtatagtgcctggcacaaagctcaataaacagtagctattgttactgaatataatcaagtgtttcttaattttcacatgttatatggacttttagattaattccactgtcatcagagaacatattgcagatagtttgacaagtgctgaaacaagggaaatacaggttaatatgggtggaaataacaggaacacctgacatttaggcaggctgcctgcagaatgattgtaagcataaaactgaaggataagtgggatattctgccagagaaggtgtgtaggtaggcgtgtgtgtgttggccagagtagtggctgaaggacttcagcctcatgggggaggcccatatgtgtaatttagtaggttcagtgtattttagtaaatgttatgatgaagggaagcttgggaatttggggagcacatcaaagcctaatggatctgcttcatgaagttatgggtatataatgctaaacaatatgtcccaatgattaagcatgtggatctcagacttggatttgaatcctcttctgcctcttaataatcatttttcctcggacaagacactaaccttctctaagtctcagttttctcatctatacaatggggttaaaaatccctgccttgtgcaatcagtatgaagtcatctgagatcatgtatgccaagcaattagcacaagacaggtatcagggctctgttagtgggaatgggtacgggtttttacaacgtcacctggcccaccatgggaatgtctgctgctacagaacacccaggaagcagaaggtggagagggaagtagacaagaatatccaggaaccttccagaaggagcctatgggcacagcacactgtggccatggtagaccccaycaagcttgtgattgcagaaaagctgcatgtgtggagcatcagtttcagaggatttggacccttttcccagctccgcatagactcattcaatgaacttggacttcctgggtctccatttccctaagtgaaaaatgcaaagggaattttcaaggtaaattggattcc

SEQ ID NO: 82689 - DNA, 1843 bp, Homo sapiens
gattctgtagcttttttgagtgggatcttgcgaagatgtcaagcagcattacttaccaagcctgtcgtcatatggtctcgcatcagaccttaattttcttttcagcgcatccatgcctgcttatttccagagcccccgctttggctttggacttcaggtctgtgggaggagtgtcccaggatggctcgtgcggtcatttccaggcagtgccgctctccctgtggcttgtacccacagtgcctcactgtgtgagtgtcctcctgctctggttgcccagccggccatcactccacagcgtgtgttcatttctcccaaagctgctcgccttcagctgtgctcacctttgcagtgtggcttccatgtctgccgtcctctggtgctttcagacttggcttcgtcactgcttggtcagtcctggagggcccctcacagtttgctgttgctttcagggcgccggtctcaatgctgctttgaattctgttgaacttgggctgaaccctgtgtcttcttggcagcatctgctctctgtgactttcaccttcaaacaccaaaaggaccggtttacttgagccctagatctgtggtttctaattaattgaggctttcgcatgtaaagatagctttttatttaaagcaagtagagtgagccagggtccggggctctgaggaggaaagggggatcaaagctgtgaatatggagggcatgatacacggtggccgcggggcccacctggaacattcttctcctcataacccttctgctagtgattctggtctagaaaagagggagattttgctctacaaagagggtgcttcactaaactcctacagctgaaattgcttggtcacagcgaatatgcagatgtaatcttgatggatattactaaaatgccctcatttgcccttctctattctgggcagcaatagggaggatgtttgcccacccccaccccccaccccatctccatccctttccttgacactgtcctagggcaggaatgtaacacaggtccagctcgctagggataaggggttgttgtatagggacctagatacgcacacttcagaagggtcctgggaaagtcagctgcttggatccttggtttcctcatctttaaaatgggagtcattgtacctgccttaaggggcaggttgggaggattcagagacatactgcgtcctaagccttacttacgacatgcctggcatgtattacacattcaataaaagctggtcacggatgatgacggtggtggagtgactctgccaagtagagggggaggctgaggggtgtggcagcaggggcagtcatcccctttcacagyagcccaggctggtgtgggggcggctgggtgcctggaagtaggagaatgtcggtcctgcccacatcagaggtggtccttcccagaagctacctgggagaccagtggtggccttgtgtggtcacggcagaggctgtgtgtgaggtgaaagctattccacaggtgtgaaattattctctttctttgtaagaaagtaagattttggaagtaagaaattaaagaaattgaaagagcagaaagattgtctttccattgattgagtgaacagaagagacctgtgaagaagttgaggaggtgacaattttgaacttaccaaaaaaccatttcaacaaagttctatccatgtgtattttttaaaagaagtatctcacattctttttccagagtatagtttttataaacaaaaacagaatttttgttaaaatacgtatcgatactgaaaataaatccagcttgtatgtgcttgttttttaaattaaaataatagcagtgtaaatgtctaatttgggtgtggttttttt

SEQ ID NO: 82690 - DNA, 1836 bp, Homo sapiens
aggaatgcaacagagcatttctgaaatagaatgtacaactgaaagcggcttcccaatgaggcttccccctcctgttttttccttaactacttctcagaagaaaggtggagaactacacttgaaagataatcactgagaaaaacggaacgccatgattaacacctaagagtgggattccatttttctgcaatatgagaaaggaagtgctttgctctcctctcccttacattaacacttcctttccacagtgacaatgagattcaaagattcccccctagagctgctaacaagccacactcttgaacaagaagcttctaaatgactggcacatagtgaacttacagttaatttcagtctgagccatatgaccagactaaaggaagagaaactcatcatcgatcacaagttctacactccatgtgtagatttatcaggtccagtgatcccaggatagaggaggtcagagcctcttacgtaggcacaattcaagttcaaatatgatcctctatccctctgtactagcagctttacaacatgggctactcactggtttcttgaagctcttgattttctcccctgtgtggaatgtcagtgggcctacacctaagttagatcaattttgaattacattttcttagagacaggatctcactctgtcacccaggctggagtagagtggcaaaatcttggctcactgcagcctcaacctcctaggcccaagctatcctccctatagctatagctccctatagactataggcacgcaccaccgtgcccagcttttaaaaaagttttttgtaggccgggcgcggtggctcacgcctgtaatcccagcactttgggaggccgaggcgggtggagcacctcaggttgggaggtcgagaccagcctggccaacatggcaaaaccccgtctctactgaaaatacaaaaaaaaattaggcgggcatggtrgcaggcgtctgtaatcccagctactcgggaggctgagtatcgcttgaacccgggaggcggaagttgcagtgagccgagatcgtgccattgtactccagcctgggcaacaagagcgaatctccatttcaaaaaaaaaaaaaaatttgtagagacagggtctcactatgttgcccaggctggtctcgaattcttggcctcaagggatcctcccacctcagcatcccaaagtcctggaattacagacatgagccactgcacctggccaatttttaattaattttatctttaaaatacaatatatgcatatggtagaacttcagatcacagaacagaaataataaaactttcccccagcccctcttcccaaagataatcactggtaggagttttggggtattctttcagagaaaattttcaacatctatcagcataaactgttctgtaccctactttaaagaaatctatttaatatagcttaaaatctttccgcctgtaatctcagcactttgggaggccgaggtgggcagatcacatggtcaagagatcaagattactaaaaatacaaaaattagctgggtgtggtggcacgcgcctgtaattccagctactcgggaggctgaggaaggagaattgcttgaacctgggagggggaggttgcagtgagccgagatcgcgccactgcactccagcctggcgacagagcgagactccatctcaaaaaaaaaaaaaaagaaaaaaaatctttccatagcagcacatacacgctgacctatttttttctaacttcatagtattccatggatggctatatcacaacgtacttaaccagttcccagttgatactaagaaagccattacaaacacagaatgtcacccccactcc

SEQ ID NO: 82691 - DNA, 795 bp, Homo sapiens
attttagaccaatatccttgatgaacatcgatgcaaaaatcctcaataaaatactggcaaaccgaatccagtagcacatcaaaaagcttatccaccgtgatcaagtgggcttcatccctgggatgcaaggctggttcaatatatgcaaatcaataaatgtaatccagcatataaacagaaccaaagacaaaaaccacatgattatctcaatagatgcagaaaaggcctttgacaaaattcaacaacgcttcatgctaaaaactctcaataaattaggtattgatgggacgtatctcaaaataataagagctatttatgacaaccccacagccawtgtcatactgaatgggtaaaaaactggaagcattccctttgaaaactggcacaagacggtgatgccctctctcaccactcctattcaacatagtgttggaagttctggccagggcaattaggcaggagaaagaaataaagggtatttaattaggaaaagaggaagtcaaattgtccctgtttgcagatgacatgattgtatatctagaaaaccccattgtctgagcccaaaatctccttaagctgataagcaacttcagcaaagtctcaggatacaaaatctgtgtacaaaaatcacaagcattcttatacaccaataacaaacagagagctaaatcatgagtgaactcccattcacaattgcttcaaagagaataaagtacttaggaatccaacttacaagggacgtgaaggacctcttcagtctcccaagttctatcccttgttcctagtacctgtgga

SEQ ID NO: 82692 - DNA, 961 bp, Homo sapiens
tgcattctctttctcagggatgttccttgctgagaaaaagaattcagtgatatttctcccatttgcttttgaaagaagagaaatatggctctgttccacctggctcaccggcagtcagagtttaaggttatctctcttgttccctgaacattgctgttatcctgttcttttttcaaggtgcccagatttcatattgttcaaacacatatgctccacaaaccatttgtgcagttaacggaatcatcacarggtcctgaggcgacctacatcctcctcagcttacgaagatgacgggattaagagattaaagtaaagacaggcataggaaatcacaagggtattgattggggaagtgataagtgtccatgaaatcttcacaatttatattcagagactgcagtaaagacaggtgtaactgatcccaatcgcattagccaagaagactttttaatattagagtacagtggttaagagtagccttcagcaaattatttcacctttctgtgcctagattctttatctgttaatttgtagtaatcatgggttttcatgataatcaatgaattgccttatcacatcattgacacttgttaggaactcgaatgtggagctattgttattgctattacaatattgtaattttgtaaaaaaattagtaacaaaaaaaagaaagtataaaagtattaatttggggaactaataaatgtccatgaaatcttcacaatttatgttcttctgccatgacttcagccaatccctccgttcggggtccctgacttcccacaacaaacatatgtaagatgaacattggtttggtccagaaaaagtggggcaattcaaagaaaaggtgagacaacttgaagtggggagggagcttccaggtcatagataggtaagagacaaatggttgcagtctttcgagtttcttattagcctctccaaatgaggcaataagatatgc

SEQ ID NO: 82693 - DNA, 961 bp, Homo sapiens
tgcattctctttctcagggatgttccttgctgagaaaaagaattcagtgatatttctcccatttgcttttgaaagaagagaaatatggctctgttccacctggctcaccggcagtcagagtttaaggttatctctcttgttccctgaacattgctgttatcctgttcttttttcaaggtgcccagatttcatattgttcaaacacatatgctccacaaaccatttgtgcagttaacggaatcatcacagggtcctgaggcgacctacatcctcctcagcttacgaagatgacgggattaagagattaaagtaaagacaggcataggaaatcacaagggtattgattggggaagtgataagtgtccatgaaatcttcacaatttatattcagagactgcagtaaagacaggtgtaactgatcccaatcgcattagccaagaagactttttaatattagagtacagtggttaagagtagccttcagcaaattatttcacctttctgtgcctagattctttatctgttaatttgtagtaatcatgggttttcatgataatcaatgaattgccttatcacatcattgacacttgttaggaactcgaatgtggagctattgttattgctattacaatattgtaattttgtaaaaaaattagtaacaaaaaaaagaaagtataaaagtattaatttggggaactaataaatgtccatgaaatcttcacaatttatgttcttctgccatgacttcagccaatccctccrttcggggtccctgacttcccacaacaaacatatgtaagatgaacattggtttggtccagaaaaagtggggcaattcaaagaaaaggtgagacaacttgaagtggggagggagcttccaggtcatagataggtaagagacaaatggttgcagtctttcgagtttcttattagcctctccaaatgaggcaataagatatgc

SEQ ID NO: 82694 - DNA, 961 bp, Homo sapiens
tgcattctctttctcagggatgttccttgctgagaaaaagaattcagtgatatttctcccatttgcttttgaaagaagagaaatatggctctgttccacctggctcaccggcagtcagagtttaaggttatctctcttgttccctgaacattgctgttatcctgttcttttttcaaggtgcccagatttcatattgttcaaacacatatgctccacaaaccatttgtgcagttaacggaatcatcacagggtcctgaggcgacctacatcctcctcagcttacgaagatgacgggattaagagattaaagtaaagacaggcataggaaatcacaagggtattgattggggaagtgataagtgtccatgaaatcttcacaatttatattcagagactgcagtaaagacaggtgtaactgatcccaatcgcattagccaagaagactttttaatattagagtacagtggttaagagtagccttcagcaaattatttcacctttctgtgcctagattctttatctgttaatttgtagtaatcatgggttttcatgataatcaatgaattgccttatcacatcattgacacttgttaggaactcgaatgtggagctattgttattgctattacaatattgtaattttgtaaaaaaattagtaacaaaaaaaagaaagtataaaagtattaatttggggaactaataaatgtccatgaaatcttcacaatttatgttcttctgccatgacttcagccaatccctccgttcggggtccctgacttcccacaacaaacatatgtaagatgaacattggtttggtccagaaaaagtggggcaattcaaagaaaaggtgagacaacttgragtggggagggagcttccaggtcatagataggtaagagacaaatggttgcagtctttcgagtttcttattagcctctccaaatgaggcaataagatatgc

SEQ ID NO: 82695 - DNA, 2319 bp, Homo sapiens
cccggccacctatgttgggttccacagtaaaaagatcaaacctcaccatcacatctctgagtttaaaaargaaataaagaaatgcaaagcacaaggccagtgggaaagaaagaataaggacaaaagcttcctagaggcaatcccttaaagaatgggtgcaagtgacgcagcccaagatcccaggaaaggtcgtcctgtgcaagaataccagctcaacagtcacaggatcatggagtcttcatgacagaggattctcttagagtctcaagttgcacttctaaaaaatctccagaaatcagttttaccattcagttctatccatacaaccccaatgggggaggaacttattaccatcaaaggaagcctgcaagaacagaaatcaggaaggtctgacagctaggcttgccagtgggatggtgcacctgagaaggtgagcttagcttcactaggctgcagtaacgactcaacgtgctgggatgttagcagttacttagcacagagccagagtttcctgaatatgaggtgaggccaaaaaacacataggtcctcatgagaatggctaagaaagcttctaggaggacctgacagaatccttgccacaatcagtttcattgtcaactgggtgcttttgtaccaggaaagcttatttgttcctccaactaggaggatctttatgtttcccactagaaacaccttcaaaattctaaatataaaatgattctcaacctgtaattctaaaattcaacctttcaggtaagtataaaggtaaaacagatataaaaatttacctcccatacaatctttctgagaaaactattacaggatatgctcttcaggaaaaaaggaaagataacatgagatccaagaaaattagggatctaactgaagaatatgaagaagagttatagaatcaggctatatagttctgatcctaggacttcacacacacacacatacccacacacacacacacatacacacacacacacacacacacagcagggctaagaacaaccagtccaagttagaagggagaaatgtcttcaggaaaagaatggaattagaatggaattttgctgtgttgaaattttgaaaaaatttaaaattgtttggcacaactttttaaagcattatcttttcctaaatgcatagaaaactatgcaaatttaaaaaggcaattaagtctaggacacacaaagagagcgtcaaaaaagaaaacagtcatagtgtactactaagctcaaccgtgaacaatgtttacatagtaataatgtgcacattatttgatttaacgaatatagttatattgggaagtggtggtgacagtgagctagaagagctgcatcctgtctacaacaaccaggaggcaatacaaaaatgtccaaaattgatcaattaaaaaacagcaacataagcaaagtatttataatagaaatatggcactaaaaataatagtataattttcctagaggtttccccctttggaagtgggtccagagatacagaaaggtgagaaaggagactgatattttttgttgctagaattcaacgcttgttgatattttttaagctgtgatcatatattgcttgaaaagaataaaagcattttaaaagatatacagttaaacagaaaattaaataacagtacattttaaattataattactttgcatgtatttttctctcattctattgtgaatcttaaaggtcaaatatttctgtaaattatgatacatctcaaaatcagaaaagaacaaaaatactacaatacacagccatgcacttaactacccagatttaacatacttttacttcctcccctcaagtttacttaaacaccctcacaggagccaccgcattgtctgtgatgagcctcgcgggccactgttcttccccagctcctctcgggtggctgcggtggtgacgaccacgagggcagaggtgttttttctcaaaaaaaggtatctggctaggcacggtggctcacacctgtaatcccagcactttgggaggccaaggcaggtggatgacatgaggccaggagttcaagaccaacctggcccacatggtgaaaccccatctctactaaaaatataaaaattagctgaatgtggtggtgcgtgcctgtaatcccagctacttggcagactgaggcacaagaatcacttgaacccgggaggcagaggttgcagtgagcctagatcgcaccactgcactccagcttgggccatagagactgtctcaaaaaaaaaaaaaaaaaaaaaaatatataatatatatatattttttgtgggagagagagagagagagagagagaga

SEQ ID NO: 82696 - DNA, 2319 bp, Homo sapiens
cccggccacctatgttgggttccacagtaaaaagatcaaacctcaccatcacatctctgagtttaaaaaagaaataaagaaatgcaaagcacaaggccagtgggaaagaaagaataaggacaaaagcttcctagaggcaatcccttaaagaaygggtgcaagtgacgcagcccaagatcccaggaaaggtcgtcctgtgcaagaataccagctcaacagtcacaggatcatggagtcttcatgacagaggattctcttagagtctcaagttgcacttctaaaaaatctccagaaatcagttttaccattcagttctatccatacaaccccaatgggggaggaacttattaccatcaaaggaagcctgcaagaacagaaatcaggaaggtctgacagctaggcttgccagtgggatggtgcacctgagaaggtgagcttagcttcactaggctgcagtaacgactcaacgtgctgggatgttagcagttacttagcacagagccagagtttcctgaatatgaggtgaggccaaaaaacacataggtcctcatgagaatggctaagaaagcttctaggaggacctgacagaatccttgccacaatcagtttcattgtcaactgggtgcttttgtaccaggaaagcttatttgttcctccaactaggaggatctttatgtttcccactagaaacaccttcaaaattctaaatataaaatgattctcaacctgtaattctaaaattcaacctttcaggtaagtataaaggtaaaacagatataaaaatttacctcccatacaatctttctgagaaaactattacaggatatgctcttcaggaaaaaaggaaagataacatgagatccaagaaaattagggatctaactgaagaatatgaagaagagttatagaatcaggctatatagttctgatcctaggacttcacacacacacacatacccacacacacacacacatacacacacacacacacacacacagcagggctaagaacaaccagtccaagttagaagggagaaatgtcttcaggaaaagaatggaattagaatggaattttgctgtgttgaaattttgaaaaaatttaaaattgtttggcacaactttttaaagcattatcttttcctaaatgcatagaaaactatgcaaatttaaaaaggcaattaagtctaggacacacaaagagagcgtcaaaaaagaaaacagtcatagtgtactactaagctcaaccgtgaacaatgtttacatagtaataatgtgcacattatttgatttaacgaatatagttatattgggaagtggtggtgacagtgagctagaagagctgcatcctgtctacaacaaccaggaggcaatacaaaaatgtccaaaattgatcaattaaaaaacagcaacataagcaaagtatttataatagaaatatggcactaaaaataatagtataattttcctagaggtttccccctttggaagtgggtccagagatacagaaaggtgagaaaggagactgatattttttgttgctagaattcaacgcttgttgatattttttaagctgtgatcatatattgcttgaaaagaataaaagcattttaaaagatatacagttaaacagaaaattaaataacagtacattttaaattataattactttgcatgtatttttctctcattctattgtgaatcttaaaggtcaaatatttctgtaaattatgatacatctcaaaatcagaaaagaacaaaaatactacaatacacagccatgcacttaactacccagatttaacatacttttacttcctcccctcaagtttacttaaacaccctcacaggagccaccgcattgtctgtgatgagcctcgcgggccactgttcttccccagctcctctcgggtggctgcggtggtgacgaccacgagggcagaggtgttttttctcaaaaaaaggtatctggctaggcacggtggctcacacctgtaatcccagcactttgggaggccaaggcaggtggatgacatgaggccaggagttcaagaccaacctggcccacatggtgaaaccccatctctactaaaaatataaaaattagctgaatgtggtggtgcgtgcctgtaatcccagctacttggcagactgaggcacaagaatcacttgaacccgggaggcagaggttgcagtgagcctagatcgcaccactgcactccagcttgggccatagagactgtctcaaaaaaaaaaaaaaaaaaaaaaatatataatatatatatattttttgtgggagagagagagagagagagagagaga

SEQ ID NO: 82697 - DNA, 2319 bp, Homo sapiens
cccggccacctatgttgggttccacagtaaaaagatcaaacctcaccatcacatctctgagtttaaaaaagaaataaagaaatgcaaagcacaaggccagtgggaaagaaagaataaggacaaaagcttcctagaggcaatcccttaaagaatgggtgcaagtgacgcagcccaagatcccaggaaaggtcgtcctgtgcaagaataccagctcaacagtcacaggatcatggagtcttcatgacagaggattctcttagagtctcaagttgcacttctaaaaaatctccagaaatcagttttaccattcagttctatccatacaaccccaatgggggaggaacttattaccatcaaaggaagcctgcaagaacagaaatcaggaaggtctgacagctaggcttgccagtgggatggtgcacctgagaaggtgagcttagcttcactaggctgcagtaasgactcaacgtgctgggatgttagcagttacttagcacagagccagagtttcctgaatatgaggtgaggccaaaaaacacataggtcctcatgagaatggctaagaaagcttctaggaggacctgacagaatccttgccacaatcagtttcattgtcaactgggtgcttttgtaccaggaaagcttatttgttcctccaactaggaggatctttatgtttcccactagaaacaccttcaaaattctaaatataaaatgattctcaacctgtaattctaaaattcaacctttcaggtaagtataaaggtaaaacagatataaaaatttacctcccatacaatctttctgagaaaactattacaggatatgctcttcaggaaaaaaggaaagataacatgagatccaagaaaattagggatctaactgaagaatatgaagaagagttatagaatcaggctatatagttctgatcctaggacttcacacacacacacatacccacacacacacacacatacacacacacacacacacacacagcagggctaagaacaaccagtccaagttagaagggagaaatgtcttcaggaaaagaatggaattagaatggaattttgctgtgttgaaattttgaaaaaatttaaaattgtttggcacaactttttaaagcattatcttttcctaaatgcatagaaaactatgcaaatttaaaaaggcaattaagtctaggacacacaaagagagcgtcaaaaaagaaaacagtcatagtgtactactaagctcaaccgtgaacaatgtttacatagtaataatgtgcacattatttgatttaacgaatatagttatattgggaagtggtggtgacagtgagctagaagagctgcatcctgtctacaacaaccaggaggcaatacaaaaatgtccaaaattgatcaattaaaaaacagcaacataagcaaagtatttataatagaaatatggcactaaaaataatagtataattttcctagaggtttccccctttggaagtgggtccagagatacagaaaggtgagaaaggagactgatattttttgttgctagaattcaacgcttgttgatattttttaagctgtgatcatatattgcttgaaaagaataaaagcattttaaaagatatacagttaaacagaaaattaaataacagtacattttaaattataattactttgcatgtatttttctctcattctattgtgaatcttaaaggtcaaatatttctgtaaattatgatacatctcaaaatcagaaaagaacaaaaatactacaatacacagccatgcacttaactacccagatttaacatacttttacttcctcccctcaagtttacttaaacaccctcacaggagccaccgcattgtctgtgatgagcctcgcgggccactgttcttccccagctcctctcgggtggctgcggtggtgacgaccacgagggcagaggtgttttttctcaaaaaaaggtatctggctaggcacggtggctcacacctgtaatcccagcactttgggaggccaaggcaggtggatgacatgaggccaggagttcaagaccaacctggcccacatggtgaaaccccatctctactaaaaatataaaaattagctgaatgtggtggtgcgtgcctgtaatcccagctacttggcagactgaggcacaagaatcacttgaacccgggaggcagaggttgcagtgagcctagatcgcaccactgcactccagcttgggccatagagactgtctcaaaaaaaaaaaaaaaaaaaaaaatatataatatatatatattttttgtgggagagagagagagagagagagagaga

SEQ ID NO: 82698 - DNA, 2319 bp, Homo sapiens
cccggccacctatgttgggttccacagtaaaaagatcaaacctcaccatcacatctctgagtttaaaaaagaaataaagaaatgcaaagcacaaggccagtgggaaagaaagaataaggacaaaagcttcctagaggcaatcccttaaagaatgggtgcaagtgacgcagcccaagatcccaggaaaggtcgtcctgtgcaagaataccagctcaacagtcacaggatcatggagtcttcatgacagaggattctcttagagtctcaagttgcacttctaaaaaatctccagaaatcagttttaccattcagttctatccatacaaccccaatgggggaggaacttattaccatcaaaggaagcctgcaagaacagaaatcaggaaggtctgacagctaggcttgccagtgggatggtgcacctgagaaggtgagcttagcttcactaggctgcagtaacsactcaacgtgctgggatgttagcagttacttagcacagagccagagtttcctgaatatgaggtgaggccaaaaaacacataggtcctcatgagaatggctaagaaagcttctaggaggacctgacagaatccttgccacaatcagtttcattgtcaactgggtgcttttgtaccaggaaagcttatttgttcctccaactaggaggatctttatgtttcccactagaaacaccttcaaaattctaaatataaaatgattctcaacctgtaattctaaaattcaacctttcaggtaagtataaaggtaaaacagatataaaaatttacctcccatacaatctttctgagaaaactattacaggatatgctcttcaggaaaaaaggaaagataacatgagatccaagaaaattagggatctaactgaagaatatgaagaagagttatagaatcaggctatatagttctgatcctaggacttcacacacacacacatacccacacacacacacacatacacacacacacacacacacacagcagggctaagaacaaccagtccaagttagaagggagaaatgtcttcaggaaaagaatggaattagaatggaattttgctgtgttgaaattttgaaaaaatttaaaattgtttggcacaactttttaaagcattatcttttcctaaatgcatagaaaactatgcaaatttaaaaaggcaattaagtctaggacacacaaagagagcgtcaaaaaagaaaacagtcatagtgtactactaagctcaaccgtgaacaatgtttacatagtaataatgtgcacattatttgatttaacgaatatagttatattgggaagtggtggtgacagtgagctagaagagctgcatcctgtctacaacaaccaggaggcaatacaaaaatgtccaaaattgatcaattaaaaaacagcaacataagcaaagtatttataatagaaatatggcactaaaaataatagtataattttcctagaggtttccccctttggaagtgggtccagagatacagaaaggtgagaaaggagactgatattttttgttgctagaattcaacgcttgttgatattttttaagctgtgatcatatattgcttgaaaagaataaaagcattttaaaagatatacagttaaacagaaaattaaataacagtacattttaaattataattactttgcatgtatttttctctcattctattgtgaatcttaaaggtcaaatatttctgtaaattatgatacatctcaaaatcagaaaagaacaaaaatactacaatacacagccatgcacttaactacccagatttaacatacttttacttcctcccctcaagtttacttaaacaccctcacaggagccaccgcattgtctgtgatgagcctcgcgggccactgttcttccccagctcctctcgggtggctgcggtggtgacgaccacgagggcagaggtgttttttctcaaaaaaaggtatctggctaggcacggtggctcacacctgtaatcccagcactttgggaggccaaggcaggtggatgacatgaggccaggagttcaagaccaacctggcccacatggtgaaaccccatctctactaaaaatataaaaattagctgaatgtggtggtgcgtgcctgtaatcccagctacttggcagactgaggcacaagaatcacttgaacccgggaggcagaggttgcagtgagcctagatcgcaccactgcactccagcttgggccatagagactgtctcaaaaaaaaaaaaaaaaaaaaaaatatataatatatatatattttttgtgggagagagagagagagagagagagaga

SEQ ID NO: 82699 - DNA, 757 bp, Homo sapiens
catatttatactttttgttttaaaagtattcattgtttatctaastttcaaatttaattaggcagcctgtatttttatttgctaaatctggcaatcctaaaccttctatagtctgaacaattcctgccccaaagtatccacccccagagatcagagatttttgcaaaacaaactctttaagtttattccatgaggcagcatcacatcagcagcattgtaagctagcggattgcccctagcaacaggcatggaagacgctctgctccatgaagccaaagactaggaggggagggaaaagcagagactggaatgggggtccagataactgggtcataaaacagaaccacgacagtgcaagaggatggagaagagatgggcaattctgaaaaaaaacaaaggagagaggataactaacaacccttgtctcttgagaattttacctgtttaaaggtgttcctgcagcctatagacactgctactgtgtttccctcattgtggccgtgggcctggaaaggtaaggtctgaaaaactggcatatcaagaaagccacaccaccaccaacttgtccacacccaagcaatcgtttctttaagaaggggttattaaaatgagtttgtgtcccagttgtctgaaatttaaaacctcattgtttttctaagacactaaacaggttttgttttatgttatttgctcttccttggcccgccccttcgataagcacagccaccaccaccgaggccttgcacacacctttgca

SEQ ID NO: 82700 - DNA, 568 bp, Homo sapiens
ccccctcccctcccctcccatggcccagtcccacatcacagtctcacacattatgtgacaccccaccctgcaggtcgatgctgtatttgtatacctcctcacacacagctgcacgtctggggtcaacagctgggcacaatggcacagagaagaggccatgtgggtcctgggagcaggcagggattctggggctggggtatctggagctagagcagggccccctaaacctgggcccccctcactcagatctcagggtgtgcagggtggatggattgcagggcaggtggggctgaggaacaagtaggagggcgtggggatgtccgggccagagatcaccagttctgagatgrgggagagggagggggtaagggagaggggaatcccaggggtgtaaggtgttaaaactggcaggaccggatggtgcccacggtgtggggagagggagagttggggatgcctgcttatttccgactggggtgagcaggggctgtagggcacaaggctgaggagcaatttgatgggaaaatgaaggtttggttttgaatgtgtccagtggaaagaggttgtg

SEQ ID NO: 82701 - DNA, 635 bp, Homo sapiens
ccttgactgggaccatgtatatggctataacarcaagcaattctctctttcctatggaatcactagatgggatgatctaagcttggagctgctaatggttatgattccccttccactttccttttcctgcctcatgaatgaatcccatggcaaagagaaagatgctactacacagtcagaagcaaaatgttgagaaacataaggagtatgagcgatccagtgatgtcattggagcccctgagtccagctgtgcctgaggctattccctggtgactcacccagctctacaagcaactaaatttcctcttaggttaaagcggctggactcttttggttggaagtcgaaggcccagctgatttggtagctcagtaaatattgcttttactccagtggtggccacttcatgtccgaccatggctcttgtcaccctaatctcaggtgtccaggggagcatctgtccctccctcttggctgagagctcctcaggggaggtacagggtctgacgtgcccagcatttacttccatctcagtgcctggggcatagaaggtgcccaggaaatgtctgatgattgagggagggagggagggagggagtgattgagtgttgacccaggtctgcccccttcctgtcct

SEQ ID NO: 82702 - DNA, 635 bp, Homo sapiens
ccttgactgggaccatgtatatggctataacaacaagcaattctctctttcctatggaatcactagatgggatgatctaagcttggagctgctaatggttatgattccccttccactttccttttcctgcctcatgaatgaatcccatggcaaagagaaagatgctactacacagtcagaagcaaaatgttgagaaacataaggagtatgagcgatccagtgatgtcattggagcccctgagtccagctgtgcctgaggctattccctggtgactcacccagctctacaagcaactaaatttcctcttaggttaaagcggctggactcttttggttggaagtcgaaggcccagctgatttggtagctcagtaaatattgcttttactccagtggtggccacttcatgtccraccatggctcttgtcaccctaatctcaggtgtccaggggagcatctgtccctccctcttggctgagagctcctcaggggaggtacagggtctgacgtgcccagcatttacttccatctcagtgcctggggcatagaaggtgcccaggaaatgtctgatgattgagggagggagggagggagggagtgattgagtgttgacccaggtctgcccccttcctgtcct

SEQ ID NO: 82703 - DNA, 764 bp, Homo sapiens
atatcaccatttaaaaagatgctccaaatttaacactcatttctgaatatttaaaaatagccgttttagaaaaccagaaacagtggtacgggagtggagcagggaagtgctggaaagggaagggcgtggtccctggctagggctccacccctgggcctgtgcccacggacctaggtaaggacagggatttctgttttcctgcccaaatgttgcatttcccaagaccaccctggcttgtcacgcccccatcccgtgcctgcaaagactcccgagaccctaatgggcttgggtacaagcagctggacgtggagargaacacaccaccggaagaagacacaagcggctggacgtagaggcacctacctgagtaagagcgcaccggcggatgctggcaggctggcagccatcgaggcccgaagcagattttggctggggcggacagaggagagccctgctgctgagcagccctaccccaggggaaaaccaacttcccactccatctctcccttctgtcttccccatctgctgagagctacttccgctcaataaaaccttgcgctgattgtccaggcccgggtgtaatccaattcttccggtacaccaaggaaagaaaccccgaaatacagaaaagccctctatccttgcaataaggcaagggatctaattgagctgataaacacaagcttcttacagatgactaaactaaaagagcacggggtaacacacacccacaggagactcaggagctataaacattcactcct

SEQ ID NO: 82704 - DNA, 1605 bp, Homo sapiens
ggttttatttgggtaacaggatatattaaggttgctagtgttatggttcacaaggcatttctcttatgatttcctatgaagagcttaagatactttattaaatctggagataattctcataactcagtgaaggtaggttaagtatattttaaaaaatcttagtagccgatctatctatatttcattttaatctcttttaccaacagctatcccagtgagctttcccaaattttaaaaattcaattaatgaataatcatttcaattaaagaaataaacaaaaytgaaagtgcaaagtaattcaacattaacacaagtattagggtcatgccatatctttcaacccaacttatgctcttagaacaaaattgattattaaggagaacttagtaatttgctaataaaaggattatcttactctatgatttgatatcaaattccagagcttattaaagtaacttaacctgtttcctctatctgtctttggctctagaatttgttttgatttgctttttaataattcttaccgttaaataagaaatatagaaagcttcataaaacaaatgggtaggttactaaattaccaaaaggtgtacactcttgtaactctcacttatgtcaggaagtaaacctcaccagcttcctcaggacagtgctgtctgcttcctcaatcacagctcttttctttccactaagaattgccctcctgacttttaattgcctccttattttattgtccaattgtgcttccatagacactgacgttcagttttgcttgttattttttaaagtatttttaaatttataggatccctctgcatcacttgtcttttctgaaatctgtttatgaaagagccagagtcatgtgtcctgtcaattttcacaggctggattttgctgattgcgttcctgtatagtttaacacgttcctctgccttttctgataattggtagtcatatctagagacttaaactcaggctagctttattttgtatttatgttattttttaggtaaatttacttcctacttggtgtgtgcccctcatgaggagtcataggagggattcaatgacaaattgtcacttttgataaagttagaagctcttaaagttcagtacttggatcttttttattccttaggatttgcaaaatgttgatactatattctgtctgtcattcttcttttatctgttcattgaaatatttctgtaaggagccacattccttcctctactctttggtcacccaattctacagatcatataagaaaagcagaataaatgcttgattgtttccttttatttatacccagtttatgttttgaagctgtgttgactgtaattctcgtatactttggaacacaagatctataattcatctttaaataccacagctgtgcttttcaaaggagaaatatgcttattttaattttggccacatatctgagttattcaaaatttgcttttgagatattacactctgaactatataatgagccaatgctgtgtaaactccacttctttcaaaattccaccttcaccagatgtgtagtcagattgccactcactttaattcattttccttatagatgttctactgtgctttg

SEQ ID NO: 82705 - DNA, 718 bp, Homo sapiens
ttaatgccaagcttttttttaggtggcataaatggattttcagaattaaaaaaaaaacaactttactagatttaattagtggtgtgctattggagtttcatgtgtttcatccatgtaacaatctactaatctactattgtaggaataactatggataaactatgtgagtatttgaggatttttgctttgtttgctttgctttgttttgattttttcccaagttgaaattcaacaatggtatatccccataggatctagtaatgttactgatcagagtcttatacagagagaaaaggctaatgtacacaaaaatgtgtccaaagttatcattgcaggacattttgtgaaaatggattttctgatgtggaactggtcaatgagctctatgaaacagagagacaaagcatgcttaaagctaaaggatgtccagcctctcctaaaagagaaagtacagcatttatcttatttttaaagtttcagctgtgaattagtacacamctttgagctcacatctctcttcccctgcctgtgggatgatgtactatggggaaaggagagagcttctgcaataccactattttccaaaacagatgcactcatgttttaacacctattcaaacaataccctttataggtttcatcctcaataaaacatttgcactctaaaactcaaaatgaattaaagagagaaagaaacaaaaatgatagtctttagaac

SEQ ID NO: 82706 - DNA, 702 bp, Homo sapiens
aaagataaaagttgcatcaatgggacagaatagtccagacgatgacccacattttgttcctttgcacaaccttgtggttcccttccagggtggctccgcactcagccctgtgatcacctgagtaatgggaagtcagtgagtgcagtgcctgcagagggagcrtgcttgccaatcaccatcacccacttttgcacttgtcgcagaggatgtgcccaagccaacctgagaaagatgaaagacacatggctcagacactccattaccccatcccagggccattaacctgccaggcatgtgagtgagcctgtctaaaacagctcagctgagcctcgtctaaattgaagacttgcaaagtcatgggtgaaatgagaatttattatgttaagttttttgttaatgatggttttgaggtcatgtgttaatgcggcatcattttgctgtaggtaagtgatgtccttataattaaatttgtaagtgcttatcaatgtatttgtacttacaatctatctcaaaatctcacctcaaagaaattctcatttctttactttaaaaggttattagtattattgaggtattttggtgtatggggggtagtagttatttggaaagccttgtcattcatattatgggtttgattttttcccgttggtagcacagcagtccacttttctagtactaaagcttgtgttgctgctggatccc

SEQ ID NO: 82707 - DNA, 737 bp, Homo sapiens
atgagcatatgaatatatgtccgacaatatttgtcacctagcaaagtaaaacacagtaaaaaggagctacccaggccggcaccgtggctcatgcctgttatcctagcactttgggaggtggaggttgcagcgagccaagactgcaacactgcactacagcctgcgcgatgggagcaagactccatctcaaaaaaaaaaggaggtacctacgttggtggagagaagagagtgttgtgataaagatactgttaaatttccaagaggcaactgcagctaagattattcttgaatattcgaggcttggacagaagcagctcaaagccccatagaggtttttgctayagcaggcaaatttggcttctagtcatgtcacatgcatataggaaacagaaaaaccaagtatttaaacagctttttaattaccctccttccaaaaaccaggagaacactaaaggtatacacattcttgttctgtgtgtacaaaaatatactatctattcctaatgtcaatgaatactatagtgacatttaattatttttctactatattcactaacttcttgctggtatacagacttcataattgttctacagtcctatttgaaacagacaatatgatatatgactggtattaaaataataggacacaattattatagctataatagtctttctagaatatttttcaagagaatcacagaaaaatctacttgatttttaaagaaagtaaaacaatt

SEQ ID NO: 82708 - DNA, 744 bp, Homo sapiens
agtagttcaagatcagccctggcaacatactgagactctctaccaaaaaaaaaaaaattagctgagcatggtgatgcatgcctatagtcctagctactcaggagcctgaggtgggaggatcacttgaacttggaaggtcaatgctgccgcggtgagccgtgagctgtgagccatgagccatggttgtgccactccagcctgggtgacagagcaagaccctgcctcaaaaaaaaaagaaaaatgactcatcctgttgcgttaacattaattttatccatgtaattatttttaaatattttatactattcaattaaattgatatacagatwtttcttaggtggtattattattatttttaaagggacagagtgcagtggtgtgatgagagttcactgtagcttcaaactcctaggctcaagtggtcctctgacctaagcctctcaagtagcttgggctaaagacatgttccaccatgcctggctaatttttttttctaaagagatggggttttgctatgttccccatgctgattttaaactcctggcctcaagcgatccttccaccttggactccaaaggtgctaggattacaggcacgagccaccattccctgctggtgttactcctctgttggacatttgtttatttacttaacttttagagacaaggtctctgtcgccgcggctggagtgcagtgcatagttcactggaaccttaaactcctgggctcaagcagtcttcccat

SEQ ID NO: 82709 - DNA, 435 bp, Homo sapiens
  misc_feature (1)...(435): n = A,T,C or G
cttaaagccaggagtttaagaccagcctggacaacatagtgagatcctgtctttaaaaaaaaaaaaaaacataaaaattaaaaaattagctaggcatgctggtgtatgcctgtagtcctacctactggtgaaactgaagcaggaggattttttgcttgaaccctggaggatgagtaagctatgattgtgccactgtactccagactgggtgacagagcgagcccgtctccaaatgaataaaataaatgggtacattttaaaaartcattatatgtaatatattgttatattgcataaataccgaggcaattacttgaaaatatatgaggatnnnnnnnnnnnnnnnnnnnnnnnnnnnnnnnnnnnnnnnnnnnnnnnnnnnnnnnnnnnnnnnnnnnnnnnnnnnnnnnnnnnnnnnnnnnnnnnnnnnnatat

SEQ ID NO: 82710 - DNA, 2672 bp, Homo sapiens
tatttgtagcttagtattagataccgtttcgaagagaaaaaaatactgcccttcctggaaagctcttacggctgccatatgaattgttgctcaagcctacatatttgaaagccaatgaaggtaagagatcttacttcccatttctttgaagagaggaagcaggaaccatgaagataatgggctgtttgatgaattggtgatccacaatagaatgaaggtggcccccaatatttccaatgatgtcttttctttgcctatttagatagacttctggaaacatcatttgacattttgttttgtatttaatatttttaaataaatttctgattataggaatcattaatgttccctcttccacacatgtgagcatgcacacatgtgcttaagcatggacacacatacacattccaaccaccagaactgtgcaatattaggaagtctttcccttctctgatttcataacattagatgtagttgtaaatgcattaaacaaggaaaagagctaagaatgcatatgttggtgtgacttttgtattcatcatgggatctggtggagctgaatgcctcgccaaattaatttgccactcatgagactcaaattctgacaaagcctacagggttctagtggatgtatttgccagtaaatcacacgtgccaaggaaaccacagtgacctgtgtcaatggcatgggctgttctcagtaggcttggtcgttgaccccaggccacccatcttctctgagtgcctacatatatctctctttgagaatttcagtgacctactgttcactcaagttcattgaatttacagtgatcactcctaaccttaaacatagaaggcaaagaaaacaaatcacaccattttttttgaggtttatgctctcccctggattaggaaaatttcgaaaattattttctttagcattctaagatgcagtgaaaatcaactaagatgctaaatatcaaaattgttaagggctaccacttgcataaatactgtcaaatattgaaaatgaaagtaagccacataatgtatacatacggatgtctgaatcgttatatacatattacttatttatatatatgtaaattaggtagatgaatatgtaagattgtagctgaacaaaataggacatggtaccaaatgaggctaaggtggcagattcaattcctgtataacctacctagttaattctgttctttattcatagattgaacccctgattcttagtcagatcttgtataatgtttataatgttgcagctggtccaaaaaggcagtgtgaatgaatcagtgcaactcgccccactattgggaaaacacgcaaatctatcagggtatatccataatatatctgttcttttgagggcaagtgtaattttactctcaaattcaatgtgtgattttgatattactatgtgagtcttgttaaaatatgtaaatagggcatttgctaaactgtctttattcagtgttcttttaagtgatcataaaattttaatgactattattactgatactctaataagtacttcaatgaattttttgatggttaaatataatttgtatgttactctagaatctcaatatggggattttaatattgaagcattaccgtaaaatattcatgccatcaaccttccatattgctgtaccatagaataaatgcatgttgatttgaacttaaatctttctgacatccaatggtttgggtatcacaaaatcttgtaaagcattagccattcagctgagggaaagtgacttgcattttcagagtatttataaattgatgttaaaaaacattttattctagtcaagcaggctcttgctttacagtctaattttgracatatatgtgggttacttaaatagagagataacattaatctttcaggagcaacaagtgctgggtggggttaaggccaagagattagcatttctgttatcaacatgctattgttggacttaagtaccacaatatatgatcattgcagaatgttcaaataatttagattcctttgaactctgctgtatgatactacatttcctcacatcgtaagtccccatcctcaacttttttttttttttctaaaggccaagcagcaattagtaggaaatgttacatctaatatgcctatgatttgcttgaggccaaacaaagcagctcatgatactgcgttgctgctgctatttatgtagacattaggcacaggagcaggtttttaacaataggactgcttgggctttatgttacacatcaagaaacattttgtttatgctttataaatagtgtcacctatttataaccttcagccacgattcttttaatggcattctcaagtggcgtttggtttggttaacatcagccactcatgccttctgttctgttgcttgagaagttaaatgggaatatgtgagttttagctggccaatctaataaaactctgggaaatcgttagggtaaaggaagttaagctataattgacatcatataacaaacattgaaaatgttgaaaagaaacagattggatgagttttatattatgaaaatgtcatctgacagatgcagtacagtagtttcatttgaaaagatctctacatacactgagtcttctattccattaaaagaagaaaaaaccctgaggtgacaggagattcctatgggggattagc

SEQ ID NO: 82711 - DNA, 2672 bp, Homo sapiens
tatttgtagcttagtattagataccgtttcgaagagaaaaaaatactgcccttcctggaaagctcttacggctgccatatgaattgttgctcaagcctacatatttgaaagccaatgaaggtaagagatcttacttcccatttctttgaagagaggaagcaggaaccatgaagataatgggctgtttgatgaattggtgatccacaatagaatgaaggtggcccccaatatttccaatgatgtcttttctttgcctatttagatagacttctggaaacatcatttgacattttgttttgtatttaatatttttaaataaatttctgattataggaatcattaatgttccctcttccacacatgtgagcatgcacacatgtgcttaagcatggacacacatacacattccaaccaccagaactgtgcaatattaggaagtctttcccttctctgatttcataacattagatgtagttgtaaatgcattaaacaaggaaaagagctaagaatgcatatgttggtgtgacttttgtattcatcatgggatctggtggagctgaatgcctcgccaaattaatttgccactcatgagactcaaattctgacaaagcctacagggttctagtggatgtatttgccagtaaatcacacgtgccaaggaaaccacagtgacctgtgtcaatggcatgggctgttctcagtaggcttggtcgttgaccccaggccacccatcttctctgagtgcctacatatatctctctttgagaatttcagtgacctactgttcactcaagttcattgaatttacagtgatcactcctaaccttaaacatagaaggcaaagaaaacaaatcacaccattttttttgaggtttatgctctcccctggattaggaaaatttcgaaaattattttctttagcattctaagatgcagtgaaaatcaactaagatgctaaatatcaaaattgttaagggctaccacttgcataaatactgtcaaatattgaaaatgaaagtaagccacataatgtatacatacggatgtctgaatcgttatatacatattacttatttatatatatgtaaattaggtagatgaatatgtaagattgtagctgaacaaaataggacatggtaccaaatgaggctaaggtggcagattcaattcctgtataacctacctagttaattctgttctttattcatagattgaacccctgattcttagtcagatcttgtataatgtttataatgttgcagctggtccaaaaaggcagtgtgaatgaatcagtgcaactcgccccactattgggaaaacacgcaaatctatcagggtatatccataatatatctgttcttttgagggcaagtgtaattttactctcaaattcaatgtgtgattttgatattactatgtgagtcttgttaaaatatgtaaatagggcatttgctaaactgtctttattcagtgttcttttaagtgatcataaaattttaatgactattattactgatactctaataagtacttcaatgaattttttgatggttaaatataatttgtatgttactctagaatctcaatatggggattttaatattgaagcattaccgtaaaatattcatgccatcaaccttccatattgctgtaccatagaataaatgcatgttgatttgaacttaaatctttctgacatccaatggtttgggtatcacaaaatcttgtaaagcattagccattcagctgagggaaagtgacttgcattttcagagtatttataaattgatgttaaaaaacattttattctagtcaagcaggctcttgctttacagtctaattttggacatatatgtgggttacttaaatagagagataacattaatctttcaggagcaacaagtgctgggtggggttaaggccaagagattagcatttctgttatcaacatgctattgttggacttaagtaccacaatatatgatcattgcagaatgttcaaataatttagattcctttgaactctgctgtatgatactacatttcctcayatcgtaagtccccatcctcaacttttttttttttttctaaaggccaagcagcaattagtaggaaatgttacatctaatatgcctatgatttgcttgaggccaaacaaagcagctcatgatactgcgttgctgctgctatttatgtagacattaggcacaggagcaggtttttaacaataggactgcttgggctttatgttacacatcaagaaacattttgtttatgctttataaatagtgtcacctatttataaccttcagccacgattcttttaatggcattctcaagtggcgtttggtttggttaacatcagccactcatgccttctgttctgttgcttgagaagttaaatgggaatatgtgagttttagctggccaatctaataaaactctgggaaatcgttagggtaaaggaagttaagctataattgacatcatataacaaacattgaaaatgttgaaaagaaacagattggatgagttttatattatgaaaatgtcatctgacagatgcagtacagtagtttcatttgaaaagatctctacatacactgagtcttctattccattaaaagaagaaaaaaccctgaggtgacaggagattcctatgggggattagc

SEQ ID NO: 82712 - DNA, 459 bp, Homo sapiens
atcccagcaagcttctaattttgttttatcatcttaatattcatgtttaattgttgcctcttagaggcttaccactaaattttggattacaaatacatggaatttcaacatgtactatcacattttttaatgtgtttctggtgcttcactacgaaagctatgattacatttgctgtgtagtctctcagtctgttcactggaaaaatagtatccaccatcagatgaacagggttgaaacagtattctacactttgcaggattttatttatgtttaacacgataatgacaagtagaagttactaacatgtmtttttaagagatagttcagttaaaaacatgaagagattataaaatcttatttttttgcatttatgttcaataatgctgaaaatgcaaaaaaacttagagatttgtttcaaatattgaatagaaacttttgataacttgaattcatatgtg

SEQ ID NO: 82713 - DNA, 845 bp, Homo sapiens
tcctcccccaacttttcttttagaggtggaaaaagcttttttaatcaagcatttaagcatatatgaattatactaattatgccagcttttatataacaattttctcacaaaaccacgaggctttctctctttaacttatcaagtagcttaagaataactaaaaagtcagaggtaacagctccattaacaaaaaagaagagtgccagaaaaaaaaaatatatgacctgggccaggtctataggatattgatgttttgataatcctcaggtaagtttcaggaaatttcaggcttctaaaagattataatatgtggtgaactgaatgactgagctcatcctgtcactttatcgttcaaaagagcttagcaattaccatgaacttgccttaaaatgataacatattttaggacatagtacatgtagaaatcctcagcactcaggaattgttttcaaaagtattgggaaatctttctgtgtgtaaaataattcaaaagttccaattttaatcttttcaaaatgcagttcaactcaggtcatcttcagctaaaactttcaatagcacttcactgccttcagaataaaatttgttttccttagcataaaattcaaggtttttcatgatggggtccttgcagatctttccagcctcaagtcacatcttcttcccatgctccyccttctaagtctccatgtgactctgtaggagaggactatcatagccctcataattcagttatagttgtcaaatcacctccctgaatcacccaccacacagtgaagatgttaaaagcagaatttgtgctgtattcatgtgtgtatcattagcgcacagggtctgacatagag

SEQ ID NO: 82714 - DNA, 3044 bp, Homo sapiens
tgttaacaatctctgaaatatagtaacaagcattcagtataagacagctttaattattacttacattagccaccacttttacttctttgtattgtgcttcatagaaaattccagcattttccagtgcttctgttaatgagggtccgtttttcacctgcttatctaatccattcacaaattcttccagcttggagcttgcctcttcaaattctttggagaacttcttcccacctgttttatctaaaatgacatgggaaatattcatttcaggataaaataaaaaataaaaaaatttagtcttttgacttttgaagaaaacctctctttgtgaacatactcttgctgccttactgtgcagtactctaatactcttagtttctttctttttttttttttttgagacggagtctcactctgtcgcccaggctagagtgcagtggcgcgatctcagctgactgcaagctccgcttcccgggttcacgccactctcctgcctcagcctcccgagtggctgggactacaggcgcctgccaccacgcccagctaattttttgtatttttagcggagatggggtttcactgtgttagccaggatggtctcgagctcctgacctcgtgatccgcctgcctgggcctcccaaagtgctgggattacagttgtgagccaccgtgcccggcctcacaattttatcttaaacaagtttctccaaatcacaaaatcacaaaacagattattaaaattctttacagaacagactcatgtgaacctgccagagtgaaggcacttgtaattaaggtaaagaaaagaaagttcaactaaaagagtttgttgattaattattttcttcacaaattggattccacactgctacttacttaggaataacagaatgaagctcaactgtattcgcttataccataacttttgcattacagaaggtagtaagatgttatctcttaaacgagaaaagtaacgttcagaaaagtaaaaataaagtgacctctgtatgcatcacaataaaagttcttctttcctatctgaaaaagattcgtgataattcagtatatctacttctttcccagtgactggcagaatatggctttggatatgagtataaagtttggctttgcctcttatcagttgtgtaacttgggtaagctactaatctccttacaagacctcagatctctcatgtgataaaatagagatttttagtatgttttctgttatgaggattgaattaggtaatatatgttaaattgtttgtttttaaaaaatttttctttagagacggtctcttctgtcacccaggctggagtgcagtgacatgatgagagttcactacagcctcctggggtcaaacaatctgcttgcctcagcctcccaagcagctaggactacaggtgtgtgccaccaagctcattaatgttttaatttttttgtagagacagggtctcactatgttgcccaggctagtctcaaactcttggtctcaagcagtcctcctgccctggcttcccaaagtgctgagattacaggcactgtgtctggtctgttaaatttaaagtacggcacaggaataaaattggtgccaaaattaatagctagtagtcatttacttattatttcaaaaatattcatcaaatatctattatgtgccaagcattgttctaggtgccagggtatagcaatgaacaaatcaatataatttctgccttcatgaggcttacattataataaattattagtatgatttacaatttacaatgcaaggaaactagatggtctaactagattttatgaggcattagagtgacttcattaaagagcatacccataccaattaaccatacatgtgaaatacaactgtctatatataacctagtacaccaagaaagtactagaaatgagaacaacagaatttacttatgaaatttatatgcatgaaataactacctgggaaaccagaggtgccacaactgctttctacccaaggatctccttatgaggtaaaccagtatgattactggaaaaatgacacatatggaaagaaaatctgacttactctaaaaggatgtaagcattaccttttaagcatttgagagtttctgtgctgcacacatccaccctcatagttgacaactgcttttccttcagttctatctgatcttctgagcgcttgtatagcaacagctcttcaattagggcctgagactaaacacagaccagagtcatatttcatttacaagatcattcaattattctcattctctctctcctcattttgtaaaacaaaacaaaacaaaacaaaacaaacaccctaaagcttaacaaaaccctgggaggaaaaaaacttttcactttttctcatggtgacagatattaatgatcaattatcatgtcaaaaccatgtttagttatagacttcatttatttatttattttttgaaatggagtctcgctctgtcgcccaggttggagtgcagtggcacgatctcggctcactgcaagctccgcctcccgggttcatgccattctcctgcctcagcctcctgagtagctgggactacaggcgcccgccaccacgcccagctaatttttgttttttttttttttaatttttagtagagacggggtttcaccgtattagccaggatggtctcgatctcctgacctcgtgatccgcccacctcggcctcccaaagtgctgggattacaggcgtgagccaccgcgcccagcctagttacagactttaaaagatccttttccttcattacacaaagctaatttatggatacagaattaagactaaaacagacaaaggtccatttatatagcctctctaaattttaattacataaacatagccttctgttattctaagcaaattctaatttagaaagagtttcacaggaaaataaactctcttgctggcataaattgaatatgsaactcagctgataatagatatactggaagaaggttatttctaccattaggggaacagataaaacgccaagcaatctaatcccaatctgggtt

SEQ ID NO: 82715 - DNA, 646 bp, Homo sapiens
gtggtggctcaagcctgtaatcttagcactttgggaggccaaggcaagaagatcactcgaggccaggaatcttgccctatctctacaaaaaattaaaaaattagcagtacatggtggtgtgtgccctgtagtcccagctattcaggaggctgagatgggaggatttcttgggaccaggaggtcgaggctataatgagctgtgatcacaccattgttctccagcctgggctayagagcgataccctgtgtctataaaatgaaaaaaaaaaaagttattctaattccttactctagaataaaaatattacagtgaggctgtcactgtgcaagacatttttggagttgccttcagtcataaaatgtaccaaaataatgagttctattaatatttaaagttcgttttagaatagcagttgcattgcccatcttcatcaccctcttacaccatttattagaccattgccaaaattgtaattatactgtcaaaggatattttccactatttaaatgaatatcattaaaaaagaaggtcttagactttagaggaaaactttcttctttttttagaggcggggtcttactctgtcgcacaggctggagtgcagtggcgtcacagctcatcacaaccttgaactcctgggctcaa

SEQ ID NO: 82716 - DNA, 629 bp, Homo sapiens
aggctgtcctgttagttttctgtgcctctgtttcctcatgcatgtaatagggaataataagagtccctgttacataaggctgtggtgagcattaaatgaataaatatatagaaagtgcttagaagagtgcctggcacactgtaatggctcaaccagtttcctgtcactttgaggtatctctatagttaccctatagttacccctgtaattaagtacttatcagagaaatctaattcacaatttactttacttttctgcattgtaagatccttagaattgggacaactctccagggctccagctcttggtatgcagagggcatttatgaaatttttgttaaatacttgactaaatcagtgaatgaatgaacttctgttcacagcattgatcgcttctcaccttgcattatgagagtggattttatcttctstatttgatttactgtaagcttactgaggcagcaccacagcaccgtcatcttggcatatcccatctcctccaaccaacactgtctgggaacattttattcctgtaattcaactaataccagttgaactaaagcctcctctctgggaataggctttagacttctcctgcttttcatctgccacgtcctgtcatcctcttct

SEQ ID NO: 82717 - DNA, 558 bp, Homo sapiens
acggtgacatataaggcccccggaggctagaggagttcccaggggtgctggtgttggcagggcctttaggctggaaggctaacaggctaggagcacctgagctggggatctttgcagaagsggctggcagagctcagcctgctgtggctaagccctcaacgtatctgtcaaactctagagctgagatgtccactggggtgcagtagctgaggtcagtaactcctatagggtctgacagtgtgtggtgtcgcattctcgaggggagggagagcacaccccaagttctcaccacagcaaagcaggccactcgcatagcaagccaggtaagcactgggagtcacttcaaagctccataccatgtgagaaccagggatggctttgagaaagaactaggtttctagccaggctctgaggactagccacaatccaggctctcagagaagcaagatgactgtgaccccagcaacaacgaagcacggccctggtcaggcattcagatgccaggaaagagaagagggggtctggaaaggaaggactgacccgaggaggagaggactg

SEQ ID NO: 82718 - DNA, 558 bp, Homo sapiens
acggtgacatataaggcccccggaggctagaggagttcccaggggtgctggtgttggcagggcctttaggctggaaggctaacaggctaggagcacctgagctggggatctttgcagaaggggctggcagagctcagcctgctgtggctaagccctcaacgtatctgtcaaactctagagctgagatgtccactggggtgcagtagctgaggtcagtaactcctatagggtctgacagtgtgtggtgtcgcattctcgaggggagggagagcacaccccaagttctcaccacagcaaagcaggccactcgcatagcaagccaggtaagcactgggagtcacttcaaagctccataccakgtgagaaccagggatggctttgagaaagaactaggtttctagccaggctctgaggactagccacaatccaggctctcagagaagcaagatgactgtgaccccagcaacaacgaagcacggccctggtcaggcattcagatgccaggaaagagaagagggggtctggaaaggaaggactgacccgaggaggagaggactg

SEQ ID NO: 82719 - DNA, 842 bp, Homo sapiens
  misc_feature (1)...(842): n = A,T,C or G
aggatcctgtctcccatctgcctctccattctaaacttctgtgcctttgcatgtgctgttctaagtgcctagaatgatgatgataatgatgatattgatgataacataactttttgagcgcttagaatgtgttaggtgctgtgatgggcattattttcatgaactgctcagcaatgccgtgattaataccttttaaaattaataaatgccttaataaagtaaaggtattatcgttaaaattantagactttatgttttagaacatttttagatttatagaaaaattgagatgatattacagacagttcccatatatacctcctctaattttcctatgagtaataccttatgttactatttgttacgatttgttataattcttggtagatacttyccttgacacattattgttattaataactaaattccatagtttatttagattgtttttacctaatatcttttacatttagtagttcgtctgttttttttttttgagacagagtttcactcttgttgcccaggctggagtgcagtggcccaatctcggctcactgcaacttccacctctggagttcaagccattcttctgcctcagactcctgagtagctgagactacaggcacgtgccacgcctggctaatttttgtatttttagtagagatggggtttcaccacgttggtcaggctggtcttaaagtctgacctggtgatcctcccgcctcggcctcccaaagtgctggaattacaggcataagccactgcacccggccgtgtctttaggctcctctctggctgtgatggtttctcggactttccttgatttggatgaccttgatagt

SEQ ID NO: 82720 - DNA, 520 bp, Homo sapiens
tcgcagcacatctggacccagctccctttcaagactggcccggggactgccagaggaaaagggcagaagtgccataatgaaagggctgacaattaccttccctcttaattaccatttgcagtaattaaataataatagccttttgttggccctgagaattcaaagcagcccacatcataacatctggttcggccttttgccaggaaytgaatgcccatagggacatgatggggaaattgaggcagagggggataaggctagccattcttaagtcacacagaaatcagaacgccagcgttagggcaaggtccttaaagaaacgactccaagtggaagatagccgcagccctgcattttgggtgctggctcaaaccattcacacgctgtgtggtttgggtggttcactcccctctttgtgcctcagttactctatatgtaaaataaaatgaagtcaatacttgacctgccctgagcatatttttctagacttgactttgttcatacatagtaatgggaaatt

SEQ ID NO: 82721 - DNA, 520 bp, Homo sapiens
tcgcagcacatctggacccagctccctttcaagactggcccggggactgccagaggaaaagggcagaagtgccataatgaaagggctgacaattaccttccctcttaattaccatttgcagtaattaaataataatagccttttgttggccctgagaattcaaagcagcccacatcataacatctggttcggccttttgccaggaattgaatgcccatagggacawgatggggaaattgaggcagagggggataaggctagccattcttaagtcacacagaaatcagaacgccagcgttagggcaaggtccttaaagaaacgactccaagtggaagatagccgcagccctgcattttgggtgctggctcaaaccattcacacgctgtgtggtttgggtggttcactcccctctttgtgcctcagttactctatatgtaaaataaaatgaagtcaatacttgacctgccctgagcatatttttctagacttgactttgttcatacatagtaatgggaaatt

SEQ ID NO: 82722 - DNA, 520 bp, Homo sapiens
tcgcagcacatctggacccagctccctttcaagactggcccggggactgccagaggaaaagggcagaagtgccataatgaaagggctgacaattaccttccctcttaattaccatttgcagtaattaaataataatagccttttgttggccctgagaattcaaagcagcccacatcataacatctggttcggccttttgccaggaattgaatgcccatagggacatgatggggaaattgaggcagagggggataaggctagccattcttaagtcacacagaaatcagaacgccagcgttagggcaaggtccttaaagaaacgactccaagtggaagatagccgcagccctgcattttgggtgctggctcaaaccattcacacgctgtgtggtttgggtggttcactcccctctttgtgcctcagttactctatatgtaaaataaaatgaagtcaatacttgacctgccctgagcatatttttctagacttkactttgttcatacatagtaatgggaaatt

SEQ ID NO: 82723 - DNA, 605 bp, Homo sapiens
agtgccaatttccatggtgtaaatgttcccactcaagtggatttcaagcyatcagtgtgaagtagtagttggacttggcattgggatgagatgcacacaatcagctctcaggagccagtgcaacctgccgcagcacacccacctggagtcctttcctagagacttgtcttacatgagagagaaacgcaccccatctgactgcagctacttcagccagggctctgttactaacagctgaaagtcattcctaacattcgtgtgcagcttgagcggatacagtcctcggagcagaggaatcttgtttgcctaagagagtagaaagaccgctcctcaggtgcctctgacagccttgggctatccagcctgggacacagtgtggctgagaggcagatgttgaggagatgggccaagtgctacaattctccccctggtggcccccatgggtccacagaagacccagccacccaggcagctcttcaggatttctgagaaactgccttggagtctgccttcctcacattgctcagggcacttgagaaacctggacatttcctccctgattttgcagtcagggaataaggacagcgggcttgctccttcctcct

SEQ ID NO: 82724 - DNA, 786 bp, Homo sapiens
agtccaggtttttaaagggaattttggtcaagtctggttgaatagaataaacttgctcaatactttataagcaatcatgtatagatttagttagcaggatttagagtagaaacagctctcagagtaacactgggattatgcaggragatggcctgatatctattcagtcttctagaattaagtcagtagatccacttctgctctgacaaagagcatacatagtgtggggtgtgtactgtgctaggttaacccaaagtgaactcttctgcctcctggagaagatcacaagtggtaccaatggctcagaggcaagaagtccaacccagttttggacaatgtccagctgttttgaaaagtaggctacaggcctcatgatattccccaagtcttgggttagtactcctaaactcaccccttctctctcatatatgaacaaattaaatggctttcttagttcagggggtaccagtagccagagccattaacaatttttatttaatggttagaaaggccttttgacattccttggtccattccagaagtcaactgtctggtcttagggctttatagggagattttgctataagcccaaaataagaaaatcaaataaggcaacatccagccatacctaaaaacccctcacagctgctgccatgtcctgagtctggccaccctgacaagagcttctctgcagtccgaaagcagattgctctgctcctgagaaagttcaaatccaagatatgtaactgagggtttcaagatttgtgcctttttcttggatacctt

SEQ ID NO: 82725 - DNA, 1124 bp, Homo sapiens
agtcccagctacttgggaggctgaggcaggagaatggcgtgaactcaggaggcggagttcgcagtgagctgagatcgcatcactcccctccagccagggtgacagagcgagactccgtctcaaaaaaaaaaaaaaaaaaaaaagaatgaggtaacttcttaatagttttcatattttgtagactataaaaagtcaaatcaagaataatttttggtatgtaatggttcccaaaattgttgaaccaattttacttcagaataattttcttccgatgggactttgagaatgggtatttctgggtcttggtatattcactcaccaccaaaaggcagcaataaaactggataaaattataaaaataatctctagaaattggccaaagagcatactgttgggaaatatttattccagaaagtccacataaatctcagtaaaaaagagtggatgcttttatccacctttgtctcacagctcagttctgtggctcagaagttgaaccctgggtaggcaagcagtctgtgtggactggaaactctgctgctccactggaggggagtgactttatagcgtggaaaattccctgcccaaggatcctattgaatataaagaggttacagtgggaagcaagtagagaagattagtatgtgtagaggatattagctggggcaagcaacmaagtggccagtcagtcaaaaatttaatggcaaaatttggagaaagggacagcctaaggacttccactaagatgaaacttactgatggtggttcagaagtcaatgggaatgcatatagctatgttcaatcaagaaaccagagaagtctctgtgagctactagtctccactattgattctagtctatctaaaccttatcatttccaattaaactacctaaattatctaaagtgtcacactctagaccatttcaacaatctttttagctcacttactctactaaatttgttccaaccattcaatgacactgatgctttttcactattcttttcccttcactttctctcttcccaccatacccaaattagattcaatggttcatcactgtaagtcaatcccttgcacacactctcctgcccattcctttctttctatctgtaatccaagtttt

SEQ ID NO: 82726 - DNA, 1421 bp, Homo sapiens
gcatgcctatagtcctagctactcaggagcctgaggtgggaggatcacttgaacttggaaggtcaatgctgccgcggtgagccgtgagctgtgagccatgagccatggttgtgccactccagcctgggtgacagagcaagaccctgcctcaaaaaaaaaagaaaaatgactcatcctgttgcgttaacattaattttatccatgtaattatttttaaatattttatactattcaattaaattgatatacagatwtttcttaggtggtattattattatttttaaagggacagagtgcagtggtgtgatgagagttcactgtagcttcaaactcctaggctcaagtggtcctctgacctaagcctctcaagtagcttgggctaaagacatgttccaccatgcctggctaatttttttttctaaagagatggggttttgctatgttccccatgctgattttaaactcctggcctcaagcgatccttccaccttggactccaaaggtgctaggattacaggcacgagccaccattccctgctggtgttactcctctgttggacatttgtttatttacttaacttttagagacaaggtctctgtcgccgcggctggagtgcagtgcatagttcactggaaccttaaactcctgggctcaagcagtcttcccatctcagcctcccaagtggttaggactacaggcattcaccaccacacctggctaatttatgagacatttagactcttcccttttttggagggaggaaataagtaaatctatagttttgtggggttttttcccccttctatttaggatgtttccttagggtagacagccagaaattagaacttctgggtcaaagaacatttaaaaaaatttttatgcatgttaaaatgttttattttctaaaaatattctatcattttgcattttcacaagtgttttgtgagctgtacaaatgttcttttcaccacatttttaaaaagtcacacgaaaggctgggcgtggtggctcacgcctgtaatcccagcactttgggaggccaaggcaggctgatcacgaggtctggagttcgagaccagcctgaccaacatggtgaaaccccgtctctacaagtacaaaaattagttggatgtgattgtgcgcatctgtaatcccagctacttggggggctgagacaggagaattgcttgaacctgggaggcagagcttgtggtaagccgagatcacgccactgcactccagcctgggcgacagagtttggctctgtttcaaaaaaaacaaaaaacaaaaaaaaaaaaaacacacaaaatataattgttaattgtagctagtttgtttcctatttcaatatccgctgccccccgccccccgccaccttttttttttccgtgtttttctgctccatatattcaggtaaatg

SEQ ID NO: 82727 - DNA, 580 bp, Homo sapiens
ttccccaggagaaacgaaagcttagtgagtttaggcaacttgcccgtgaagacaaaactactggagggtgaggaggtgatcccagtgtcttcttgcccacacacctgatgaggacaaggccataccctgacttactggaccgtggcctggtgtcagaagtcctaagtgtgattctttctcctaagaatttgaattggaaatacacagaaacaataaagccttgttagcaggggctacagccgcaaggatgctgcaagrcagaatctagctatgaggtttcatggcctgaaattattaggtagaactgtcttaagcattagaaccttttgttcagatgtatgaaattcctttttttttttttttttttggtttttttttgagacaaagtctcactttgtcacctaggctggagtgcagtggcaccacctctgcccactgtagcctcaacctcctgggctcaagcaatcctcccacctcagcctcccgagtagctgggactacaggtgcacactacgacccctagctaatttttttgcactttttgtaggatggggttttgccgtgttgcccaggctggtct

SEQ ID NO: 82728 - DNA, 1796 bp, Homo sapiens
gatccttgactgacttcatacagtagaattccccctcctctcactgattcccctgggatatcaagaataagcacaatatatacagtttcattctagacattttgtttaaacaacagggtctacatcatagctcactgcagcctcaaactcctgagctcatgcaatcctcctgcctcagcctcccaaataggtaggactacagatgtgtgccgtcatacccagctaatttttaaattttttttataaacatggggtcttgctatgttacccaggctggtctcaaacttctggcctaaagcaatcctcacaccttggcctcccaaagcacacaggtgtgagccaccatgcccagcctggaattgtttattacttcagtataaccaagtctattctaactatatcaatgacaataaagtatcctttaaacttacttatttaatttatatgaggtgatttttggaaatattttaagcaaataataaatagtttggtttactatatgagccagaaattccactttttggaatataccccaaataattgaaatcagggatttaaacagatatatgtacaatcatgtacatagatcatcatttatattagccaaaggtagcaattacccagatgtctatgatggatgaatggatgaacaaaatgtggcatatacgtaacaacaaaatagtattcagcctttaaaaggaaattctgatacatgctaccatataaatgaaacttgaaataagccagacacaaaagaaaaaaacatattgtatgattctgcttatatgaggtaccaagaatagtctaattaatagagacaaaaagtaaaayagtggttactagagcctggcgagaggaggtacttgagaggtactgtttattggatttgcagtttcagtttaggttgatgaaaaagtccagaagatggatgatgatggttgcacaacaatatgaatgcacttactgccattgaattgaatactttaaaaaggctaaaatattaaattctatgttatgtgcactttatcacaattaaaaaagacagttcaggtgatttctatctacagtagaactcattaagatgataattaaatgttgagaaatattgattgggaataagcatgagttttgggatccagcagaccttggatttgaaaaagacacttccccatgcttgctgagaacctctggcatttgttgacctttctcggcctcactttcattgtctagaaaatagggtcattgtaaagggtccaggtaacatgcaaaacacttagaagaaaatggacacattgaagaaacccaaataatggttgcagttgtgctgccattgtttttgttattattaatatgtttcaaaatgaaataggagactgaagtgttttctatgcagtttttttttcacataacataaatttggttagaaatcaagttatgaaaaacaagatttttgtcccagtagagttattgaatatttcatcattttagaagtccaattttcttcactcattctcagtgtctcctgcctttatgagataaggaacagattcaatttatactgtcaaatactagctacctagccatctagaaaactactccttttaaccttcttttatgtttaccttgctgaaatatagttaaatgctttcaataaaatataaaaccaacagacaaaacctaccaaagacttctgttcctctgcatataagcagaccttttgagacaaatgaactatttaacttaataacattttacacacttgactttgtagacaacctgtaagtaagcagggccat

SEQ ID NO: 82729 - DNA, 1796 bp, Homo sapiens
gatccttgactgacttcatacagtagaattccccctcctctcactgattcccctgggatatcaagaataagcacaatatatacagtttcattctagacattttgtttaaacaacagggtctacatcatagctcactgcagcctcaaactcctgagctcatgcaatcctcctgcctcagcctcccaaataggtaggactacagatgtgtgccgtcatacccagctaatttttaaattttttttataaacatggggtcttgctatgttacccaggctggtctcaaacttctggcctaaagcaatcctcacaccttggcctcccaaagcacacaggtgtgagccaccatgcccagcctggaattgtttattacttcagtataaccaagtctattctaactatatcaatgacaataaagtatcctttaaacttacttatttaatttatatgaggtgatttttggaaatattttaagcaaataataaatagtttggtttactatatgagccagaaattccactttttggaatataccccaaataattgaaatcagggatttaaacagatatatgtacaatcatgtacatagatcatcatttatattagccaaaggtagcaattacccagatgtctatgatggatgaatggatgaacaaaatgtggcatatacgtaacaacaaaatagtattcagcctttaaaaggaaattctgatacatgctaccatataaatgaaacttgaaataagccagacacaaaagaaaaaaacatattgtatgattctgcttatatgaggtaccaagaatagtctaattaatagagacaaaaagtaaaatagtggttactagagcctggcgagaggaggtacttgagaggtactgtttattggatttgcagtttcagtttaggttgatgaaaaagtccagaagatggatgatgatggttgcacaacaatatgaatgcacttactgccattgaattgaatactttaaaaaggctaaaatattaaattctatgttatgtgcrctttatcacaattaaaaaagacagttcaggtgatttctatctacagtagaactcattaagatgataattaaatgttgagaaatattgattgggaataagcatgagttttgggatccagcagaccttggatttgaaaaagacacttccccatgcttgctgagaacctctggcatttgttgacctttctcggcctcactttcattgtctagaaaatagggtcattgtaaagggtccaggtaacatgcaaaacacttagaagaaaatggacacattgaagaaacccaaataatggttgcagttgtgctgccattgtttttgttattattaatatgtttcaaaatgaaataggagactgaagtgttttctatgcagtttttttttcacataacataaatttggttagaaatcaagttatgaaaaacaagatttttgtcccagtagagttattgaatatttcatcattttagaagtccaattttcttcactcattctcagtgtctcctgcctttatgagataaggaacagattcaatttatactgtcaaatactagctacctagccatctagaaaactactccttttaaccttcttttatgtttaccttgctgaaatatagttaaatgctttcaataaaatataaaaccaacagacaaaacctaccaaagacttctgttcctctgcatataagcagaccttttgagacaaatgaactatttaacttaataacattttacacacttgactttgtagacaacctgtaagtaagcagggccat

SEQ ID NO: 82730 - DNA, 1796 bp, Homo sapiens
gatccttgactgacttcatacagtagaattccccctcctctcactgattcccctgggatatcaagaataagcacaatatatacagtttcattctagacattttgtttaaacaacagggtctacatcatagctcactgcagcctcaaactcctgagctcatgcaatcctcctgcctcagcctcccaaataggtaggactacagatgtgtgccgtcatacccagctaatttttaaattttttttataaacatggggtcttgctatgttacccaggctggtctcaaacttctggcctaaagcaatcctcacaccttggcctcccaaagcacacaggtgtgagccaccatgcccagcctggaattgtttattacttcagtataaccaagtctattctaactatatcaatgacaataaagtatcctttaaacttacttatttaatttatatgaggtgatttttggaaatattttaagcaaataataaatagtttggtttactatatgagccagaaattccactttttggaatataccccaaataattgaaatcagggatttaaacagatatatgtacaatcatgtacatagatcatcatttatattagccaaaggtagcaattacccagatgtctatgatggatgaatggatgaacaaaatgtggcatatacgtaacaacaaaatagtattcagcctttaaaaggaaattctgatacatgctaccatataaatgaaacttgaaataagccagacacaaaagaaaaaaacatattgtatgattctgcttatatgaggtaccaagaatagtctaattaatagagacaaaaagtaaaatagtggttactagagcctggcgagaggaggtacttgagaggtactgtttattggatttgcagtttcagtttaggttgatgaaaaagtccagaagatggatgatgatggttgcacaacaatatgaatgcacttactgccattgaattgaatactttaaaaaggctaaaatattaaattctatgttatgtgcactttatcacaattaaaaaagacagttcaggtgatttctatctacagtagaactcattaagatgataattaaatgttgagaaatattgattgggaataagcatgagttttgggatccagcagaccttggatttgaaaaagacacttccccatgcttgctgagaacctctggcatttgttgacctttctcggcctcactttcattgtctagaaaatagggtcattgtaaagggtccaggtaacatgcaaaacacttagaagaaaatggacacattgaagaaacccaaataatggttgcagttgtgctgccattgtttttgttattattaatatgtttcaaaatgaaataggagactgaagtgttttctatgcagtttttttttcacataacataaatttggttagaaatcaagttatgaaaaacaagatttttgtcccagtagagttattgaatatttcatcattttagaagtccaattttcttcactcattctcagtgtctcctgcctttatgagataaggaacagattcaatttatactgtcaaatactagctacctagccatctagaaarctactccttttaaccttcttttatgtttaccttgctgaaatatagttaaatgctttcaataaaatataaaaccaacagacaaaacctaccaaagacttctgttcctctgcatataagcagaccttttgagacaaatgaactatttaacttaataacattttacacacttgactttgtagacaacctgtaagtaagcagggccat

SEQ ID NO: 82731 - DNA, 734 bp, Homo sapiens
tatatgtatttataattgttccattttattattagtgttaatctcttactgtgctaaatttataaattaaactctctcatagtatgtagatataggaaaaaacacagtatatgtagggttcggtactatctgtggcttcagacatccactggcagtcttggaatgtaacctttgcaaataacggggaaagactctaacagccagccttcaaaggcacttccctgccagcggattatagtccaaggccctgaggaggctggggaaaagcattatatgccactcttgctttggctcctatcactgcccgtttcagtctcgcataaacacactcacactatgcaccatgaaaccatcaccaatattaagacaatgaatatatccatcatttccaaatgtttctcctttactttctttttcctgcccggccctgattccctaggtatctattgatttgttttctgtcgctatagattagtttgcattttctagtgttgcataaaaatggaaatcatacagttrttctttctttgaaatctggcttctttctatcagtgtaattattatgagattctcctatattgttgcatatatcagtagttcattcatttttattgtatgattctattgtatggctataccactgcttatagattcaatttacctattaatggatatttaggttgtttccaattggggggcattacaaataatggttctataaggaatcatctata

SEQ ID NO: 82732 - DNA, 1408 bp, Homo sapiens
gtggttccctattactagagaggtaatatagaaggaatactcttctcaactttcaagggaagtgtatagtatacaaggttataaagagaatttgttctcagataaaaaagggtttcgcctatcatgctatcttgtaggcagggaggaggcattgaaagatgatgagtatagtcttcttaatacatattcctaagattatgttttcattaatgtggtgactgggttagaggttgggacaggaaggaggatggtagaagttgttcctagatctttttggttgactgtggggagtgggggaataaaatacaggaataatatggaaaaagtgaagagagataaacattaacaaggtaatatcttcagaaggattgagtttggggtgtgaggacaaggggtagtgttaagaagtccactgtagaatttactagaagtttagggatataattttaatgtaatcaaaattgacagatccatgcttttatttacctttaaatatagtattttggagtaagagagagaaaatcaaacaatatgcttaaaagtagaagacttggttaggtgaattaaaaggaaaaaaacattttcagtgatgaactgttgcttatcatttacaaatacttttttacattttaaaactaaactacaagtaggaaaatgtcagtttcatgataattcctcctctttgagtagatttttattaaaaagtgtttccgaaagtgagttttgaaaaacagctcttccttgggttgaaagtagttattttattagaagcaacaaaatggatccttggtcagagaagtttgggaattactagatctcttacatataatcttctatgagttttagtatggtattatgcattctgaatcttcaaatagaaaatatttctcaagctcaattttcttagctttatttaagtatgactgacaaatagaattgtttaaattttaggtttacaatgtgatgatttgacatatgcatagattttgaaatgactaccacaatcaagttagttaacacacgtatcagctcacctagtatattagtccattctcacactgctataaagaacttccctgagactgggtartttttaaataggagaggtttaattgactcacagttccacatggctggggaagcctcaggacacttacaatcatggtggaagggaaagaggaagcaaacctgaacgttttcacgtggcggtacgaacacatgtggcatgaacgcaagcaggggaaatgccagatgctgatagaaccgtcagatcttgtaagaactcactcactatcatgagaacagcatgggggaaacttcctccataatccaatcagtctcaccaggtctctccctaaacacctggggattacaattcaagatgtgatttgggtgggacacaaaactt

SEQ ID NO: 82733 - DNA, 1354 bp, Homo sapiens
tataaaatcagataatgtgggagaagaaatcttgaatgacttcttttaaattaatatgtttaaaaaacaactgaaaagataatattcttcacgttaattgtccctgatacccattaataataggtgcctacattattgcaatacacattcattaactattaggattttacagtagttacatatcaaaactgaatcttactgtggcaataaattaaaattaaatgaatattaaatctacacctggctttattaaacctaaaattgattactttgcttttgtcataaaaagtgacttctctaaaaaatgtgatatatttttwaaaagtaccaaaccaagtattatgattcttgggttttagtctcagctgcaccactcactgactgagtggctttaaacacgtcacttgcctggctagacctccaactgctgaattttgaaagagaaatttgatgtagattaatttatataattatttttaacttgaaacttctgtaatatataaacgtacccatgattttaaattttagacacaaggtggcactattagtagtgattctaatttgttccacagataaaactaggggaatttcaagatctgtgtatccaaagaataaatctaaatatatgaagacactgtatctcacacacacacacacacacacacacacacacacagtcttggttatttttaacatctggatgaatgctcaacaattcagtcaaccaaatgtttgcttgacatcaagatgattgattttttaaaatgttcacgagaatatttcagtgttaaggtacacaatcaagaaatatttgcaaaaatatatgcaagataaagattgatactggtgtgatttcaacataaacaggaactcctaaacaagatctatcaattttatagcatgtaaggaaaggtattgaaatgtgaacaaattgcataactcagtttgctattaaattaaaaagaatgcatgttggtatgcagacaattttcaaatgacactaaaggcaaaatttgttttaaactggaaaggtgtagatgatgcaaagaatttaaattataatctctagaacatttttgttgaaattttccaacatcttgctaccacttcctaaaacactctccacacatactgaagaccatgaactgttttgtggctaaatcaacaatattacttaatataatattacttttataataaacatatttttcctaaaatctgacttcttcccgtttgttatgaagattctcaaattaaatctttcatgatccaattcaaatacaatttttctcctttagtgtttttcctgatactgcaggaaagtctctcctaaatcatttataaaattcttgta

SEQ ID NO: 82734 - DNA, 1354 bp, Homo sapiens
tataaaatcagataatgtgggagaagaaatcttgaatgacttcttttaaattaatatgtttaaaaaacaactgaaaagataatattcttcacgttaattgtccctgatacccattaataataggtgcctacattattgcaatacacattcattaactattaggattttacagtagttacatatcaaaactgaatcttactgtggcaataaattaaaattaaatgaatattaaatctacacctggctttattaaacctaaaattgattactttgcttttgtcataaaaagtgacttctctaaaaaatgtgatatatttttaaaaagtaccaaaccaagtattatgattcttgggttttagtctcagctgcaccactcactgactgagtggctttaaacacgtcacttgcctggctagacctccaactgctgaattttgaaagrgaaatttgatgtagattaatttatataattatttttaacttgaaacttctgtaatatataaacgtacccatgattttaaattttagacacaaggtggcactattagtagtgattctaatttgttccacagataaaactaggggaatttcaagatctgtgtatccaaagaataaatctaaatatatgaagacactgtatctcacacacacacacacacacacacacacacacacagtcttggttatttttaacatctggatgaatgctcaacaattcagtcaaccaaatgtttgcttgacatcaagatgattgattttttaaaatgttcacgagaatatttcagtgttaaggtacacaatcaagaaatatttgcaaaaatatatgcaagataaagattgatactggtgtgatttcaacataaacaggaactcctaaacaagatctatcaattttatagcatgtaaggaaaggtattgaaatgtgaacaaattgcataactcagtttgctattaaattaaaaagaatgcatgttggtatgcagacaattttcaaatgacactaaaggcaaaatttgttttaaactggaaaggtgtagatgatgcaaagaatttaaattataatctctagaacatttttgttgaaattttccaacatcttgctaccacttcctaaaacactctccacacatactgaagaccatgaactgttttgtggctaaatcaacaatattacttaatataatattacttttataataaacatatttttcctaaaatctgacttcttcccgtttgttatgaagattctcaaattaaatctttcatgatccaattcaaatacaatttttctcctttagtgtttttcctgatactgcaggaaagtctctcctaaatcatttataaaattcttgta

SEQ ID NO: 82735 - DNA, 1354 bp, Homo sapiens
tataaaatcagataatgtgggagaagaaatcttgaatgacttcttttaaattaatatgtttaaaaaacaactgaaaagataatattcttcacgttaattgtccctgatacccattaataataggtgcctacattattgcaatacacattcattaactattaggattttacagtagttacatatcaaaactgaatcttactgtggcaataaattaaaattaaatgaatattaaatctacacctggctttattaaacctaaaattgattactttgcttttgtcataaaaagtgacttctctaaaaaatgtgatatatttttaaaaagtaccaaaccaagtattatgattcttgggttttagtctcagctgcaccactcactgactgagtggctttaaacacgtcacttgcctggctagacctccaactgctgaattttgaaagagaaatttgatgtagattaatttatataattatttttaacttgaaacttctgtaatatataaacgtacccatgattttaaattttagacacaaggtggcactattagtagtgattctaatttgttccayagataaaactaggggaatttcaagatctgtgtatccaaagaataaatctaaatatatgaagacactgtatctcacacacacacacacacacacacacacacacacagtcttggttatttttaacatctggatgaatgctcaacaattcagtcaaccaaatgtttgcttgacatcaagatgattgattttttaaaatgttcacgagaatatttcagtgttaaggtacacaatcaagaaatatttgcaaaaatatatgcaagataaagattgatactggtgtgatttcaacataaacaggaactcctaaacaagatctatcaattttatagcatgtaaggaaaggtattgaaatgtgaacaaattgcataactcagtttgctattaaattaaaaagaatgcatgttggtatgcagacaattttcaaatgacactaaaggcaaaatttgttttaaactggaaaggtgtagatgatgcaaagaatttaaattataatctctagaacatttttgttgaaattttccaacatcttgctaccacttcctaaaacactctccacacatactgaagaccatgaactgttttgtggctaaatcaacaatattacttaatataatattacttttataataaacatatttttcctaaaatctgacttcttcccgtttgttatgaagattctcaaattaaatctttcatgatccaattcaaatacaatttttctcctttagtgtttttcctgatactgcaggaaagtctctcctaaatcatttataaaattcttgta

SEQ ID NO: 82736 - DNA, 724 bp, Homo sapiens
tttctttactttgcactctgtcagtagcctgaaatctattgatattttaaatgacttcatatttgggccattacctgttttcataataatcatggtgttttttttttcagactttctaattacattttttatgtttcttttgcatcatttgtttttaaaatattataatttcacttgagatcccaattatgttttctattctatcagttgactcctcctacctccatagtacctttctccctcccctgcatctctgtctattgaaggcttttgtacccctgcaccaataaggcctagtgattgttagtctgattactcaggcttaatccgaggacttctcttcatggttctactaggctgaattcagattctgtcttttatttaccttttcatgtttgtatagttactacagtatatcctaaatcctaaaggaactttgtaaggaagtgtatttggaacataaacttyctgaatactttcgtgtttgaaaataatattgatttatcatcatactttattgatattttagccatgtatccaacactatgtgaaaatcaatttcccaaaaatattaaagatgttgctcccattgttttctagcatctagtatcattaatgattaatagaaactgataaaatctcattcttgttgctttatattcactgtttctcccactttctctctctctggaagcatttagtatcagtgctttgaaattcacaa

SEQ ID NO: 82737 - DNA, 724 bp, Homo sapiens
tttctttactttgcactctgtcagtagcctgaaatctattgatattttaaatgacttcatatttgggccattacctgttttcataataatcatggtgttttttttttcagactttctaattacattttttatgtttcttttgcatcatttgtttttaaaatattataatttcacttgagatcccaattatgttttctattctatcagttgactcctcctacctccatagtacctttctccctcccctgcatctctgtctattgaaggcttttgtacccctgcaccaataaggcctagtgattgttagtctgattactcaggcttaatccgaggacttctcttcatggttctactaggctgaattcagattctgtcttttatttaccttttcatgtttgtatagttactacagtatatcctaaatcctaaaggaactttgtaaggaagtgtatttggaacataaactttctgaatactttcgtgtttgaaaataatattgatttatcatcatactttattgwtattttagccatgtatccaacactatgtgaaaatcaatttcccaaaaatattaaagatgttgctcccattgttttctagcatctagtatcattaatgattaatagaaactgataaaatctcattcttgttgctttatattcactgtttctcccactttctctctctctggaagcatttagtatcagtgctttgaaattcacaa

SEQ ID NO: 82738 - DNA, 789 bp, Homo sapiens
ctggcttttagctgctggcattggcatatcaatgcttgtaggtctggtttttcaagacactttttgttagaaaagaaatgtttcggggatcgctttttattaaaaaaaaaaaaattccactgagaactttcaccctttctagctgcctaaaaataatttcttaataatgcctgcattaatatcagtattacaccacatgaattgctcctgaataggattttcaatttaagacgtcataacaaagtttcaaaagagcaattgaggagtggataaagttcccatgagaacgaactttctctcaattctctacgggattctgatgaataaaagaaagaaacttgttgaacatggaacagttctgtagaacaggccaggcttcccaaatttgcactggccatcagatttttatcagtctaggaagtaaaacacttaggtatgmcttgaatacaaaaagtgctcaatatacatctaaccaaattgaactgatgaaatggacctccaagttcttcaagctgctaagcttatatttttaggtttgattcatttagtaaatatttattgaacccctactttactgcagggccttttcaggggttggggcagctgcaatgtaaaggcagactgggttcatgccttcttgtagctcatgttctaaagggagagtcagataataaacaaaacaagggtgcacagtgatagggatggaggcttgtgggaaaaagattaaatagggctgttagagagagattctgggaagatatatttcacctaaggcctgaataataacaa

SEQ ID NO: 82739 - DNA, 741 bp, Homo sapiens
tttttaacatatatttttgaaatattgccatattgttacaggatgaaatcagtactccattttctttctctttatccctccaggaaaatatgggaaaatgaagcaaaagtaacatcttatcaccttattttcatataaaagtagaaattgagttgagaataaaagggacagtcaggttactccaaaaacagtactcctccagacattttggggggactcttacgtttgcaacgataaaataaaaataaatgcactaatggcttctattatgaggaaagggcaatcccttgagtccagttcccaaaggaggacaggcattgtgaaatggatctacattacatgagcatatttgcttcattttcttcgacttctgggcatttaaatgatttaggtaaattgtgaactttgcgaaaggctcagttgaaatgttttgtatccaacagatttgctgctgcttccaggagaagtggagcaggatgtaagcaccagcattccttcctgtatcccttttgtggcccagcctcctacctgtgaagtgaagccaaagcccagtgttaaaagaatggacaaacagacggaagaggtactccacagggaattcagtcattctccacactgccttgattttgtaattcatcccttcaaagaaatgctgyatgcttctgtatttttctaacatttgggaaaatataaaattcaagttgcttaattggtccctctcacagccatctatctcaaatg

SEQ ID NO: 82740 - DNA, 609 bp, Homo sapiens
tagttcctcaggggttgaactgtgtttgctattatctatgcagctgggagttatgtagcacagtgcaatgcacataatgataactttaaaagtaaaaatgatttttatttctaggcactgtcaagttatgtggtccatgtcctcaatatgtcttcagtctattaatagtaagggaaacaaaactagaattcaaaagttagctagagaacaatcaagagctcaaccacgagaataatcagaggagagagagagcaggaggcaagcagtgaatagagaaggactgagagaaaaggtaagacytgaatgtgaccctgaaaagcgaagaaagtggcttaagtgggagggggtgttccaaggtaggaaagcatgagtgaaggctctggagcagggatgggcatggctggtctgggaagaaggatggcactttaggagaggaaaaaaataccagggaagttcagggcatttcaaagtaaaacaattccttcaaatttatagtgtcattgttttaaaaatttctcatgataaggttctgtgtgataatttcattaaaaatttctcatgataaagttctgtgtgataactagcttctcccaagttagttgcaaggag

SEQ ID NO: 82741 - DNA, 699 bp, Homo sapiens
ggcaacattgcaagaccccacctctacaaaatatttaaaaattagccagatgtggtggcacacacctgtagtcctacctactcaagaggctgaggtgtgaggatcacttgagtgcaggggtttgaggcttcagtgagctatgattgtgccagcctgggtgagagggcaagaccctgtctccaatcaaataaataaataaataaataaaaatctaaaaataggattttaaataaattctacctcatactttaatatggaattaacagaaagaatttcagtcaaatttttaagttagttgaattgartaataaagaaatatagtgaagtcagccgcttcaccgtttctgaaagacatttggttcatttcttccttcaaaatcctgatcagacaattcctactactagaattcccaccctgcttccccaccacctttcataatccccaaatccttcagggcctctgtcagtaaccaccacctccatgatgctgtcacctattacaaaataggtgacattttgtaataggtgacattttgtaacattctctttcccacccgagactcagtatggaattagtaaagaccttggctcttgaagccagatagacccagtttgctacctaaccacattttcaccagctgggagaagaattttcttcttggtaaaatgataaatggtggtaattttgcttgcttccca

SEQ ID NO: 82742 - DNA, 614 bp, Homo sapiens
gcctccctctttttctcatccccctaccctttccatccctgaggaaacttcacatttctctttatgtttaagatacttggtctatgtctcaaataccttttctaagtcctatgcttttatagaagaaaaatggatgtatttgatttactgtcgttttatatgtctccttcaacttataaacatagagctactaacttgagaagggaaaggtaatgaagaaaaataaggattaaaaatatatctcttaatattatccctcaataatttctgaaataatgctataagggaaatccacggtgacttgagaacagttaacaaaggaaccaaatttaatttgattgggtggtaggtcctatgagagggagcttagagagggttcttctgaggagatsagataggaactgggatctgaaagccatgtagagttaatgttttgaaggagagtgaggagtggggaggagggtgttctcaacagaaaggatacacgtgccaaggcctctcagcaggagaacatggaaaaaaaaaacaaatctacaagcattatcatttatggataaaatcttaattatagattatacgcacttgcattttggtgtatgaggcctcagcaaact

SEQ ID NO: 82743 - DNA, 539 bp, Homo sapiens
aaaaggtagacagttgaaggggtagagtccataaagacctggaggtatgaatgtgtgtggaactggaattggaagcactgagtataattatttgtattgttactttacaaaaggaaaggttaaccaaattcagaattttttttttttttttccaaggcgtagtctcgctctcttgcccaggctggagtgcagtggcgctatctcagcttacagtaacctcgcctcctgggttcaagtgattctcctgtctcagccactcaagtagctgggattacaggcgccckccaccatacccggctaatttgtctattttttgtagagacgaggtttcgccttgttgtccagtctggtctcgaactcctgacctcaggtgatccacccacctcagcctcccaaagtgctgggattacaggcgtgagccaccgcattggccaaattcagatcttaaatatctgaagctgtgacctatttactgagctaagttttgacaatataaactagaagataaagtagcacattgccttagaactaaccacatt

SEQ ID NO: 82744 - DNA, 935 bp, Homo sapiens
tttgattcacaaattgtcccagctttgatcagtaggagcccttttaagctggattctgtgtccttgtaacttcctctcatcctattttcttttttttttaatttcagcacttgttatttttaggcataacaagatgttcagtgctcatcttgaatttattctgctcctgccctgaaatctaccatttcttcaaggaaccctagttgctttttgtggataatggtgttaaagactatgctgcttctcagtttattgtattttagctccacatccatccttcattgctttgtcagatctccttttccagctggtatggatgagcttagtcagtagaaggtgttggaaggacactgtaggaagtagggttttggtgtgcttccgttcctatttgctctgtgctgccagtggcatgtgtgggatgcctagtggtactcatcccctaggaaattttgttgtcagttactgcctgcggctccttgcctttcagcctggatctgctggcaccacaacagagcttcctgcttgccagtctcagcctgtagttccttgcccatgaagtttgaccctcctactatcatattagaacagctatgtcagggacaaccagtgggttacagccacattgcctccaatgagatctgaattccagccttggcraggaggcacctctttcaggtatttcctttggttttcctcctcaatctaggcattcctaagagttgtcttttatttcttcttagtagttaattctgggtaaatagttaataattctttataagactccctatttaaattgctgtatggatttcattttctgtccagaccctggctgctacagagatcactatctggacagtaggtatgcttcttgcaacttacatctaagcttttttcaacagccagagataggaaatgtaatacatttatctatatgc

SEQ ID NO: 82745 - DNA, 935 bp, Homo sapiens
tttgattcacaaattgtcccagctttgatcagtaggagcccttttaagctggattctgtgtccttgtaacttcctctcatcctattttcttttttttttaatttcagcacttgttatttttaggcataacaagatgttcagtgctcatcttgaatttattctgctcctgccctgaaatctaccatttcttcaaggaaccctagttgctttttgtggataatggtgttaaagactatgctgcttctcagtttattgtattttagctccacatccatccttcattgctttgtcagatctccttttccagctggtatggatgagcttagtcagtagaaggtgttggaaggacactgtaggaagtagggttttggtgtgcttccgttcctatttgctctgtgctgccagtggcatgtgtgggatgcctagtggtactcatcccctaggaaattttgttgtcagttactgcctgcggctccttgcctttcagcctggatctgctggcaccacaacagagcttcctgcttgccagtctcagcctgtagttccttgcccatgaagtttgaccctcctactatcatattagaacagctatgtcagggacaaccagtgggttacagccacattgcctccaatgagatctgaattccagccttggcaaggaggcacctctttcaggtatttcctttggttttcctcctcaatctaggcattcctaagagttgtcttttatttcttcttagtagttaattctgggtaaatagttaataattctttataagactccctatttmaattgctgtatggatttcattttctgtccagaccctggctgctacagagatcactatctggacagtaggtatgcttcttgcaacttacatctaagcttttttcaacagccagagataggaaatgtaatacatttatctatatgc

SEQ ID NO: 82746 - DNA, 1633 bp, Homo sapiens
ccccaaaatgcagtaagaggaaaaaagtacaaaacatgatttattgtgtaccatccttggaaattcagaaggacactgaccaatgaagccataggaagaaactaagaactgggcttcaaagtgaagataactgaccagcgagtggattttatgaagaaaaggaaagaagcacagggytctgccaatgacaattctaccatcgttcatcaagtggccccaagtttggactatggggtcccgagtgggattaattctgatcttgcagaccaaagcctgaagatgatatcagcacagcgggggtcacatttgatgtgtttcctggccaggacccctgttatgtagctaaatgccttacagctcccataaatcagcttccccatctgtttccttgatggcctttccaatgacttagtgacctcaacttttaggtctctgtccagcacacacatcttatttaaataaaaaacaatgatcatcaaggccctgcctgaaaaacacaatcctcaaaggccctgcccaactcctttctctttctaggtctgctatcctctctcaatcagggtagagccttaactgcacagatggtctggtccagagcctcaatgccaccagacagggtcctactgagcaaacaggagaggtagcaacaaatacccaaggtacagtcgccagcagggaaacacaagctccagagcccaggataaggggtggtcaagaaaagcacaacacagagcttgtctttcggccccaaagatggcaattactgcattgtaaaggcagcactgtctttagctattctgtctttaactcaagcttgggggggaagttggggtggggcgtgggggagaggagactactgaggatgaggggtggaaatgaagacgagaggaaactgtctatcaaggctcatgagccccaaaatataagagaatcgtgtttgttccttcagacccttttctttatatttcaggatgaattcattttcttaccgtctttgctttggatataagcaatgaatgatgaatgaatcaagctgataaatgaattaagctgatgaatttcagggttggttacaaatctggctgcaacttcacaagagatgtgctccctcatgcctctgtcctcaaaatgatccagcaggcaaccttacctgctgacatatattacaatacagatcagtcaagatgtggttcaaatgaaaagtactatattactagggaaactgcattataataattcacaaaagttattccaaaggggaaaaaaataaattatctcatataaaataatacatggtatgtgtgaataatcttggctactgtcttcagagagcctgtttgctgccagccacctgcacctgtggggggagcagatgttgtctggaggtgactctcctccagcgcgatggagctgggtccctcctccaggagctggattggggtgattaaatgagtctggagttttggaggaactggatgaggacttggtagacaaacttgtactgagcgatagtctggatcatgaacatcctctgctccctgaggagcctcagcatcatgggcacttccaccttctgcaagaaaagagagaaagcacaaggtcctgagacaggaggcttccctttgagcattcc

SEQ ID NO: 82747 - DNA, 1087 bp, Homo sapiens
gaccttgtgatccgcctgcctcagcctcccaaagtgctgggattacatgagaagaacacgtttaatgatgagtgaatgcagtcaaagtcagtagatctgggatttggcatcatcactgattggcttcaagatcttgagcacatggcttgaccttttcatatctgcttttccccaactctgaaatggtgacattacatgccaatgcctcatggggctataaagaaggtcaaataagataatgcatgataaacagtttttgcatagtgtaggtatttacggtttgcaaagtgctttcagttctacagcccttcttgactttctagtcctcataatttctctttggtactccattattactctagtcccacccctcatctctagtagagaacggccatcactgaattgacttctgataaagaaactaaagcttggatgtctggtcaccgatctaagctcatataaattacaactggcaaagcttgatgttcaggtttgaaaaaagcagtatgtaataagctttcattatttacagcctgcttttttcaaaaaaggatttaaggagatgagaagttgttattactttaatctggccattctgagtaacacatgcatgcaatagcttatagatagtttaaaagataaagtatcatttagcctactaaagaaaagattgaaagctctcatgaagggttttcaagaatgtaagggaaccatggatatagcacaaaaggagttggagcataataaagttaggttaagtactgttaaatagtgagcgtttaaaaattctaaaatgggttaataaggttacttactctaggagttttaaaaaacaaaataaattcttatctrttggaggtagtttaagtacagtatgctaagaatagaccatgtggtcttcctccttaagtgtgcctttgagccttatattctccaaactcttagaattcattatcacttctgcttatttacttcaaaataacaactgacactttacaatttacaaagtgctttcacacatagcctctcatttaatttttacaacaaccttctaatatattatacacatttcccagaaaaagcaact

SEQ ID NO: 82748 - DNA, 1087 bp, Homo sapiens
gaccttgtgatccgcctgcctcagcctcccaaagtgctgggattacatgagaagaacacgtttaatgatgagtgaatgcagtcaaagtcagtagatctgggatttggcatcatcactgattggcttcaagatcttgagcacatggcttgaccttttcatatctgcttttccccaactctgaaatggtgacattacatgccaatgcctcatggggctataaagaaggtcaaataagataatgcatgataaacagtttttgcatagtgtaggtatttacggtttgcaaagtgctttcagttctacagcccttcttgactttctagtcctcataatttctctttggtactccattattactctagtcccacccctcatctctagtagagaacggccatcactgaattgacttctgataaagaaactaaagcttggatgtctggtcaccgatctaagctcatataaattacaactggcaaagcttgatgttcaggtttgaaaaaagcagtatgtaataagctttcattatttacagcctgcttttttcaaaaaaggatttaaggagatgagaagttgttattactttaatctggccattctgagtaacacatgcatgcaatagcttatagatagtttaaaagataaagtatcatttagcctactaaagaaaagattgaaagctctcatgaagggttttcaagaatgtaagggaaccatggatatagcacaaaaggagttggagcataataaagttaggttaagtactgttaaatagtgagcgtttaaaaattctaaaatgggttaataaggttacttactctaggagttttaaaaaacaaaataaattcttatctgttggaggtagtttaagtacagtatgctaagartagaccatgtggtcttcctccttaagtgtgcctttgagccttatattctccaaactcttagaattcattatcacttctgcttatttacttcaaaataacaactgacactttacaatttacaaagtgctttcacacatagcctctcatttaatttttacaacaaccttctaatatattatacacatttcccagaaaaagcaact

SEQ ID NO: 82749 - DNA, 722 bp, Homo sapiens
ggatcctttgtggccaggagttcgagaccagcctcgtcaacgtggcaagagcccatctctactaaaaatacaagaattagccaagtcagtggcgcgtgcctgtagtcccagctactcaggaggctgaggagggagaatcacttgaacctgggaggtggaggttgtagtgagccaagatcacatcactgcactccagcctgggtgacagagtgagactgtatcaaaaataaaataaaataatctgaactggacagaatttacattaattcttaatgtaagtattaagatattagtagtttacatctgaccaagctctgtaagaacaccacagcaacaatatttagattattcctaaagtcttacctcagatccaacttataataatattgaaatagctttccaatgactttccagtctctagcctctactttcttttcctaaaacatactcttactcctcaagtctacttaaaagtttaaacttcttaatagcataatttagaaaaaattccattcaccaaattaaaaraaattgctcaaagaaaatgaaaatctggaatgtgttcctaaaaggaagaattaacattcccctctccacatctgtgaaaaacagcaacaacactcaaagcctccctaatattactagaagataaactagctagactattatctcattaaaaacaggggccatgtcagtcttgttcactgtagcaactagcagtt

SEQ ID NO: 82750 - DNA, 823 bp, Homo sapiens
ttttttgagatagagtctcactctgtcacccaggctggagtccagtggcacgatcttggctcactgcaacctctgcctcccaggttcaagcagttctctgcctgagccttcggagtagctgagattacaggcccgcgccaccatgcctggctcatttttgtattttcggtagagatggggtttcaccatcttggccaggctggtcttgaactcctgacctcatgatacaccagcctcggcctcccaaagggctgggattacaggcgtgagccaccgcacctggccatgaattttatagtatgtaaagtatgctttaataaagcttaagaatgaggctgatctatgtgtagtgatttggaataaatcataacacataaagtgaaaaaaatctaggcacagagcagaagatagagatactctcttttgtataaacatatgtatgtgctgacagaagaattcattttttctggaaagattcagaaacagctgtaaacaatgactgtctcaaaaaaaggttctggatacctggagtaggaaaaagcctacttttcagtgtacaagcttttctactatgaattgttcactatgtccatctattacctttccaactcaaaaaaaaaaaaagggaaaaactgggaatataatcatcagtgtaatcatgtgcatttaactacaatttcttaaattttaagtatctacacaattacataatcccatttmcactgaaaaggaaagcagactcagaatgtgagagtgattctcttcattcctttagaaaaaatacatttcaggctcccctgctaaacactgtccatctttggat

SEQ ID NO: 82751 - DNA, 584 bp, Homo sapiens
tatttcagctttacaagttgtctataaataactttattatatactgaaaattacgttcacagactaacgcatatactagtagccaagcttataactgtgttcgtagactaactcacatataagatgatgtgcattgcaaagagctatacatattctaaattgtagctttatatgattgtcttcccatgtatgtcattatctactttttaattttaaagatttgaatcctaataagatttggggtgcgcgtttagttgattggtttggctttgtctttctttatatctgattgttttgaccaggtaagtagtagtatctgacctgccatatcacctaccatacagttagtataaatctgaagcatattgaatattttaaaatttgaatcatgagaataaaagttttgaagggtgcttattttttaaaatgacagttgtggtctgatagtttagattaaattrctaggttggtggcttatgcctgtaatcctagcactttgagaggtggaggtgggaagatcatttgaggccaggagttcaagaccagcctggtcaacatagcaagactctgtctctacgaaaaat

SEQ ID NO: 82752 - DNA, 997 bp, Homo sapiens
acacacacagtactttctaatgttgaagaagcccatacctttatatacagttgaccacgtggggctgatgaaattattcattatattctcaactttggtgatgttttaaggttgttgaacaaaaacacaacttaatagccattttaaacatttaaaagatggtaatgttttggcatattggttgcagtaatggactaaccgcacaacaaatcaatgaactctaaaaggaatgggtttgattcctgagctggaaaggcattagagtgccttcatgattgagagcaaagacatttggtttctgcagacctgagtccaatcctggctgccacttactagttgtgaaaccttgacaagttccttatttagcttctcccatagtttccttgttttaagaaagggagaataatgtcttccagataggattggttgccagagttaagtgagactatagttaaagctcctgatactgttattttttttttttttttttttttttttggagaccgagctcattgcaacctctgcctcccaggatcaagcaattyttgttctcagccacacgagtagttgcgcttagaggtgcgcaccaccatgcccgcctaatttttgtattttttagtagacacagcattttgccatgttggccaggctggtctcaaactcctgacctcaagcagtccgcccgccttggcctcccaaagtgccaggaccacaggtgtgagccaccatgcccagcctcctgatacattttttgttacttagaaaatcaccctgaaggtggcctgtttctgtagtgtattacagaactcagaattctgccagtattctgtgaaactcttgtcattttgaactgtatgccagttatcaaatatatcatttttctaattgctcctctccctttttaatttttgatttaattattcccagtttaattcaattacattttatctttaagtaatataattagatgaaacattttaaaataatagttgcattg

SEQ ID NO: 82753 - DNA, 1228 bp, Homo sapiens
gaccttagaaatgatataccttctgkttattgctctctcctctatgagtacgcacagctttttgcatatgcttattgaagcacatgtactagcaaagtacttagttttcttcaagttaactccttgaagacaaagatgttgtgatgacacaccttccccacctagccagatgcttgcttggcagattgcaggcacttgaatgcttgctaagtgagtgaatgagagtgaatctaggcctctgctatccaatatagccattagccacatgtgggtatttaaattaattagaattaaacaaaatttaaaaatcagttatttagtcacacctactgcatttaaagtgttcagtcaccacatgtggctagtgactaccatattggacagagcagagaatatttccattattgcagaaagttctattggacagtgttgatctagagtatttctctcactttgcacaacagaatgagctcagggaagttgtcacttgctcaaaattaaaccatcagaagcagaactgagattaaaactgggaactcctagatcaatatccattgttgttgagtcatacctctgattcatttcagaattctaactgtatgtggccctaacttaaagctccatatgagcttatggtatgatattaggggaaacatcgtctttgtgttatgattgtcatagaagtgattttatttttgtattttacttgatcaatttgcatgtttgataaaaatatatataacaggttaaaaaaatgtacctggaagttctgtacctctggtatagaaagaaaaaataatgctaattttaaaaatactttccaggtatctaactaaataaaatattatagtattctggtcttgtgaccatttacttagaaaaggcacagcataggctctggtcaaatgtgctttttgctttggttttttaaaagcattcctctttggtttattaatttttgaaaattatttggatccaaatcaacaagttacttttttcaaaaaacaaaggggattttttaaatttaaaaacaaaggccatattttaatacaacatcaccagctattgagtgcgtaccaaagaactgcaagaaaattggtcttaagaaagaaaaaagtacaatgacagaaaacatgatatagtgcacctctaaggagatgggaaccagactaattggaaaaaaacacacatctcccaagcatttccacatacacatatgtacaggtta

SEQ ID NO: 82754 - DNA, 1228 bp, Homo sapiens
gaccttagaaatgatataccttctgtttattgctctctcctctatgagtacgcacagctttttgcatatgcttattgaagcacatgtactagcaaagtacttagttttcttcaagttaactccttgaagacaaagatgttgtgatgacacaccttccccacctagccagatgcttgcttggcagattgcaggcacttgaatgcttgctaagtgagtgaatgagagtgaatctaggcctctgctatccaatatagccattagccacatgtgggtatttaaattaattagaattaaacaaaatttaaaaatcagttatttagtcacacctactgcatttaaagtgttcagtcaccacatgtggctagtgactaccatattggacagagcagagaatatttccattattgcagaaagttctattggacagtgttgatctagagtatttctctcactttgcacaacagaatgagctcagggaagttgtcacttgctcaaaattaaaccatcagaagcagaactgagattaaaactgggaactcctagatcaatatccattgttgttgagtcatacctctgattcatttcagaattctaactgtatgtggccctaacttaaagctccatatgagcttatggtatgatattaggggaaacatcgtctttgtgttatgattgtcatagaagtgattttatttttgtattttacttgatcaatttgcatgtttgataaaaatatatataacaggttaaaaaaatgtacctggaagttctgtacctctggtatagaaagaaaaaataatgctaattttaaaaatactttccaggtatctaactaaataaaatattatagtattctggtcttgtgaccatttacttagaaaaggcacagcataggctctggtcaaatgtgctttttgctttggttttttaaaagcattcctctttggtttattaatttttgaaaattatttggatccaaatcaacaagttayttttttcaaaaaacaaaggggattttttaaatttaaaaacaaaggccatattttaatacaacatcaccagctattgagtgcgtaccaaagaactgcaagaaaattggtcttaagaaagaaaaaagtacaatgacagaaaacatgatatagtgcacctctaaggagatgggaaccagactaattggaaaaaaacacacatctcccaagcatttccacatacacatatgtacaggtta

SEQ ID NO: 82755 - DNA, 1216 bp, Homo sapiens
cgcatcaatctcggtgacacagaaaggctgtggagattttggtgggctggttaaaacctctccaggcttgaatggacctcaaacatagttgcaggcctgatgcactaggggaaatactatgctttcaaccaagctgattactttgaatctctggggaaaatcagatgtctgcatttgtctttgtcaaatttcaaatgaatttcttgcttgtaatttggaggggagctacaaatgaatggcgctgcagggcattaaggagtcaacagtagctcattctgtgtttgtagcatctttgttcatctggtcaggttttattattattattattatttgagatggagtttcactctgttgcccaggctggaatgcagtggtgcgatcttggctcactgcaacctctgcctcctgggttcaagcgattctcctgcctcagcctcccaagtagctgggattacaggcatgtgccaccacgtcccgctaattttgtatttttagtagagacggggtttcgccatgttagtctggcttgtctcaaactcctgacctcaggtgatctgcccgcctcggcctcccaaagtgctgggattacaggcgtgagccaccrtgcccggccatctggtcaggtttaaagcaggagctcattctggagggctggatgtgttctcttgcacacctgcttaattgatactagaatcttctaaagttactgtacccagggacaaatcaatgtcactcttggtctctgtaagttcctcctagcagtatgtaagaaatcatctttgtagatgtctaaaatctcacttaacggttgtatgctcagtaatgaaatgtgttacctgtgtgttgtttgaaatggaatcatgaattttagcattgagtgtaactgtccagtcaccatgttgatgactttcttgttccttagttctagttaggcttcttctctgccacattctaaaaccggtctgaacggggaccacagtgggagaggaagttttttgctttactttagggaagatcacatggaccatttgaattcatacttacgccagaggacagaccaatgggctgcatagagctctgagctcaccctaactgggttttaagcaaaggaggaagtggtgatggagcaggaattttagaggcttgtatgaggtgtgattaacaaatgagtgatgctaaactagataatattttataaacttttatagcttagaag

SEQ ID NO: 82756 - DNA, 798 bp, Homo sapiens
ccacttcttggttrcactgcccagcctctctgagcagccactgggaagccagggctcagggagcagcacagcccctgaatctagaagtgctgaaagagccagcacctctgtaagtctggtctgctggggtctaggtactggctctgcaggagatcccacaatggtgagaatgatgaggtccagccctcaaccttgaagaggctggctggggccatcaccaaggttaggatatgcggtgacagtcagggcagtagcagacagagctctccattcaagaagcaaccgaggccaagggggcacatgaggccaagtgagccatgggaggcttgtaaacccggttcagacagctgaaaacacagctagtgcttaactggagtttctgctctcccgtgtagcagctgtctgactttgagcaacttatttcttagcatctatacaatagtggtgataatatccacctcaagggattgttgtgaggactacagagatggtctatttaatatcccagcataaagcctgacacaaattgtcactttcatttctctctttgagaccctacggctgagagaccatgtcccatatatttttgattgcttctgtaacatacatgcatatgatctctccctctctcaaacacatacacatttttttaaaacttggggatgtagagtgaggaatataagaaacgttgagactttctagggggtcttatatcctccgagtaatttgaacaagaatatttttatttccagcatagactaaaatggctgattgtccaattcaagaggaaaagataaa

SEQ ID NO: 82757 - DNA, 798 bp, Homo sapiens
ccacttcttggttacactgcccagcctctctgagcagccactgggaagccagggctcagggagcagcacagcccctgaatctagaagtgctgaaagagccagcacctctgtaagtctggtctgctggggtctaggtactggctctgcaggagatcccacaatggtgagaatgatgaggtccagccctcaaccttgaagaggctggctggggccatcaccaaggttaggatatgyggtgacagtcagggcagtagcagacagagctctccattcaagaagcaaccgaggccaagggggcacatgaggccaagtgagccatgggaggcttgtaaacccggttcagacagctgaaaacacagctagtgcttaactggagtttctgctctcccgtgtagcagctgtctgactttgagcaacttatttcttagcatctatacaatagtggtgataatatccacctcaagggattgttgtgaggactacagagatggtctatttaatatcccagcataaagcctgacacaaattgtcactttcatttctctctttgagaccctacggctgagagaccatgtcccatatatttttgattgcttctgtaacatacatgcatatgatctctccctctctcaaacacatacacatttttttaaaacttggggatgtagagtgaggaatataagaaacgttgagactttctagggggtcttatatcctccgagtaatttgaacaagaatatttttatttccagcatagactaaaatggctgattgtccaattcaagaggaaaagataaa

SEQ ID NO: 82758 - DNA, 644 bp, Homo sapiens
tgtgaggggattgtattcatgacttgtcacatatcccaagtctgtctctgttctacaaacctcttagttttctatggaaaagaagggggatacctgagtatcttatgcaagaacagcatagaaagtgtcaaggagaaggaaaagcaagcagggactgaagttatagtgtggtcttcagctctgatgagtagaaagactaaggccagttggagggtacagccttgttcaattaaagaaaacttttttccttgatgtggctgaggaaatagatattctatttgaattgtgagagaggaagcaaagggctgctcagcttggagtggatcacatatagggctgtgtgggaacaagaggaataaacagaggagacagagccgggcacttccaatcagatgataaactccttgataatagaagtctgtgtgtgtgtgtgtgtgtgtgtgtgtgtgtgtgtgtrtatgtgtgtgtgttttccataacagctagttcaggactggattcacaattggtatcaattttggtttcctaattagcaattcatgttccaaggttagaactcaagtttataaagtcaaaggaagggcagtgatatgctggatacattatattcagcagagtttaccttactcttgatattaacagac

SEQ ID NO: 82759 - DNA, 1762 bp, Homo sapiens
aagatgtgtaggagcactccatcagttctatctcccaatggttataaggtagaaattgacaagtgatgaggcttatttgaaatttaaatttaagagattttagacctattccatgttaaacagaaaagctactgctttcttgtttaatttcttttttattgttaactatttgttgagcacttactggtgtgtgtgtttcactgtggaacatcatggtgataagaggatcttaatcctcaggtgcccagtgaggtttctgtcatttctgtctttggactcaaagagattcctcacttggcacttgtgttggttcttaacagcacttcttgagggctaccattgaccattttctatcataaaacaccaattttatggcaaccatttcaatatgagatattagaatcagtgtccctaccgaaggtatttctggatttctccatgggtttatgttaggaaaagtcacatttaatgttcatcccattttcctacctgtattaattgctttatgttaaaaraagtagcatggtgggttgatgcttcttatggccaagcagagattcaaattcaattctttctccagaggtgaggcgcattccattactgcccactgcatcctgggaaccagaggacatgagaggtggaggacagagcttctttgccttttcataacgagagtgtaaaacaaactgtaatatgctcctcaaataaaggttaaacataaataaatagctcagtttgccacatttgaaatttttttcttggaagtcttcattgctctaaaggtgtagtctgcaccattatctgaggttttgcttttcagttccctgcagtcaactgagatccaaaaatattgaatgaaaaattctagaaataagcaattaataaatataaaattgtacagcatgctgagtaacacaatgaaatctcatgctgtcctgcccaggatgcagatcctccctttgtccagtgtatctgtgtcatacctactcctgcctgtttgtcacttagtagctgtctccattatcagatcaactgtcttggtattgcagtgcttgtgttcaactaacctatattttaccaaataatgtcctcagagcacatgaatactgcacctaatttataaattaaactttgtcataggtatgcatgaacaggaaaaaacataatatgtatagggtttggtggtttcaggcatccactggggttcttggaatgtatctctcatggataaggtggaattactatataaggaacacatttgattcctcaaatatgaatgagttaatgactaagagaagttaatttttagaatttgagagggacctcccacttggctgtttgagaatttgatgaagatattgccctgaaccagctgacaagagacaaaaaaatttagcgagagaggaagagagatttgctattaagtcaaaatacagagtactgtacaggaaaatcttccttgggagacaacattctcttcaaaagaaaagtgagtttgttttggcaaggggccttggaattctagtttgcaatttaaatcttagctaaaaattgcatttttaaggcaggtgcttgtctagcacaggtggttagtgtagcaatcactgtatcgacagaaaaatattatgatgaggtgtggagacaccaacctaatgaaataaaatgaaaaggaggaaaaaaaattgcctctctcttctttcctccttcacatactcctccaaataattgtaatttaatgttctattcagaagaacatattttt

SEQ ID NO: 82760 - DNA, 1201 bp, Homo sapiens
caatctcatctttaagctacaaaatgtcccatatttcatcattaagtcttctttaatcacataattcaaaaattgttgggtgatagctatgtgaaaggaatatgtataagagtttctttttatttgtaagaaagatgtggagagttagcctggtgtcaaaaatgttcttcacgtaacttcaaaatgacattttccctctgatcttagttggtgtgacaaaaattacaaacaaaaataatcctgcaacattcttttccttttatcatccctttgaatatttccaaaaatatttggcaaagcctgagatatcttccagattttcatgtactcattgatacccatccttaaaaacctgagtcaggtttttaagatgatatttttacaagaaaaaggagtcctatcacattctaacttaactggttttaggacttgaattctgaccttgtagaggatttcacattttatttgagatcaaatacatttttattttaatattgcatcaggacccgcactgcatagacggaaacctatgatttcattggatccatgcatattaagcagtagaaacgaggtcaaaaatggaaaaaacaaattaagtgggtctttaggataaagaagggcaatgtggtaaaatagaatggaaggactctggtttcatccttccatacctgtttgacctcggactgaggtttgatttactcattaataaaacagaatgtggccgggcgcggtggctcacgcctgtwatcccaacactttaggaggctgaggcgggcagatcacgaggtcaggagatcgagcccatcctggctaacacggtgaaaccccgtctctactaaaagtacaaaaaattagccaggcgtgttggcgggcgcctgtagtcccagctactcaggaggctgaggcaggagaatggcacgaacccaggaggcggagcttgccgtgagccgagatcatgccaccgcactccagcctgggagacagagcgagctctgccccaacggagggagataaataaataaataaataaataagaatgttgtaggtttttttgttgtcattcataattttctgttttttttatttttgagatggagtctcactttgtcacccatgctggggtgcagtggcatgatcacagttctctggaacctccacctcctggattcaagcgattctcatgcctcagcctcccaagtag

SEQ ID NO: 82761 - DNA, 854 bp, Homo sapiens
aatgagagtattcagagtggcatcggtcaggtgactccaccctgtgtgactgcatcgctcaggggacttctccatctatttgtttctgcccctggcaaggcagcaggcagccattttgaaggccagaccatggtcttgatctcctttgctcttcttcagcatttcgtttccctaaagctacctcttcctcctcctctgactctcttgcctctctctaagccacttctgtctttctccccctgcccttgttctacccttttcacctcctgtagattcaggacattctgaatgtcctggtgtctgaccttaaccgttccaatggggtagcgctccccacactggacaagtggaaggtgaggcagtgccaagatccctctctgacttgctctctccagctgtgcatgccccaaggctcctctggtttgggggatactttgcctctggcttattttatgttgctgccatttcccttctgcctgtttrtgtctgcttcttcacctatttgattgattgggtttttcttttccttcacccacatcttttattatcttggagaaagtgagacatatcttaaaggttagaggtaatttgggaataactttaagggcaggcatatggaatttggggctttttttcttagagacaaagtctcactctctcgcccagactggagtgtagtggtgtgatctcagctcactgcaacctccacaaattcaagcaattctcctgtctcagcctcctgagtagctgggattacaggcgcctgccaccacacctggctaatttttgtatttttagtacggacggggtttcaccatgttggccagaatggtcttgatctctcgacctcatga

SEQ ID NO: 82762 - DNA, 743 bp, Homo sapiens
  misc_feature (1)...(743): n = A,T,C or G
tgcatgaaagcattagtacatgaagcctccgcatgtttctatgaaattttgaaagtaattttgatgaaagttaccctaataatatttgagtatctaagaacagcaactcagccttacacatctcagtatttctagcacttagcacaatgcctgatacggagttagtatgtaataatatttttagaataaatgaacgaataacttctcacccccttagttattctttatcctctctgcttcaaattcactttgtctaacggttggtctactggggattatcttgattaagactcaaacttacagggactatggaaaataacttaagtcgtagagcttccttcaaggaagaaatgcaaccagaatctctgctcacagtatgcaaaacaggatagcaaagttatactgggttcgaatgggcatcaccatctctgagaagcagcctggtacatacacagcaatggtatcgaggtggctgatgatccttgaagtccgatagatggaggcattctagtgtgtgacctgccagggccctaaagagtagcaaacacctgttttcccctagtggaaatgatcgggcccaggttatgccattttcattatgagacaggtgtgctaaggttcgtaacattcgaacctagcnnnnnnnnnnnnnnnnnnnnnnnnnnnnnnnnnnnnnnnnnnnnnnnnnnnnnnnnnnnnnnnnnnnnnnnnnnnnnnnnnnnnnnnnnnnnnnnnnnnnwtta

SEQ ID NO: 82763 - DNA, 1651 bp, Homo sapiens
tgcctactaggttcttagaactgaatctgagaaataagaaaatgtggtaaatgactaatagaataaagaatacagtgctgtaaaagatgtgacaaatacatagcaaatgaaaagaggggaaagggaatttgaaagtgtggtgggttatgaagggattgatgtagaaggagacatctcaaataggctctaaaggttagatgcataaccatatattcaagcccttatctactgattgtaagaatcagcrtagcacaggattaaaaacaccacatttagagccagaaagaacagagctgcaatcttgcttttcattattactaattataggaccttgactatatgacattacttttctgtgtctcaattttataatatgtaaaatgaggataataataacagtgccatctcattttattataagagttatgtgaaaaaccatagaaaaatattacacaacctggcaaacaggcagcaacaaatgcattgaagttattattatggttattattgttgtgattttagctacctggagacccacagagatgaactgatccctttactcattcttactgccgtgaaaatatgatacttgaagtgggggcagcattcatgtcaccatgggaaacagcaaagagaacaatataatgttggctcagctttcactgaatcttttaaccatactggcagcatcttgctgccagactgcttgttatgtgagagctgtaatccatgtatcttaagtcacttaagtcatcgtttaacaggttttctttacctgcatccccaaacactcctaactgatacattgatcatccaacaaggcaattttagagtgaataagacatagcaggcactgtaagacattatatgattttgataggtggaagtaatttcatatttgttctagacgataatatttcaaagacccactggatcccagattgaaagagaggaagccaagaacttcatacactcaaactgaaagcccatacctttcattcccaaaatatccatgaccatgacagaatctgggtttcctcactcataagatgaaagtaaataataaatactttacagaactgttgtgaggattaaatacaatagtctatgaaaattttctttcatagtgcctggcagtagaaatcactcaggaattggtatccatttacatcatgaaagcaacatattatcattccctagtgaattttcttgaaaaaattatcagttatttaatatgtaataaattagtctcttcattcgaagcatacattcttcctggatagggttcaaatgttacctttatttttagtcctttcccctcatccccagtgccacaaccaatcacagcccaactcagagaacatacttattttttgttttgttttatagaaacaggatctcactatgctccctgggttagtctggaactccaggcctcaaatgatcctcccgcctcggctcccaaagttctgggattacaggtgtgagacaccacacccagtcacagaggacgtgcttattgaaatgaacattttcaaactagctgtaggtacagaaccatcattatctctttgcatatggaagctgcttcacacttccattgtatagatgcaaataatctgagagttgttaaacaattctataataccaa

SEQ ID NO: 82764 - DNA, 1651 bp, Homo sapiens
tgcctactaggttcttagaactgaatctgagaaataagaaaatgtggtaaatgactaatagaataaagaatacagtgctgtaaaagatgtgacaaatacatagcaaatgaaaagaggggaaagggaatttgaaagtgtggtgggttatgaagggattgatgtagaaggagacatctcaaataggctctaaaggttagatgcataaccatatattcaagcccttatctactgattgtaagaatcagcatagcacaggattaaaaacaccacatttagagccagaaagaacagagctgcaatcttgcttttcattattactaattrtaggaccttgactatatgacattacttttctgtgtctcaattttataatatgtaaaatgaggataataataacagtgccatctcattttattataagagttatgtgaaaaaccatagaaaaatattacacaacctggcaaacaggcagcaacaaatgcattgaagttattattatggttattattgttgtgattttagctacctggagacccacagagatgaactgatccctttactcattcttactgccgtgaaaatatgatacttgaagtgggggcagcattcatgtcaccatgggaaacagcaaagagaacaatataatgttggctcagctttcactgaatcttttaaccatactggcagcatcttgctgccagactgcttgttatgtgagagctgtaatccatgtatcttaagtcacttaagtcatcgtttaacaggttttctttacctgcatccccaaacactcctaactgatacattgatcatccaacaaggcaattttagagtgaataagacatagcaggcactgtaagacattatatgattttgataggtggaagtaatttcatatttgttctagacgataatatttcaaagacccactggatcccagattgaaagagaggaagccaagaacttcatacactcaaactgaaagcccatacctttcattcccaaaatatccatgaccatgacagaatctgggtttcctcactcataagatgaaagtaaataataaatactttacagaactgttgtgaggattaaatacaatagtctatgaaaattttctttcatagtgcctggcagtagaaatcactcaggaattggtatccatttacatcatgaaagcaacatattatcattccctagtgaattttcttgaaaaaattatcagttatttaatatgtaataaattagtctcttcattcgaagcatacattcttcctggatagggttcaaatgttacctttatttttagtcctttcccctcatccccagtgccacaaccaatcacagcccaactcagagaacatacttattttttgttttgttttatagaaacaggatctcactatgctccctgggttagtctggaactccaggcctcaaatgatcctcccgcctcggctcccaaagttctgggattacaggtgtgagacaccacacccagtcacagaggacgtgcttattgaaatgaacattttcaaactagctgtaggtacagaaccatcattatctctttgcatatggaagctgcttcacacttccattgtatagatgcaaataatctgagagttgttaaacaattctataataccaa

SEQ ID NO: 82765 - DNA, 1651 bp, Homo sapiens
tgcctactaggttcttagaactgaatctgagaaataagaaaatgtggtaaatgactaatagaataaagaatacagtgctgtaaaagatgtgacaaatacatagcaaatgaaaagaggggaaagggaatttgaaagtgtggtgggttatgaagggattgatgtagaaggagacatctcaaataggctctaaaggttagatgcataaccatatattcaagcccttatctactgattgtaagaatcagcatagcacaggattaaaaacaccacatttagagccagaaagaacagagctgcaatcttgcttttcattattactaattataggaccttgactatatgacattacttttctgtgtctcaattttataatatgtaaaatgaggataataataayagtgccatctcattttattataagagttatgtgaaaaaccatagaaaaatattacacaacctggcaaacaggcagcaacaaatgcattgaagttattattatggttattattgttgtgattttagctacctggagacccacagagatgaactgatccctttactcattcttactgccgtgaaaatatgatacttgaagtgggggcagcattcatgtcaccatgggaaacagcaaagagaacaatataatgttggctcagctttcactgaatcttttaaccatactggcagcatcttgctgccagactgcttgttatgtgagagctgtaatccatgtatcttaagtcacttaagtcatcgtttaacaggttttctttacctgcatccccaaacactcctaactgatacattgatcatccaacaaggcaattttagagtgaataagacatagcaggcactgtaagacattatatgattttgataggtggaagtaatttcatatttgttctagacgataatatttcaaagacccactggatcccagattgaaagagaggaagccaagaacttcatacactcaaactgaaagcccatacctttcattcccaaaatatccatgaccatgacagaatctgggtttcctcactcataagatgaaagtaaataataaatactttacagaactgttgtgaggattaaatacaatagtctatgaaaattttctttcatagtgcctggcagtagaaatcactcaggaattggtatccatttacatcatgaaagcaacatattatcattccctagtgaattttcttgaaaaaattatcagttatttaatatgtaataaattagtctcttcattcgaagcatacattcttcctggatagggttcaaatgttacctttatttttagtcctttcccctcatccccagtgccacaaccaatcacagcccaactcagagaacatacttattttttgttttgttttatagaaacaggatctcactatgctccctgggttagtctggaactccaggcctcaaatgatcctcccgcctcggctcccaaagttctgggattacaggtgtgagacaccacacccagtcacagaggacgtgcttattgaaatgaacattttcaaactagctgtaggtacagaaccatcattatctctttgcatatggaagctgcttcacacttccattgtatagatgcaaataatctgagagttgttaaacaattctataataccaa

SEQ ID NO: 82766 - DNA, 1651 bp, Homo sapiens
tgcctactaggttcttagaactgaatctgagaaataagaaaatgtggtaaatgactaatagaataaagaatacagtgctgtaaaagatgtgacaaatacatagcaaatgaaaagaggggaaagggaatttgaaagtgtggtgggttatgaagggattgatgtagaaggagacatctcaaataggctctaaaggttagatgcataaccatatattcaagcccttatctactgattgtaagaatcagcatagcacaggattaaaaacaccacatttagagccagaaagaacagagctgcaatcttgcttttcattattactaattataggaccttgactatatgacattacttttctgtgtctcaattttataatatgtaaaatgaggataataataacagtgccatctcattttattataagagttatgtgaaaaacyatagaaaaatattacacaacctggcaaacaggcagcaacaaatgcattgaagttattattatggttattattgttgtgattttagctacctggagacccacagagatgaactgatccctttactcattcttactgccgtgaaaatatgatacttgaagtgggggcagcattcatgtcaccatgggaaacagcaaagagaacaatataatgttggctcagctttcactgaatcttttaaccatactggcagcatcttgctgccagactgcttgttatgtgagagctgtaatccatgtatcttaagtcacttaagtcatcgtttaacaggttttctttacctgcatccccaaacactcctaactgatacattgatcatccaacaaggcaattttagagtgaataagacatagcaggcactgtaagacattatatgattttgataggtggaagtaatttcatatttgttctagacgataatatttcaaagacccactggatcccagattgaaagagaggaagccaagaacttcatacactcaaactgaaagcccatacctttcattcccaaaatatccatgaccatgacagaatctgggtttcctcactcataagatgaaagtaaataataaatactttacagaactgttgtgaggattaaatacaatagtctatgaaaattttctttcatagtgcctggcagtagaaatcactcaggaattggtatccatttacatcatgaaagcaacatattatcattccctagtgaattttcttgaaaaaattatcagttatttaatatgtaataaattagtctcttcattcgaagcatacattcttcctggatagggttcaaatgttacctttatttttagtcctttcccctcatccccagtgccacaaccaatcacagcccaactcagagaacatacttattttttgttttgttttatagaaacaggatctcactatgctccctgggttagtctggaactccaggcctcaaatgatcctcccgcctcggctcccaaagttctgggattacaggtgtgagacaccacacccagtcacagaggacgtgcttattgaaatgaacattttcaaactagctgtaggtacagaaccatcattatctctttgcatatggaagctgcttcacacttccattgtatagatgcaaataatctgagagttgttaaacaattctataataccaa

SEQ ID NO: 82767 - DNA, 1651 bp, Homo sapiens
tgcctactaggttcttagaactgaatctgagaaataagaaaatgtggtaaatgactaatagaataaagaatacagtgctgtaaaagatgtgacaaatacatagcaaatgaaaagaggggaaagggaatttgaaagtgtggtgggttatgaagggattgatgtagaaggagacatctcaaataggctctaaaggttagatgcataaccatatattcaagcccttatctactgattgtaagaatcagcatagcacaggattaaaaacaccacatttagagccagaaagaacagagctgcaatcttgcttttcattattactaattataggaccttgactatatgacattacttttctgtgtctcaattttataatatgtaaaatgaggataataataacagtgccatctcattttattataagagttatgtgaaaaaccatagaaaaatattacacaacctggcaaacaggcagcaacaaatgcatkgaagttattattatggttattattgttgtgattttagctacctggagacccacagagatgaactgatccctttactcattcttactgccgtgaaaatatgatacttgaagtgggggcagcattcatgtcaccatgggaaacagcaaagagaacaatataatgttggctcagctttcactgaatcttttaaccatactggcagcatcttgctgccagactgcttgttatgtgagagctgtaatccatgtatcttaagtcacttaagtcatcgtttaacaggttttctttacctgcatccccaaacactcctaactgatacattgatcatccaacaaggcaattttagagtgaataagacatagcaggcactgtaagacattatatgattttgataggtggaagtaatttcatatttgttctagacgataatatttcaaagacccactggatcccagattgaaagagaggaagccaagaacttcatacactcaaactgaaagcccatacctttcattcccaaaatatccatgaccatgacagaatctgggtttcctcactcataagatgaaagtaaataataaatactttacagaactgttgtgaggattaaatacaatagtctatgaaaattttctttcatagtgcctggcagtagaaatcactcaggaattggtatccatttacatcatgaaagcaacatattatcattccctagtgaattttcttgaaaaaattatcagttatttaatatgtaataaattagtctcttcattcgaagcatacattcttcctggatagggttcaaatgttacctttatttttagtcctttcccctcatccccagtgccacaaccaatcacagcccaactcagagaacatacttattttttgttttgttttatagaaacaggatctcactatgctccctgggttagtctggaactccaggcctcaaatgatcctcccgcctcggctcccaaagttctgggattacaggtgtgagacaccacacccagtcacagaggacgtgcttattgaaatgaacattttcaaactagctgtaggtacagaaccatcattatctctttgcatatggaagctgcttcacacttccattgtatagatgcaaataatctgagagttgttaaacaattctataataccaa

SEQ ID NO: 82768 - DNA, 1651 bp, Homo sapiens
tgcctactaggttcttagaactgaatctgagaaataagaaaatgtggtaaatgactaatagaataaagaatacagtgctgtaaaagatgtgacaaatacatagcaaatgaaaagaggggaaagggaatttgaaagtgtggtgggttatgaagggattgatgtagaaggagacatctcaaataggctctaaaggttagatgcataaccatatattcaagcccttatctactgattgtaagaatcagcatagcacaggattaaaaacaccacatttagagccagaaagaacagagctgcaatcttgcttttcattattactaattataggaccttgactatatgacattacttttctgtgtctcaattttataatatgtaaaatgaggataataataacagtgccatctcattttattataagagttatgtgaaaaaccatagaaaaatattacacaacctggcaaacaggcagcaacaaatgcattkaagttattattatggttattattgttgtgattttagctacctggagacccacagagatgaactgatccctttactcattcttactgccgtgaaaatatgatacttgaagtgggggcagcattcatgtcaccatgggaaacagcaaagagaacaatataatgttggctcagctttcactgaatcttttaaccatactggcagcatcttgctgccagactgcttgttatgtgagagctgtaatccatgtatcttaagtcacttaagtcatcgtttaacaggttttctttacctgcatccccaaacactcctaactgatacattgatcatccaacaaggcaattttagagtgaataagacatagcaggcactgtaagacattatatgattttgataggtggaagtaatttcatatttgttctagacgataatatttcaaagacccactggatcccagattgaaagagaggaagccaagaacttcatacactcaaactgaaagcccatacctttcattcccaaaatatccatgaccatgacagaatctgggtttcctcactcataagatgaaagtaaataataaatactttacagaactgttgtgaggattaaatacaatagtctatgaaaattttctttcatagtgcctggcagtagaaatcactcaggaattggtatccatttacatcatgaaagcaacatattatcattccctagtgaattttcttgaaaaaattatcagttatttaatatgtaataaattagtctcttcattcgaagcatacattcttcctggatagggttcaaatgttacctttatttttagtcctttcccctcatccccagtgccacaaccaatcacagcccaactcagagaacatacttattttttgttttgttttatagaaacaggatctcactatgctccctgggttagtctggaactccaggcctcaaatgatcctcccgcctcggctcccaaagttctgggattacaggtgtgagacaccacacccagtcacagaggacgtgcttattgaaatgaacattttcaaactagctgtaggtacagaaccatcattatctctttgcatatggaagctgcttcacacttccattgtatagatgcaaataatctgagagttgttaaacaattctataataccaa

SEQ ID NO: 82769 - DNA, 1231 bp, Homo sapiens
tgcgttgatcgcttaattttttttttttttttttttatgatggagtctcacacttttgcccaggctggagttcagtggcacgatcttggctcactgcagcctttgcctcctgggttcaagcaattcttctgtctcagcctcctgagtagctgggactacaggcacctgccaccacacccagctaatttttgtatttttaggagagacagggtttcaccatattgttccggttggtctcaaactcctgacctcaggtgatccctcagcctcggccttcgaaagtgctgggattacaggcrtgagccaccgcacccggttgattgcttaatcttgattacatgtttacacctggaggagtaagttgacatcctggtaaccacatagaccttctccaaaacttagaggctattggaagaagaaaaagaaagtcagtgctgggaatatgaacagaaaagtccactcttaagaactccgtctcttggaaagaaagtctttctcttttaagcagcctgatataaagtccttctcttcttaaacttaattgtttgcccatggattgcactcattagttcatgttttgtctctgcaaatccacagaacaagttaaatccttggtatacactgagtatggttgatggattaggcaatttaagctactataataaaatatcatagaacaggtaggttatacacatcagaaatttgtttctcacagttccagaggctggaagaccaagattaagacatcagcagagtctggtgtcttaatctgtctggtgagggacccattcctcaaagatagtgccttctcattgtgacctcacatgttggaaggggtagctagctccctggagtttcctttatcagggaattaatcccagtcatgagggttttacccaaatgacctaattacctccccaaagccccacttcctaataccattatctcaggggttaggattttagcatgtgaattttgaggggacacagatatttacaccacagtagttgtaatttactaataggatatcttactctcatagtttactttgtgaataaacctccctagaatagtaaaggcttagcatcatgtatatttggtgcacttaaataagaatatccaaggaaaataaatgctatatgaatattccacttatgtccttatttccaaggaaaactagcaatttatgaggtcctatcttgacattacatagaaagagtgtacttacgaa

SEQ ID NO: 82770 - DNA, 1242 bp, Homo sapiens
agattgtcattttggagaacacaattgatgaaaaaaactggtaagtcatgtcctaaaaaaaaggtattgtcmaaatacgtcaagaaactaatctgacttgggataagatgtttccagttgctctgttgtgtattagaacagctctccaaaataggctcaaattgagtctctttgaaatattatatggtaggtcattccaggattctaccctggtgggaaaaccaactgaggtgttaagaaagttaacaattgccaaatatgttaagacacagggcactatactaacttctgttcgtgtttgcttcttgcaagaccactcatcccatagatgtggccttacatcctttttgacttggaaattgagtcttcataaacatttagaaaaaaacaagaatctggcatccagttggtattcaggtccttgatttcattccacagttgccccctattgattttttgaagcaggaagtaggcagatgaaagacgacatcccatttccaaggtaccacaagatagtgaaatgagcctttggacagtggggaattgtaaaagtgaacttgcaaaggaactagcaaaactaactccatttttaagggtcccttgcccattcctgcacataggctagtataatttcagaacactgagataatatgcaaaaacagcagtcatgtagtttttaatataaactctaggattaaagagaaagtatgcaagcaactcacttttttttttaaagatttacaggagcgttgtaacctgaccaaggacaaagaagttcctaatctcagatcctcacgggtgctcagatgtgtgtggtcattgatcacctcttgattacaacctctttctcttcccctccccttaacaaaaaacgagcctgaaatttgtactgacttaagaagctatgttagtacactagtccgccattttcatggtttgaggaataaacctgcttttccttccaccaactctcatctcttgtgcttggctttcaagtggcgagcagccaaatctgggttaggttacacttagatcctcctttgcatctcttcagaaacactgaggtggctgcttgaactgattatagggtgagaagggatggaacgttcagggagagaaaggagcaagtttaaattttctgagacacaaaggtgcttgttgtgcttgaaaaccagagagaaggcattgtggcacatgcttacaatttagaatttaattctaagaccagtgggatgccaacca

SEQ ID NO: 82771 - DNA, 1242 bp, Homo sapiens
agattgtcattttggagaacacaattgatgaaaaaaactggtaagtcatgtcctaaaaaaaaggtattgtccaaataygtcaagaaactaatctgacttgggataagatgtttccagttgctctgttgtgtattagaacagctctccaaaataggctcaaattgagtctctttgaaatattatatggtaggtcattccaggattctaccctggtgggaaaaccaactgaggtgttaagaaagttaacaattgccaaatatgttaagacacagggcactatactaacttctgttcgtgtttgcttcttgcaagaccactcatcccatagatgtggccttacatcctttttgacttggaaattgagtcttcataaacatttagaaaaaaacaagaatctggcatccagttggtattcaggtccttgatttcattccacagttgccccctattgattttttgaagcaggaagtaggcagatgaaagacgacatcccatttccaaggtaccacaagatagtgaaatgagcctttggacagtggggaattgtaaaagtgaacttgcaaaggaactagcaaaactaactccatttttaagggtcccttgcccattcctgcacataggctagtataatttcagaacactgagataatatgcaaaaacagcagtcatgtagtttttaatataaactctaggattaaagagaaagtatgcaagcaactcacttttttttttaaagatttacaggagcgttgtaacctgaccaaggacaaagaagttcctaatctcagatcctcacgggtgctcagatgtgtgtggtcattgatcacctcttgattacaacctctttctcttcccctccccttaacaaaaaacgagcctgaaatttgtactgacttaagaagctatgttagtacactagtccgccattttcatggtttgaggaataaacctgcttttccttccaccaactctcatctcttgtgcttggctttcaagtggcgagcagccaaatctgggttaggttacacttagatcctcctttgcatctcttcagaaacactgaggtggctgcttgaactgattatagggtgagaagggatggaacgttcagggagagaaaggagcaagtttaaattttctgagacacaaaggtgcttgttgtgcttgaaaaccagagagaaggcattgtggcacatgcttacaatttagaatttaattctaagaccagtgggatgccaacca

SEQ ID NO: 82772 - DNA, 1242 bp, Homo sapiens
agattgtcattttggagaacacaattgatgaaaaaaactggtaagtcatgtcctaaaaaaaaggtattgtccaaatacgtcaagaaactaatctgacttgggataagrtgtttccagttgctctgttgtgtattagaacagctctccaaaataggctcaaattgagtctctttgaaatattatatggtaggtcattccaggattctaccctggtgggaaaaccaactgaggtgttaagaaagttaacaattgccaaatatgttaagacacagggcactatactaacttctgttcgtgtttgcttcttgcaagaccactcatcccatagatgtggccttacatcctttttgacttggaaattgagtcttcataaacatttagaaaaaaacaagaatctggcatccagttggtattcaggtccttgatttcattccacagttgccccctattgattttttgaagcaggaagtaggcagatgaaagacgacatcccatttccaaggtaccacaagatagtgaaatgagcctttggacagtggggaattgtaaaagtgaacttgcaaaggaactagcaaaactaactccatttttaagggtcccttgcccattcctgcacataggctagtataatttcagaacactgagataatatgcaaaaacagcagtcatgtagtttttaatataaactctaggattaaagagaaagtatgcaagcaactcacttttttttttaaagatttacaggagcgttgtaacctgaccaaggacaaagaagttcctaatctcagatcctcacgggtgctcagatgtgtgtggtcattgatcacctcttgattacaacctctttctcttcccctccccttaacaaaaaacgagcctgaaatttgtactgacttaagaagctatgttagtacactagtccgccattttcatggtttgaggaataaacctgcttttccttccaccaactctcatctcttgtgcttggctttcaagtggcgagcagccaaatctgggttaggttacacttagatcctcctttgcatctcttcagaaacactgaggtggctgcttgaactgattatagggtgagaagggatggaacgttcagggagagaaaggagcaagtttaaattttctgagacacaaaggtgcttgttgtgcttgaaaaccagagagaaggcattgtggcacatgcttacaatttagaatttaattctaagaccagtgggatgccaacca

SEQ ID NO: 82773 - DNA, 1242 bp, Homo sapiens
agattgtcattttggagaacacaattgatgaaaaaaactggtaagtcatgtcctaaaaaaaaggtattgtccaaatacgtcaagaaactaatctgacttgggataagatgtttccagttgctctgttgtgtattagaacagctctccaaaataggctcaaattgagtctctttgaaatattatatggtaggtcattccaggattctaccctggtgggaaaaccaactgaggtgttaagaaagttaacaattgccaaatatgttaagacacagggcactatactaacttctgttcgtgtttgcttcttgcaagaccactcatcccatagatgtggccytacatcctttttgacttggaaattgagtcttcataaacatttagaaaaaaacaagaatctggcatccagttggtattcaggtccttgatttcattccacagttgccccctattgattttttgaagcaggaagtaggcagatgaaagacgacatcccatttccaaggtaccacaagatagtgaaatgagcctttggacagtggggaattgtaaaagtgaacttgcaaaggaactagcaaaactaactccatttttaagggtcccttgcccattcctgcacataggctagtataatttcagaacactgagataatatgcaaaaacagcagtcatgtagtttttaatataaactctaggattaaagagaaagtatgcaagcaactcacttttttttttaaagatttacaggagcgttgtaacctgaccaaggacaaagaagttcctaatctcagatcctcacgggtgctcagatgtgtgtggtcattgatcacctcttgattacaacctctttctcttcccctccccttaacaaaaaacgagcctgaaatttgtactgacttaagaagctatgttagtacactagtccgccattttcatggtttgaggaataaacctgcttttccttccaccaactctcatctcttgtgcttggctttcaagtggcgagcagccaaatctgggttaggttacacttagatcctcctttgcatctcttcagaaacactgaggtggctgcttgaactgattatagggtgagaagggatggaacgttcagggagagaaaggagcaagtttaaattttctgagacacaaaggtgcttgttgtgcttgaaaaccagagagaaggcattgtggcacatgcttacaatttagaatttaattctaagaccagtgggatgccaacca

SEQ ID NO: 82774 - DNA, 1808 bp, Homo sapiens
gacataacacatcattgtcaattgaaacacatttctgtttatgtcttccatccacaaatttaatgccttttccatcttaactaagcacttatgcactgttgccataacttttgcagtttgaggtgtgacagcaatgccagcacaaatttcttttaccttcttcacagtttcacagatagacgtgcatttcttactatagatcttagcaacctcagcatatgacttctttttttttccattaagtcaaaaatttttacattttcacttaaagaaagcattttacagcttctctttggaatatctaaattgccagtatcactactcttgcactttggggccattactacctcaaatagggctagtggcgcatacacactgtgatatttgacacttgatctgataagggagatggctattgagtgattaacaggcaggtagcttggagagtgtggacacactggacaaagggatgattcacatctcaggtggggcaatagttatattccgattttttatcttgttttaaaaatataaacataacatatgtttctgacttactaagtttattgtaaattactgtcatttacaatagcttcggaaagaataaaatacagatcaacttagcaaaaaaaagcaagatatatacactgaaaactacacaacatttctgaaagaatttaaaaaggatctaaataaatggaccaacatcatatgttcataaattagaagttattaatgtaaaaatagcaatcattttagaatcgatcttcaagttagacactatcccactcataatcctaaaaggcttctttggagaaattgacaagctgattattaaatctcaagggaccatgaatagtcaagaccattttgaaaatgtacaaaaatagatgactcacacttctgatttcagaactaactgcaaaactatagtaatcaagtctgtgtggcagtggcattaggacagacacatagatccatggaataaaattggaagtctagaaataaactttcacatttatgttcaaatgatttttgaaaagggtttaaagacratgtaatggagaaaagagtagtcttttcaacaaatagtgctggaaaattactacttttgtacttccaagtgaaaaacctcagaacactttaacacttattagtatatttcttttattttattttttcatgcattttattttataaattttgaatatataaaaattattatcattaatttatagatttaaaatttatttagtgtttttctgtacatatttttccattttttctttctaaatatccaaactttcatctgttcattttattttatcttctatttagccatagaaatatctgactttttgttgcaattaggtctgatgatcggttatttgtttttctctccctggaaatgtctttattttgctttcatttttaaagttataggttgagatataattcacatgacatgtgatgcaccagttaaaatataaaattcaaactgtgttagtatattcacagaggtgtacaactattatcacaataaatattagtttattttcatcaccccaaaaagaaatctcatactcatgagcaatccctctgcatttcctccaaggtggctgacactagaaaaattctactgtacttccaggctttataaatttgcctattctggacatttcttataaatggaataaaaaaaaaacatgtggtcttctgtgactagctgttttttacttggtatattaaatttttacttagtataataacagttcagggtgccaaactaatgtttgggctattgtggg

SEQ ID NO: 82775 - DNA, 1808 bp, Homo sapiens
gacataacacatcattgtcaattgaaacacatttctgtttatgtcttccatccacaaatttaatgccttttccatcttaactaagcacttatgcactgttgccataacttttgcagtttgaggtgtgacagcaatgccagcacaaatttcttttaccttcttcacagtttcacagatagacgtgcatttcttactatagatcttagcaacctcagcatatgacttctttttttttccattaagtcaaaaatttttacattttcacttaaagaaagcattttacagcttctctttggaatatctaaattgccagtatcactactcttgcactttggggccattactacctcaaatagggctagtggcgcatacacactgtgatatttgacacttgatctgataagggagatggctattgagtgattaacaggcaggtagcttggagagtgtggacacactggacaaagggatgattcacatctcaggtggggcaatagttatattccgattttttatcttgttttaaaaatataaacataacatatgtttctgacttactaagtttattgtaaattactgtcatttacaatagcttcggaaagaataaaatacagatcaacttagcaaaaaaaagcaagatatatacactgaaaactacacaacatttctgaaagaatttaaaaaggatctaaataaatggaccaacatcatatgttcataaattagaagttattaatgtaaaaatagcaatcattttagaatcgatcttcaagttagacactatcccactcataatcctaaaaggcttctttggagaaattgacaagctgattattaaatctcaagggaccatgaatagtcaagaccattttgaaaatgtacaaaaatagatgactcacacttctgatttcagaactaactgcaaaactatagtaatcaagtctgtgtggcagtggcattaggacagacacatagatccatggaataaaattggaagtctagaaataaactttcacatttatgttcaaatgatttttgaaaagggtttaaagacgatgtaatggagaaaagagtagtcttttcaacaaatagtgctggaaaattactacttttgtacttccaagtraaaaacctcagaacactttaacacttattagtatatttcttttattttattttttcatgcattttattttataaattttgaatatataaaaattattatcattaatttatagatttaaaatttatttagtgtttttctgtacatatttttccattttttctttctaaatatccaaactttcatctgttcattttattttatcttctatttagccatagaaatatctgactttttgttgcaattaggtctgatgatcggttatttgtttttctctccctggaaatgtctttattttgctttcatttttaaagttataggttgagatataattcacatgacatgtgatgcaccagttaaaatataaaattcaaactgtgttagtatattcacagaggtgtacaactattatcacaataaatattagtttattttcatcaccccaaaaagaaatctcatactcatgagcaatccctctgcatttcctccaaggtggctgacactagaaaaattctactgtacttccaggctttataaatttgcctattctggacatttcttataaatggaataaaaaaaaaacatgtggtcttctgtgactagctgttttttacttggtatattaaatttttacttagtataataacagttcagggtgccaaactaatgtttgggctattgtggg

SEQ ID NO: 82776 - DNA, 1033 bp, Homo sapiens
tcatgtttagacatacgtatatatacaaacaacttatgaatggtttaattttgcaaaatattcctcaggcactgtgagagtaaagatagtgctcaaagttgtataactatataaccacaaatcataacccaaatagaggtaacaaagtgggtgttctgccatgttgagaattgttatttcattttaaataacctattatattcccctatttgggctgacatgtttctgtgatttgtgagactctcaaaagtacagggcttttgcctgttcagtatctgtttcaatatctaccatcttcaaaaccctaaataaggctgggtgtgatagctcacacctgtaatcccagcacgttgggagactgaggcgggcagatcatttgaggtcaggagttcaagaccagcctggccaatatggtgaaaccccatctctactaaaaatacaaaaaattagctgggcgtggtggcacatgcctgtagctccagctacttgggaggctaaggcatgagagtcgcttgagcccggggaactggaggttgaaaagagccgaaattgcaccactgaactccagcctgggcagtgggagtgagatcctgtctcaaaaaaacaaaaacaaaacaaacccaaaaaaccctaaacaggatggaccagtgaataatttggcttctgtgtatgatttactattctgaaaagggacaatctggattcagattcaagctgtatccagactctagaaagatccagaatttgcagctatgcaaccttggttgaggcggtccaaggagattactgctttatcctgttttcagttccaatctccttaggaccttgccaagayaacattaaggtagcctcaatgtagtatcacataattatcccacttggcttccaagtagaataaattctgtaagttggctaaatactaattaatatccaccttgaacagaagtagaaagtgaggctcaaaattcagtgatttgtccaaggttacatggctactaagagccaacctggttaaaattgaggacaattaaaa

SEQ ID NO: 82777 - DNA, 1155 bp, Homo sapiens
tgtgtgtgtttgtgtgtgtgtgtgtgtgtgtatgtgtgtgtgtgtaattttttttttttgtcaagacggggttttgccrtgttgtccaggctggtctcgaactcctgggctcagcctcccaacatgctgggattacaggcatgagtcaccacacctggctgagatatttgtctatctgatattctatctggatgtttattcatataccacatttttgattcatacaccacatttttgattcatacattagaaaatactagagatacaaataatgtacatatcaaaatgtggtatagaaatatattctttccttcttattaactgactcctacattggaacaggggcggtatatggactctgttcagatcaattctgcatctcttttgcacttttgtagatacagctagcagtgagatgtgaagagaggtcatggttgaccccaggaaagctctttagagtccttactcaggccaggtgcaatggttcatgcctgtaatccccgcactttgggaggcgaaggtggaaagattgattgagctcaggagtttgagcccagcttgggcagcatagtaagaccctgtctctataaacaatttttttacaaaattagctgggaatagtggtttgtacctatagttccagctactcaacagggtgggaggatcacctgagcccagaaggttgaagctgcattgagccatgattgtaccacagcactctaaactaggtgacaaaacaagaccctgtcaaaataaaaaaagagttattacttttttactcaactctaagtcttgtccttgctgatgtgaagtggaagcgatggtcagaaatgccatggtcatcttgggacatgaagtgactttgaagattggtggcatatgctgaggaacaaacagcagatagaagaccagggcctattaatagtgaagcagacacacctcataccagcagcagactgcctacatctagacttctcttgcttatgaaataaataaaattttatcttgtttaagcctctgacataaaaaatcagcccaacttaattctgatacttacatttatagaccaaaatgtctagaattgcaatagctacttttgccttattgctgttgatataccctacactgctatgaaaagggtctcaataactttaa

SEQ ID NO: 82778 - DNA, 1155 bp, Homo sapiens
tgtgtgtgtttgtgtgtgtgtgtgtgtgtgtatgtgtgtgtgtgtaattttttttttttgtcaagacggggttttgccatgttgtccaggctggtctcgaactcctgggctcagcctcccaacatgctgggattacaggcatgagtcaccacacctggctgagatatttgtctatctgatattctatctggatgtttattcatataccacatttttgattcatacaccacatttttgattcatacattagaaaatactagagatacaaataatgtacatatcaaaatgtggtatagaaatatattctttccttcttattaactgactcctacattggaacaggggcggtatatggactctgttcagatcaattctgcatctcttttgcacttttgtagatacagctagcagtgagatgtgaagagaggtcatggttgaccccaggaaagctctttagagtccttactcaggccaggtgcaatggttcatgcctgtaatcccygcactttgggaggcgaaggtggaaagattgattgagctcaggagtttgagcccagcttgggcagcatagtaagaccctgtctctataaacaatttttttacaaaattagctgggaatagtggtttgtacctatagttccagctactcaacagggtgggaggatcacctgagcccagaaggttgaagctgcattgagccatgattgtaccacagcactctaaactaggtgacaaaacaagaccctgtcaaaataaaaaaagagttattacttttttactcaactctaagtcttgtccttgctgatgtgaagtggaagcgatggtcagaaatgccatggtcatcttgggacatgaagtgactttgaagattggtggcatatgctgaggaacaaacagcagatagaagaccagggcctattaatagtgaagcagacacacctcataccagcagcagactgcctacatctagacttctcttgcttatgaaataaataaaattttatcttgtttaagcctctgacataaaaaatcagcccaacttaattctgatacttacatttatagaccaaaatgtctagaattgcaatagctacttttgccttattgctgttgatataccctacactgctatgaaaagggtctcaataactttaa

SEQ ID NO: 82779 - DNA, 1155 bp, Homo sapiens
tgtgtgtgtttgtgtgtgtgtgtgtgtgtgtatgtgtgtgtgtgtaattttttttttttgtcaagacggggttttgccatgttgtccaggctggtctcgaactcctgggctcagcctcccaacatgctgggattacaggcatgagtcaccacacctggctgagatatttgtctatctgatattctatctggatgtttattcatataccacatttttgattcatacaccacatttttgattcatacattagaaaatactagagatacaaataatgtacatatcaaaatgtggtatagaaatatattctttccttcttattaactgactcctacattggaacaggggcggtatatggactctgttcagatcaattctgcatctcttttgcacttttgtagatacagctagcagtgagatgtgaagagaggtcatggttgaccccaggaaagctctttagagtccttactcaggccaggtgcaatggttcatgcctgtaatccccgcactttgggaggcgaaggtggaaagattgattgagctcaggagtttgagcccagcttgggcagcatagtaagaccctgtctctataaacaatttttttacaaaattagctgggaatagtggtttgtacctatagttccagctactcaacagggtgggaggatcacctgagcccagaakgttgaagctgcattgagccatgattgtaccacagcactctaaactaggtgacaaaacaagaccctgtcaaaataaaaaaagagttattacttttttactcaactctaagtcttgtccttgctgatgtgaagtggaagcgatggtcagaaatgccatggtcatcttgggacatgaagtgactttgaagattggtggcatatgctgaggaacaaacagcagatagaagaccagggcctattaatagtgaagcagacacacctcataccagcagcagactgcctacatctagacttctcttgcttatgaaataaataaaattttatcttgtttaagcctctgacataaaaaatcagcccaacttaattctgatacttacatttatagaccaaaatgtctagaattgcaatagctacttttgccttattgctgttgatataccctacactgctatgaaaagggtctcaataactttaa

SEQ ID NO: 82780 - DNA, 1155 bp, Homo sapiens
tgtgtgtgtttgtgtgtgtgtgtgtgtgtgtatgtgtgtgtgtgtaattttttttttttgtcaagacggggttttgccatgttgtccaggctggtctcgaactcctgggctcagcctcccaacatgctgggattacaggcatgagtcaccacacctggctgagatatttgtctatctgatattctatctggatgtttattcatataccacatttttgattcatacaccacatttttgattcatacattagaaaatactagagatacaaataatgtacatatcaaaatgtggtatagaaatatattctttccttcttattaactgactcctacattggaacaggggcggtatatggactctgttcagatcaattctgcatctcttttgcacttttgtagatacagctagcagtgagatgtgaagagaggtcatggttgaccccaggaaagctctttagagtccttactcaggccaggtgcaatggttcatgcctgtaatccccgcactttgggaggcgaaggtggaaagattgattgagctcaggagtttgagcccagcttgggcagcatagtaagaccctgtctctataaacaatttttttacaaaattagctgggaatagtggtttgtacctatagttccagctactcaacagggtgggaggatcacctgagcccagaaggttgaagctgcattgagccatgattgtaccacagcactctaaactaggtgacaaaacaagaccctgtcaaaataaaaaaagagttattacttttttactcaactctaagtcttgtccttgctgatgtgaagtggaagcgatggtcagaaatgccatggtcatcttgggacatgaagtgactttgaagattggtggcatatgctgaggaacaaacagcagatagaagaccagggcctattaatagtgaagcagacacacctcataccagcagcagactgcctacatctagacttctctygcttatgaaataaataaaattttatcttgtttaagcctctgacataaaaaatcagcccaacttaattctgatacttacatttatagaccaaaatgtctagaattgcaatagctacttttgccttattgctgttgatataccctacactgctatgaaaagggtctcaataactttaa

SEQ ID NO: 82781 - DNA, 571 bp, Homo sapiens
atttttcttagcttatagtttacattgataattaaatatagataaataattattcaaatttatctaacacaaatgaaagtgttttgggaactctgacatacagaggaatcaagtcagaaatgatggaacagttgcgcctgtgcttcccaggtgatcattctgaggatcagagaataatgaaatatttcacaataaaaaatgcaaatttaactatgatatccttcaagagagaaatattgaaatctatcctttcttatatcttatgaattattcttgttttgtggtgtatgtactatgtatggtgatagactgaattgatcaaacacagaaaaaaagcaacttttatgactggyttattcagcacatcattgtgaatgttatttatttgagctgaacatgagatcatgagttttaaatcaaattgtccaagttattgtgaaccaatttttttcactatactgttactcccagtaacctagcaattattaaaaagtgcatgtgtgtgttttttgttttgttttgttttaaagggccagggaagcagaaggaagaaagtaagctagcaatagta

SEQ ID NO: 82782 - DNA, 729 bp, Homo sapiens
ccctgtttttctrctgaatggaatagtttcagaaggaatagtaccagctgctccttgtacctctggtagaattcggctgtgaatccatctggtcctggagtttttttggttggtaagctattaattattgcctcaatttcagagcctgttattggtctattcagagattcaacttcttcctggtttagtcttgggagagtgtatgtgtcgaggaatgtatccatttcttctagattttctagtttatttgcaaagaggtgtttatagtattctctgatggcagttacatgtttttaatggaagtatagcatcaacccacctttggattgagatgtttttaagaaagttatgttacgttttgttttacatggatattttaggtcccatgtctgaccatgtgttttataggtaacagatcaaaaaacaatgagtttctattaagagcaaaatatattatacttatctattatctgtccatctacactcagtagcctttgtaaatttttgcatctattagtatcccacagaagcaacattaataaaattcaaatttgcataaatatattttcaaagttatttcataaattgttggatgcttacataactgcatctttttgcagatgtagcactggtatgcagtcatagagtttattccaatattaccatctgcaacaatgattatggaatatacagtacatgcaatatgaaattgatttagattcaggttta

SEQ ID NO: 82783 - DNA, 729 bp, Homo sapiens
ccctgtttttctgctgaatggaatagtttcagaaggaatagtaccagctgctccttgtacctctggtagaaktcggctgtgaatccatctggtcctggagtttttttggttggtaagctattaattattgcctcaatttcagagcctgttattggtctattcagagattcaacttcttcctggtttagtcttgggagagtgtatgtgtcgaggaatgtatccatttcttctagattttctagtttatttgcaaagaggtgtttatagtattctctgatggcagttacatgtttttaatggaagtatagcatcaacccacctttggattgagatgtttttaagaaagttatgttacgttttgttttacatggatattttaggtcccatgtctgaccatgtgttttataggtaacagatcaaaaaacaatgagtttctattaagagcaaaatatattatacttatctattatctgtccatctacactcagtagcctttgtaaatttttgcatctattagtatcccacagaagcaacattaataaaattcaaatttgcataaatatattttcaaagttatttcataaattgttggatgcttacataactgcatctttttgcagatgtagcactggtatgcagtcatagagtttattccaatattaccatctgcaacaatgattatggaatatacagtacatgcaatatgaaattgatttagattcaggttta

SEQ ID NO: 82784 - DNA, 1465 bp, Homo sapiens
attcctgctaatgacagtatctgctttaaatcatctggcccattcctcagcacaagcctatattcctgcaggcaaaaatctttacaactatcccgttatttaatatccacaagcctctctaagcctttgaaattgatactgtatttgtaaaacacagatggctcatgtaattgaagttcacagaattttatgttttgctttgtgacaactctgagcctttgtacatgttttcccctctatctaaaatgttacctattttgaatgatagtgcagacattagtaaggaaagcttgctaaatatttgtatcacctgggaagcctgtttttgcttcatcaggggacgttagtttttttcacatcaacctcctgcagaagacaatgctttctgaaagacagagtttgtgtcttattaatgcttgcattcaaatatctgacccaaagcttgtgatctttacatacttgctcagtgaatgacagtgaataactacctggttgtaaagactgtctcaaggggasttttgtctgggaaaagaaaagaaagacaaaaaagaggattgagaagcacccaataaattttcttatgaagttggcagctggggagagaagacagtgaaggatcctctggctcactgaaatacctcctagaggtactcatggttcactaaatttccatttaagataactgggcatctcaaatgctttggtctaggaggatgctaatccctctttgacattcatcaagtctgcgtccatctagggagattcctttgagggccaaagacccaaggaagagagacagctttataagtgccagtgcagcccacgtagaacagcatcctgagtcaaatggaagatgctggcatggagtggaagggctgcatgagaaagaagctacagagaagaaaggaccagtaagttgctgaaggtcctttgttttgtggataaaggaagtcattggagtgaactctctaatatcccttatctagcatgactatatgcagggttatggaatagggcagcttccaggaaaatggccaatctgttgttagggctgctgttctatcatatctcccgtgatgtttttgatggggaagacagatctggacttgttactgggctatgccttgtagagaatgatacagggttgtggcaggcaaggaaacataatctcagcaattgctccaattgatgaagcttctaacatttcagagtgctttcctccacagccccattaaacctaatcatttctctccaaaagaggcagggcccatgtggaaatctttcaacatagtaaaaaagctaaggtttagaaagattcagtaactttgccaaagccatatggaaggattgtccaaaaacctgtgcaagagctcatagcttcccactccaaataccttacgcttcattgttgtcagattatttttcaatcttttcttagagctcactgcaacattgctcactggaa

SEQ ID NO: 82785 - DNA, 597 bp, Homo sapiens
ttatgtatttrtttttactttttaaacatttttgttaaaaattaagacatggacacacacattagcctagacctacacgggatcaagatcatcagtatattgttttccacttccacacattgttccactggaggatcttttggacaataacatacatgaagctgtcatctcctaggataatgatgccttattcttgaatacctcctgaaggacctacctgagtcttttttacagttaactttttttttctaagtagaagaaatactctctcaaataacaataaaagtaaagtatagtaaataacaagtgataggatttttcactttcattataatctatggaaccactgtcctatatgcagtccgttgttgattgaaaagtcattatgtgaaacatgaccgtattttactattcttttagtgattatctcgtagataacaaattgcatcttgacatcttatcgtctactataaattaccatttttcaattttcccagtaatgctagatagaagctcagaactttaaaaactcaaatgatatctctttctttttgcatgattcctgccacaattatagttcaaagaatgtttaaaccc

SEQ ID NO: 82786 - DNA, 597 bp, Homo sapiens
ttatgtatttgtttttactttttaaacatttttgttaaaaattaagacatggacacacacattagcctagacctacacgggatcaagatcatcagtatattgtyttccacttccacacattgttccactggaggatcttttggacaataacatacatgaagctgtcatctcctaggataatgatgccttattcttgaatacctcctgaaggacctacctgagtcttttttacagttaactttttttttctaagtagaagaaatactctctcaaataacaataaaagtaaagtatagtaaataacaagtgataggatttttcactttcattataatctatggaaccactgtcctatatgcagtccgttgttgattgaaaagtcattatgtgaaacatgaccgtattttactattcttttagtgattatctcgtagataacaaattgcatcttgacatcttatcgtctactataaattaccatttttcaattttcccagtaatgctagatagaagctcagaactttaaaaactcaaatgatatctctttctttttgcatgattcctgccacaattatagttcaaagaatgtttaaaccc

SEQ ID NO: 82787 - DNA, 597 bp, Homo sapiens
ttatgtatttgtttttactttttaaacatttttgttaaaaattaagacatggacacacacattagcctagacctacacgggatcaagatcatcagtatattgttttccacttccacacattgttccactggaggatcttttggacaataacatacatgaagctgtcatctcctaggataatgatgccttattcttgaatacctcctgaaggacctacctgagtcttttttacagttaactttttttttctaagtagaagaaatactctctcaaataacaataaaagtaaagtatagtaaataacaagtgataggatttttcactttcattataatctatggaaccactgtcctatatgcagtccgttgttgrttgaaaagtcattatgtgaaacatgaccgtattttactattcttttagtgattatctcgtagataacaaattgcatcttgacatcttatcgtctactataaattaccatttttcaattttcccagtaatgctagatagaagctcagaactttaaaaactcaaatgatatctctttctttttgcatgattcctgccacaattatagttcaaagaatgtttaaaccc

SEQ ID NO: 82788 - DNA, 625 bp, Homo sapiens
caggcctggagcaattccatgtgtggattggaattcccttctgtatcatctacattgtagctgttgtgggaaactgcatccttctctacctcattgtggtggagcatagtcttcatgaacccatgttcttctttctctccatgctggccatgactgacctcatcttgtccacagctggtgtgcctaaagcactcagtatcttttggctaggggctcgcgaaatcacattcccaggatgccttacacaaatgttcttccttcactataactttgtcctggattcagccattctgatggccatggcatttgatcrctatgtagctatctgttctcccttgagatataccaccatcttgactcccaagaccatcatcaagagtgctatgggcatctcctttcgaagcttctgcatcatcctgccagatgtattcttgctgacatgcctgcctttctgcaggacacgcatcataccccacacatactgtgagcatataggtgttgcccagctcgcctgtgctgatatctccatcaacttctggtatggcttttgtgttcccatcatgacggtcatctcagatgtgattctcattgctgtttcctacgcacacatcctctgtgctgtctt

SEQ ID NO: 82789 - DNA, 750 bp, Homo sapiens
tgcctagagctcttgtggaccagagctggagaaagaggtgtcagaagccatgagcagatggaaaaatgtactagacagactgggaggaatgaaatgttttggagagtttggggtctgagcttaaaaagtggcttctggaaatggatcatgaaacaggagctttgagcatctgtcagtgaatggagtagaaaatagccattctattaatatgtttccttcctcctggcttacatatttcctagggtggagggaacacagaggctgtactgtagttggaaggatttggtgtagagaacacgaattacttcctctggcacaagtgattagtaaaaacataccccaatgtctccttgtgcctgggctgatgaagggacattatatccagaggagagggctgttagaagartatggcctttagtcagatgaatttagattcaaatcctagctcttttgtttaccagctgtgtgacctagagtaagtttattaacctctcaggaacaaaattctttgatctgtcatatggcaatgttagcaaacaaactagactgttagggaattcatagttcactatatgctgaatcctcagaaaagtgcctcccacagagagggcatttggcaaatgctctagcatcctaagccctagcatcaccctcactcatctaaaatctctgtacaattgctggttgcctctcacaggccccatttgtatcctgcagggacacagccagatggaggcaggagatggggct

SEQ ID NO: 82790 - DNA, 750 bp, Homo sapiens
tgcctagagctcttgtggaccagagctggagaaagaggtgtcagaagccatgagcagatggaaaaatgtactagacagactgggaggaatgaaatgttttggagagtttggggtctgagcttaaaaagtggcttctggaaatggatcatgaaacaggagctttgagcatctgtcagtgaatggagtagaaaatagccattctattaatatgtttccttcctcctggcttacatatttcctagggtggagggaacacagaggctgtactgtagttggaaggatttggtgtagagaacacgaattacttcctctggcacaagtgattagtaaaaacataccccaatgtctccttgtgcctgggctgatgaagggacattatatccagaggagagggctgttagaagagtatggcctttagtcagatgaatttagattcaaatcctagctcttttgtttaccagctgtgtgacctagagtaagtttattaacctctcaggaacaaaattctttgatctgtcatatggcaatgttagcaaacaaactagactgttagggaattcatagttcactatatgctgaatcctcagaaaagtgcctcccacagagagggcatttggcaaatgctctagcatcctaagccctagcrtcaccctcactcatctaaaatctctgtacaattgctggttgcctctcacaggccccatttgtatcctgcagggacacagccagatggaggcaggagatggggct

SEQ ID NO: 82791 - DNA, 712 bp, Homo sapiens
ggactggaggcccaacatggttggctctccatccctttcttcaccatgtacattgtggccattgtgggaaacatcctaattatggcagcagtgcaggaagactctgccctacatgagcccatgtacttatttctctccatgttggctgtcactgaggtgggcgtctctgtgtctacactgctactgttacaggcattctttggtttgatgcccacagagttgactttgatggctgcctggcccagatgttcttcattcacaccttctcctgcatggagtcaggggtcctactagccatgagctatgaccgctttgtagccatctacaaccycctgcgctatacagccatcctgaccctgccccgtattatctgcatgggtctgggcattacactgaagagtgtggcactcatggccccacttccaatccttttgaggcaactgccctattgccacactaatgtcctctcacactcctactgcctccactcagatctgatccagctgccttgtgcagatactaaactcaacagcatcctgggcttagccattgttctcgcaaatttcgggctggactcattgcttatcgtggtctcttatgtcttgattctttatacagtgatgggcattgcttctggagagggacggtggaaggctctcaacacatgtgtgtcacatatttgtgcagtgcttatatattatgtgcccatgat

SEQ ID NO: 82792 - DNA, 712 bp, Homo sapiens
ggactggaggcccaacatggttggctctccatccctttcttcaccatgtacattgtggccattgtgggaaacatcctaattatggcagcagtgcaggaagactctgccctacatgagcccatgtacttatttctctccatgttggctgtcactgaggtgggcgtctctgtgtctacactgctactgttacaggcattctttggtttgatgcccacagagttgactttgatggctgcctggcccagatgttcttcattcacaccttctcctgcatggagtcaggggtcctactagccatgagctatgaccgctttgtagccatctacaacctcctgygctatacagccatcctgaccctgccccgtattatctgcatgggtctgggcattacactgaagagtgtggcactcatggccccacttccaatccttttgaggcaactgccctattgccacactaatgtcctctcacactcctactgcctccactcagatctgatccagctgccttgtgcagatactaaactcaacagcatcctgggcttagccattgttctcgcaaatttcgggctggactcattgcttatcgtggtctcttatgtcttgattctttatacagtgatgggcattgcttctggagagggacggtggaaggctctcaacacatgtgtgtcacatatttgtgcagtgcttatatattatgtgcccatgat

SEQ ID NO: 82793 - DNA, 712 bp, Homo sapiens
ggactggaggcccaacatggttggctctccatccctttcttcaccatgtacattgtggccattgtgggaaacatcctaattatggcagcagtgcaggaagactctgccctacatgagcccatgtacttatttctctccatgttggctgtcactgaggtgggcgtctctgtgtctacactgctactgttacaggcattctttggtttgatgcccacagagttgactttgatggctgcctggcccagatgttcttcattcacaccttctcctgcatggagtcaggggtcctactagccatgagctatgaccgctttgtagccatctacaacctcctgcgctatacagccatcctgaycctgccccgtattatctgcatgggtctgggcattacactgaagagtgtggcactcatggccccacttccaatccttttgaggcaactgccctattgccacactaatgtcctctcacactcctactgcctccactcagatctgatccagctgccttgtgcagatactaaactcaacagcatcctgggcttagccattgttctcgcaaatttcgggctggactcattgcttatcgtggtctcttatgtcttgattctttatacagtgatgggcattgcttctggagagggacggtggaaggctctcaacacatgtgtgtcacatatttgtgcagtgcttatatattatgtgcccatgat

SEQ ID NO: 82794 - DNA, 955 bp, Homo sapiens
gccaagtatttttaatttggatttaatcaaaataaaacaatcagacaaatataaaataactagcttggacttttgaaaaagacaatgtcatgaaagcctgaagaaaaaaaagtacaggggaactgctctagattaaggaaaattaaacaaacactgacaactaaatgtattttatgatcctaaattggatcctggattttttgttgttgttgttgttctgagacggagtctcactctgttgcccaggctggagtgcagtggtgtgatctctgctcactgcaacctccgcctcctgggttcaagcaattctcctgactcagcctcccaagtagctgggattacaggcacccgccaccacgcccagctaatttttgtatttttagtagagacagggtttcaccatgttggtcaggctggtctcaaaatcctgacctcaggtgatccacccgcctcagcctcccaaagtgatgggattacaggcrtaagccactgtacccggtctcttttgtataggtaaataatgatcaaatattggcaactttatacggtttatcctaatatttaaggctaaaaacttgctgtaagcactggtatttcccataagttaaaatattgatattacaaaattatttcttgttgatgagtgcatttatttatagtaaaaatgcaaatcaggcatgggaaagatacacaccagttttaggatagtagttactttagagaaggaagggatgatgaaggaatatagatgtaacattttatttcttacaaatacagcattaaaatataaataaacatgtacagcaaataaggcaggagagtaacatctgtttaattttgttagtgggtaaatcccacaagattttatacttagatttttttatcattcagttgaaaatatttcttatttaattatgatctgtgatttcttttttttcccctcaggcctggcctg

SEQ ID NO: 82795 - DNA, 955 bp, Homo sapiens
gccaagtatttttaatttggatttaatcaaaataaaacaatcagacaaatataaaataactagcttggacttttgaaaaagacaatgtcatgaaagcctgaagaaaaaaaagtacaggggaactgctctagattaaggaaaattaaacaaacactgacaactaaatgtattttatgatcctaaattggatcctggattttttgttgttgttgttgttctgagacggagtctcactctgttgcccaggctggagtgcagtggtgtgatctctgctcactgcaacctccgcctcctgggttcaagcaattctcctgactcagcctcccaagtagctgggattacaggcacccgccaccacgcccagctaatttttgtatttttagtagagacagggtttcaccatgttggtcaggctggtctcaaaatcctgacctcaggtgatccacccgcctcagcctcccaaagtgatgggattacaggcgtaagccactgtacccggtctcttttgtataggtaaataatgatcaaatattggcaactttatacggtttatcctaatatttaaggctaaaaacttgctgtaagcactggtatttcccataagttaaaatattgatattacaaaattatttcttgttgatgagtgcatttatttatagtaaaaatgcaaatcaggcatgggaaagatacacaccagttttaggatagtagttactttagagaaggaagggatgatgaaggaatatagatgtaacattttatttcttacmaatacagcattaaaatataaataaacatgtacagcaaataaggcaggagagtaacatctgtttaattttgttagtgggtaaatcccacaagattttatacttagatttttttatcattcagttgaaaatatttcttatttaattatgatctgtgatttcttttttttcccctcaggcctggcctg

SEQ ID NO: 82796 - DNA, 719 bp, Homo sapiens
ggctccagggcagtgaggagctgccttgggactaacagaaaattggccagcttgtttttctttgggaccagaagaaaccagctcttttaaatctcaatggccaggcttggaaacctagcttgccagaagaatgggagggaggagagaagcggtccttttggggaggctctggccagggcattaaaaaggcaggattttgctggaaacagtgtgccctggccaagaccaggtggaaagatcaatttgggctttatgaattagccccttcatttattctgggtctgcttttcctcatctgtaaaayagtgttggaccatcagacaaaatatcagctatcaatcttgtcccagggcccaggggagggtcacggggtcctagttaccaggccctagggtttcaggcaacagattgagtacagaaggtaaaagctgagatgtgggacaggcccaacaacaagagtattgacctcaaccttcaaatctgcttaacccaggagaacaagctgggcacaacagcgctgctttcaacagccacctgtaacccatctccttgtatttctgaccttgccttgcctagacgctaaccctcaactccatttatactcccaacagacttgcgtttgatatttagacaccttggtcacaacatcttgcattctctcgggatgctgatttctaactgctctttggcctttcctgcattggtcctcctcaggcagg

SEQ ID NO: 82797 - DNA, 782 bp, Homo sapiens
aaccaagacaagttccagttagatggaaagcatcaggactgtcagggcccctgctactcagtcgcagatgtgacatctcacactcactttgactctcactcaactcccccacattgtaggtccggcagaagtctgtgctcaaatgctacatgtgaatggggcagaaggctcaatgggcacatgctgccacatctcctctatccatgctcatgctccaaaacactaggtcaaagagaaaattattaagaatttcaagatgggccggatgcagtggtttacacctgtaatcccagcactttgggagcccaaggctggatcacctgaggtcaggagttcgagaccagcctcgccaacatggtgaaaccccacgtctactaaaagaaatacaaaaattagctgggtgtggtggcrggtgctgtaatcccagctactcgggaggctgaagcaggagaatcacttgaacccgcaggcagaggttacagagagccgatattgagccattgcactccagcttgggcaacaataacaaaaaaaaaaaggatttcaagctggtgacagcagagcattaaaccaagcatagggccctcctgagcatgaactctatgtgactgtactcgtcacgtgcccatgaagatggccttgatgacagccacacctgtgtaaggacaggctcaagacacacttccacagccatccttccatttgctggccagttcacccaaagccaaattaggttaggaccccacactctgaggccctgggtctcagatatgacggccaaa

SEQ ID NO: 82798 - DNA, 1038 bp, Homo sapiens
caaatttctgagtgccaagaaataattttgtctgtctgtttagttttattgattaatttattgatkcagtaaaaaattcttattgggcagtctaagttttcaacacagatgccaatcaaacatcaattattttataaaaagacatattcccaatctcatagatttataatcaagtataattctgacttttcaaatggtatttttattagaatatcttacttaactataactatactcatctcaatatagatataattttaaagaagagtcatttgattacctcactgatgatctgagagatgagatgttgactttttaatttttattcttaatgactgactgatatttattcttgggtactcaggcactgttcaaagaattttgaaattttaattaaattattactcaatgaagcttggggtctcaaaaattagtaaatttattgggtgtctacagtcaataataatttaattgtatattttaaaataactaaaataatataattgggttgtctgtaacacaaaggataaatgtttgagatgatgggtacccctatttactttactgggatttttttttttgagacagagtcttgctttgttgcccaggctggagtgcagtggcgcaatcttggctgcaacctccacctcctggattcaagcaattctcctgtcttagctcccgagtagctgggactacaggcacatgccaccacgcccagctaatttttgtatttttagcagagatggagtttcactatattggtcaggttggtctccaactcctgacctcaggtaatccacccacatcaggctcccaaagtgctgggattacaggcatgagccactgtgcccggccctttaaagggattattacacattgtatgcttctatcaaaatatctcatacacccataaatatatacacctactatgtgcccacaaagatttaaaattttaaaagtcaatgaagttttgattcaatattttcacttttcaagatatctttcttgttctttatgtatctagtcaacacaaac

SEQ ID NO: 82799 - DNA, 1038 bp, Homo sapiens
caaatttctgagtgccaagaaataattttgtctgtctgtttagttttattgattaatttattgatgcagtaaaaaattcttattgggcagtctaagttttcaacacagatgccaatcaaacatcaattattttataaaaagacatattcccaatctcatagatttataatcaagtataattctgacttttcaaatggtatttttattagaatatcttacttaactataactatactcatctcaatatagatataattttaaagaagagtcatttgattacctcactgatgatctgagagatgagatgttgactttttaatttttattcttaatgactgactgatatttattcttgggtactcaggcactgttcaaagaattttgaaattttaattaaattattactcaatgaagcttggggtctcaaaaattagtaaatttattgggtgtctacagtcaataataatttaattgtatattttaaaataactaaaataatataattgggttgtctgtaacacaaaggataaatgtttgagatgatgggtacccctatttactttactgggatttttttttttgagacagagtcttgctttgttgcccaggctggagtgcagtggcgcaatcttggctgcaacctccacctcctggattcaagcaattctcctgtcttagctcccgagtagctgggactacaggcacatgccaccacgcccagctaatttttgtatttttagcagagatggagtttcactatattggtcaggttggtctccaactcctgacctcaggtaatccacccacatcaggctcccaaagtgctgggattacaggcatgagccactgtgcccggccctttaaagggattattacacattgtatgcttckatcaaaatatctcatacacccataaatatatacacctactatgtgcccacaaagatttaaaattttaaaagtcaatgaagttttgattcaatattttcacttttcaagatatctttcttgttctttatgtatctagtcaacacaaac

SEQ ID NO: 82800 - DNA, 720 bp, Homo sapiens
ggatccgcctgggcaacatagtgaaaccctgtctctaccaaaaatacaaaaaataaccagggcgtggtggtgcgtgactgtagtcccagctactcaggaggctgaggtggaaggatgaaccctggagatggaggttgcagtgagccgagatcgtgccattgcactccagcttgggtgacagagacaaaccctgtctcaaaacaaacaaacaaacaaacaaacaaacaaacaaaaaagcccaayaccataatggattaccccttacatgctagaaatgagtgaagctattcaaaaaactcgtttaacttttaaaaaactacatcagctaattttattataattattttttacaattaataaactgattcccacataattcagtttgtttgataaagactaatatgtagcaacactagaattacaataaaatcctaaatatatgtgtgtattatatatagaaggcagaattgaagtcattttgacagtagtatctgagatctaaaaaatgagaatttagtaaatccaatcctagtttccctgaaggcacaacctgttccatgagacattaacagagtttatgtttttcaataatttgtagaacaagtacttattagatcaagacacttagatagatgctttatacttcaggaatttattttttcacaatgatccaaagtattagatgaaggttttttgttttattttgcttttaattgacaa

SEQ ID NO: 82801 - DNA, 720 bp, Homo sapiens
ggatccgcctgggcaacatagtgaaaccctgtctctaccaaaaatacaaaaaataaccagggcgtggtggtgcgtgactgtagtcccagctactcaggaggctgaggtggaaggatgaaccctggagatggaggttgcagtgagccgagatcgtgccattgcactccagcttgggtgacagagacaaaccctgtctcaaaacaaacaaacaaacaaacaaacaaacaaacaaaaaagcccaacascataatggattaccccttacatgctagaaatgagtgaagctattcaaaaaactcgtttaacttttaaaaaactacatcagctaattttattataattattttttacaattaataaactgattcccacataattcagtttgtttgataaagactaatatgtagcaacactagaattacaataaaatcctaaatatatgtgtgtattatatatagaaggcagaattgaagtcattttgacagtagtatctgagatctaaaaaatgagaatttagtaaatccaatcctagtttccctgaaggcacaacctgttccatgagacattaacagagtttatgtttttcaataatttgtagaacaagtacttattagatcaagacacttagatagatgctttatacttcaggaatttattttttcacaatgatccaaagtattagatgaaggttttttgttttattttgcttttaattgacaa

SEQ ID NO: 82802 - DNA, 720 bp, Homo sapiens
ggatccgcctgggcaacatagtgaaaccctgtctctaccaaaaatacaaaaaataaccagggcgtggtggtgcgtgactgtagtcccagctactcaggaggctgaggtggaaggatgaaccctggagatggaggttgcagtgagccgagatcgtgccattgcactccagcttgggtgacagagacaaaccctgtctcaaaacaaacaaacaaacaaacaaacaaacaaacaaaaaagcccaacaccataatggattaccmcttacatgctagaaatgagtgaagctattcaaaaaactcgtttaacttttaaaaaactacatcagctaattttattataattattttttacaattaataaactgattcccacataattcagtttgtttgataaagactaatatgtagcaacactagaattacaataaaatcctaaatatatgtgtgtattatatatagaaggcagaattgaagtcattttgacagtagtatctgagatctaaaaaatgagaatttagtaaatccaatcctagtttccctgaaggcacaacctgttccatgagacattaacagagtttatgtttttcaataatttgtagaacaagtacttattagatcaagacacttagatagatgctttatacttcaggaatttattttttcacaatgatccaaagtattagatgaaggttttttgttttattttgcttttaattgacaa

SEQ ID NO: 82803 - DNA, 720 bp, Homo sapiens
ggatccgcctgggcaacatagtgaaaccctgtctctaccaaaaatacaaaaaataaccagggcgtggtggtgcgtgactgtagtcccagctactcaggaggctgaggtggaaggatgaaccctggagatggaggttgcagtgagccgagatcgtgccattgcactccagcttgggtgacagagacaaaccctgtctcaaaacaaacaaacaaacaaacaaacaaacaaacaaaaaagcccaacaccataatggattaccccttacatgctagaaatgagtgaagctattcaaaaaactcgtttaacttttaaaaaactacatcagctaattttattataattattttttacaattaataaactgattcccacataattcagtttgtttgataaagactaatatgtagcaacactagaattacaataaaatcctaaatatatgtgtgtattatatatagaaggcagaattgaagtcattttgacagtagtatctgagatctaaaaaatgagaatttagtaaatccaatcctagtttccctgaaggcacaacctgttccatgagacattaacagagtttatgtttttcaataatttgtagaacaagtacttattagatcragacacttagatagatgctttatacttcaggaatttattttttcacaatgatccaaagtattagatgaaggttttttgttttattttgcttttaattgacaa

SEQ ID NO: 82804 - DNA, 696 bp, Homo sapiens
  misc_feature (1)...(696): n = A,T,C or G
tgacccatcctttgtgtctgacccccaaaatttgcttgtacacatttacttctttagtgctgtgagttctttttgccagtggaggtagaaatgggtcgagtaggtagcccaggtgtttcattccacctgggcgagtaactttcagaagagggagccttgtatcctagaggaggaaagaaaatgagcccaggcttcagggacagctctccagtccatgacccctccaaggctgagacctgcaagttctgccctgggacctctcagtgcccctggttagcaatcctcccccatcaaatagaatagtccagacacatcccctagacctctgctacccagtaaggtaaccattagctagctctggttacttaaattacagttgacccttgaacagtgtgggggctaggggtgctcacccsctcacggttgataatccatgtataatttattttcttttttttttttttgagacagggtctcactccattgcccaggctggagtgcagtggcgtactctcagctcactgcaacctccacctcctgggctcaagtgatcctcctgcctcagactcccgagtagctgggactacaggcatgtnnnnnnnnnnnnnnnnnnnnnnnnnnnnnnnnnnnnnnnnnnnnnnnnnnnnnnnnnnnnnnnnnnnnnnnnnnnnnnnnnnnnnnnnnnnnnnnnnnnng

SEQ ID NO: 82805 - DNA, 505 bp, Homo sapiens
  misc_feature (1)...(505): n = A,T,C or G
actccatctcaaaaaacagaaaggaagagaaaacaccagggagcatctgttgtgttcctggcctaaagccttctgcagccacggggttccttaggaaactggccaagtacctgggtgaaacccttagaacctgcacccctcacacggaccccaggaagtacgtgtccttaacctcactgaatgtacgacaaaactgcagctctgggaagtcagctggccaggtcccgctgctgtatgcggtgcagctgggattcagcctcccgctgcccgccgtcttggccgaggccttcctctgcagcgggccttgttcctgttaaccagcagctgctggtgcacggngcccggggtggccctgagactctgcwtccctcaccagctcccaggtgacatgaggccaccagcacttgcaccacactctgtctggatagactccacactgccttatctccccagctcagcctcccgtaggacggatttgctttattcctccaggaactgtactaag

SEQ ID NO: 82806 - DNA, 574 bp, Homo sapiens
acctcagtgaatgtgtcctgggaagccccgcagttccccaatggcatcctggagggctacaggctggtgtacgagccctgcagccccgtggatggtgagtggaccccccagcacagctccccagccccccactttgcaaaagctcgctctcatctcagcgcccatcacagccaytacacatgagtgagattcggtgagagtctccccatcttataaacacggaaactgagtcccagacaagggaaagtgcatttccaaggtaaaacaacagcaagttgagggcagagttggaagagagatccaggtctcctaacttccaggcagagaatcgttaaatatattcttccccctttggtcaacggaaacagggaggaaaggaagggaaacctgagtggacagggctctgttgagaccataaagaaggggggcagccaaggacggtggctcacgcctgtaatgacagcactttgggaggctgaggcgggtggatcacctgaggtcaggagttccaagaccagcctggccaacatggtgaaaccccgtctctactgaaaatacaaaaattagccgggtg

SEQ ID NO: 82807 - DNA, 574 bp, Homo sapiens
acctcagtgaatgtgtcctgggaagccccgcagttccccaatggcatcctggagggctacaggctggtgtacgagccctgcagccccgtggatggtgagtggaccccccagcacagctccccagccccccactttgcaaaagctcgctctcatctcagcgcccatcacagccactacacatgagtgagattcggtgagagtctccccatcttataaacacggaaactgagtcccagacaagggaaagkgcatttccaaggtaaaacaacagcaagttgagggcagagttggaagagagatccaggtctcctaacttccaggcagagaatcgttaaatatattcttccccctttggtcaacggaaacagggaggaaaggaagggaaacctgagtggacagggctctgttgagaccataaagaaggggggcagccaaggacggtggctcacgcctgtaatgacagcactttgggaggctgaggcgggtggatcacctgaggtcaggagttccaagaccagcctggccaacatggtgaaaccccgtctctactgaaaatacaaaaattagccgggtg

SEQ ID NO: 82808 - DNA, 543 bp, Homo sapiens
tgtgygtgtgtgtgtgtgtgtgtgcacgcacgcgcgtgtgtgtcctttggtcctgggaagcctttgattcataacaataactcatcctagtctgatgtcaaggctaatttatacttcccagcttgatggcttgaatgctgcagggcatgagttttctccactctccaacccctctgttacctctacaagccttttgctctccagaaagcagttgtatttgaaggcaaaagacatgttaggtcagctaggaatgaggagtcagggagcacattgccctgggcccagaccccagcccctgactggcatgtttttgagtagccagtgaaatcccggctgagttgtggcctgggagtcctccagcaaagcaaaacctggctcatccaaggtcaccaagaggcaacaaggacagagagatagggtgaggaggctcaggagcctcgtaattgaatctataataaactaattacatgcatgaaagtgtgtggaagagaatgtttctctcttttgtatgagcaaagaatttggctaatttaaggagaatga

SEQ ID NO: 82809 - DNA, 1529 bp, Homo sapiens
agctactcgggaggctgaggcaggagaatcactcgaacccaggaggtagaggttgcagtgagccaagatcatgccactgcactccagcctgggcgagagagtgagactgtgtcaaaaacaaaaagatgatgtaagagactcacttcatgaagcacatgcgcatcaatcacctggccagggtactcagcagaccaaaaaacaagtagacgccctgattttcaggggtcccttggccttttgaaaaacattttttcaacctgtaattgatttgactttcaacacttagctgcagtccaatgcagaaatctttaatgcacctgtttagaatatgctcttcctgaggcttagccgtggatccttcggcactggatgttagggaagggggtacgtttcggtaaacaatgacagtgacttctgtttggaaccatagtttctttgttggaacgaagctcaactcatataaggagtttggaaccccctrccggacttacaacctccaacttctctctaatgaggctcttgggagctgtacaaaaaggtgaggctggagtttgactgttgtcttctgttgcaggttctgggcatttggaaaagtttctcttcgggctgttaagcaaggctaaagaggagaggaaaaaaatgttaaaatgtgtgttgtcttcctagttttccatttgtctgtgttcattttggagttggacataattgaaagcaccaaagctaataacagctaccatttattcaacagcttgtattttttaatacctacccccaactttcccttgcccacattgattgtgcctcctcccaaagccagaaaaactctaaacctcaagttaaccagttgtattagcctcctcccactaaagattttaaccaagcacccaaaacaagagtaactaatttgaatctagtcaagttaaggttctttgatgttagcctttatgtgtttaaaatatgtgcgtgtaaatctctgaattacagttccatcactcaggctaactgggaaaacttgaatgactcgcggatactggccctagtttcagttgctgtaacaacaagccgtgtttccttttgaacaggctggatcaggtgcaacaccaccataaggaagagtggattcggtggcatcacgatgctcttcacaggatacttcgtcctgtgttgtagctggagtttcagacgtctgagtaagtctttctatatttctagcctaaataacaggtcccattccgttatgtggacctccaagggattctctgaattttttttttttttttttttttttacagctttacagtatctggcatgccctggtgaatgagctattgcctggggtttctgggttttatttttttgagatacagttttgctcttgttgcccaggctggagtgcaatggcacgatctcagctcactgcaacctctgcctcctgggttcaagtgattctcctgcctcagcctctcgagtagctgggattataggcatgcaccaccatgcccggctaattttgtatttttagtagagac

SEQ ID NO: 82810 - DNA, 1529 bp, Homo sapiens
agctactcgggaggctgaggcaggagaatcactcgaacccaggaggtagaggttgcagtgagccaagatcatgccactgcactccagcctgggcgagagagtgagactgtgtcaaaaacaaaaagatgatgtaagagactcacttcatgaagcacatgcgcatcaatcacctggccagggtactcagcagaccaaaaaacaagtagacgccctgattttcaggggtcccttggccttttgaaaaacattttttcaacctgtaattgatttgactttcaacacttagctgcagtccaatgcagaaatctttaatgcacctgtttagaatatgctcttcctgaggcttagccgtggatccttcggcactggatgttagggaagggggtacgtttcggtaaacaatgacagtgacttctgtttggaaccatagtttctttgttggaacgaagctcaactcatataaggagtttggaaccccctgccggacttacaacctccaacttctctctaatgaggctcttgggagctgtacaaaaaggtgaggctggagtttgactgttgtcttctgttgcrggttctgggcatttggaaaagtttctcttcgggctgttaagcaaggctaaagaggagaggaaaaaaatgttaaaatgtgtgttgtcttcctagttttccatttgtctgtgttcattttggagttggacataattgaaagcaccaaagctaataacagctaccatttattcaacagcttgtattttttaatacctacccccaactttcccttgcccacattgattgtgcctcctcccaaagccagaaaaactctaaacctcaagttaaccagttgtattagcctcctcccactaaagattttaaccaagcacccaaaacaagagtaactaatttgaatctagtcaagttaaggttctttgatgttagcctttatgtgtttaaaatatgtgcgtgtaaatctctgaattacagttccatcactcaggctaactgggaaaacttgaatgactcgcggatactggccctagtttcagttgctgtaacaacaagccgtgtttccttttgaacaggctggatcaggtgcaacaccaccataaggaagagtggattcggtggcatcacgatgctcttcacaggatacttcgtcctgtgttgtagctggagtttcagacgtctgagtaagtctttctatatttctagcctaaataacaggtcccattccgttatgtggacctccaagggattctctgaattttttttttttttttttttttttacagctttacagtatctggcatgccctggtgaatgagctattgcctggggtttctgggttttatttttttgagatacagttttgctcttgttgcccaggctggagtgcaatggcacgatctcagctcactgcaacctctgcctcctgggttcaagtgattctcctgcctcagcctctcgagtagctgggattataggcatgcaccaccatgcccggctaattttgtatttttagtagagac

SEQ ID NO: 82811 - DNA, 1529 bp, Homo sapiens
agctactcgggaggctgaggcaggagaatcactcgaacccaggaggtagaggttgcagtgagccaagatcatgccactgcactccagcctgggcgagagagtgagactgtgtcaaaaacaaaaagatgatgtaagagactcacttcatgaagcacatgcgcatcaatcacctggccagggtactcagcagaccaaaaaacaagtagacgccctgattttcaggggtcccttggccttttgaaaaacattttttcaacctgtaattgatttgactttcaacacttagctgcagtccaatgcagaaatctttaatgcacctgtttagaatatgctcttcctgaggcttagccgtggatccttcggcactggatgttagggaagggggtacgtttcggtaaacaatgacagtgacttctgtttggaaccatagtttctttgttggaacgaagctcaactcatataaggagtttggaaccccctgccggacttacaacctccaacttctctctaatgaggctcttgggagctgtacaaaaaggtgaggctggagtttgactgttgtcttctgttgcaggttctgggcatttggaaaagtttctcttcgggctgttaagcaaggctaaagaggagaggaaaaaaatgttaaaatgtgtgttgtcttcctagttttccatttgtctgtgttcattttggagttggacataattgaaagcaccaaagctaataacagctaccatttaytcaacagcttgtattttttaatacctacccccaactttcccttgcccacattgattgtgcctcctcccaaagccagaaaaactctaaacctcaagttaaccagttgtattagcctcctcccactaaagattttaaccaagcacccaaaacaagagtaactaatttgaatctagtcaagttaaggttctttgatgttagcctttatgtgtttaaaatatgtgcgtgtaaatctctgaattacagttccatcactcaggctaactgggaaaacttgaatgactcgcggatactggccctagtttcagttgctgtaacaacaagccgtgtttccttttgaacaggctggatcaggtgcaacaccaccataaggaagagtggattcggtggcatcacgatgctcttcacaggatacttcgtcctgtgttgtagctggagtttcagacgtctgagtaagtctttctatatttctagcctaaataacaggtcccattccgttatgtggacctccaagggattctctgaattttttttttttttttttttttttacagctttacagtatctggcatgccctggtgaatgagctattgcctggggtttctgggttttatttttttgagatacagttttgctcttgttgcccaggctggagtgcaatggcacgatctcagctcactgcaacctctgcctcctgggttcaagtgattctcctgcctcagcctctcgagtagctgggattataggcatgcaccaccatgcccggctaattttgtatttttagtagagac

SEQ ID NO: 82812 - DNA, 1529 bp, Homo sapiens
agctactcgggaggctgaggcaggagaatcactcgaacccaggaggtagaggttgcagtgagccaagatcatgccactgcactccagcctgggcgagagagtgagactgtgtcaaaaacaaaaagatgatgtaagagactcacttcatgaagcacatgcgcatcaatcacctggccagggtactcagcagaccaaaaaacaagtagacgccctgattttcaggggtcccttggccttttgaaaaacattttttcaacctgtaattgatttgactttcaacacttagctgcagtccaatgcagaaatctttaatgcacctgtttagaatatgctcttcctgaggcttagccgtggatccttcggcactggatgttagggaagggggtacgtttcggtaaacaatgacagtgacttctgtttggaaccatagtttctttgttggaacgaagctcaactcatataaggagtttggaaccccctgccggacttacaacctccaacttctctctaatgaggctcttgggagctgtacaaaaaggtgaggctggagtttgactgttgtcttctgttgcaggttctgggcatttggaaaagtttctcttcgggctgttaagcaaggctaaagaggagaggaaaaaaatgttaaaatgtgtgttgtcttcctagttttccatttgtctgtgttcattttggagttggacataattgaaagcaccaaagctaataacagctaccatttattcaacagcttgtattttttaatacctacccccaactttcccttgcccacattgattgtgcctcctcccaaagccagaaaractctaaacctcaagttaaccagttgtattagcctcctcccactaaagattttaaccaagcacccaaaacaagagtaactaatttgaatctagtcaagttaaggttctttgatgttagcctttatgtgtttaaaatatgtgcgtgtaaatctctgaattacagttccatcactcaggctaactgggaaaacttgaatgactcgcggatactggccctagtttcagttgctgtaacaacaagccgtgtttccttttgaacaggctggatcaggtgcaacaccaccataaggaagagtggattcggtggcatcacgatgctcttcacaggatacttcgtcctgtgttgtagctggagtttcagacgtctgagtaagtctttctatatttctagcctaaataacaggtcccattccgttatgtggacctccaagggattctctgaattttttttttttttttttttttttacagctttacagtatctggcatgccctggtgaatgagctattgcctggggtttctgggttttatttttttgagatacagttttgctcttgttgcccaggctggagtgcaatggcacgatctcagctcactgcaacctctgcctcctgggttcaagtgattctcctgcctcagcctctcgagtagctgggattataggcatgcaccaccatgcccggctaattttgtatttttagtagagac

SEQ ID NO: 82813 - DNA, 1529 bp, Homo sapiens
agctactcgggaggctgaggcaggagaatcactcgaacccaggaggtagaggttgcagtgagccaagatcatgccactgcactccagcctgggcgagagagtgagactgtgtcaaaaacaaaaagatgatgtaagagactcacttcatgaagcacatgcgcatcaatcacctggccagggtactcagcagaccaaaaaacaagtagacgccctgattttcaggggtcccttggccttttgaaaaacattttttcaacctgtaattgatttgactttcaacacttagctgcagtccaatgcagaaatctttaatgcacctgtttagaatatgctcttcctgaggcttagccgtggatccttcggcactggatgttagggaagggggtacgtttcggtaaacaatgacagtgacttctgtttggaaccatagtttctttgttggaacgaagctcaactcatataaggagtttggaaccccctgccggacttacaacctccaacttctctctaatgaggctcttgggagctgtacaaaaaggtgaggctggagtttgactgttgtcttctgttgcaggttctgggcatttggaaaagtttctcttcgggctgttaagcaaggctaaagaggagaggaaaaaaatgttaaaatgtgtgttgtcttcctagttttccatttgtctgtgttcattttggagttggacataattgaaagcaccaaagctaataacagctaccatttattcaacagcttgtattttttaatacctacccccaactttcccttgcccacattgattgtgcctcctcccaaagccagaaaaactctaaacctcaagttaaccagttgtattagcctcctcccactaaagattttaaccaagcacccaaaacaagagtaactaatttgaatctagtcaagttaaggttctttgatgttagcctttatgtgtttaaaatatgtgcgtgtaaatctctgaattacagttccatcactcaggctaactgggaaaacttgaatgactcgcggatactggccctagtttcagttgctgtaacaacaagccgtgtttccttttgaacaggctggatcaggtgcaacaccaccataaggaagagtggattcggtggcatcackatgctcttcacaggatacttcgtcctgtgttgtagctggagtttcagacgtctgagtaagtctttctatatttctagcctaaataacaggtcccattccgttatgtggacctccaagggattctctgaattttttttttttttttttttttttacagctttacagtatctggcatgccctggtgaatgagctattgcctggggtttctgggttttatttttttgagatacagttttgctcttgttgcccaggctggagtgcaatggcacgatctcagctcactgcaacctctgcctcctgggttcaagtgattctcctgcctcagcctctcgagtagctgggattataggcatgcaccaccatgcccggctaattttgtatttttagtagagac

SEQ ID NO: 82814 - DNA, 686 bp, Homo sapiens
ctactcgggaggctgaggcaggagaattgctagaacccaggaggcagaggttgcagtgagccgagatcgcgccactactccagcctgggcaacaagtgaaactgcatctcaaaaaaaaaaaaaaaaaaaaaaamccaccagtatttttgtacaattaaaacaaaaagcccactttcagatgaaaacttcaggtgtaaaagtacaagataacgatgaattctgaaggccagcataattcacacactggacttcttaagaaaaaaaaaaatcacaatttgatgctaattgggattcgtttgatgaaatcagtgcctagtgagtagcgggtaggtccgacagcaggaacaaggcggcagcactcctgcatgctggctgggatggcctcgccgccatctcttgtatcagacacctggccatgggtgaggaaaagaagtgcctttctgatcgtcctgcataaatggagaggcccaaaaccaagagtcatttctcccacagagaaaagggcttttcttaaagttttaccagtctgaaagggattgtttgatacctgacattaatgaacagagactgaagaaagtgaaacaaacttctcattgtgcttaatactctatttctaaacttataaaacaaaaagagaatgatctgtagaggcaaaagatagtaacagtcattggaagtggcctctc

SEQ ID NO: 82815 - DNA, 533 bp, Homo sapiens
atcacagcaatccaagtagaacataaaagccagttagcccaatccagacaagtttgggatggggagctgtgtcctgctttacaggtaaagaaaatggagtggggacctttgtccagagggtctgggctttgggaaatgagatgcayggcttgttctcaggaactcggagtccttcataacatggggatacatctcgagggatgtagctacaatgaatagaactataatgatccccgctaatggagcaggccctctgccagacagtctgaaacgctgacatgcataactgtatttagttttcacacctctgtgcggcagctcctattgctacctgagcaccgacgctgcctgggtactgacgggcacataaagtacaggaagggtgagggttttgctggggaagtgatccggccgggcttgaactccaatctgcctgattttctaaagcccacacacctcttaactcctacactcctgcactcctgcctggagaccacaggatgggaacgagagctccccccaaaccccccacc

SEQ ID NO: 82816 - DNA, 1628 bp, Homo sapiens
  misc_feature (1)...(1628): n = A,T,C or G
ttgggtttcctgtctgttctccaccctgtgctggcgtcagccacctctgtcctttgcacctgagcttccctcagatccccttcccctctttatccgtggctctctgggccttgccctcgtgggacataattcaccttcatgctgttcagtcagagcggtgcgggtgctgcctgggtcagggacgaggcaagcccctgacatagccttggggcatccatcatgttggtgggaaggccaggaggggccctggctgcatgctctgggtggggctgatggggtcagcctggccctgagagagggtgcgtcttcctgctggtggcagtgcggggctgatttggaaactgaggtatccaagccaccctgggcctagccagacccctcttcacagtagaaggacgtcagtgaggccagctcgcaggtcctctctgtctggcctgctccagggaggtcacccagtggccaacagtgggtcttccaggccgctgccaccagggactaaaaggccttaacttcccctagcctgccccaaccaagcacctccagtctctcacatgcagggcccgttcttctcgccgttctgcttctgcaccctctggttgaagctgctctcccgccagaggtgtgcccagttcaaggccgcccttccccagggctgatggttttgttttcctcaccatactttctcatagacccagccgtgtaagtcgagcactgcagcagaggcgcctcgacaccctggcgtcctgtctgaattttggacccagtggtgggaactgctgagggggctgtctccccacttccagtgtggatccttccaatttggggaaggccatggggacccagtctacatcagagctgtccttgcagaaggctccggggtcccgaacctcggcctcactgttggtcttacttgtttttgagcctctgcctcctacacctccatatatatatatatatttttttttttttttttttttagacggagtncactctgtcgcccaggctggagtgtgatggcatgatctcrgctcactgcaacctccgcctcccattcaagagattctcctcctacctcagcctcttgagtagctgggattataggcacccgccaccacgcccggctaacttatttatttatttatttagagacagagtctcactctgtcacccaggctggagtgccgtgacacgatcttggctcactgcaacctccggcttccgggttctcctgccttagcctccggagtagctgggattacaggcacacgccaccaagcccagctattttattttttattttttatttttagcagagatggggtttcaccatattggcgaggatggtctcgatctcctgacctcgtgatccgcctgccttggactcccaaagtgctgggattacaggcgtgacgaccgtgcctgacccatctttttgtttaatatctctctttctctctttcccctttgctggctgtgaaatccctcaagggcaaggatcatgactaattcgtcttaagtcatccttagtccagcacccagcacaggcaccttctcagcatttattgaataaataaatggaacctttcctccctggccttttcatagcattagctgcccagtttcggaac

SEQ ID NO: 82817 - DNA, 667 bp, Homo sapiens
tggccctggccctgctccgagtcctggtttctcacagggccctggcttggtccttccttttatgctcaggtcttgattcacccagtgtgaccaagtcacagcccacaaacttggaacaccagagtcccacgctggccttcccaggaaacactgagaatcaacagagccagagtcaggggccaacattccacagcctggcaccccaactggccaacttgggtggaataaacaggtgcaggccctggttgggagaagcacgtagtggtctcctggccaactcagcagccggcaccagagggccagggagggaccatctggagtggggagagagccagccccgcatgcatcctccggccacrcagcagatctgagcagctagatgtattcgctatatgcaactgcgattattagcatgtgattaaggcaggagcggtggtaatgtcttccaggagctactagaattattaactctctgctattgggatgattagtgcccagctacctcgaagtattaacaattcatcactgggatgtttccatattccccattagaagtactagctaccgagatgcctggtggcgtcccattatgattgttatttgctatttgggctagagcaacaaaatcttgttttccttctcaattttaatcacctaaccgcggatc

SEQ ID NO: 82818 - DNA, 1224 bp, Homo sapiens
tgagggcagcacggttctggggcgtgtatacagacaatgagcagaggaagctggagcctcaggtcgctgccaaatgatgcctattttgaggcagaaagcccccttggttccacgttcttcgccctggctcctaacacagtgtcaggcacagggcagtactccacagaaattcactgagctgggcggccccttccccctccaccctgccaggctgctctgcccgagctgggctcatccccagctgagcggcagcctcatgggtcggcctcctctcctttgccccctccagtcccaggaccacccatgggcatcctgttcccagaggtgcggaccacgtctgtgcggctgatctggcagccccctgccgcccccaatggcatcattcttggtaagcctttgcccttcccgtgccccggctgcaggaagaaggaagaggcatgagctgcaaaggaggccacttcgttaccagcttgagggagagtaggtccagggagcctccacatcccctctagaatgggatctgggtgttagtcctcctgctagaaattccagtgtgtaagattatcttccggagggcaagatcagagttgaagtcccttaagagtcatgggttggctttgcgtccccaaatgtccccaggcccccagcctgccggccatctggtaaacctcggacgctgttccttagcatggccaagtgagggcacgctggcaggctcagcacagctggaaaagagtctcaaggcgcacaggagggaggctacagatgggaagcttcatctcacatttagagttcccccaatacacacacccagggttccggtcggcagctgcgtgaacttgagcaagtctactcccctctgcggcctcagtgccctcacctttaaaatgggggcttggactacctgtacctgtcccagggttctcagtcctgacctcacgcaccacctgccctagagcaatgccacatccccaagacagagtgggggcaggaaggacaagtgcrttagcccagaaagacctgggctgggattccagctctgtcacttaccagcaggtggtctggcctctccgggcctcagtttcttcacttggggctgttacgggggtcacagacactgtgcatagagtgcctctccatgccacccacagtccaccctccccaggtggcagctgaagactggagagtgacccagagacctcaggcagacagaccacagccaaa

SEQ ID NO: 82819 - DNA, 1224 bp, Homo sapiens
tgagggcagcacggttctggggcgtgtatacagacaatgagcagaggaagctggagcctcaggtcgctgccaaatgatgcctattttgaggcagaaagcccccttggttccacgttcttcgccctggctcctaacacagtgtcaggcacagggcagtactccacagaaattcactgagctgggcggccccttccccctccaccctgccaggctgctctgcccgagctgggctcatccccagctgagcggcagcctcatgggtcggcctcctctcctttgccccctccagtcccaggaccacccatgggcatcctgttcccagaggtgcggaccacgtctgtgcggctgatctggcagccccctgccgcccccaatggcatcattcttggtaagcctttgcccttcccgtgccccggctgcaggaagaaggaagaggcatgagctgcaaaggaggccacttcgttaccagcttgagggagagtaggtccagggagcctccacatcccctctagaatgggatctgggtgttagtcctcctgctagaaattccagtgtgtaagattatcttccggagggcaagatcagagttgaagtcccttaagagtcatgggttggctttgcgtccccaaatgtccccaggcccccagcctgccggccatctggtaaacctcggacgctgttccttagcatggccaagtgagggcacgctggcaggctcagcacagctggaaaagagtctcaaggcgcacaggagggaggctacagatgggaagcttcatctcacatttagagttcccccaatacacacacccagggttccggtcggcagctgcgtgaacttgagcaagtctactcccctctgcggcctcagtgccctcacctttaaaatgggggcttggactacctgtacctgtcccagggttctcagtcctgacctcacgcaccacctgccctagagcaatgccacatccccaagacagagtgggggcaggaaggacaagtgcattagcccagaaagacctgggctgggattccagctctgtcacttaccagcaggtggtctggcctctccgggcctcagtttcttcacttggggctgttacgggggtyacagacactgtgcatagagtgcctctccatgccacccacagtccaccctccccaggtggcagctgaagactggagagtgacccagagacctcaggcagacagaccacagccaaa

SEQ ID NO: 82820 - DNA, 872 bp, Homo sapiens
acaggtcaagttacaccaagggtgcagttaagacctcaaatccctctccaaagtcaggggcttagagcttgccagaaatttcaagtaggtatgtattcaagcctcagattttttattttgttaatttcctctggttactcatagacagctctagcctaacgggttggagcaaaacttgcttcagtggatccttcggagagaaatccacaggtctgggattcccaccatcaaagaaaatgatcttctaatcacatcttccctcagagggctaggatgcagtctagaagcatctacggagcccctccctgaagcagtttgtttctactctaggcgtcctgagggcagggactgggcttcgttgtctttgtccccaaaggcaagcctccactgttgttaaatgtttgtggaaggagcctgaatttgggtaaggagcagaattacaaagggacctaaagactttgtcccggaggtgtgcttaatagatatggatgataattgggaaaaggaaaacagattactaacagctagccctaagaaaaccgaaatacttcatttaaaatggaaggaaagagatggggagagggagatgtctcagagaaaataagaaacgttttttttttgtttttgtttttaacttaagctatgatttcaggagaaagaggtcctggaaygccaggaaccagggaggacttccacctggaagcaatgtggtagaaggagacccactgagggcctgcatatgcccagcaaatggccaggtgcctttgtttgtttgtttgtttgttttttgagacagggtctccctctgttacccaggctagaatgcagtggcatgatcttggcttactgcagcctcaacctgcaggctcaag

SEQ ID NO: 82821 - DNA, 872 bp, Homo sapiens
acaggtcaagttacaccaagggtgcagttaagacctcaaatccctctccaaagtcaggggcttagagcttgccagaaatttcaagtaggtatgtattcaagcctcagattttttattttgttaatttcctctggttactcatagacagctctagcctaacgggttggagcaaaacttgcttcagtggatccttcggagagaaatccacaggtctgggattcccaccatcaaagaaaatgatcttctaatcacatcttccctcagagggctaggatgcagtctagaagcatctacggagcccctccctgaagcagtttgtttctactctaggcgtcctgagggcagggactgggcttcgttgtctttgtccccaaaggcaagcctccactgttgttaaatgtttgtggaaggagcctgaatttgggtaaggagcagaattacaaagggacctaaagactttgtcccggaggtgtgcttaatagatatggatgataattgggaaaaggaaaacagattactaacagctagccctaagaaaaccgaaatacttcatttaaaatggaaggaaagagatggggagagggagatgtctcagagaaaataagaaacgttttttttttgtttttgtttttaacttaagctatgatttcaggagaaagaggtcctggaacgccaggaaccagggaggacttccacctggaagcaatgtggtagaaggrgacccactgagggcctgcatatgcccagcaaatggccaggtgcctttgtttgtttgtttgtttgttttttgagacagggtctccctctgttacccaggctagaatgcagtggcatgatcttggcttactgcagcctcaacctgcaggctcaag

SEQ ID NO: 82822 - DNA, 1049 bp, Homo sapiens
aagttgctgcatgggggaaacttggatttttattaaaatgttccagggtattgaatatccacagggagaaattagaatctgacctatgacctgacattacacacaaaattaattatacttggttcatagacataaatataaaaatwtttagtagagtatacagaacacaattcaggaaaataacttcaagaccacgaggtaggctaagctgtctgaaactagacctgaaaagcatttaccatgtaagacaaaacataatctatgtagttgatgtgagcaaagactgtggggcatatagaatcaaactcaaggttcctttaggcctctcctttcgagagttagctcagacttggaaatggaccagaggagcgggaatagtgcttacttcctgagatggcaggtggattgtatgaaatgataacatatcaaccacgtagtatcttactaagcctacactaaccccaaaaaacaaatattctaataaattgtgagatgtatcaattgcatcagttgtaatgtgtcattatttcctatatcagaatgaaagaacaaaatcactaacaatgaaactaatacttttatcatgtggaaatacactgtataataataacatcattatattataattattggaaaaaaagctgttttcaagacatatatctgtggatatttgtcttgtcttttgtcactcctatgattacatgggatggaacatataaggaaaatacaccaacaaaggttttcctaaatttcctcccattcagatccaactctcctaaatcactcttcaattcatcttgctcatggtgttccccatgttatcatcatttgtgctaatctgaggatttggtgatgctgcatttcctgtgagattcctaccttgctcctgcgagtctctattttcaaccttctgaaacctcctgtgcaagatttgatgctgatgttgatgacatcacccaaaaacatcaacaggaggtttgcagacaaagctcatatacaggtaaatgaggacaatcacattatgactgccttcccgtcaacagtgtttt

SEQ ID NO: 82823 - DNA, 1049 bp, Homo sapiens
aagttgctgcatgggggaaacttggatttttattaaaatgttccagggtattgaatatccacagggagaaattagaatctgacctatgacctgacattacacacaaaattaattatacttggttcatagacataaatataaaaatatttagtagagtatacagaacacaattcaggaaaataacttcaagaccacgaggtaggctaagctgtctgaaactagacctgaaaagcatttaccatgtaagacaaaacataatctatgtagttgatgtgagcaaagactgtggggcatatagaatcaaactcaaggttcctttaggcctctcctttcgagagttagctcagacttggaaatggaccagaggagcgggaatagtgcttacttcctgagatggcaggtggattgtatgaaatgataacatatcaaccacgtagtatcttactaagcctacactaaccccaaaaaacaaatattctaataaattgtgagatgtatcaattgcatcagttgtaatgtgtcattatttcctatatcagaatgaaagaacaaaatcactaacaatgaaactaatacttttatcatgtggaaatacaytgtataataataacatcattatattataattattggaaaaaaagctgttttcaagacatatatctgtggatatttgtcttgtcttttgtcactcctatgattacatgggatggaacatataaggaaaatacaccaacaaaggttttcctaaatttcctcccattcagatccaactctcctaaatcactcttcaattcatcttgctcatggtgttccccatgttatcatcatttgtgctaatctgaggatttggtgatgctgcatttcctgtgagattcctaccttgctcctgcgagtctctattttcaaccttctgaaacctcctgtgcaagatttgatgctgatgttgatgacatcacccaaaaacatcaacaggaggtttgcagacaaagctcatatacaggtaaatgaggacaatcacattatgactgccttcccgtcaacagtgtttt

SEQ ID NO: 82824 - DNA, 838 bp, Homo sapiens
cacactcagagttcctgaaaccattggtctggattccgatgaatggggcaatcagacacacaagcacaccaaggcttaaccattctggccactggaagggaaagaaactacccaggaatgccacctgcttccaactagctggtcccatgattggggctctagggaatttctctttacctgctgagatgtttctgtcttggggaacttcctttctcttcttgccactgcaccaggtgctgactacacttccttaccacagggcaagtgacatctgaagaggctgacagacttcagagctgggtaaggcaaccagaataccccctgaactgcctctgcctgttctgtgatgtcacctgacctctgctctgtttacatatagctgcttgtgacatcatctgggcatgtatggtatctgtatctaygtcaagacctgggctttgctccacttggagtcagctgattggcaggagggcatctgaaattgagaggaggtttcaggccgtttacccagccctttagtggggatctgtccgggactctgcagtctgaacctgcaactgtaaaaggtacaatatctacatttaggccctcatctctgtctctctctcctcctcctcctttcctctgcagggtgatctgcataagccccactccatccaggatccagccctggagggaaatagcctccactgccctagcagggtcactctttttggggccctggagtacttctcacaactgtgccagtttttatggggaaaggaaggatgtgaactattccataggttatctaaagggcttgccaccatgcttacggtgcttaatgttgtttatgtga

SEQ ID NO: 82825 - DNA, 838 bp, Homo sapiens
cacactcagagttcctgaaaccattggtctggattccgatgaatggggcaatcagacacacaagcacaccaaggcttaaccattctggccactggaagggaaagaaactacccaggaatgccacctgcttccaactagctggtcccatgattggggctctagggaatttctctttacctgctgagatgtttctgtcttggggaacttcctttctcttcttgccactgcaccaggtgctgactacacttccttaccacagggcaagtgacatctgaagaggctgacagacttcagagctgggtaaggcaaccagaataccccctgaactgcctctgcctgttctgtgatgtcacctgacctctgctctgtttacatatagctgcttgtgacatcatctgggcatgtatggtatctgtatctatgtcaagacctgggctttgctccacttggagtcagctgattggcaggagggcatctgaaattgagaggagrtttcaggccgtttacccagccctttagtggggatctgtccgggactctgcagtctgaacctgcaactgtaaaaggtacaatatctacatttaggccctcatctctgtctctctctcctcctcctcctttcctctgcagggtgatctgcataagccccactccatccaggatccagccctggagggaaatagcctccactgccctagcagggtcactctttttggggccctggagtacttctcacaactgtgccagtttttatggggaaaggaaggatgtgaactattccataggttatctaaagggcttgccaccatgcttacggtgcttaatgttgtttatgtga

SEQ ID NO: 82826 - DNA, 838 bp, Homo sapiens
cacactcagagttcctgaaaccattggtctggattccgatgaatggggcaatcagacacacaagcacaccaaggcttaaccattctggccactggaagggaaagaaactacccaggaatgccacctgcttccaactagctggtcccatgattggggctctagggaatttctctttacctgctgagatgtttctgtcttggggaacttcctttctcttcttgccactgcaccaggtgctgactacacttccttaccacagggcaagtgacatctgaagaggctgacagacttcagagctgggtaaggcaaccagaataccccctgaactgcctctgcctgttctgtgatgtcacctgacctctgctctgtttacatatagctgcttgtgacatcatctgggcatgtatggtatctgtatctatgtcaagacctgggctttgctccacttggagtcagctgattggcaggagggcatctgaaattgagaggaggtttcaggccgtttacccagccctttagtggggatctgtccgggactstgcagtctgaacctgcaactgtaaaaggtacaatatctacatttaggccctcatctctgtctctctctcctcctcctcctttcctctgcagggtgatctgcataagccccactccatccaggatccagccctggagggaaatagcctccactgccctagcagggtcactctttttggggccctggagtacttctcacaactgtgccagtttttatggggaaaggaaggatgtgaactattccataggttatctaaagggcttgccaccatgcttacggtgcttaatgttgtttatgtga

SEQ ID NO: 82827 - DNA, 957 bp, Homo sapiens
catgccacttttgtataatggagacttgagaaatagctgatattggcctggaaaacaacccttctatcyagcccttaatggagagatctgttctcattgttactggcagatgatcagttacaggctcaatgtgctgcatggccttacatgctcccagaacctgttgttcaattggagaactgtgggtttcagcacatttccatagctgtgaccagaatcttagaagaactgctttcccatgctgaacgtgccagaggacctgttttgtcccttcagggtttacagtcatatcaaaagacactggtatcccagaagcggggaactagagcttgtgcctgagcaatcaatattttagccttctcaaatgctaccacttgttctttagttctttatcctagatctgtttttttgctttgacacagggtttctagttcttttgcccaagttggagtgcagtggcacgatctcagctcactaaatactccacctcccaggttcaagcaactctcatgtctcagccacacaagtaactgggattacaggtacacatcaccatgcctggctaatttcttgcatttttagtagagatgaggtttcaccacgttgcccatgctggtctcgaactcctggcctcaagtgatctgcctgccacggtctcccaaagtgctgggattacaggtgtgagctactgtgcccagctgagattgcttctttaatagtcagtatggggatgcaaacatggaggtaaacatggaatgaaagcccactggtatcccaaaagacctaggaaactttgtaactgtttaactgttttaggtatggaaaactgttatattttctcaatgaccaagcctgaagtaaggtgtgtcttacttggccaagtgatccataggaactttgcagctggttccaggccttgtacttttgtgagttgatggcccatcctctggattgaag

SEQ ID NO: 82828 - DNA, 957 bp, Homo sapiens
catgccacttttgtataatggagacttgagaaatagctgatattggcctggaaaacaacccttctatctagcccttaatggagagatctgttctcattgttactggcagatgatcagttacaggctcaatgtgctgcatggccttacatgctcccagaacctgttgttcaattggagaactgtgggtttcagcacatttccatagctgtgaccagaatcttagaagaactgctttcccatgctgaacgtgccagaggacctgttttgtcccttcagggtttacagtcatatcaaaagacactggtatcccagaagyggggaactagagcttgtgcctgagcaatcaatattttagccttctcaaatgctaccacttgttctttagttctttatcctagatctgtttttttgctttgacacagggtttctagttcttttgcccaagttggagtgcagtggcacgatctcagctcactaaatactccacctcccaggttcaagcaactctcatgtctcagccacacaagtaactgggattacaggtacacatcaccatgcctggctaatttcttgcatttttagtagagatgaggtttcaccacgttgcccatgctggtctcgaactcctggcctcaagtgatctgcctgccacggtctcccaaagtgctgggattacaggtgtgagctactgtgcccagctgagattgcttctttaatagtcagtatggggatgcaaacatggaggtaaacatggaatgaaagcccactggtatcccaaaagacctaggaaactttgtaactgtttaactgttttaggtatggaaaactgttatattttctcaatgaccaagcctgaagtaaggtgtgtcttacttggccaagtgatccataggaactttgcagctggttccaggccttgtacttttgtgagttgatggcccatcctctggattgaag

SEQ ID NO: 82829 - DNA, 2128 bp, Homo sapiens
tgcatcttaaatttgaaagcgttaaaacactattgacgagaaggcagtcataatgtgattgtcctcatttacctgtataaacttggtctgcaaacctcctgtcaatgtttttgggtgatgtcatcaacatcagcatcaaatcttgcacgggaggtttcagaaggttgaaaatataaactcgcaggagcaacgtaggaatatcacaggaaatgcagcatcaccaaatcctcagattagcacaaatgatgataacatggggaacaccatgagcaagatgaattgaagattgatttaggagagttggatctgaatgggagaaaatttaggaaaacctttgtcggtgtattttccttatgtgttcyatcccatgtaatcataggagtgacaaaagacaagagaaatatccacatatatatgtcttgaaaatagctttttttccaataattataatataatgatgttattattatacaatgtatttccacatgataaaagtattagtttcattgttggtggttttgttctttcattctgatacagaaaataatgacatgttacaactgatgcaattgatacatctcacaatttactagaatattgatttctcggggttagtgtaggcttagtaatatactgcatggtttatatgttaccatttcatacaatccacctgccatctcagaaagtaaggactattcccgctcctctggtccatttctaagtctgagctaaatctccacaggagaggcctaacggaaccttgagtttgattctatatgccctagagtctttgctgacatcaactacatagaatatgttttgtcttatatgttaaatgcttttcaggtctagtttcagacagcttagcctacctcatggtcttgaagttattttcctgaattgtgttctgtatactctactacatatttttgtatttatgtctatgaactgactataattaattttgtgtgtaatgtcaggtcataggtcagattttagtttctccctgtggatattcaataccctggaatattttaataaaaatccaattttcccccattcagcaacttaaatatatgcttatatatgcatacgtctgttttttaagttattggctatttattctatctctgtgcaaataccacactcttattattaagagagtctattcaagaattttctctctagagattgttctttctcttcttttttaagagataattttgttctgtcacaccaactggggtacagtggcacaaacacagaacacattctgtgtgtgagctgctggactcaagtgatcctccccacgcagtctcctgagtagctggcactacaggtgcaagccaccatgcccggctaatttttaacttttttagtggagaggaggtctctctttgttgcccaggctgatctagaactcctggccttaagcaatccaccctccttagtctcccaaagtgtaggaattgcaagcgtgatccattgtgcctggcccagggcctgttctttttaaccactgagctgctctataatgaggtgaaagaagttcagacctgcatgccttgcacttacaccaatcctttcagctgtaccttgaatgaggctgtggatatacaactttagaacgttgccattgactctgaaatctctacgtccttgtgaatcttaggcagtctcccaacaccactgcccaccttatgtatttagtatctttgacaacagccaaggttgttgaaaacctagagaggcaaccctggctcccttctgccctgctgtagatgatcctgtgaacagggtccccctccagaccatgcccaacagaggcaggttcacaggggagcctctgagctcagagcctctctgggggctctgcatgcacaaggacagcacctccctgccttggttgtggggtgaggtagggaattcaagtcttttaaaaaaggctcagtttgttcaaaaatgattctgtttgctgaccaatgacaccttaagactttagattttacatcgtgatatttctccttgattttgatttaatttgttgtgcaaatgtcttaaatgcttgtgtataaatattctctttttttggtcatataaacatcatctaaaaccaaatatttatttt

SEQ ID NO: 82830 - DNA, 1226 bp, Homo sapiens
tggcagcctgttcggtagccatttcccagaaatccagtcctctggaaaagcaggaggaggtttgtgcataggctgcactaccttggtctggccatgggtagtcgtgcatgagaactactccctggagtatttctcagtccactgacactgatgtaattggctccacttcccctgctgttgagccaggccgacacgccctgggcaaaggcatctgtgtgaagtattgaggtgcaaatcagtgcttaagatatgtttggatgcaaaacactttttcatctacatgggcagtgtcttggcagaagatggagattctctctaaatgcatgtgagacagggtggctggcatctgggtcaggatgatgccctggtgcatggcaagaacatgccttgtgcagcagctgccctcgctaaggagagaggctcactgacctggcttttccccctcacctgctctccagaaagccagactctagggcagatgctcctgagaccccaggaacaggctggtggggagcgcagctcagagcattactcaggggatgtggcctttgtcatcctactttgaaacaattgactatttgagcctagattgatacagggcttcaagttgattttaatccaggctcctatagtcagcgagtgaaacagagattttagttgaaataatgagacctggtgttactagtcagctctccatgctggagaaccataagaaattataccaaaggcaggaaaggggatagaatatggggatcatcacgccaagaataaggtgcagcccatttagcccctgggtcttaaagagacccatagctcwggataatggcagatctatgcgtgacacagttatcatctttgtgcatcttcagagaattgtttttccttttactcctagggacaatgtcttaagtttgttagtaaattctattgaatttattaaagatgcttctgataaattctttttatattcatttcaaacaagaagcaatttcacactgacattgttattatagcactaaatacttttacactcatcaaattcctttgagactaactgaaatttctgacagccccacattctacaactttattgtaaattttctgccaaaaatgatgctttcctatacactcctaatacaagtataaatatattatttaatctagtcttaggttgatttaaaattttgaaaattcactccaaaaatatgttctgtaaccatatggcc

SEQ ID NO: 82831 - DNA, 1430 bp, Homo sapiens
aaatatatatgtatatgtgtatatatacttatctatgtatatgtgtatatatatacttgtatatatatatttatacatatatatgtgtttatataaatcaaaatctgttttatttgggcacatgtgtggctgttatagcttcctcatacagtctttgtgttttttgttttttgtttttttttttttgagacagagtctcgctctgttgcccaggctggagtgcagtggcgcgatcttggctcactgcaagctctgcctcctggattcatgccattctcctgcttcagcctaccaagtagctgggaatacaggtaccccccaccacgcccggctawttttttgtatttttagtagagacggggtttcatcgtgttagccaggatggtctcgatctcctgaccttgtgattcgcccacctcggcctcccaaagtgctgggattacaggcgtgagccaccacaccggacagtctgtcttttattatatgtagtgataaaagaggaaggattctttatcctacttaatacattaactttaaatcccgtatggtctgatattaatattgccattccaactttctttttgtttgcattgcctgattcctctttgtccactactttattttaaacctttattactttgttaaagatgcaatttgtgtaaagatcatgtaactaggttttgtttttaattcaattttcctattcttgcttactccttagtgggaggatttagatcattctaatttatagaaataatttatgtggttgacttttttgtttccatttttcttttcgatgtttatgatgatatattttacattcctatttcttccttttcctcttccacatttgccttttttgagcatttgaaaatttattctgattttttattccattcatggccatttttttcttccctcactctcataatctgatgcatattacttcattctttttttttgagccggagtctcactttgttgcccaggctggagtgcagtggcatgatctcggctcactgcaacctccgcctcccaggttcaagcgattctcctgcctcagcctccaaagtagctgggactacaggtgcccatcaccacactgggctaatttcttgtgtttgtggtagagacagggtttcaccatcttggcctggctggtcttgaactcctgaccttaagtgttccgcccatcttggcctcccaaagtgctgggattacaggtgtgagacaccgcgcccagctgcctattacttctttcttatttgaaaacaaaatattgaacatttccctcagcaagccacactgtgtcccactccaagatgttcactgctcccacttcctctctacctaatgggatgagatctttaggatacgtttgcctccctattcctttcccttcttccctctccttttccatttatttacct

SEQ ID NO: 82832 - DNA, 1430 bp, Homo sapiens
aaatatatatgtatatgtgtatatatacttatctatgtatatgtgtatatatatacttgtatatatatatttatacatatatatgtgtttatataaatcaaaatctgttttatttgggcacatgtgtggctgttatagcttcctcatacagtctttgtgttttttgttttttgtttttttttttttgagacagagtctcgctctgttgcccaggctggagtgcagtggcgcgatcttggctcactgcaagctctgcctcctggattcatgccattctcctgcttcagcctaccaagtagctgggaatacaggtaccccccaccacgcccggctatttttttgtatttttagtagagacggggtttcatcgtgttagccaggatggtctcgatctcctgaccttgtgattcgcccacctcggcctcccaaagtgctgggattacaggcgtgagccaccacaccggacagtctgtcttttattatatgtagtgataaaagaggaaggattctttatcctacttaatacattaactttaaatcccgtatggtctgatattaatattgccattccaactttctttttgtttgcattgcctgattcctctttgtccactactttattttaaacctttattactttgttaaagatgcaatttgtgtaaagatcatgtaactaggttttgtttttaattcaattttcctattcttgcttactccttagtgggaggatttagatcattctaatttayagaaataatttatgtggttgacttttttgtttccatttttcttttcgatgtttatgatgatatattttacattcctatttcttccttttcctcttccacatttgccttttttgagcatttgaaaatttattctgattttttattccattcatggccatttttttcttccctcactctcataatctgatgcatattacttcattctttttttttgagccggagtctcactttgttgcccaggctggagtgcagtggcatgatctcggctcactgcaacctccgcctcccaggttcaagcgattctcctgcctcagcctccaaagtagctgggactacaggtgcccatcaccacactgggctaatttcttgtgtttgtggtagagacagggtttcaccatcttggcctggctggtcttgaactcctgaccttaagtgttccgcccatcttggcctcccaaagtgctgggattacaggtgtgagacaccgcgcccagctgcctattacttctttcttatttgaaaacaaaatattgaacatttccctcagcaagccacactgtgtcccactccaagatgttcactgctcccacttcctctctacctaatgggatgagatctttaggatacgtttgcctccctattcctttcccttcttccctctccttttccatttatttacct

SEQ ID NO: 82833 - DNA, 588 bp, Homo sapiens
tgcctcatctttctcaatactcataaaaatcaacaaggatgacatttattgactccattttaaagaggagggatttcattaaaattaagactccaggtcatgccactaagtagaaaatggaccaggacaagaatccagatcttctgacaccaaggagatgctctagsgtacagtagaaagatcatatctttgaaatcatacagacttgcattcaaaggctgattgctgagggtatttactgtgtgacttaggcaaatttctcaacatctctgacctgtgaaatagtttttttttaaatacatactctaagtaaggattcaataagacaatttacataccatgaatgttaacttccttcttcatctccaaagtctccgatctttctaccaaactagattaaatggcagaatcctagctcgaatccacaaatagctacatggagaaagaaaactcaacttaccaatggatggtgtttcaaagattcctttagcaggtatatttggaaatctaaatgaattttccaatataagcaattccatagtgttttgggggttgaaatttgtcccgcagaaaattatgttgaagttc

SEQ ID NO: 82834 - DNA, 609 bp, Homo sapiens
tgcattacaaatttcttcaataaagtatcaagtatgagaagtcttgaataaggaatagagaggcagggagagattcattccagtcacaggttggaggcttccagcaagaggtgacctttatgctgagactcaaataatgggttgaattgaggagataggaagaagggyactctgagtgcattccagagtgaacaaaagcaaacaacaataacaacaataaaacccaacatggtatcttcagggtctcttttactttgctccccgacccaaccctgcccaggcaatccattagctctgctgttaattccactttcagtataaatcctgactattccaattcttcatgccccaccaccccagtgtaaaccatcatgtttcccctgaagacaactgtgatctcctagctgcctttcctacttccacttttgctccctgcagtcttttctcccaaagagaagccagatctattctcttaaaacatgaaccagatcatttccctgcttataatcatctactagcttcccattgaacttaaaatcctaaccacctacaatgaccttcacaactccatgcactagctctgacttcctctccagccacatttcccac

SEQ ID NO: 82835 - DNA, 609 bp, Homo sapiens
tgcattacaaatttcttcaataaagtatcaagtatgagaagtcttgaataaggaatagagaggcagggagagattcattccagtcacaggttggaggcttccagcaagaggtgacctttatgctgagactcaaataatgggttgaattgaggagataggaagaagggcactctgagtgcattccagagtgaacaaaagcaaacaacaataacaacaataaaacccaacatggtatcttcagggtctcttttactttgctccccgacccaaccctgcccaggcaatccattagctctgctgttaattccactttcagtataaatcctgactattccaattcttcatgccccaccaccccagtgtaaaccatcatgtytcccctgaagacaactgtgatctcctagctgcctttcctacttccacttttgctccctgcagtcttttctcccaaagagaagccagatctattctcttaaaacatgaaccagatcatttccctgcttataatcatctactagcttcccattgaacttaaaatcctaaccacctacaatgaccttcacaactccatgcactagctctgacttcctctccagccacatttcccac

SEQ ID NO: 82836 - DNA, 687 bp, Homo sapiens
tttctttttgttttttaaaatttttttaaattgaaaacaaaacaaaacaaaacagatgaggtctcactgtgttgcccaggctggtcttgaactcctgggctcaagtgatcctcccaccttggcttcccaaagtgctgggattacaggtgtgaaccactgtacccagcctgattttcatattaatagggaaactgatttctcatatattctggataatgtaactgaaggttcaggcttttatgtttatttatttatttttctctttagtatcagggaaggctgttttagcacctgctgtctcttttgcattacccagattacctgcagttgttgcaagtagaaaagttttggttttggccatgtttcttagtatatataatacttctttttactcgagagatttgaaaatgtacctggccagaaaaattaggttttacctgggagttgtgctttggaagctgacttaaagcctgagcagcagctttctcccccaacccccatccttctccgtggccaacctttggtttgggcatgggcagtcattatcactctgtgaggctgagacactgctcatggcccagaggartgaaggtggatcttcttgaaggcctttgtcttttgtgctattcaagtggtcctactagtgagcaaagtttacagtattttgtatctcattcctcaggatcc

SEQ ID NO: 82837 - DNA, 1307 bp, Homo sapiens
tctgctgggtgcagtggctcatgccctgtaatcccagcactttgggaggctgaggtgggtggattgtttgagtcccggagttttgagaacagcctggccaacatggtgaaaccttgtctcttctaaaaatacaagaattagcccaggcgtggtggcacacgcctatgttcccagctactcaggaggctaaggctggagaatcagttgaatctgggaggcagagcttacagtgagccaaaactgtgccmctgccctccaacctaggtgacagagggaggctctgtttaaaaaaaaaaagtgtaaaatatcttttctgtctagaagaggatcttatctttccagtagctacatctggctagtatctaccatactagtgaggtagtgtggtagctgttgggcacctgatgtgtagctaattctactgaggaactgtatggctaatatctaccatattggccagtgcagttctagacaaataggcaaataacacaagaaaatatataagataggaagaatggaaagcacagagtttacgtgaaagataaagtaagttgtctacctcagctggaattgagcttataaggaagtcaaatgagaaataatatttggtgaagttgagtggatccagattatgaaagactgaacattgctttgggacaatcgggagcttatgatgtctcctgaactaagaagtgttatgttcagtcctatgctatgggaagattaaacaggcaggggtagctatgaagaaccagaaaggttacagaagtagagatgctacatgtgagaccacagtaagagtccagacaagttaatgaaaacctgaactaagacagtaacaaaggaaatgaaggaaaaagacagatatgaaacatatcttgaaagtagaaatgagaaaattaagaactgattggaagagttggaaagcaaagaagagaagtgaactttggagaacaaaagatgaaagagaaattataagagaaatagatttggtagtacagccatctgatttagaaataatattctgatttttgttttagatcttttaggcttaaggtgccaatgttagaaatataactatatcattaaagagaaatgttagaaaatgtggtagaaatttaaggaccatccgcatataaattagggatcaacaaactatagccctcaggtcaaatccagccaactgcccattttctcaataaagttttattggaacacagcttctctaatttgcttgtatattatctatagctgttttctagtataaaatgaagagctgagtaaatgcaacaggctgttaggcacac

SEQ ID NO: 82838 - DNA, 927 bp, Homo sapiens
ggatgacattttctcaccaatgatttcttgctagaccaagaaatctctgatttgattaaacatgtaactttttggtccatttccaacatgaactgaaacaactgtcagaggcccaattccatgaactagggccagctctattcaacccagggggcatggtactggtaaaggtacttcctttcctttctccctctgtaagcccagattgggagggaccttacaccatacttctttctactcctacagcagtaaaggtcactggaatagattcttgcattcattatacttgagtaaaggcctgggaagctgacggagtttcctcckttgacccagaagagcactcaaagtactaatatgaagagatcagggaccttaagataaaaatcacaaaatataagtgtcaataattaatcttccatggatatcccctttatagtcttgcttatgcttgctgttcttaccttcgttctatattataccatggggcacctttaccaaagaccccttaatcctaaatgcctgtgagaatatgtactcccctaaacagttatctctcttctaaagtttaagtgttcccatacagagtttaatttctgtcactacagtgaaacagctcagggcataatgttgttttcaagaggattagtgtatttcacttcttatttctataatctttggcactagattcttttcttttaactcctttttgtataacatacatatttgatccatgcgtacttaaccaattcttgtcacccagagggcatcaaactccaatcagtcatgcaactggagcctcagacgatgactccagccacttctgagtccaggaacccttaggtagacctctgagggaaatctgactgccattttccccaaaacaatgccccctgtcagcaggaagcagctaagattggtcatcatcca

SEQ ID NO: 82839 - DNA, 927 bp, Homo sapiens
ggatgacattttctcaccaatgatttcttgctagaccaagaaatctctgatttgattaaacatgtaactttttggtccatttccaacatgaactgaaacaactgtcagaggcccaattccatgaactagggccagctctattcaacccagggggcatggtactggtaaaggtacttcctttcctttctccctctgtaagcccagattgggagggaccttacaccatacttctttctactcctacagcagtaaaggtcactggaatagattcttgcattcattatacttgagtaaaggcctgggaagctgacggagtttcctcctttgacccagaagagcactcaaagtactaatatgaagagatcagggaccttaagataaaaatcacaaaatataagtgtcaataattaatcttccatggatatcccctttatagtcttgcttatgcttgctgttcttaccttcgttctatattataccatggggcacctttaccaaagaccccttaatcctaaatgcctgtgagaatatgtactcccctaaacagttatctctcttctaaagtttaagtgttcccatacagagtttaatttctgtcactacagtgaaacagctcagggcataatgttgttttcaagaggattagtrtatttcacttcttatttctataatctttggcactagattcttttcttttaactcctttttgtataacatacatatttgatccatgcgtacttaaccaattcttgtcacccagagggcatcaaactccaatcagtcatgcaactggagcctcagacgatgactccagccacttctgagtccaggaacccttaggtagacctctgagggaaatctgactgccattttccccaaaacaatgccccctgtcagcaggaagcagctaagattggtcatcatcca

SEQ ID NO: 82840 - DNA, 927 bp, Homo sapiens
ggatgacattttctcaccaatgatttcttgctagaccaagaaatctctgatttgattaaacatgtaactttttggtccatttccaacatgaactgaaacaactgtcagaggcccaattccatgaactagggccagctctattcaacccagggggcatggtactggtaaaggtacttcctttcctttctccctctgtaagcccagattgggagggaccttacaccatacttctttctactcctacagcagtaaaggtcactggaatagattcttgcattcattatacttgagtaaaggcctgggaagctgacggagtttcctcctttgacccagaagagcactcaaagtactaatatgaagagatcagggaccttaagataaaaatcacaaaatataagtgtcaataattaatcttccatggatatcccctttatagtcttgcttatgcttgctgttcttaccttcgttctatattataccatggggcacctttaccaaagaccccttaatcctaaatgcctgtgagaatatgtactcccctaaacagttatctctcttctaaagtttaagtgttcccatacagagtttaatttctgtcactacagtgaaacagctcagggcataatgttgttttcaagaggattagtgtatttcacttcttatttctataatctttggcactagattcttttcttttaactcctttttgtataacatacatatttgatccatgcgtacttaaccaattcttgtcacccagagggcatcaaactccaatcagtcatgcaactggagcctcagacgatgactccagccacttctgagtccaggracccttaggtagacctctgagggaaatctgactgccattttccccaaaacaatgccccctgtcagcaggaagcagctaagattggtcatcatcca

SEQ ID NO: 82841 - DNA, 1101 bp, Homo sapiens
tttaatttttttccrtaacaagggcatagcaatattctaatcattttgagccgtgaaatagaacacagagtaaaaatcctctagtctatcctatgtggcagtggcaattgtttgtggtatatgttgcatatacaccctaattgcttatggtgtagagacataaaagaatatgttttgagatctgcactaataagaaaaatgtctgggtcatctttagcactctttattcatgactctatttgcatgccctaatcatacacaatgaatcagtagtttcggctgcttaatgaacaaaaattcagaacagagaagatagctttctccagttgtgtcatcagctagcaattccaaggtccccgacaatttccttaacacacacaacccccagtaattatagcacattttctaatagataacttctcaaacaaattctcaattacgtagggggtaaatccatgcctgaagactgcttcatcactgagattggctgttttatgcccccaagcagtggctgacacttccctttcacacagtgttcggaactcttggagtgcatgagacatctgggaaattagagctatgataggctacctgagtcatgttggagtcctgctcaactggagaacacagaaacgcattggtgtttgtggctttgttcatatgtatgggggatttttgaatctcatcttacttcccataacctattaataattgtctttattttggcttttcagacaagagaaagatttttaaccttttccccttagcctacgtactttgttgttgttgctgtttgaggcagggtcttgccctgttgctcaggctggactgcagccgtgcaatcatagctcactgaagcctcaaactcctgggctcaaactatcctcttgcttcaacctcctgagtagttaggactacaagtatgtgccactatgcccatataattaaaaacaaaatttttttttggaacagggtcttgctatgttgcccaggctggtcttgaactcctggctttgagcaatcctcctaccccagcctcccaaagtcctaggattacaggcctgagccactgtgtctggccagcctacatacattcttaag

SEQ ID NO: 82842 - DNA, 1101 bp, Homo sapiens
tttaatttttttccataacaagggcatagcaatattctaatcattttgagccgtgaaatagaacacagagtaaaaatcctctagtctatcctatgtggcagtggcaattgtttgtggtatatgttgcatatacaccctaattgcttatggtgtagagacataaaagaatatgttttgagatctgcactaataagaaaaatgtctgggtcatctttagcactctttattcatgactctatttgcatgccctaatcatacacaatgaatcagtagtttyggctgcttaatgaacaaaaattcagaacagagaagatagctttctccagttgtgtcatcagctagcaattccaaggtccccgacaatttccttaacacacacaacccccagtaattatagcacattttctaatagataacttctcaaacaaattctcaattacgtagggggtaaatccatgcctgaagactgcttcatcactgagattggctgttttatgcccccaagcagtggctgacacttccctttcacacagtgttcggaactcttggagtgcatgagacatctgggaaattagagctatgataggctacctgagtcatgttggagtcctgctcaactggagaacacagaaacgcattggtgtttgtggctttgttcatatgtatgggggatttttgaatctcatcttacttcccataacctattaataattgtctttattttggcttttcagacaagagaaagatttttaaccttttccccttagcctacgtactttgttgttgttgctgtttgaggcagggtcttgccctgttgctcaggctggactgcagccgtgcaatcatagctcactgaagcctcaaactcctgggctcaaactatcctcttgcttcaacctcctgagtagttaggactacaagtatgtgccactatgcccatataattaaaaacaaaatttttttttggaacagggtcttgctatgttgcccaggctggtcttgaactcctggctttgagcaatcctcctaccccagcctcccaaagtcctaggattacaggcctgagccactgtgtctggccagcctacatacattcttaag

SEQ ID NO: 82843 - DNA, 1101 bp, Homo sapiens
tttaatttttttccataacaagggcatagcaatattctaatcattttgagccgtgaaatagaacacagagtaaaaatcctctagtctatcctatgtggcagtggcaattgtttgtggtatatgttgcatatacaccctaattgcttatggtgtagagacataaaagaatatgttttgagatctgcactaataagaaaaatgtctgggtcatctttagcactctttattcatgactctatttgcatgccctaatcatacacaatgaatcagtagtttcggctgcttaatgaacaaaaattcagaacagagaagatagctttctccagttgtgtcatcagctagcaattccaaggtccccgacaatttccttaacacacacaacccccagtaattatagcacattttctaatagataacttctcaaacaaattctcaattacgtagggggtaaatccatgcctgaagactgcttcatcactgagattggctgttttatgcccccaagcagtggctgacacttccctttcacacagtgttcggaactcttggagtgcatgagacatctgggaaattagagctatgataggctacctgagtcatgttggagtcctgctcaactggagaacacagaaacgcattggtgtttgtggctttgttcatatgtatgggggatttttgaatctcatcttacttcccataacctattaataattgtctttattttggcttttcagacaagagaaagatttttaaccttttccccttagcctacgtactttgttgttgttgctgtttgaggcagggtcttgccctgttgctcaggctggactgcagccgtgcaatcatagctcactgmagcctcaaactcctgggctcaaactatcctcttgcttcaacctcctgagtagttaggactacaagtatgtgccactatgcccatataattaaaaacaaaatttttttttggaacagggtcttgctatgttgcccaggctggtcttgaactcctggctttgagcaatcctcctaccccagcctcccaaagtcctaggattacaggcctgagccactgtgtctggccagcctacatacattcttaag

SEQ ID NO: 82844 - DNA, 1259 bp, Homo sapiens
tatgtgtgtatttgtgtgtccatgctgaaggcagaggccggggaggaagttgtgttaaagcaaacattccagatcacagtggactgggtgaattttaagttgggtgtttctgggaaaagtatgagaatgatgagtgtataatggaccactcctttacataatgctgcatttatgctgcaggtttgggcaaggttatttggaggcaacacagtgcacccattggtgcaataaaaatgggatggactactgccctggaagtgagattctggagaaaatggggaacacaagcttccctctaatcaccaaagtcttatccagacgggaaggaattcactttgaggagtagagggacatagattctaggtcaaccttgagaatgaacttcctgggtacctagaacaaagcatgttccctatataggccttagttttctctgtgaagtgatgggctgacttggaagacctctgtagaacctgtgaattcttaatatttaatgcttaatacttaattattcttaatatttaaatattaagttttattataatacttacttggatacttagtatatcccttaaaatgatttgctattgactcctaatcactcggtgtggaaatgtaagaatattgctaaaaccactttcttattttcatgtttggtgaaactgaacacattctcactaaattacattgtgtacatttatacattaataatgagaatgttaaatattgggccaaagtgacctttgtgaccttcatttttagaagcttagaattaaatggctgaaggtaacttttaatacctaccaaatagcattattttaatagcattttttttttttttttttgagatggagtcttgctctgttgcctaggctggactgcagtggtgcgatctcggctcactgcaacctctgcctgcygggttcaagcaattctctgcctcagcctcccgagtagctggtattacaggcacccaccaccatgcttggctactctttttttttgtatttttagtagagacggggtttcaccatcttggccaggctggccttgaactcctgaccttgtgatctgcccaccttggcctcccaaagtgctggtattacaggcgtgagccaccgctagcatttgtttattatgatacgttgtaggatgaaatgagaattttttcagtttgcagtggaaagaggagtttggagtaaggggtgatggagagaggagtttggggttagcagctcagggactgaaaacttaagttc

SEQ ID NO: 82845 - DNA, 1259 bp, Homo sapiens
tatgtgtgtatttgtgtgtccatgctgaaggcagaggccggggaggaagttgtgttaaagcaaacattccagatcacagtggactgggtgaattttaagttgggtgtttctgggaaaagtatgagaatgatgagtgtataatggaccactcctttacataatgctgcatttatgctgcaggtttgggcaaggttatttggaggcaacacagtgcacccattggtgcaataaaaatgggatggactactgccctggaagtgagattctggagaaaatggggaacacaagcttccctctaatcaccaaagtcttatccagacgggaaggaattcactttgaggagtagagggacatagattctaggtcaaccttgagaatgaacttcctgggtacctagaacaaagcatgttccctatataggccttagttttctctgtgaagtgatgggctgacttggaagacctctgtagaacctgtgaattcttaatatttaatgcttaatacttaattattcttaatatttaaatattaagttttattataatacttacttggatacttagtatatcccttaaaatgatttgctattgactcctaatcactcggtgtggaaatgtaagaatattgctaaaaccactttcttattttcatgtttggtgaaactgaacacattctcactaaattacattgtgtacatttatacattaataatgagaatgttaaatattgggccaaagtgacctttgtgaccttcatttttagaagcttagaattaaatggctgaaggtaacttttaatacctaccaaatagcattattttaatagcattttttttttttttttttgagatggagtcttgctctgttgcctaggctggactgcagtggtgcgatctcggctcactgcaacctctgcctgccgggttcaagcaattctctgcctcagcctcccgagtagctggtattacaggcacccaccaccatgcttggctactctttttttttgtatttttagtagagacggggtttcaccatcttggccaggctggccttgaactcctgaccttgtgatctgcccaccttggcctcccaaagtgctggtattacaggcgtgagccaccgctagcrtttgtttattatgatacgttgtaggatgaaatgagaattttttcagtttgcagtggaaagaggagtttggagtaaggggtgatggagagaggagtttggggttagcagctcagggactgaaaacttaagttc

SEQ ID NO: 82846 - DNA, 1231 bp, Homo sapiens
ttactaagtaaaagaagccaatctgaaaaggctatactatatgagtccaagcatatgacattttgaaacaggcgaaattatggagacaataaaaagatcagtggttgccaaaggctagtgaggagggaaggatgaaaagatggcacatagggtatttagggcagtgaaactcctctgtatgatactacaatgtcattatacatttgtccaaacccctacttcagtgtaggtttattagttgtaacaaatgtaccactctggtgggggatattgatcatgggagaggctatgcgcgtgtggggatagggacaaggggtatgtgggaaatctctgtaccttcctctcaattttgctttagataattttgcttttgggtactggttcttgggttttaagtaaatatttatatttgtattgactttgccacagtaggtacagcaaatttgctctaaaactgctctaagaaaataaagtcttaaaaaaaagctggtgaggagggaaaggtttgaaaaaggtaaaggtaagaaactatgcccccatgcaccggctcctgcggcttgtaagggtgggatttaggagccagagaggtcaggttgttcacctgaaaggtgaggccacctggagggagaatggaagccccaaggtgaggaattcacagtctgcttctctctgatgaaaacacagagctatactaaccatattagaaaggggttaagaaattagtatgtaaactctccaaaacctggtcaagcacattagctttattaaacctctctatttggaaaaaaaatcatgtgaaaatttttattacaactagcaaaagctacacaaatagtttaaaatcatacgatttatgggatcattgagacttctggtcactcagtcattaatctagcaaaggccaagtgattaacataagaataagcagtcagtaaagtttgagtgttgggcaagtttaatcataacctccatgtcttcctcaggattggactttggatggagtgaaggggaaggaaaataaatgttcggacttattcagtctcaattagatcaccactcacttccttcagtctctgggtagaacagagcaagtagcagaagtattacaggagaagaaggggagagaggagagagaaggggagaggggargggatggcacaggagctgggaaggagagtatcagaaagaggcacctctgtgtcacccagcctgggaatgccaactgaggagc

SEQ ID NO: 82847 - DNA, 634 bp, Homo sapiens
  misc_feature (1)...(634): n = A,T,C or G
cnnnnnnnnnnnnnnnnnnnnnnnnnnnnnnnnnnnnnnnnnnnnnnnnnnnnnnnnnnnnnnnnnnnnnnnnnnnnnnnnnnnnnnnnnnnnnnnnnnnnagacatggcacctgccctgaaggagttgacaaaccaataaacgcagatgtcattagctrtgtgcgagaatatgacagaggtctcacggctgagacctgaaggataagagatcagccaggtgaaaagggaaaggcgaggcaataaatagcacgttcaaaggcctggaggtgaaggagcatattgactttgaggagcaaaagaagttcagtgtggctggaggggagaaaggagaaggtgagtgtggggtagattatggaggaccttatacaggctgttaaacacgttttgcttcatccacggggagatataatcctaagggtttttgcttgataggaaaatgacagatttgttttcttgattgaaaaatttctgataattttacagttagttttgcattgcaacagagattctctctctctctctctttttttttttttttttttgagacaagagtctcgctctgtcacccaggctggagtgcaatggtgcgatcccagctcactgcaacctccgcttcctgagttcaagcgatt

SEQ ID NO: 82848 - DNA, 513 bp, Homo sapiens
aattctgcaaatgcaacgagaggggacaaacacgacaaagaggcagcatgaccaggccactgtgagtcctatatttcaacaagggtaggccagcccaaatggctttccttatctacttgaamcaatggtatgtttttcttctgagaaatctcacccatggttgcatttcattgcagccagtaaaatttaaagaatttagaggaaaaaatttaaagaattccccaaattattacatttttggaagaagcattacatataggttctctgaaacactatgttttttcattgtctcccctgcccctgaacatgtaggtgtttgaatcacttgtattttttctttgacaacttttcttaaaagtctacacctaaaccttgtgtgtctacctctgggaaggtcctgacagctttatctgattttgcaaaagtccatcgctaagcttcccccaaaaaggataacaaattgcagccttaaagatgccagacccatcagcatttctttatgataccaggtac

SEQ ID NO: 82849 - DNA, 513 bp, Homo sapiens
aattctgcaaatgcaacgagaggggacaaacacgacaaagaggcagcatgaccaggccactgtgagtcctatatttcaacaagggtaggccagcccaaatggctttccttatctacttgaaacaatggtatgtttttcttctgagaaatctcacccatggttgcatttcattgcagccagtaaaatttaaagaatttagaggaaaaaatttaaagaattccccaaattattacatttttggaagaagcattacatataggttctctgaaacactatgttttttcattgtctcccctgcccctgaacatgtaggtgtttgaatcacttgtattttttctttgacaacttttcttaaaagtctacacctaaaccttgtgtgtctacctctgggaaggtcctgacagmtttatctgattttgcaaaagtccatcgctaagcttcccccaaaaaggataacaaattgcagccttaaagatgccagacccatcagcatttctttatgataccaggtac

SEQ ID NO: 82850 - DNA, 722 bp, Homo sapiens
gatcctgaatcccatcttcttgccctccatccattgtgacctacataagcggccactaccagatgccattatgggaaactgaggtccatagaagttatgattttgccaaaggtcattcagtaagctagcagtggcattagatttagaacttacaacaccttagtttctagggtatgttggtcaagtatcttgagcagataaattttactaatagaaaaggaacaataatgatactgttgtatgtgtgtgcacgcacacacactaacacgygcacaggaaagaaagaaaaatgtactctggcccatccattctgtgccaatttcccctgttgggacttagtttaatccagccttttggcttgttcatcatatgcaccaatttcttcctttcccggaaacaaatcgaggtgtctcttgagctcatgtacactcccacttccctcacctccccatttaacattttccatatgtgtattaacctaaagggacgccagctccctcgtttcccgagatatctgatgcctgtataatgttcttgagtgtttaaacctcagcagtatggaaagtctttctctttttctgctgcccttacatgaatgggggcatttctttggaatctcatttcctttgtgtgtgagtcccattcctttattattactgcacgtacctggccaaaaactcatttctggacctctgaaatcactttgtctccatcattaagag

SEQ ID NO: 82851 - DNA, 2133 bp, Homo sapiens
tgcacaaatcataaatgttcggcgtaatgaattttcacaaactgaacaaactggtgtaacctgtgcccagatcttgaaagagcattcctgtgcatctggatgcttccttacagccccttccagttttgcctggttttcttctttctataaatggaattatatagcacggttctttgtgtgtaactcttttaactcactgttacattggcgagaattatctgtgtcgtggtgtctaattgtgtttcatttattcttattagcatatagttttctattgtgagactatgtcacaacttatcttcactctagtgttgcaagtcattggggatgtgttcatttgtacggaattgtgttgagcttatgttctttagagttgtaattttaacctttcctatgtgtgagtgtgtttcattttcccatttatgttaggaatacatagtaaattcttattgcaaaaaaaaaaaaaaaatctagcattcagggaaaaaaacaggcagtgaatttctctctgatttcttttcgtctccctcccaacccaattaattcagtttcactgttactagttttctgggcatccttccagacatttctctgtgcatctgtgcactgatacatacaacattcaatgtgatgcttaattttgtttttacataaatgcaattgttctgcaatttttttcacttatcaatatgtcctgtagacccttctgtagatcatcctcattgcttaagactgctgagcctgcttccattgcatgggcgtgccatgatttatttaaccagtctcctactggtgggtattcaggctgtctccagttttctgctgctgcaagcagggtggcagtgaacatccttttatgtgcttctttatgagcattgcaactatttctcttggggagaaatggaaaggtggaattgctgggtgtacacatttgcctttaagtggctcttatgaggtcaaatagattgcccgtaccactgtgaattctgggtacagcctgaaatttaagtgaaggcatttggcataaagatcgaaattcacttgggttttcaaagattcgacggttgcctagaattgggcagaacagaagaggaagctgtcttagctttcacttagtacagtttgccagcacctcgaccccacgggatgctgatgctacacagagattccataagggaagaaagtactaccagcagatggtaaggagagttggaactgggacgtctgagacacaagggacggctctttgaggacaactagaataatcatgatagtaacacagctaacatgcattgagtactcactatgtgtcaagcactgctcagggattgtctaattcaattcctaccatactcctatgggaaagtactacaytgagtcccattttccagctggaaaaactgaggctccaataaagtcacctgctcaaagtcacacttattcactatgtgaattaattgcttggagattacactattgagcaagctcaacatggctttttcccccaggaagctcactgtctcctggtggaaacagacaagccaccaggtgattacaatggagctctgcttggagctgtgttcagccagagcggtgtgccctgcggactgcttagaaacatgactggagacacagggaacctaaaaccactcctatgaggaagataaaacctctctggctctcttgtccttccatgtgtatcacacctcaacaccctggccaggaaggcaaaccttaaagctaattaatattaacatcacgcagcaggcgccaagtgcatgctaactgcttcaccccatcaattctcacagcaggttttttaggaaactgaggctcagagaggagaggtgacttgtccaagggccacagtgaatagggagaagagccgggatttgagtctgggtctgtgtaataattctggagcctggaacctctgagcatgcagaccccaccttcctgccctttagacagtcccagtccaacattcctcaatcaaaaatattcgagggccaaatccatccgtgtgtgctttggcagtggagtacactgagagcagacgtctgtcctttggttccaaccccagtttacaatcacctcacttaacaattaaatatataaagtcacagcccattg

SEQ ID NO: 82852 - DNA, 2133 bp, Homo sapiens
tgcacaaatcataaatgttcggcgtaatgaattttcacaaactgaacaaactggtgtaacctgtgcccagatcttgaaagagcattcctgtgcatctggatgcttccttacagccccttccagttttgcctggttttcttctttctataaatggaattatatagcacggttctttgtgtgtaactcttttaactcactgttacattggcgagaattatctgtgtcgtggtgtctaattgtgtttcatttattcttattagcatatagttttctattgtgagactatgtcacaacttatcttcactctagtgttgcaagtcattggggatgtgttcatttgtacggaattgtgttgagcttatgttctttagagttgtaattttaacctttcctatgtgtgagtgtgtttcattttcccatttatgttaggaatacatagtaaattcttattgcaaaaaaaaaaaaaaaatctagcattcagggaaaaaaacaggcagtgaatttctctctgatttcttttcgtctccctcccaacccaattaattcagtttcactgttactagttttctgggcatccttccagacatttctctgtgcatctgtgcactgatacatacaacattcaatgtgatgcttaattttgtttttacataaatgcaattgttctgcaatttttttcacttatcaatatgtcctgtagacccttctgtagatcatcctcattgcttaagactgctgagcctgcttccattgcatgggcgtgccatgatttatttaaccagtctcctactggtgggtattcaggctgtctccagttttctgctgctgcaagcagggtggcagtgaacatccttttatgtgcttctttatgagcattgcaactatttctcttggggagaaatggaaaggtggaattgctgggtgtacacatttgcctttaagtggctcttatgaggtcaaatagattgcccgtaccactgtgaattctgggtacagcctgaaatttaagtgaaggcatttggcataaagatcgaaattcacttgggttttcaaagattcgacggttgcctagaattgggcagaacagaagaggaagctgtcttagctttcacttagtacagtttgccagcacctcgaccccacgggatgctgatgctacacagagattccataagggaagaaagtactaccagcagatggtaaggagagttggaactgggacgtctgagacacaagggacggctctttgaggacaactagaataatcatgatagtaacacagctaacatgcattgagtactcactatgtgtcaagcactgctcagggattgtctaattcaattcctaccatactcctatgggaaagtactacactgagtcccattttccagctggaaaaactgaggctccaataaagtcayctgctcaaagtcacacttattcactatgtgaattaattgcttggagattacactattgagcaagctcaacatggctttttcccccaggaagctcactgtctcctggtggaaacagacaagccaccaggtgattacaatggagctctgcttggagctgtgttcagccagagcggtgtgccctgcggactgcttagaaacatgactggagacacagggaacctaaaaccactcctatgaggaagataaaacctctctggctctcttgtccttccatgtgtatcacacctcaacaccctggccaggaaggcaaaccttaaagctaattaatattaacatcacgcagcaggcgccaagtgcatgctaactgcttcaccccatcaattctcacagcaggttttttaggaaactgaggctcagagaggagaggtgacttgtccaagggccacagtgaatagggagaagagccgggatttgagtctgggtctgtgtaataattctggagcctggaacctctgagcatgcagaccccaccttcctgccctttagacagtcccagtccaacattcctcaatcaaaaatattcgagggccaaatccatccgtgtgtgctttggcagtggagtacactgagagcagacgtctgtcctttggttccaaccccagtttacaatcacctcacttaacaattaaatatataaagtcacagcccattg

SEQ ID NO: 82853 - DNA, 2133 bp, Homo sapiens
tgcacaaatcataaatgttcggcgtaatgaattttcacaaactgaacaaactggtgtaacctgtgcccagatcttgaaagagcattcctgtgcatctggatgcttccttacagccccttccagttttgcctggttttcttctttctataaatggaattatatagcacggttctttgtgtgtaactcttttaactcactgttacattggcgagaattatctgtgtcgtggtgtctaattgtgtttcatttattcttattagcatatagttttctattgtgagactatgtcacaacttatcttcactctagtgttgcaagtcattggggatgtgttcatttgtacggaattgtgttgagcttatgttctttagagttgtaattttaacctttcctatgtgtgagtgtgtttcattttcccatttatgttaggaatacatagtaaattcttattgcaaaaaaaaaaaaaaaatctagcattcagggaaaaaaacaggcagtgaatttctctctgatttcttttcgtctccctcccaacccaattaattcagtttcactgttactagttttctgggcatccttccagacatttctctgtgcatctgtgcactgatacatacaacattcaatgtgatgcttaattttgtttttacataaatgcaattgttctgcaatttttttcacttatcaatatgtcctgtagacccttctgtagatcatcctcattgcttaagactgctgagcctgcttccattgcatgggcgtgccatgatttatttaaccagtctcctactggtgggtattcaggctgtctccagttttctgctgctgcaagcagggtggcagtgaacatccttttatgtgcttctttatgagcattgcaactatttctcttggggagaaatggaaaggtggaattgctgggtgtacacatttgcctttaagtggctcttatgaggtcaaatagattgcccgtaccactgtgaattctgggtacagcctgaaatttaagtgaaggcatttggcataaagatcgaaattcacttgggttttcaaagattcgacggttgcctagaattgggcagaacagaagaggaagctgtcttagctttcacttagtacagtttgccagcacctcgaccccacgggatgctgatgctacacagagattccataagggaagaaagtactaccagcagatggtaaggagagttggaactgggacgtctgagacacaagggacggctctttgaggacaactagaataatcatgatagtaacacagctaacatgcattgagtactcactatgtgtcaagcactgctcagggattgtctaattcaattcctaccatactcctatgggaaagtactacactgagtcccattttccagctggaaaaactgaggctccaataaagtcacctgctcaaagtcacacttattcactatgtgaattaattgcttggagattacactattgagcaagctcaacatggctttttcycccaggaagctcactgtctcctggtggaaacagacaagccaccaggtgattacaatggagctctgcttggagctgtgttcagccagagcggtgtgccctgcggactgcttagaaacatgactggagacacagggaacctaaaaccactcctatgaggaagataaaacctctctggctctcttgtccttccatgtgtatcacacctcaacaccctggccaggaaggcaaaccttaaagctaattaatattaacatcacgcagcaggcgccaagtgcatgctaactgcttcaccccatcaattctcacagcaggttttttaggaaactgaggctcagagaggagaggtgacttgtccaagggccacagtgaatagggagaagagccgggatttgagtctgggtctgtgtaataattctggagcctggaacctctgagcatgcagaccccaccttcctgccctttagacagtcccagtccaacattcctcaatcaaaaatattcgagggccaaatccatccgtgtgtgctttggcagtggagtacactgagagcagacgtctgtcctttggttccaaccccagtttacaatcacctcacttaacaattaaatatataaagtcacagcccattg

SEQ ID NO: 82854 - DNA, 795 bp, Homo sapiens
acattcagtgagttttctgattttaggagctggaagaaatataagggaataagatagatatgattaagcctctataaggactcacttctagatagggaggcaggtgttagacatgtaaagaaacaagcaaaacatttcccagctgtattatcaaacaataaaataataaaggagaataaataaaaatagtgtccagggaaggcatctctaagggggaaacatataatctgaacctggaaaatgagaacwgctgagtcacatgtagaaaagagaaaaagtcatccaggcagaaagaatagacagctcaaaagacctgggacagaaatgagcctaaatacatagctcccaaggcagaaaaaaaattgcgtggcttgaggttagtgaatggggcagaatgacatgagataaggctacagatgaaggcaggtgccagatataatgatgaacaagacagagaccttgcctgcaaagacttacaggccgctagaggagtcaaagggtagacaaaaatgatgaataaaagaaagaacttgccaaaggacctacaaggtggccttgatattagagctaagtctatgcgtaaggtcttggttcacacaaaggtacggaagacacattcagttccttctaatcttcctctcactcagcatcataataacatttctgaaatcagagcaggtctacatggcaaagaaggaaaagacgttccagtgtggttatcctgaagctacgcgagtgtttcagaccaaatccccagaactacaagcctcagggaaacacatgccaggctgtaca

SEQ ID NO: 82855 - DNA, 795 bp, Homo sapiens
acattcagtgagttttctgattttaggagctggaagaaatataagggaataagatagatatgattaagcctctataaggactcacttctagatagggaggcaggtgttagacatgtaaagaaacaagcaaaacatttcccagctgtattatcaaacaataaaataataaaggagaataaataaaaatagtgtccagggaaggcatctctaagggggaaacatataatctgaacctggaaaatgagaacagctgagtcacatgtagaaaagagaaaaagtcatccaggcagaaagaatagacagctcaaaagacctgggacagaaatgagcctaaatacatagctcccaaggcagaaaaaaaattgcrtggcttgaggttagtgaatggggcagaatgacatgagataaggctacagatgaaggcaggtgccagatataatgatgaacaagacagagaccttgcctgcaaagacttacaggccgctagaggagtcaaagggtagacaaaaatgatgaataaaagaaagaacttgccaaaggacctacaaggtggccttgatattagagctaagtctatgcgtaaggtcttggttcacacaaaggtacggaagacacattcagttccttctaatcttcctctcactcagcatcataataacatttctgaaatcagagcaggtctacatggcaaagaaggaaaagacgttccagtgtggttatcctgaagctacgcgagtgtttcagaccaaatccccagaactacaagcctcagggaaacacatgccaggctgtaca

SEQ ID NO: 82856 - DNA, 795 bp, Homo sapiens
acattcagtgagttttctgattttaggagctggaagaaatataagggaataagatagatatgattaagcctctataaggactcacttctagatagggaggcaggtgttagacatgtaaagaaacaagcaaaacatttcccagctgtattatcaaacaataaaataataaaggagaataaataaaaatagtgtccagggaaggcatctctaagggggaaacatataatctgaacctggaaaatgagaacagctgagtcacatgtagaaaagagaaaaagtcatccaggcagaaagaatagacagctcaaaagacctgggacagaaatgagcctaaatacatagctcccaaggcagaaaaaaaattgcgtggcttgaggttagtgaatggggcagaatgacatgagataaggctacagatgaaggcaggtgccagatataatgatgaacaagacagagaccttgcctgcaaagacttacaggccgctagaggagtcaaagggtagacaaaaatgrtgaataaaagaaagaacttgccaaaggacctacaaggtggccttgatattagagctaagtctatgcgtaaggtcttggttcacacaaaggtacggaagacacattcagttccttctaatcttcctctcactcagcatcataataacatttctgaaatcagagcaggtctacatggcaaagaaggaaaagacgttccagtgtggttatcctgaagctacgcgagtgtttcagaccaaatccccagaactacaagcctcagggaaacacatgccaggctgtaca

SEQ ID NO: 82857 - DNA, 1345 bp, Homo sapiens
taagtgtgaggtaggagtaattactcggaagtcagtatttgtcaaatgaattatccatcgccattcttttaatagtaaatcaaaaataggtggatagactaagggagagaatctggtcctcagagttttagtggatgagcaagcagaaattccttccttaaataaagtcatacgatgcactaaccaggctctatacctttctcttactgcaatgggtggcctggagaggatgaaatgtatgtgtgtgtgtgagagagagagagagatttgtgtgtgtgtttgtgttatgtgtgtggtgtcattattttcttagacacatgatttgacctgggctgtggtcaaagcctgataaataacaagctaggattaaatgtaattgtgtgtcctaagtaccttaagaggcaaagcgctgatgagggagatgtcactcttctggcatcctcttgcgagccagcctttttctccggagaatctgatgatggtgagttcatgggcagcacagagaacatattgaccaaccaaccatgagaaatatatcaagatttatcatctcttggagtaaaaaattgaccccaatttaacctctattaatatttatttctcaggtcaataaatctagaatttgtcttagtaaaagtcaatatcagttgaattctgcctacacttcttagggggcaaagaagaaaggggaactgtaatttgaacatgttaacaataaaataataaagccacacacaaaattcccagggtggggagaaacccacaacactcctgccacttctgattttaaaacaaatagacattccaccccaaacataaattgcctcgattccacaattcacatctctggtggaataagaggccaaccacagggaagaggcatggagcctataatgctcagacaccagagacttttcacccatcctctcactgcactcagtcactgtttcctaatcttaaaaagaaaaaaaaaaaaatccggcaggtttggtggctcaggcctgtaatctcagcactttgggaggccaaggcgggcgaatcacgaggtcagcagatcgagaccatcctggctaacacagttacaaaaacaaaattaactgggcgtggtagtgggcgcctgtagtctcagctatttgggagcctgaggtgggagaatggcgtgaacccrggaggcagagcttgcagtgggccaagatcaggccactgcactccaacctggacaacagagcgagactccgtctcaaaaacaaaaaacaaaaaacaaaaaccccaaactatatatgcctatcaatgttgttttgttcattgtgcttttcactcaagaatttcatctcttttagaccag

SEQ ID NO: 82858 - DNA, 833 bp, Homo sapiens
gatcctagaatagcaggcgtagaaatgagagatggcagatatctaacaggtcattggcagtcctgtacaatttagttaaatgcctggtattttttacagaatttcttttaacactctctacttcgctacctagttcagtcacacctgttacaaaactccattcaagtcttctactcagacatagttagaatttactctttcatgccagttccctatcttcatcttagttctcagaaaaatttctaaagcatccctaagttagtctgtttaaacaacagcaacaataataacacttcaatgcgaatattcacccacaaggtggtttgctgaagcagttttcagcacacacacaakctggaagtagtctgaatgtctaagaatgaaggattgattaattaagtcttcatacaaccatgagatagaacacgaggctgtcattaaaaatgatgtcaggccaggaatggtggctcacgcctgtaatccctgcactttgggaggcccagggcggacggatcacctgaggtcaggagttcaagaccagcctggccaacatggtgaaaccccatctctactaaaaattcaaaaattagccaggcatggtggtgggcacctgtaatcccagctactcgagaggctgaggcaggagaatcgcttgaacctgggaggtggaggttgcagtgagccgagattgcaccaatgcactccagcctgggtaacagagtgagactctgtctcgaaaaaaattaaaaattacaaaaagccaaaagatgtcaatgcaaagttatcaatttcaaataacagccacaataaagactccaaagcgacaagggtat

SEQ ID NO: 82859 - DNA, 635 bp, Homo sapiens
gctgtttattgttgggctaaaattaattttttgaagtagttacagtgagatttttcttttcattgaattatattttttccttgcagtttgtattattgaataattcacctccccccatcaggcaggaagcagtttctgtgtttccttggctttgggatggtttgtggcagagcctcctggctttagtttccaaaaatctcatgttcgttgaggaccccawggcatgaggataaagggatggcttctcaactaaaaagcagttcccagagacttaggaaggagtagatagaggctcagaataaaaattaagaagattaaaaatacagaaatgtgaaatatttttcttagtaagcctttagatcaaaattcagatggatagcctttagttcaggtataaataaactattggccttttcaatttgagtaatctcagagaaggaggtcagtgttgtacaagaagataaaattatatgcaaggaaataaaatattcctttttattttaagggattccttaagaaaataaaatacactttaaaatctttttttttttgagatggtatctggctctgccgcctaggctggagttcagtggtgtgatgttggctcaatgcaacctccgcctcttggattcaaa

SEQ ID NO: 82860 - DNA, 635 bp, Homo sapiens
gctgtttattgttgggctaaaattaattttttgaagtagttacagtgagatttttcttttcattgaattatattttttccttgcagtttgtattattgaataattcacctccccccatcaggcaggaagcagtttctgtgtttccttggctttgggatggtttgtggcagagcctcctggctttagtttccaaaaatctcatgttcgttgaggaccccatggcatgaggataaagggatggcttctcaactaaaaagcagttcccagagacttaggaaggagtagatagaggctcagaataaaaattaagaagattaaaaatacagaaatgtgaaatatttttcttagtaagcctttagatcaaaattcagatggatagcctttagttcaggtataaataaactattggccttttcaatttgagtaatctcagagaaggaggtcagtgttgtacaagaagataaaattatatgcaaggaaataaaatattyctttttattttaagggattccttaagaaaataaaatacactttaaaatctttttttttttgagatggtatctggctctgccgcctaggctggagttcagtggtgtgatgttggctcaatgcaacctccgcctcttggattcaaa

SEQ ID NO: 82861 - DNA, 1145 bp, Homo sapiens
gtatcttgtacatagtaaacccatattggttgcagcaagacccctgggttaatagggatttgattctgaggagttactcatttttatcttattccagtgaataatctggaaactacaaagaggtctccgtagcaggctagagcaaaggttgaggagtgtagaatatgcaatagtagaagtgtgttttctgtcaaatcatgtttgcagcacctctgaagagtaatcaatttccattcattctctcattcattcacttstccaataggtattgatgcctacagatattaattggtattaatcaagcccctattagacattgcaaatatattggagattaaaacaataaggtagtcatgtacttagagcaacttaaatttattttcaacttgtcatcacttctcttgagtcacctgtgatactttgttataaccatccaagaaaaacagaaaacaaaatagcttcccacctcaagattgttgttaaaagagttaatacatgtgacatgcttaagatagagatttgcttataatacaagaaatagcttagtacaaataattatttcaaccactactacaatgatcattttgtgatgtttttaagcattgtgatgcttgttggaaacattagaccaaactcagttcagacctgagtctgccttataatagctactgattttacatgaattatataacctctctgagtttcagtttcctcatgtataaaataggcataatctcagtacctgactcataaggtaatgatgagtcttaagtgagatattgtctgtaaagtggctggtatagcacctggaatgtagtaaataatcactagttaccataataaaaacagtaactaaagcttgtgttaccattttgagttgtcacagtactttcacttcgacattctcatttcatgctcagggaatgagagaagggtcattaatattattgccatcactatcatcattatacctatttataaaataaggaggggttcagtgacttgcctaagatcacagggcaggtaaatggtcaagtagggtctctgtcctagtaggcattacaagtgattttcaaagtgatcctttggcctggagagaattcctcttcttatttgtacaatggatcagcagtgataaggatagg

SEQ ID NO: 82862 - DNA, 859 bp, Homo sapiens
taatacctaggtgatgggttgataggtgcagcaaactgccatggcacgcgtttacctatgtaacaaacctgcacatcctgcacatgtatcccagaacttaaaataacattttaaaaaagatgtattttaatcttgtattgattatacattaaaaattgctgccatttaatatgggaacatagcttaatactaattgtggaaattgttataacagttatttgcttataactttggattttgattttcatatttagatttatttttaacatagattttatttattttttatttttttggagacaggatcttgttctctcgcccaggctggagtgcagtggtgcaatatcggctcactgcagcctccatctcctaggttcaagtgattttcctgcctccacctcccaagtatctgggattacaggcacatggcaccacgcccggctaatttttgtattttttagtagagatgaggtttcaccatgttggccaggctggtcttaaactcctgacctcaggtaatccacctgcctcggcctctcaaagtgctggggttacaggtgtgcgccaccgtgccctgccctaacatagattttaaagtgaaccagtaacagtatagttgagcagcaacctttggatttcactgttttaagagtctatgctgaamactgcgtcagtttatatattatatattatatatatagttaataatattctttattaacaatattgccaaaatttttttaaacaagagtttaccaggaagaaaataagttaggttttaataatttattttgcatgtttaatatcattatttaaaaaatatatttcttaggaaattagctcttcaaaaaggttataa

SEQ ID NO: 82863 - DNA, 877 bp, Homo sapiens
tgcctgtattgtattattgaaaatcactggggggaaaacatttaccagcatatctcttacttaaacaaactttaaaaactggataactatcctgatggcaatttggaaattacttttaagatggtttcctccagcctctcctctcattgccatttcttctcattctaattactttgaaagatgacaattctcaagccaccagcaagtaataagcaagaggagcactgagacacactcagagaagagtaattccagcaattaataagattatagagggagaaatgcaaggagagtacaagtggtgaaatatattgagaatgatggttttcattttattggctcagagtrttagggaaaagactcaagaaaggaaattagcctaatttcttttcctcaggaggaagactaatttctgtatgtgaaattagtctctttctgaatgcaaaattagtcttcctcctaagagttgtggactggctgggtacagtggctcatgcctataatctgaacactttgggaggctgaggcaggaggatcacttgagctcaggagttcaagaccagcttggggaacatagtgagaccttgtctctacttaaaaaaaaaaaaaaaaattaaccaggcatggtggtgcctgcctgtagtctcagctattcaggaggctgaggcaggaggatcacttgagcacaggagatagagggtgcagtaagctatgattgtgcaactgcactacagcctgggtgacagagcaagactctgtctctaaaaaaaaaaaaaaaagagagttgtggacattagcttgaaatttcgatacagatttgtggaaaagattcttgcaacacttggtttttgatcacaaggttggatgatagtttaaa

SEQ ID NO: 82864 - DNA, 2178 bp, Homo sapiens
ctttggattactgtagtggtcccccaccttttgggcaccagggactagttttgtggaagacattttttccatggaccgggcggtggaggaataatttctggatgcttcaggcacatcatatttatcatgcactttatttcttttattactacattgtaatatgtaatgaaataagcatacaactcaccatcatgtagaatcagtgggagccctgagcttgttttcctgcaactagacggtcctatatggaggtgatgggagacagcgatagatcatcaggcatttgattcttataaggagtgtgcagcctagatccctcgcatgtgcaattcacaatagggttcacactcctatgagaatcttatgctgctgccgatctgacaggaggcggagcttagtcagtaaggagagggatggggagcatctgtcaacgcagacaaagcttcagtcactggcctgccactcacctcctgctgtgctccccagttcccaaaaggccatggaccagcactggtctgtggcccagaggttggggatccttcgttactggactaataatttattggaagtaaataacaccttactgcttctataaggtcttcaatcctgaggttattttaatgttgtccacatgttgctaaaacacttaaatataaaatttaaaacttcattaatgagctatgtgttttgtttatgtattgttgaaatgcctaaatatttgatatcatttggatgaaataatcagataatgaaatgaaattttcattttccatgtaaatgttttgatgtggtttggctttagccatagatacctttcaaaatactaattggtattgaagtcatttttcccatcttcagaatttctgtgcatttcaaaaattatggtgctgggatcacataactttagtaagcaaaattagccatacttaaataatattaaacataaaaaaataatattttaaagcatcttgctgcttggtattgtgtagattcttccccctcaccaccctttccccagaaagcagattttatgtagttagttgtggtaacctattcaaagccgaatgagtagagagagaaaggtagcttaattgaggtgctaacattgtcctgcatcattagatcatccacataggtgagcaacacttragcaggagaaaaaaatattacaaacttcctcttcatgccagttccactctcctccctaattccctgcaggacatattcctgagattgtatgacatgtcagtccattttgtactcaccagtatgccaatatttgcaaacatgcattatactgttaagcaataggataaaagcaacatggaatttaagcctttgcttcaaattctattcttcaacagacaaacataagtgagagagaaagagatagagagaggagggagggagagggggagagagagagagtgcgcacgagagagctattggcactttctgcttttcctacagttaaccagttaccaaaccctttcagatggaagggtgcagttcaaactgccttttattgattcttacgaacccataaaggtataggttaaaaaatgtcttttcaaaaatatagaattaattggccacttagttaatgaccatctgatgagcggtcagccataagtaaacagattcagctgaaaaggagaaaatgaaaggccattcgttggtttattactgatttcacaatattcccaacttaattgtttatgaagtatctatgaagagggacttgtagggagaaaaggaataatctccctatagagcaatggaaacctcgatgaacctatctgcaaaatgggggtattaacaatagatgactttcctgttataaacctcagtgaatccaaaacctcaattttttttaaccacatagcaatggaagtgttgaaggttctagatttgatctatttcagaagaagaagaaaaagagaacagacttgaagggaaaaagacagctaaaaaggtcatgtctataccacaacaggtaattagagggaaacaaagtggtttctcaattcaaaatagttattttttataaagtgttttcggtatcacattcttcttgaaaataatcatttaaggaactttagaataacagaccgaaaaatgtggttttaattataattataatgattttcatagtagacacattctaccaactaataa

SEQ ID NO: 82865 - DNA, 2178 bp, Homo sapiens
ctttggattactgtagtggtcccccaccttttgggcaccagggactagttttgtggaagacattttttccatggaccgggcggtggaggaataatttctggatgcttcaggcacatcatatttatcatgcactttatttcttttattactacattgtaatatgtaatgaaataagcatacaactcaccatcatgtagaatcagtgggagccctgagcttgttttcctgcaactagacggtcctatatggaggtgatgggagacagcgatagatcatcaggcatttgattcttataaggagtgtgcagcctagatccctcgcatgtgcaattcacaatagggttcacactcctatgagaatcttatgctgctgccgatctgacaggaggcggagcttagtcagtaaggagagggatggggagcatctgtcaacgcagacaaagcttcagtcactggcctgccactcacctcctgctgtgctccccagttcccaaaaggccatggaccagcactggtctgtggcccagaggttggggatccttcgttactggactaataatttattggaagtaaataacaccttactgcttctataaggtcttcaatcctgaggttattttaatgttgtccacatgttgctaaaacacttaaatataaaatttaaaacttcattaatgagctatgtgttttgtttatgtattgttgaaatgcctaaatatttgatatcatttggatgaaataatcagataatgaaatgaaattttcattttccatgtaaatgttttgatgtggtttggctttagccatagatacctttcaaaatactaattggtattgaagtcatttttcccatcttcagaatttctgtgcatttcaaaaattatggtgctgggatcacataactttagtaagcaaaattagccatacttaaataatattaaacataaaaaaataatattttaaagcatcttgctgcttggtattgtgtagattcttccccctcaccaccctttccccagaaagcagattttatgtagttagttgtggtaacctattcaaagccgaatgagtagagagagaaaggtagcttaattgaggtgctaacattgtcctgcatcattagatcatccacataggtgagcaacacttaagcaggagaaaaaaatattacaaacttcctcttcatgccagttccactctcctccctaattccctgcaggacatattcctgagattgtatgacatgtcagtccattttgtactcaccagtatgccaatatttgcaaacatgcattatactgttaagcaataggataaaagcaacatggaatttaagcctttgcttcaaattctattcttcaacagacaaacataagtgagagagaaagagatagagagaggagggagggagagggggagagagagagagtgcgcacgagagagctattggcactttctgcttttcctacagttaaccagttaccaaaccctttcagatggaagggtgcagttcaaactgccttttattgattcttacgaacccataaaggtataggttaaaaaatgtcttttcaaaaatatagaattaattggccacttagttaatgaccatctgatgagcggtcagccataagtaaacagattcagctgaaaaggagaaaatgaaaggccattcgttggtttattactgatttcacaatattcccaacttaattgtttatgaagtatctatgaagagggacttgtagggagaaaaggaataatctccctatagagcaatggaaacctcgatgaacctatctgcaaaatgggggtattaacaatagatgactttcctgttataaacctcagtgaatccaaaacctcaattttttttaaccacatagcaatggaagtgttgaaggttctagatttgatctatttcagaagaagaagaaaaagagaacagacttgaagggaaaaagacagctaaaaaggtcatgtctataccacaacaggtaattagagggaaacaaagtggtttctcaattcaaaatagttattttttataaagtgttttcggtatcayattcttcttgaaaataatcatttaaggaactttagaataacagaccgaaaaatgtggttttaattataattataatgattttcatagtagacacattctaccaactaataa

SEQ ID NO: 82866 - DNA, 2178 bp, Homo sapiens
ctttggattactgtagtggtcccccaccttttgggcaccagggactagttttgtggaagacattttttccatggaccgggcggtggaggaataatttctggatgcttcaggcacatcatatttatcatgcactttatttcttttattactacattgtaatatgtaatgaaataagcatacaactcaccatcatgtagaatcagtgggagccctgagcttgttttcctgcaactagacggtcctatatggaggtgatgggagacagcgatagatcatcaggcatttgattcttataaggagtgtgcagcctagatccctcgcatgtgcaattcacaatagggttcacactcctatgagaatcttatgctgctgccgatctgacaggaggcggagcttagtcagtaaggagagggatggggagcatctgtcaacgcagacaaagcttcagtcactggcctgccactcacctcctgctgtgctccccagttcccaaaaggccatggaccagcactggtctgtggcccagaggttggggatccttcgttactggactaataatttattggaagtaaataacaccttactgcttctataaggtcttcaatcctgaggttattttaatgttgtccacatgttgctaaaacacttaaatataaaatttaaaacttcattaatgagctatgtgttttgtttatgtattgttgaaatgcctaaatatttgatatcatttggatgaaataatcagataatgaaatgaaattttcattttccatgtaaatgttttgatgtggtttggctttagccatagatacctttcaaaatactaattggtattgaagtcatttttcccatcttcagaatttctgtgcatttcaaaaattatggtgctgggatcacataactttagtaagcaaaattagccatacttaaataatattaaacataaaaaaataatattttaaagcatcttgctgcttggtattgtgtagattcttccccctcaccaccctttccccagaaagcagattttatgtagttagttgtggtaacctattcaaagccgaatgagtagagagagaaaggtagcttaattgaggtgctaacattgtcctgcatcattagatcatccacataggtgagcaacacttaagcaggagaaaaaaatattacaaacttcctcttcatgccagttccactctcctccctaattccctgcaggacatattcctgagattgtatgacatgtcagtccattttgtactcaccagtatgccaatatttgcaaacatgcattatactgttaagcaataggataaaagcaacatggaatttaagcctttgcttcaaattctattcttcaacagacaaacataagtgagagagaaagagatagagagaggagggagggagagggggagagagagagagtgcgcacgagagagctattggcactttctgcttttcctacagttaaccagttaccaaaccctttcagatggaagggtgcagttcaaactgccttttattgattcttacgaacccataaaggtataggttaaaaaatgtcttttcaaaaatatagaattaattggccacttagttaatgaccatctgatgagcggtcagccataagtaaacagattcagctgaaaaggagaaaatgaaaggccattcgttggtttattactgatttcacaatattcccaacttaattgtttatgaagtatctatgaagagggacttgtagggagaaaaggaataatctccctatagagcaatggaaacctcgatgaacctatctgcaaaatgggggtattaacaatagatgactttcctgttataaacctcagtgaatccaaaacctcaattttttttaaccacatagcaatggaagtgttgaaggttctagatttgatctatttcagaagaagaagaaaaagagaacagacttgaagggaaaaagacagctaaaaaggtcatgtctataccacaacaggtaattagagggaaacaaagtggtttctcaattcaaaatagttattttttataaagtgttttcggtatcacattcttcttgaaaataatcatttaaggaactttagaataacagacckaaaaatgtggttttaattataattataatgattttcatagtagacacattctaccaactaataa

SEQ ID NO: 82867 - DNA, 2178 bp, Homo sapiens
ctttggattactgtagtggtcccccaccttttgggcaccagggactagttttgtggaagacattttttccatggaccgggcggtggaggaataatttctggatgcttcaggcacatcatatttatcatgcactttatttcttttattactacattgtaatatgtaatgaaataagcatacaactcaccatcatgtagaatcagtgggagccctgagcttgttttcctgcaactagacggtcctatatggaggtgatgggagacagcgatagatcatcaggcatttgattcttataaggagtgtgcagcctagatccctcgcatgtgcaattcacaatagggttcacactcctatgagaatcttatgctgctgccgatctgacaggaggcggagcttagtcagtaaggagagggatggggagcatctgtcaacgcagacaaagcttcagtcactggcctgccactcacctcctgctgtgctccccagttcccaaaaggccatggaccagcactggtctgtggcccagaggttggggatccttcgttactggactaataatttattggaagtaaataacaccttactgcttctataaggtcttcaatcctgaggttattttaatgttgtccacatgttgctaaaacacttaaatataaaatttaaaacttcattaatgagctatgtgttttgtttatgtattgttgaaatgcctaaatatttgatatcatttggatgaaataatcagataatgaaatgaaattttcattttccatgtaaatgttttgatgtggtttggctttagccatagatacctttcaaaatactaattggtattgaagtcatttttcccatcttcagaatttctgtgcatttcaaaaattatggtgctgggatcacataactttagtaagcaaaattagccatacttaaataatattaaacataaaaaaataatattttaaagcatcttgctgcttggtattgtgtagattcttccccctcaccaccctttccccagaaagcagattttatgtagttagttgtggtaacctattcaaagccgaatgagtagagagagaaaggtagcttaattgaggtgctaacattgtcctgcatcattagatcatccacataggtgagcaacacttaagcaggagaaaaaaatattacaaacttcctcttcatgccagttccactctcctccctaattccctgcaggacatattcctgagattgtatgacatgtcagtccattttgtactcaccagtatgccaatatttgcaaacatgcattatactgttaagcaataggataaaagcaacatggaatttaagcctttgcttcaaattctattcttcaacagacaaacataagtgagagagaaagagatagagagaggagggagggagagggggagagagagagagtgcgcacgagagagctattggcactttctgcttttcctacagttaaccagttaccaaaccctttcagatggaagggtgcagttcaaactgccttttattgattcttacgaacccataaaggtataggttaaaaaatgtcttttcaaaaatatagaattaattggccacttagttaatgaccatctgatgagcggtcagccataagtaaacagattcagctgaaaaggagaaaatgaaaggccattcgttggtttattactgatttcacaatattcccaacttaattgtttatgaagtatctatgaagagggacttgtagggagaaaaggaataatctccctatagagcaatggaaacctcgatgaacctatctgcaaaatgggggtattaacaatagatgactttcctgttataaacctcagtgaatccaaaacctcaattttttttaaccacatagcaatggaagtgttgaaggttctagatttgatctatttcagaagaagaagaaaaagagaacagacttgaagggaaaaagacagctaaaaaggtcatgtctataccacaacaggtaattagagggaaacaaagtggtttctcaattcaaaatagttattttttataaagtgttttcggtatcacattcttcttgaaaataatcatttaaggaactttagaataacagaccgmaaaatgtggttttaattataattataatgattttcatagtagacacattctaccaactaataa

SEQ ID NO: 82868 - DNA, 710 bp, Homo sapiens
ctcaaactcctgaccacaggtgatccacccgcctcggcctcccaaagtgctgggattacaggcatgagccactgcacccagccatctatttcttaaaaaaaaaaaaaaaaataagccaaattcaattgaatgagtctcttgctcaccttgtacctcaaagttcctatgctaggggccctatccccctcagccttcccccttccttttccttctcctctttccttgcagaggctccagggaccatagagtttgtggctgaccctgcagccctggccaccatcctgtcaggtgagggtgtgaagagctgtcacctggggcgccagcctagtctggctaaaagagtactggttcgaggaagtcagggaggcaccacccagagggtccaggtaatgaaacaggatgtgaggagaccaggctagggggcactgaggggggcatcctgagcagtgctgacagcctctgttggtgtcccagggtgttcgggcctctgcatatttggcccccagaacccccacccaccgactggaccctgccagggcttcctgcttctctaggctggagggaccaggacctcgaggccggacattgtgyccccagaggctacaggctctggtgagtgcccttgaggggctgatagtcggtgcttctgggagctccttccagggacaaagctgggctctgggagaagaggtacctcatgatgaggcaag

SEQ ID NO: 82869 - DNA, 615 bp, Homo sapiens
tctacctgtttgctctgccccagttgtccccactctctctctccctcactctattgtctctcattctttctctattgaggaataaattacagatcttatatggggaacttgatgagctttgacataggcatgcatcctcattaccaccacccagccatgacatggcatccctggcacctagaaggctccactgtggattttcccagctagttgcctctttgggggcgaccattattttggcctctatcatcataggttatttgtagctatttttaaacttcgtataaatgcaatcgtgcaatagcaactcttttgtrtttaaactattttagttttgtacttcttttactcagcatcatgtctttgtgattcatccatgttattcataaaatatcattattttgttttttctttgctgtgtaacatttgttgtatgaatgaatatgtcataatttatgtactcatccctttctggtagatatttcagttgtttctagtgtgaggctattacaaataaagctgctatgagcattcttgttcaagtctttatgtgctcttaatggctttccctaccaattctccactctagttttcaaaccctccctttcccccttt

SEQ ID NO: 82870 - DNA, 2501 bp, Homo sapiens
  misc_feature (1)...(2501): n = A,T,C or G
agatataagggataggttggtttcattggaatcaggttcacactaagaagatcaccagccgttaattactttccccacattattccctgattagagagagctctgtgcttctgagtatatgcctccaggatgttgctgtttataatgctgtggtgtgccaaaatttgcatgagttagaatgcttttggctgcaaataacagacagatataggcatttaaaaaaaatcttactcatcaagaagtttggtggtgggttcaattcttaccaacccacaaggctcaagtttttgcagatggttaacctatattttccagggacactcatagagagacacagaaaaaatactctaacactaaagttctgttctatgccacagataaaattgtgtgttaagaaatagttgataattcatggatgaaccccattggcacctcactcaaacatttctttccaccatgggtctgagaagaaaagccacgttaagaaatgacattccatccaatctaaggagggaggattcatgagcttgtgtgatgcagcaggcatcatctgagatttctggctggaatggcagtgggatggcaactgtataagtaaggatgtagtaacatgctgtgttgggtggttcaaggccctgatatctggagcagtagctggtacatggtgtcagacccctcctggagaggagtcctgggggcagtgtcagaaggtgctctggcagacagattagcacctgtatttacataattaattacaccatgtataaagtaaattctgtacatggggatcctgagagagatggtaccacaagggccaaggatgtgggccagtattctcagcacataatccctggtctagctgcatcaaatcatctgggaagatttctagactctgtcccacaagccccgcattctcaaaatcccctgagatggcctgagtacatggcnnnnnnnnnnnnnnnnnnnnnnnnnnnnnnnnnnnnnnnnnnnnnnnnnnnnnnnnnnnnnnnnnnnnnnnnnnnnnnnnnnnnnnnnnnnnnnnnnnnntttcacaaatgaaacactttcactggcctttgaaaatctcatatgccctagatattgttgcctgtagtggataaagtggtcttgtctttcaaccaagggaagtggccagaaagccatccaaagctctgaagtttgggaaactaaagagtgcatttggaaatggtaaagtcaagcttactattggattgtgctgacctaagataagttaaactgtaatgggggaaaaaaaggctgatgaggttaaggtcacagatcagattttattagcatcatcatagattattataattaatcataattgtcaccttttattgaatatttatggttattggatgctttgtatatatttgtatatacatatataaaatatttgaagtagtgtttgaatagcaagggttccaactcctactcctttctctttttaggaaaaaatgaggcatyaaccaccatattattattttagttttatgtaaaagaacaatgagagatgctcaacccagattatggctgtcaggattagaagactttctacctaacccagcagaagtgtgacaaaccagggtagcaaggggcagggggggtggtaattgtgtctcttatcttggggtctgtgtccgttttgagacttgttattacatttgttgttgagaggataggatcctactggaaattataggcagggcagaatgtccttctgagacagaatttctttgcagacattataaactgcaccaatatgcatcctcaaacataatttatatgtaattatgtaataaatgagttgagttgtagttgactagttgacatattattcttttttatatatgtaattaaatatatttaattgtagctgttagttcctctagtcagaggacaggtgcatagcttagagtagaaggaactagctctgtatttttgtagtgcagaggcctagacttggcaacttcacacttcatctcagaagcagcaagtggcggagtcccctttcctaccggggtggatgtatgctccactggggagtgaggattctggtcttcgttcccagcagacagcttcggtttaccacctaaagtggtaatggcttaggctagtaagagggattatgctcttagtttttctaccctgagatttaaaaagctaaagtcaaagaaaaaagaaggcagctgcccaaagtcatccaagtgaaaatgatgatgaagaggaggagcaaaaatgccatttttaccaactttgctaatgtgaggaaactgatgtgcaaatactattcctaatcctcataaccaacctatgaagtacatgttatcactcttctatggttgagaaaactgagtctcagaaaaattgattgatttgatcctagtcacacagacaaagtttctagtggttgagatcagacttgaactcatatctatttaattccaaagtcttcaggcctcccattttggaatattttt

SEQ ID NO: 82871 - DNA, 771 bp, Homo sapiens
tcctgccttgtcctcccaaaatgctgggcttatagacatgagccaccacacccagcttggacaattttcttaacctctttgagcctcagttcctcaagtgaagataataatatttgcttatggattccagataatataaattcccttgcaacaccagggcacatgataaacagcacatggtggctattgycacactatctttccaaggagtcaaggtagctagtacatttatttctgtgtaatgcaggtgatgaaggtggctggcctaatgtctgaatgctgagggtgggtgctggtggtgtcatttcatggcagcagattcattcatgtggaagccagtgtaattctgcaccaagagtagcaaatacacagtgtatggggcatctctgccaccaccaccttcaccttagcagacatgcttagtgatcatacagtggtctgctacctgcactgcctgaccctcagagtctttctcaacaagcattttcacagattggtgctctgccagtggtgaggcttacttcccatttcttgtttggacattctgggcaaggccagcccaggtcaaccttactttacagggttatatatcatatgcacaattttaattctctttatctgcccttgaggcaaggcatcattgctgtgatgagcccatcttcatgtgttgaatgtatcattctcctcctctttgcttttgccttctctatatgatgaagctctgggagtaagtggcattaggatggcacccagcccaggcatacttagagg

SEQ ID NO: 82872 - DNA, 923 bp, Homo sapiens
tgcatagaaaatgctaaacatctggcataatttctggcwtttagtaaaggcttattatacatgttggctgtcattatggcacactagttatactcacagttccctaaaggtgcagtactggtcctggatctgtttgccctgaatccatcctccctctttgcctgctgtgttttagttcacgatggctgatccttgcaggctgcagttcacaggctcttgtgtctcagacttccagctggttgggttaggccaggaagacacactggcaaaaaatggagggtagaaaggagggagaagccagggtatttctctccttgtttccttgggtgatttctgcagcagtgactgtcttctctgtagttccagctcttgccaaaacaggtccactgtggttcagcttctggttccttcttttttcctttagcagagtcggtagtggcttcctgcttcttgatgctaatctctgcattgcctcatcactcgtgttaactctcagcagctctctctaccatatagccaatcccctgctttccattccctgtgctgtacatccttaaagaggtgcctgttttcctggagacaccctgactggtttgcatagcacactctcataccttggacctttggcttttgccttatttcagcctcctcatccttaagaccaactcctagccatcctttcttctaccatctttgttctaccaccatctcctcttggaagctgtctcagtttctccacctgccacttcctgaagcgtgagttgggtattcctcttctaaacgcctctctcctaacaagtggtttgttcttggaaaactccagtacagatttaattttcttaagagcaagtgcactgtcttacacaacatggtatctcaaaaccatcctatggaagatgttttttgaaagaacgactaaatgc

SEQ ID NO: 82873 - DNA, 1087 bp, Homo sapiens
  misc_feature (1)...(1087): n = A,T,C or G
gcatccttattttttaaactttagaaaattacacgtttaagacatttttgataaaaatacagaaaagaaaaaaaggaaggaagaacagacgagagagagattagactgtgatctcacctcattttggtgtttttgtccctagaccctttgtctaacgtataacgtatgtatgttgttctactttacaaagatgggatcccataccgattgttgagttaattgcttgattcatttaactgcatattgtggacattttccttattaatattcttctgtaacgttgttaccatttggttactattatattgtgtagctattacatcattccacttcattagtcctttagtccttgttgttcctaattttttgctaaacaatgctttgatgaacatcctgttggacaatttgcacacatccttaatacttccctttaggtaaattcctagaagcagaacgctggatcacaaaggttgcacctttgttttttgtkttgttttgttgttttgtttttcttttgttttgagacggagtcttgttctgtcgcccaggctggagcgcagtggcgcgatctcagctcacaggaagcaccgcctcccgggttcacgccattctcctgcctcagcctcctgagtagctgggactacgggcacccgccaacatgcctggctaatttttttttgtatttttagtagagatggggtttcaccgtgttagccaggatggtctcgatctcctgacctcgtgatccacccgccttggcctcccaaagtgctgggattacaggcgtgagccaccgcgcccacagccctttgtttttttaatataaagtttttattccttttacattttttgtagagacgggctctcactgtcttgctcaggctggtcttgaactcctgggctcaagcggtcctcttgccttgctgccacggtgctgggattataggcgtgaacccccatgcctagccgaggttccacgtttctaannnnnnnnnnnnnnnnnnnnnnnnnnnnnnnnnnnnnnnnnnnnnnnnnnnnnnnnnnnnnnnnnnnnnnnnnnnnnnnnnnnnnnnnnnnnnnnnnnnng

SEQ ID NO: 82874 - DNA, 1087 bp, Homo sapiens
  misc_feature (1)...(1087): n = A,T,C or G
gcatccttattttttaaactttagaaaattacacgtttaagacatttttgataaaaatacagaaaagaaaaaaaggaaggaagaacagacgagagagagattagactgtgatctcacctcattttggtgtttttgtccctagaccctttgtctaacgtataacgtatgtatgttgttctactttacaaagatgggatcccataccgattgttgagttaattgcttgattcatttaactgcatattgtggacattttccttattaatattcttctgtaacgttgttaccatttggttactattatattgtgtagctattacatcattccacttcattagtcctttagtccttgttgttcctaattttttgctaaacaatgctttgatgaacatcctgttggacaatttgcacacatccttaatacttccctttaggtaaattcctagaagcagaacgctggatcacaaaggttgcacctttgttttttgttttgttttgttgttttgtttttcttttgttttgagacggagtctygttctgtcgcccaggctggagcgcagtggcgcgatctcagctcacaggaagcaccgcctcccgggttcacgccattctcctgcctcagcctcctgagtagctgggactacgggcacccgccaacatgcctggctaatttttttttgtatttttagtagagatggggtttcaccgtgttagccaggatggtctcgatctcctgacctcgtgatccacccgccttggcctcccaaagtgctgggattacaggcgtgagccaccgcgcccacagccctttgtttttttaatataaagtttttattccttttacattttttgtagagacgggctctcactgtcttgctcaggctggtcttgaactcctgggctcaagcggtcctcttgccttgctgccacggtgctgggattataggcgtgaacccccatgcctagccgaggttccacgtttctaannnnnnnnnnnnnnnnnnnnnnnnnnnnnnnnnnnnnnnnnnnnnnnnnnnnnnnnnnnnnnnnnnnnnnnnnnnnnnnnnnnnnnnnnnnnnnnnnnnng

SEQ ID NO: 82875 - DNA, 1087 bp, Homo sapiens
  misc_feature (1)...(1087): n = A,T,C or G
gcatccttattttttaaactttagaaaattacacgtttaagacatttttgataaaaatacagaaaagaaaaaaaggaaggaagaacagacgagagagagattagactgtgatctcacctcattttggtgtttttgtccctagaccctttgtctaacgtataacgtatgtatgttgttctactttacaaagatgggatcccataccgattgttgagttaattgcttgattcatttaactgcatattgtggacattttccttattaatattcttctgtaacgttgttaccatttggttactattatattgtgtagctattacatcattccacttcattagtcctttagtccttgttgttcctaattttttgctaaacaatgctttgatgaacatcctgttggacaatttgcacacatccttaatacttccctttaggtaaattcctagaagcagaacgctggatcacaaaggttgcacctttgttttttgttttgttttgttgttttgtttttcttttgttttgagacggagtcttgttctgtcgcccaggctggagcgcagtggcgcgatctcagctcacaggaagcaccgcctcccgggttcacgccattctcctgcctcagcctcctgagtagctgggactacgggcacccgccaacatgcctggctaatttttttttgtatttttagtagagatggggtttcaccgtgttagccaggatggtctcgatctcctgacctcrtgatccacccgccttggcctcccaaagtgctgggattacaggcgtgagccaccgcgcccacagccctttgtttttttaatataaagtttttattccttttacattttttgtagagacgggctctcactgtcttgctcaggctggtcttgaactcctgggctcaagcggtcctcttgccttgctgccacggtgctgggattataggcgtgaacccccatgcctagccgaggttccacgtttctaannnnnnnnnnnnnnnnnnnnnnnnnnnnnnnnnnnnnnnnnnnnnnnnnnnnnnnnnnnnnnnnnnnnnnnnnnnnnnnnnnnnnnnnnnnnnnnnnnnng

SEQ ID NO: 82876 - DNA, 519 bp, Homo sapiens
ccccctttttatccttatcccaatgtcctccarggtgcttcaagctcaagttcatggatttctgtaaagatacctattattttgactattgtaagcactattctgcctttttccacagtacaatctggttcttttgaataggttatcttctttttttgatgtatcctgattttaagttccagcctaccatatgcatagtgtgaataaaatattgaggggcaggggctgcaaaggcaaaggcatgctggcttacatataagattacatggatttgttagctttaagtccttaagatgaaataatgcaagtgaaatatctttgtttttaactttctatcttgaaaattttgcaagcaaggtttagatcaatgaaaaagctgcacaaagtatatctatatacttcgtttcctgcactttcgatagttgtagcatgtttctggcagatgtcaagttttttgctaactctatgaagttagcctggcacctgccattgctcactccttatgctatgttaggcatt

SEQ ID NO: 82877 - DNA, 1270 bp, Homo sapiens
gcatgcggtagcagcatctctgacaataagcttgtttctgtctcccgattcgcagaagaccacgtggccttaaaccaactgctgcaactctgtgtgcaggatgattctgtgggcccaagtcacccagcgcctatgctgcaaccaaaagtgcctcctgtcgctttgtatcaaaggacctttgtcatgatctcattcacaatattggtggtccctgagagtggagcagtggagtgattgacgtgcctgagtttgaagagagttaaccactggaatctctcatgttttattccctccaaaatgctgcagttcagtgttgtcccagattttatgcttgtgcttagatttctctgttctctaatttgttaagtttgtctttaatatttcacaggctttcttgatcatggatggtgaagatataccagatttttcaagtttaaaggaggaaactgcttattggaaggaactttccttgaagtataagcaaaggtaatgttggaaagcacactaaaagtaggggagggcatttggaatacaccgtgtcttgtttgtgcatttttctttttaacataaagctaaatttagaattgcagatttaggattctaggattgagattctacaaacagtcaccacatgggttgtatttaaatagtgtaaacatgccataagtctttatattgttcaaattattaaaatagtaggaaaactgtcatttatgatttcttctgattgttacctsttctatgctttttagtaggcggggccatctttggcccgttttgcatgcactgattctgcctcatcattttggtcatttggagattctgataagctgtctggggctccatagaacagactttacgttctcctcaggcaagcatgatcagtgtctggagccagcaaagctttgagggagggggagaagcttcaggggcatggaacgttttataaaatttcagttatttggttgggagaactttcaggcaacaaccttttaagcaacaaaacttgtctcaaatttcttttttaaaaatgggatcttgctaaataaaatattgatacattttcctattttggttaacagagtttactaagtcttatcaaaccttttactgccctttcattattatcaccgaagtcagttattctattgtgccagtggatatgaaaggtgtgtatctatggcagggttcttaatctttttctgtgtcatagatgtcttaatgggctggggtagcctgtggactcctcagcataatatttttaaatgca

SEQ ID NO: 82878 - DNA, 612 bp, Homo sapiens
tccacacaaatgcatatgaatgttcatagaggcattattcagaagtcaaaaaaatggaagcaacccaaatgtccaactgggggatagacgagtaaaatgtggtagatgtatccacacagtagagtgttactcagtaataaaaaggagtgcggtacttgttcatgtggctacatggatgaactttgaaaacatcatgctaagtggaaaaccagtcacaaaaggccacatattgtatgattccactgatatgaaatatggaacaaaggcaaatttatagagactgaaagattagtagttgattaacgcaggatgcagcagggatacagggaatggggagtgacagctaatgggtggaggattcttttgggagggaccaaaatgccccaaatwtgatagtggtgatggctgaataagcctatgaataactaaaaaacactgaaaacactaaactggcgaattgtgtggtatgtgaactatatttcaataaagctgttaaataaaatcacagtattatagtttatattctttgtaattaattagcttaataacttttataattagctaataaaaatcttgagcccaggctgcagtgagccatgactgcaccaccat

SEQ ID NO: 82879 - DNA, 716 bp, Homo sapiens
tccttgggctatttacatctagtttagcrttacagagccagttttgcctattaaaacaagtttgaaaattgtttaaaacaatctggtggataagtgtgtgtagagattttgttgtttctttatgttcgtggagatgagtagtgaacatagcactgaaacagaagcaatcatcttagcttgtgaaaatcctgtttgagtaataatgggaaatgttatcttttaaaatgttttggttattttcttttccattacaaacatgatataagttcctcctagaaaatttggaaggtatggggtgagagtcaggcgtaacctaatcacacagaaatccatgagatgttgaagtctcataaaatgatagagctggaatgcacttttataactatgtggttgaaagaaaaaaacaactttatgtcaataatcacaacacttctgataccaaatgtgtggattttccacactaagcagtcagttctccaactcctcatacaccaactggatgtcctcaattcaattcagttcaattttgatttcacaaaatctacctgaaattagcatcagatactgtaatcacccaaatgtgttcttcttgcccgctgcacagataaacccaattcactgagacagcattattgcagtaaacaaagagtttaattaatgcaaggctggccaagcagaaggattggggctgttactcaaatcagtctccccaaaga

SEQ ID NO: 82880 - DNA, 1407 bp, Homo sapiens
aataagctgggcatggtagcacatgcctgtagtcccaactacccaggaggttgaggtaggaggatcacttgaacccaggagttcgaggttacagtgagctatgatcgcaccactgccctccagtctggatgacagagcaagaccctatctcaaaaacaaaaaacaaaaagaaaaaggaaamaaaaggaaataaacagtatttacttgtatcattctttaccattttcaactggaagcccccttaagtgtgacattaatgaaagtcagcttgtaagacttgtaagtggcagatagtctctttaaagcatctcactttgtccttgtaagtaggtgtttctactatcaacctcttgaaagtggttaatatccagaaaaataatttcttattcagtaaaattttgacccaaggtttcatagcacctaagaagccaagtatcattaggctcataatcttatttatttacaacatgttacagataaactgactttctccttcttaagaatttgaaggaagtgaaaatttgttttctacatgctgtggattttaatccaacatagctgttaaactcttggggtggcctcctgggtgaaatctactcacacattttctttattatatgaaaggatcctgtggggaaggcagctggtgggtaaacaccaggcttaagccttagtcagtgtgaatcctggataatgtttacaaatagaatggtctctgcagcaaccaactaacagtagataagagagctgcctcatttacagctgcgtttaatctttccaacgcctgaaaaatattcgctgaatgctggtgaataggatggcttatggtgccctcaccttcacccctggacacgcttcctccactgacctttctggtcacaagcaacaaaggtggttaaaaatactccattctttgtacaaagaccatccactgcaaccccaaggcccttaatgttattatccgtggtgctgatggattggccctgatcttcaccccacttcctcttcagaacaacacgcatttatgttgagaagactggcggggactcataagtgttggaattctcttacatgtcaattaggggaggcattttacacaggatatccaatttcaacataacaaccacccacaaagtaggtgctgttatgcccattctaaggatgagaaagtggaggcatagttgtgctgtgcatcctggaacccaagtgtaaaaaaaaaaaaatcttattaaatacagacttcttatgaatgtacttaggaagtgtattaattcctcagagtaaataaaggtaactctactgctaaattctttttttttttctttttgagacaggatctcgttttaccacccaggctggagtgcactggcaacatcattgctcactgcagcctcgacctccctggct

SEQ ID NO: 82881 - DNA, 1407 bp, Homo sapiens
aataagctgggcatggtagcacatgcctgtagtcccaactacccaggaggttgaggtaggaggatcacttgaacccaggagttcgaggttacagtgagctatgatcgcaccactgccctccagtctggatgacagagcaagaccctatctcaaaaacaaaaaacaaaaagaaaaaggaaacaaaaggaaataaacagtatttacttgtatcattctttaccattttcaactggaagcccccttaagtgtgacattaatgaaagtcagcttgtaagacttgtaagtggcagayagtctctttaaagcatctcactttgtccttgtaagtaggtgtttctactatcaacctcttgaaagtggttaatatccagaaaaataatttcttattcagtaaaattttgacccaaggtttcatagcacctaagaagccaagtatcattaggctcataatcttatttatttacaacatgttacagataaactgactttctccttcttaagaatttgaaggaagtgaaaatttgttttctacatgctgtggattttaatccaacatagctgttaaactcttggggtggcctcctgggtgaaatctactcacacattttctttattatatgaaaggatcctgtggggaaggcagctggtgggtaaacaccaggcttaagccttagtcagtgtgaatcctggataatgtttacaaatagaatggtctctgcagcaaccaactaacagtagataagagagctgcctcatttacagctgcgtttaatctttccaacgcctgaaaaatattcgctgaatgctggtgaataggatggcttatggtgccctcaccttcacccctggacacgcttcctccactgacctttctggtcacaagcaacaaaggtggttaaaaatactccattctttgtacaaagaccatccactgcaaccccaaggcccttaatgttattatccgtggtgctgatggattggccctgatcttcaccccacttcctcttcagaacaacacgcatttatgttgagaagactggcggggactcataagtgttggaattctcttacatgtcaattaggggaggcattttacacaggatatccaatttcaacataacaaccacccacaaagtaggtgctgttatgcccattctaaggatgagaaagtggaggcatagttgtgctgtgcatcctggaacccaagtgtaaaaaaaaaaaaatcttattaaatacagacttcttatgaatgtacttaggaagtgtattaattcctcagagtaaataaaggtaactctactgctaaattctttttttttttctttttgagacaggatctcgttttaccacccaggctggagtgcactggcaacatcattgctcactgcagcctcgacctccctggct

SEQ ID NO: 82882 - DNA, 1893 bp, Homo sapiens
gaactggattttaatcccaagtccacacaaaccagctgcaagatcatgaggaaatgaatgtctcaacctttcacaatgtttgtttccttatctgtaaaaaggagaaccataacatcttcctcccctagtggttgtaggaattatccatgagcacagcatcagggagcatgaattacatggtagggaagcagaactccatacatggtggaatgtgccccaaatctgttgaaaattcctgtggacccaaggaaggaaatactctttaagaatttcaaaacatgaaagaacctacacaagagtacatgaaatcagctatacaaattgaaattttcgagtcatgatttacctggtaatcatcaaaatagctaaaaaatttctcacattagaaagtaaatattatggcggggcgtggtggctcaagcggtggcagcactttgggaagccgaggtgggcggatcatgaagtcaggagatcgagaccattctggctaacacagtgaaaccccgtctctactaaaaatacacacacamaaaaaattagccgggcgtggtggtgggtgcctgtagtcccagctacacgggaggctgaggcaggagaatggtgtgagcccgggaggcggagtttgcagtgagccgagatcacaccactgcactcaagcctgggtgacagagcgagactccatatcaaaaaaaaaaaaaaaaaaaaaaaaaaaaaggaagtaaatattataaaattcaacaaaaaaattaagagttgactatctcttaaagcagtgtttctcaacttttttttcgttatcaccacacactgagccttcttaggcactttttgcctaattacttcccctcaccacataaaactttaataccacaaatataccatgtgtctgtttgagttctctatgtatatctgtgttttatacataaaaagagtaagtcctcccccctcactatcaccctacaccaattttcacatctttggagatgatattcccattgaagatgcatgtcttaaagagactcacaacatgaattgagttccgtcagttgtgtctcaccttttgattagtgataatggatataaatctcattgttcagtgcctggcatagagtagatgccaataaattatagctattataataaatgttaataagatacacggagatttaacagggtaattctatggagcactgagtgtcatcagaagcccagaggcatgcctaccttctatgttttacagtcttgcttccaggtctttatgaagactgttttacaacagaccaaaaacttcagcaattcctctggagatattacttaccagggaaccatattctccaaggaatatagcagcattgctgttcttccttgcaatactaccttgcaaagtatttgtaaaaatcaagagaagaaaatattctcagcaaatatgccagatagaaggataacttttgcttacatttatgtttggtcagtgtaaatttggggtacagtaacagaatatcatcgactaggcagtttataaacagcagaaatttatttcttatggttctcaaggctgggaagtctaagatcaaggtgctggcaaattcagtgcctggtgagggcttgcttcctggttcatagatggtacctcctagttgtgtcctcacatggtgagaaggagtggctagttctctggggtctcttttatatgggcattaatcccaatcataagggctctaccctcatgatctaattacctcccaaaggccctgtctccaataccatcaccttggtggttaggattttgacatatttgaggagacaaaaacattcagaccatagcagttagtaataaattcttgttttgcagccaaacatcaatcttcatcttcttagcctggtataatctaa

SEQ ID NO: 82883 - DNA, 1192 bp, Homo sapiens
tgcatagcatcattctgctttccaagtaatttctatgcagatggtatacagcaaaatttttctgccttacattaaaatctgcatcaaccaataagaatgatttgctcctgagcagacacaaatgaaggattattgtgtgggaggagaagtacaagtacaaagtggatcaggacagcaggtgggaccaaaggaggatacaggtccttttaaaattcttaattaaaaaaagaaaaatagcatattgtatttaataggatcctattactattctagatttctttccaaaatgaagctccacagaagtattttaaccagccatgcaattgcattttaagaatcgacttaactatcaactttttagcacaaggtgagactcttgcatttagcatgcaacttctggaagaatgtagtgagagtgagtgagattgggatcgcctaccaagctgggagtgccagctgctcaaccctggtsctcaatacagggaggatgtttgaggaagaacttcatatcctatatgtcagtgatgatatgcagtttgctttggtacacacaattgtaactgtttctctgttttggaatatgcctgatggtatttatgccaaaatgatttatagtcgactcctggttgaatctgaaagttgggacaaggaataagaagaaaggtgtatatcttattgtaatttatattgcttttgagatatgctctataacttactgcagcatatgcaacttctctgtaatgttcttagataaattatccaattattcacatttcaactacatgatggttgggtaatgaaaaatggcctgtaagtaagctttaatgaaggggaagggtttggggaaggcacaagaggaagttgcttttctataaaaatgttcctgtaaataacttagagaaggactttttatgttgctagttagtgtgtatattcaatgtaattcagggaatttaaaaaagaagaaaatgattttctaactataactctctatctctgagatataatggcacattgtgtagtattacctgctattttgaattagttacctctatcctttttttattattagcattggtggatagaatcttttctatacaagtacttcttttcaacaaagaaacaaaagaacatcccctcagatgctagtgaataggaagaaatgggcactgaggaagttcctctgaagatc

SEQ ID NO: 82884 - DNA, 734 bp, Homo sapiens
tcccttttaggactcaaaaaaatttttgtaattgagagagtcttgctctgttgcccaggctgggatgcagtggcatgatcgtagctcactatgacctccaactcatggtctcaagcaattctccctccttagcctttcaagtagctaggactacacacatgtgccaccatgcccattgatttttaaaagtttttttgtagacacagagtctcactatgttgtccaggctggtctcaagctcctgggcctcaagtgatccttctgccttggcctcccagagtgctgggattatagtcgtgagtcactgtgctcatccctattactatcttaataattcatgttagaaaggagatattaatggctgctttgcaaattatttatgaaatgttatctttttattaatttgtttacttacaaactactaaacaaaaagcactttttcccatcagtatttagagtcataatctatcttgctaaatgtcaracgtatatatttaaatatcacatcctccgtttcatttactatgtgactaataaaaacttaatagacactaattgttgtcaaatttgccaagaaaagactctcacaaatcttgttagtttttaacattctgttcattttggagcatataatgtatccccagcagggactgtgcttagaagcaccagggacttcttggaagaaaatatagttggcagatcttgggtcaaccagaatcatcccttgcacagat

SEQ ID NO: 82885 - DNA, 1559 bp, Homo sapiens
gttggaggaaataagattattcagtcaaatttatataacaaaagggctaatttattactcttctttaaaatttgaacgttacttaaaatttttttaagtaagtaaaattcaagtagtaattcctttaatttcattttactatctgttcttcatttttgctctatttctttcctttactatcatacttattttagtatttctatgtgtcttcactcattcacatcagatttccctctcatgatacacctttatagaaacattcctttttcttgtttttgtttttgttttattttgtttttggagacaaggtcttgctctgttgcccaggctggagtgcagtggtgccagtggtgtgatcatggctcattgcagcctcgacctcctgagctcaaatgattctcccatctcagcctccaaagtagctgggactacagacacacgccaccacacccagctatttatttatttatgtatacatacaaacatacacacatacatgcatacatgcatacatacatacatacatacatacatacatacatacatacatacatacatttcatagggagggagtttctttatgttgcctaggctggtctcagtattcctggactcaagtgatcctcctgccttggcctcccaaaatgctgggattacaggtgtgagacactccagccagccagaaacattttttcatatctatgtcttctcaaattttctgtcactacacttttctttatgtaatatcttaaaataatgtttttttcaaaagattcctgaaaaagtctttctcattttggatcccatgtgactttggcacaatggaggagtatgttggggatggtaagggaaaggttactgaatctggaccacagaggtatctgggagaaatagtggcatgttgacagtctgagatgaagtcatgatgacagttttgagtcctatctccttttacagcattgacttgctttgctgctccaacagaaaaaataaacattgcttcttggggctaaatccatttgtgtattctcgaactagatgaaaggtatataccaaaatgtctagtttttttctttgcttttaatattaatactccgatttaccaaagttctgttctttaatatggcttatttgttgtatttaaaaataagtaatttggaatatggctttatgtcactgtgaagtcagcttattaaagctgaaattgtgtgtttcattgattatctatctcatatgtttattattctgaacagtgtcaactgtctgagatctgtagcctatagaccagagtgtaggttttaacaaattaagagtattaaacrctcagtcactgcttctatctggtacaaggatgaagtaaatttttgaggaactgtctcaatcttctgagtagagttaattgtcaatatactcattgataagaaggggacagagaagaccagaaggagaagtcacatactataattattttgtcatccttcttttttctttcacatattccactatagagtggttgagtagaggcaatgccagcatagagtcttgtcttttgtcatgca

SEQ ID NO: 82886 - DNA, 588 bp, Homo sapiens
cagggaatacgtaaaatacagaggaatgaagtattgagagaaatcaaaggaggagaggttggccttttcttctttactctgaacctgtagtctcagagctggaaaataatgtagaaatcatggtgtttctggtatgcctcagatcattcaggtggatttggatttcccaagctgcacattgaggtttattttgttgttttaattttgcttcatgtttaatttttgttttaatttgttttaccttaaaatatatttagaggataatattgtaaacttttatcttgaaaatatcctcccttaataatttggctaataataaattaggacacaatttaagggaaatctggtttgtaagttctccgtccacaaaaaaaataaatctctcctttctgcaataacatttcataaattcagcttttcataaattggaatgtacttatttgtataattctgaatkaataaggtttgagtctattcagtaaatgattttagatttatgctttcaagatatttaattgcttgctcaaaaatcttacattgtcaacataggaaggaagtttccagctcatctagcccaaccactcacta

SEQ ID NO: 82887 - DNA, 1389 bp, Homo sapiens
  misc_feature (1)...(1389): n = A,T,C or G
tccttgggtttttacattttattccttcttgcttctcctctactctttcccaaaccccagctatagctatattctaagtttttcacctttcaatcctaataaatttagcacgatgcttttcagatggctactcaataactgtggtaagttacactcaggatgcctcccatagttctggggaagttccccttttgacttctaaactgagaaaaaaacgttatacctatttctgcacctacagtgcttcacagtgagtgattacaaatgtttaattgtatgttttcccagccgattataaactgcattaaggcatctacaatgtgtattgtactgtagcatggcttggtacaatgcctggcagatagcatatgcttagaaaatactgtagaataaatgttgcagaaagttggtgctcagtacatgttttaaatcttgtatgtgtgattatatatatttggtctttgtaattcacggcataataactgatgaaatagtcactattacaattttttcatgtgttcagggaaggaggtcctttaatttgcttactaaggcttaatcttatggtgaagaggagaaataaaaattgtattgtataacaaattgaatacacttgaaaaattatcagccgtttgattagggaatgcatttttagttttcataacacatgaaaatctatatgctgtcaaggaaaggttattctaacatttaaggaattacacaaattctgttctttaacatgacagaataatagaaagagtcctctttgtaatgttagggcagctaagcgtgaccaacataactgagaagtttgttgccattattatcgttaaatctatcattatatctttgtgtaattaaatctttataaaagcaaatgagatgaggtatacttctaataattagtggtttagaataaatgaagaatttataaagtatattaatagtaagaggacacctgactaaaatctcaacagcaaagataactatgacctgaattaaagagaagaaaaaactaagaaaaaaaaagatcaaacagtattaatatttctgcatttcaggtgagktatctacattttgctggtatttttcttctcattatctgtagaaatccatagaaacaagtctctgtgcagctccaaatgcccccaattccattttatatggtatttccaataagggcaccgtttcttgcaaagaatattacatctcactaattgtcctacaaatcccattcttaattaaaatcaaaatcttaattgtaacaactttactatatagcttgcaaatatgtgttctttcttgtttgtttggaggatgaggctctggatacatcnnnnnnnntnnnnnnnnnntnntnntttttcttttcaaagggaccagccctgg

SEQ ID NO: 82888 - DNA, 532 bp, Homo sapiens
tgagtggttgttattgtctcttcccagatcagtcatccatttgtttatcaaacttttagcaagcacttgatgtgggacttaggttgactgtacaaaattgaataagagatggtcatcatctarattaatgaatggtaggtagatggtaaagatgactgcgttgttgttgttctctatgattttgtaatgttctcttacatgatagcaactcattaggtttctttaaagcgagggtaggtttgtcatgaagttttgaaagctttattggtgttggcaagaaaatggtgcaagatagttgatttatagaatgtttagttctattttcttgcttaaacaatccatagaccaaaactgttgagggaccactggtaagtggtagcctcttataggcaaagggatgcagtaaaggacttttgtaagttgttttttaaagtgtgaacatcattgctatgatctgaatgtgtcctccaaaattcatgttgaaacctcatcattattctaacaatgtgtcatcagaaaaaattttaatgaa

SEQ ID NO: 82889 - DNA, 532 bp, Homo sapiens
tgagtggttgttattgtctcttcccagatcagtcatccatttgtttatcaaacttttagcaagcacttgatgtgggacttaggttgactgtacaaaattgaataagagatggtcatcatctaaattaatgaatggtaggtagatggtaaagatgactgcgttgttgttgttctctatgattttgtaatgttctcttacatgatagcaactcattaggtttctttaragcgagggtaggtttgtcatgaagttttgaaagctttattggtgttggcaagaaaatggtgcaagatagttgatttatagaatgtttagttctattttcttgcttaaacaatccatagaccaaaactgttgagggaccactggtaagtggtagcctcttataggcaaagggatgcagtaaaggacttttgtaagttgttttttaaagtgtgaacatcattgctatgatctgaatgtgtcctccaaaattcatgttgaaacctcatcattattctaacaatgtgtcatcagaaaaaattttaatgaa

SEQ ID NO: 82890 - DNA, 561 bp, Homo sapiens
acctggctaatttttgtagttttagtagagacagggtttcaccatgttggccaggcttgtctcaaactcttgacctcaagtgatctgcccaccttgacatcccaaaatgctgggattacaggcgtgagccaccgtgcctggccaaaaaatggttttaaatcatttccttgttttttattcagcatgaggacttagatgaaaaactgatagtatgaaccttaaacaaatgtgctttaggggcaagtttacctttggtatagcagataaggtaagatggaggcattgaaatgaagttttcagctaccaatgatataaatgacattatcagatggaccaaaatgatggctgcctccattcttcagtaratgatatactgtgtctctttttcttgatagtattctttttatatagagacttagagactgttccaaagtaatgatctgaataattcaaaataatatttcaaacctgacaggactatatgctgcttgggtgaaacaaaagcagtctgcaattgtatttactggtgatcaaggttccaaattgtttggctgtcgtgga

SEQ ID NO: 82891 - DNA, 1041 bp, Homo sapiens
aaaatttatttagggttcctatgtttattttttgtatgttagattatgttctaaagcatttatgtaattattaaaaattaataatgtaattagaactacagaaataaactggaaatgaaagtgcatacctttgtctatcaactggaaagtcccacttggaaactgttcagatgtaataatggcaccattatgacgaacacaacagtgtcatcacacacggagtatttccgcaggtcgaggagtaatagtgtgcaagtgacatattaacaaagacaaacttgtttcatttaggtagtgttaattagtgcctcatataattatcgacatctggtctggttttcacctgctttccttttgctgataaatcccatctccatttaggtgaagtcagcagattaggcttcaacataaaggacaatgtatctagaaaagtatacaggctttaaggtaaatatcaaaaagaattgataaatactgaatagaaccccaaaaatgagaataattaacataagaaaaaacaatacatgtatatttatatccagcagaatctttgtaaaccatggacccagtagttcagaaaagactctgaagactgtacctatagattcatcctgtttcaatacagaaaatattaattataacttgcttaattggaaacaaaagaagtataacaatacttggaaagcagataacaagttaatggaattttctgattggttaaaaattactttgaaatagattgttctttcaatacttattggttattgaaagcctatttagaaagccttctaaaacatgcagttagtgacttccaccctagtaaatagtatgcaaatrttttctggagattgaggattgtgcaatgtttcaaacttatgctataaagtaaaaaatgtggtactgtacaggcatattcaatggattgaaacttaatccagagggactatagcacaaactccaaaagttattctcttgcacaaactcctccttgttttgctgtcatttacgtttttttttttttctaaatctggtgtagacagt

SEQ ID NO: 82892 - DNA, 622 bp, Homo sapiens
tgaagatgccctgctctctctacacagctgggctatgagacggcattcctgtcacatagatacagaggccattaaactgactgtgggttattagtaccacttagtctaagaacaattaatttgaggctgtgaataagaaaggagctatgtttttgagatggacttcatcctctagaagtcacttctatgtaattttaaatagtaatgaagaggataatgcagctgtagactggactttgtaagaaatgacatctggacatatgtgctttctgggtgcwttacacttctacaaagcagaattctagcttcacaaagccaaccactggcaagggccatataagtatgatcaacaattgtcaacactcccctgcttctctctgttcttggaacaaagttcaaaatacctaacatcctcttttgtgccctgccttatctaggcccacttacctttccagcctcctctgcctgcagttgcccacctgccatacacaaagaacccaactggcccctaaccaagtgatccaaatactcaatacaatcccaatacaaatttcagcaaatgggtgttgtgtgtatatgtgtgtgtctgtgtgtgtgtgtgtgtgtgtgtgtgtatgtaaac

SEQ ID NO: 82893 - DNA, 1510 bp, Homo sapiens
ctggttcaagcgattatcctgcctcagcctcctgagtagctgggatgacaggcatgtgccaccatccccggctaatttttgtatttttagtagggatggggtttcaccacgttggccaggatggtctccatctcctgacctcatgatctgcttgccttggcctcccaaggttattggtatcttttaaatgctccctttataattctgatgcagagtgagagctcaaaaatgctgacgtggggaactggctgcaactgacttgaatcccctctctgttttgagctttctaccaaaagtcaacatcacagcaatttccaccttcccaactacatagtttctgtggctctcagtgacagtcattagcccatgatggcaatgttggcccccttctaacagtttctatggggtcctggagcctttggtttttccgaactactgagtcctcttagcaccaccacctttaggaagaaacaagcagaagcaaatctgttacaccgcaaatcacccttaattaacaacagatctctattgtgccaggaactgtacaaggtgcttaccatacattgtcattagtcttcatatctggggttttggaaagtcagatcaataggatccctcctctccctgagttctaagccagttgagaaaggcaaaagagtcaggcaggtggagattaaaatgctagctttattacagatcaaagttattaaagaatgcagggtaggtgtgaggcatcagtgagcctctgtatactacaccccagaattagatgagcataactttagccagtggacagacatatgggaacctggaagagagatgctgctggtgctctaatgcatgttcataaacactgtataatgtaaggtattattaccattcagtgccagcaccacgmctgattattattaaggctaccacactgcaactaactatgtgcaaagtcatttacaaatttctctcaatttacgtgtatccagtctttgcaagatatccccacaccaatcccccagaaaagtgaaagtgaagagattttattgtatttccatcttttatactgtacttacgggcgccatatgcaagacacatgtgaaaggcatagctatagcacaccccacatgggcattgcaagccatttacattaggttttcccattactgtagctgcaggcacataaaatgtttattactgttatattgccattgcttaccttctacatatacctgccactgagcatctggtcttctgctgaaaagaataggaacatgttgatgttttccctggaactccagtttttttactttaatagtccctggttgtccttggccttctaccctagccagttccagagtctagacagagtaaccttggtattagctgaacaaaaattcgtggcaaagactgccctttgcttaaacaatcaaacaaaatcgggcctttccaatacctaggtaatcactttccaaagggaagtccacgaagattccccagtttactaaggagatggtaa

SEQ ID NO: 82894 - DNA, 1030 bp, Homo sapiens
tgtgaggatcaagcatgatgttcataaagcacccagcagagtgcccagcccacagtaggtgctccatgcaaggtactgatcattatcgtaaagtgagaaagccttgagaagacaccggtcatctactaggattgagaaattagctgccaatgagtggtactgaccactggtaatttcagaggtgaggggcaagagtgatctctgtggcaagagatacagtgagctggcttgtgaagaaggcctagagttggaaagatgcagggtagagaggaatggcttaatcaagggcaaggaagcaggaatgtgcatggggtaatttatgaatagtcactgcagcatctgttggatcaaaagggtcacatggggtggggcaaggaagagaaaaatgggtagcaggaaatggggttgggaaggaatactgggaaaaattgtgaaagcccttccagaataatgagtttgcctaatcccaaggcaatggaatatagctgaatgtttttgagtagtaagaaggcatgattaaagaaagattatcctcataatcatgggaagatgraatgcatatcttggaggttcttcttttctatattatctgtgaacaagactattgaaatttcattggagtttggaccttaataatgatttataaaaaaatcattttccgatttttgtccataacctagtaaatcattaaatcctactatagctaacatttatataactcttcattgttaatatgatattgagtagcccataaatagtggtcattaaataataaaatcccaggatgcttttgccatggggggttgcctaacaggaccttaaaaaataactgagaggtgacaactttgaggtaatgagtcatattcttttggagtagtgttttactctagttttccattactgacaaaaatcagagaataataaattgggtactgcaagaattagaattacaggacataatttataaaaatttgtactctgaacttgggaaaatttcagacaacttgaaagttatctaaaataattgtat

SEQ ID NO: 82895 - DNA, 1030 bp, Homo sapiens
tgtgaggatcaagcatgatgttcataaagcacccagcagagtgcccagcccacagtaggtgctccatgcaaggtactgatcattatcgtaaagtgagaaagccttgagaagacaccggtcatctactaggattgagaaattagctgccaatgagtggtactgaccactggtaatttcagaggtgaggggcaagagtgatctctgtggcaagagatacagtgagctggcttgtgaagaaggcctagagttggaaagatgcagggtagagaggaatggcttaatcaagggcaaggaagcaggaatgtgcatggggtaatttatgaatagtcactgcagcatctgttggatcaaaagggtcacatggggtggggcaaggaagagaaaaatgggtagcaggaaatggggttgggaaggaatactgggaaaaattgtgaaagcccttccagaataatgagtttgcctaatcccaaggcaatggaatatagctgaatgtttttgagtagtaagaaggcatgattaaagaaagattatcctcataatcatgggaagatggaatgcatatcttggaggttcttcttttctatattatctgtgaacaagactattgaaatttcattggagtttggaccttaataatgatttataaaaaaatyattttccgatttttgtccataacctagtaaatcattaaatcctactatagctaacatttatataactcttcattgttaatatgatattgagtagcccataaatagtggtcattaaataataaaatcccaggatgcttttgccatggggggttgcctaacaggaccttaaaaaataactgagaggtgacaactttgaggtaatgagtcatattcttttggagtagtgttttactctagttttccattactgacaaaaatcagagaataataaattgggtactgcaagaattagaattacaggacataatttataaaaatttgtactctgaacttgggaaaatttcagacaacttgaaagttatctaaaataattgtat

SEQ ID NO: 82896 - DNA, 699 bp, Homo sapiens
agaaaactcctcctccttccttaagatccagaaaactactcctcctcctccttccttaagatccaggttgcatgcatctttctgccttcagggaaagtccatcaatccctccaacatactcttatggccctttcagcattggttatcgtctctccttgagcaagtcctttaccttacccatccttagctgtaaaatggtattaataacagtacctacttcatagagccttgtgaggagtattaagttmataacatagaaagggcttaaaaccgagtgtggcattgtcataagcacctaacaaatatcagctacgattgctcttacataatctcaaatatagtatttgtgccataatcactattcacatatttgccccacccctcagacgataagattctcgatggcagggagtatgcctgtttgctttgcatcctctctgctggacgtactacttgtccttctagtaggtacccaataaaagtttgctgtagtgatgaatgcatgcatgcaaaatgtttctagtgctgcctgggttaatgagatattttgttcgccttatggtttcatatcccttctctttaaaacaaacttttcacacctagtaaactttcttcgtgaggcttttggttttaggatgctccctaatacaagtgttcttttctccaccttctgcctcaattgcaaaaccatcataaact

SEQ ID NO: 82897 - DNA, 813 bp, Homo sapiens
agctgtgtgtgccatagaagctgggcagagagatcccatatggctccagttagaggggaggctgccaacgagccatggagggcttttgtcttgtgaccacacctgtaagcctttcttataagccacatgtagcctawttctatgagccacatgtgctgctctgtcctacagggacccccaggggacaaaatgcccatgctgagctctgggcacaaaacatccttctaccaggagccgaggcccactccctgcctcctcggcacctgctgctttgtgttccccagacccttagcaatcttagcaatcctcagcaatcctcagcatccttagcaatctatgagtcagggcttgacccagaaaggaaatgaagtgagtcctgagcctctgacccttgggctctgtagtgggaaagtggccatggggtggggcactattgctggattttcttgttcatgctcaatttaccaaagtttaaaaccatgccttataacaacaattcatattatatttatttacatgaaaagtgcatattatatgtgttatatatgtataagatatacacatatattaatacaaattacatctgaaatagcatagaaatatatttaatttgtaaagtgtgttacaattacatatatgcatatacaaataacttatgtttatttatttagcatgtgcttctttttcttctaactataacagagtctggctgagtaaagactctggagacatttgatgaccctccctctttggcactagtagggtcctggccactcaggaccagtgaggacagaactgaggaaagtcgaccta

SEQ ID NO: 82898 - DNA, 1027 bp, Homo sapiens
gaattcaggtttgtcttatgaataatcaggattcacctccagggaacgatgaccagtgctctgattaagaacttgaaaaaaaagagttcccttgtggctaataaataatgggtctattttagaaagtctacttttcatgatataaatcaaaactttaaaaatgtaactgtaaatttatatcacaagagaaattatgaaagttgctcataatgtatctatataaacttgcacttctctgttattatttcaggatccagtgaggatattgtgatgacccagactccactctccctgcccgtcacccctggagagccggcctccatctcctgcaggtctagtcagagcctcttggatagtgatgatggaaacacctatttggactggtacctgcagaagccagggcagtctccacagctcctgatctatacgctttcctatcgggcctctggagtcccagacaggttcagtggcagtgggtcaggcactgatttcacactgaaaatcagcagggtggaggctgaggatgttggagtttattactgcatgcaacgtatagagtttccttccacagtggtacagccctgaacagaaacctccctgctgtggtgccccagctgctcacatgcactgcttgtctggggagcaggtcagcagcgtctctgagtctgcaaaagaggaggctgttggagaatacagggcagggtttgcttctgaggactctgcctgggactacaggtgcatgccaytaaacatggctaatttttctatttttttgtagagtcggtgcttcaccatgttgcccagcctgttgtcaaaatcatgggctcaagccacccacctgacttggcctcccaacgtgctggcagtacagtgtgagccactgcggcaggtcagcacccctgtttatgttcctgtcacctgccacagccttgactctcataaccaacaggaaaatgaggaggttctagggccctgtgagtaaaaaactgggatgatagggaaaggagaatggaatctcatctgaatc

SEQ ID NO: 82899 - DNA, 768 bp, Homo sapiens
cttttttcctctctatctgcctaaaataatttcttaataactcctacctcataaacacgtgaagctgtggagcccacagactcacctcccacccagttctccttgccctggcacatacatccagcttctgtgaagaactggatgtggctagagacttggggtcccacggacaagagttgagatgcaacacggcaagctttgaatagggggctggtcaattgtaagcagatgccatagaaaatcaggaaggtcctccaggcagagcatcaacagccccgaacatgggcttcccagacatgtctgaggaccacatgattggcaattatagcttctgcaccagatgctctctggattcttggggagatccagagaatcgttttctaattatttgcatctttgagtaccatgctcccaagcctcccagaggctgtagtttagactctcattgcgtgtatttagaaaaaaaaaaatagacttggaattccaagagtaggttttcctttgtggtattgattccaactcacaccatagccaagactcaggtgtaatcatctcttttcttaatgaaatcaggaacagtattgccatgtttgtgcwgcaggggatgagaaggaaaaacagttaaggtatagaggagttgtaatcgcccaaggggttcaccttgcctgctgcttagacagagtcgatttatcaagacacggcaatagcagtagtgaaagagtaattcacacagagctggctgtgtaatatcttccaccgtcataattt

SEQ ID NO: 82900 - DNA, 1367 bp, Homo sapiens
  misc_feature (1)...(1367): n = A,T,C or G
caccacgtccagccaggggaatatttttatttgtaggaaactcagtaaagttttagagggtgggaacatcaagtcttgaatatactctgcaaaggagagggtactttgttctatacttataacatttctgtgagagtgaaatggttccttcttaaaaaaaagagacaattttacaagataatgctaaatatatttgaaagtattttgtaatgaccttaagccattcttacatgactgtatggtcacgcaattcactacagatgcataaaaatgaaaccacaagtcctcaaggccggtatcactcacagattcaccattatttaaacctgtaagccaccttaatacccagagattatataagctgcatcttatttttggtttggtgatctctatattttaccctctcttctgccattragtattatttccccggggttctcagcatgaagagctgactagtgatgccagatctgattgacttaaataactagtttcttcctgcatttatcagagtctggattaggataaacttgaaattatccagggttcagttgtctccacaagtaggaagaccaagattgcatcccctgagtaatgctgaactccccaccagcatgttcctgggtgctcaggtacagctcctctgaatcctggatttctggagagcaggtgatggagagactttggaaaagatcaggacagtaagtcctccctaccagtgagggcagctgctgctcagtgcatgtccctgccttgcactatgaatgccactttcctcttttactttttagcagtgagtgggaacatcattctgatccacataccagcctcctgtctcacatccagaacagagtctccacctcttatcaagcaaatttccatacatatggagaaattaattggatcctaataaaactggtaatggatttgcacccaatcatatctcacatctctaacagggcccaagacatctcagcctgcttcagcagcagcattcaactacatcagtgtctgtgggctgtagcctgggttctggaaagtattactcatgcctgactaggagtggtcaaatcactgtggtgtaagctctgcacacaccctccttctgtctattcagggacctgaatgttaagggaacttgcttttgtagagggaaaaggggaaagagaaaagcaaaccttctaaaggtttgctgaaaatgaataaacaaaagacaaattaataggaaaaaaaggcagacaaatgtatttaacatgcggggtgggnnnnnnnnnnnnnnnnnnnnnnnnnnnnnnnnnnnnnnnnnnnnnnnnnnnnnnnnnnnnnnnnnnnnnnnnnnnnnnnnnnnnnnnnnnnnnnnnnnnntt

SEQ ID NO: 82901 - DNA, 1367 bp, Homo sapiens
  misc_feature (1)...(1367): n = A,T,C or G
caccacgtccagccaggggaatatttttatttgtaggaaactcagtaaagttttagagggtgggaacatcaagtcttgaatatactctgcaaaggagagggtactttgttctatacttataacatttctgtgagagtgaaatggttccttcttaaaaaaaagagacaattttacaagataatgctaaatatatttgaaagtattttgtaatgaccttaagccattcttacatgactgtatggtcacgcaattcactacagatgcataaaaatgaaaccacaagtcctcaaggccggtatcactcacagattcaccattatttaaacctgtaagccaccttaatacccagagattatataagctgcatcttatttttggtttggtgatctctatattttaccctctcttctgccattgagtattatttcccmggggttctcagcatgaagagctgactagtgatgccagatctgattgacttaaataactagtttcttcctgcatttatcagagtctggattaggataaacttgaaattatccagggttcagttgtctccacaagtaggaagaccaagattgcatcccctgagtaatgctgaactccccaccagcatgttcctgggtgctcaggtacagctcctctgaatcctggatttctggagagcaggtgatggagagactttggaaaagatcaggacagtaagtcctccctaccagtgagggcagctgctgctcagtgcatgtccctgccttgcactatgaatgccactttcctcttttactttttagcagtgagtgggaacatcattctgatccacataccagcctcctgtctcacatccagaacagagtctccacctcttatcaagcaaatttccatacatatggagaaattaattggatcctaataaaactggtaatggatttgcacccaatcatatctcacatctctaacagggcccaagacatctcagcctgcttcagcagcagcattcaactacatcagtgtctgtgggctgtagcctgggttctggaaagtattactcatgcctgactaggagtggtcaaatcactgtggtgtaagctctgcacacaccctccttctgtctattcagggacctgaatgttaagggaacttgcttttgtagagggaaaaggggaaagagaaaagcaaaccttctaaaggtttgctgaaaatgaataaacaaaagacaaattaataggaaaaaaaggcagacaaatgtatttaacatgcggggtgggnnnnnnnnnnnnnnnnnnnnnnnnnnnnnnnnnnnnnnnnnnnnnnnnnnnnnnnnnnnnnnnnnnnnnnnnnnnnnnnnnnnnnnnnnnnnnnnnnnnntt

SEQ ID NO: 82902 - DNA, 1367 bp, Homo sapiens
  misc_feature (1)...(1367): n = A,T,C or G
caccacgtccagccaggggaatatttttatttgtaggaaactcagtaaagttttagagggtgggaacatcaagtcttgaatatactctgcaaaggagagggtactttgttctatacttataacatttctgtgagagtgaaatggttccttcttaaaaaaaagagacaattttacaagataatgctaaatatatttgaaagtattttgtaatgaccttaagccattcttacatgactgtatggtcacgcaattcactacagatgcataaaaatgaaaccacaagtcctcaaggccggtatcactcacagattcaccattatttaaacctgtaagccaccttaatacccagagattatataagctgcatcttatttttggtttggtgatctctatattttaccctctcttctgccattgagtattatttccccggggttctcagcatgaagagctgactagtgatgccagatctgattgacttaaataactagtttcttcctgcatttatcagagtctggattaggataaacttgaaattatccagggttcagttgtctccacaagtaggaagaccaagattgcatcccctgagtaatgctgaactccccaccagcatgttcctgggtgctcaggtacagctcctctgaatcctggatttctggagagcaggtgatggagagactttggaaaagatcaggacagtaagtcctccctaccagtgagggcagctgctgctcagtgcatgtccctgccttgcackatgaatgccactttcctcttttactttttagcagtgagtgggaacatcattctgatccacataccagcctcctgtctcacatccagaacagagtctccacctcttatcaagcaaatttccatacatatggagaaattaattggatcctaataaaactggtaatggatttgcacccaatcatatctcacatctctaacagggcccaagacatctcagcctgcttcagcagcagcattcaactacatcagtgtctgtgggctgtagcctgggttctggaaagtattactcatgcctgactaggagtggtcaaatcactgtggtgtaagctctgcacacaccctccttctgtctattcagggacctgaatgttaagggaacttgcttttgtagagggaaaaggggaaagagaaaagcaaaccttctaaaggtttgctgaaaatgaataaacaaaagacaaattaataggaaaaaaaggcagacaaatgtatttaacatgcggggtgggnnnnnnnnnnnnnnnnnnnnnnnnnnnnnnnnnnnnnnnnnnnnnnnnnnnnnnnnnnnnnnnnnnnnnnnnnnnnnnnnnnnnnnnnnnnnnnnnnnnntt

SEQ ID NO: 82903 - DNA, 1543 bp, Homo sapiens
gggacacttctaaaatttattgcagattctggagatgtgcttctccaacaagccaggtcttagacgggaagctagcaagaaaagtaggtcatgacctacttctgcagagcagaaaagcaatctccttgcaggacagtagacagattctgttctgtggcccccagagagaaacttgttctctgctaacaagtgtatgcaggcctgatcaatcttaggacccctgggggacactaggcctgtgcaatattatgcaggtaaagtcattcttgcatctgttgaaattttcattttcaaaaaaacacagccaacttcctgaagacttgtacacaggctggtcataccacttgcaagagtcagtcccagtcaagacacagcatggacatgagggtccctgctcagctcctggggctcctgctgctctggctctcaggcaaggaaggagaacactaggaatttactgagccagtgtggtcagtactacctggctattcaggaaagtcctctcataacatggttaatagtgttaatagttttgtttcccatctcaggtgccagatatgacatgcagatgacccagtctccatcctcgctgtcttcctgtctaggtgagagtcaccatcacatgccaggaaagtcaggcagggcattagccatgttttagcctgatacaaagagaagccagggaaagcttctgagctcctgatctacgatgcatccaatttgcaaacctgggtcccattgcagttatgtggcattggatccaggacagatttgattctcaccattagcatcctccagtctgaagttgctgcaacttcttattattggtcaacagtataaaagtgaccctctcacagtgttacaaacccaataagctccccaaggaagcagatatgtgagggtgggctgccccagctgcttctcctgtttcctccatctgctgagagtgtttctcagactcagccacactctgaaggtcactgagcagttttcatagaaggggtaagggaagtgtctctacacccttagtttcttttatcctcctcagccccagcagcagacatggcaatgcctctcctaatttcatagaagagtcattacctatgaggactctgggttacagcactggtccaggttcatacaacaaaagagaagctattgtaggtaacccaaatagaaagtttttcctaatatgggaaatccatgtctaaattacaacttttcaaagaccagaggatataatggttaggaaaccagaaaggcaaaaggagtgctgggaaatctacttcaagaagcaatggtggccgcgcacagtggttcaggcctgtaatcccagcamtttgggaggccgaggcaggcggatcacctgagatcaggagttcaagaccagcctggccaacatggcgaaaccccgtctctactaaaaatacaaaaattagccgggcatagtggtgggtgcctgtaatcctagctactcagaaggctgaggcaggagaatcatttgaaccaggcaggtggtctctgcagtttcgaagcccagcgc

SEQ ID NO: 82904 - DNA, 1543 bp, Homo sapiens
gggacacttctaaaatttattgcagattctggagatgtgcttctccaacaagccaggtcttagacgggaagctagcaagaaaagtaggtcatgacctacttctgcagagcagaaaagcaatctccttgcaggacagtagacagattctgttctgtggcccccagagagaaacttgttctctgctaacaagtgtatgcaggcctgatcaatcttaggacccctgggggacactaggcctgtgcaatattatgcaggtaaagtcattcttgcatctgttgaaattttcattttcaaaaaaacacagccaacttcctgaagacttgtacacaggctggtcataccacttgcaagagtcagtcccagtcaagacacagcatggacatgagggtccctgctcagctcctggggctcctgctgctctggctctcaggcaaggaaggagaacactaggaatttactgagccagtgtggtcagtactacctggctattcaggaaagtcctctcataacatggttaatagtgttaatagttttgtttcccatctcaggtgccagatatgacatgcagatgacccagtctccatcctcgctgtcttcctgtctaggtgagagtcaccatcacatgccaggaaagtcaggcagggcattagccatgttttagcctgatacaaagagaagccagggaaagcttctgagctcctgatctacgatgcatccaatttgcaaacctgggtcccattgcagttatgtggcattggatccaggacagatttgattctcaccattagcatcctccagtctgaagttgctgcaacttcttattattggtcaacagtataaaagtgaccctctcacagtgttacaaacccaataagctccccaaggaagcagatatgtgagggtgggctgccccagctgcttctcctgtttcctccatctgctgagagtgtttctcagactcagccacactctgaaggtcactgagcagttttcatagaaggggtaagggaagtgtctctacacccttagtttcttttatcctcctcagccccagcagcagacatggcaatgcctctcctaatttcatagaagagtcattacctatgaggactctgggttacagcactggtccaggttcatacaacaaaagagaagctattgtaggtaacccaaatagaaagtttttcctaatatgggaaatccatgtctaaattacaacttttcaaagaccagaggatataatggttaggaaaccagaaaggcaaaaggagtgctgggaaatctacttcaagaagcaatggtggccgcgcacagtggttcaggcctgtaatcccagcactttgggaggccgaggcaggcggatcacctgagatcaggagttcaagaccagcctggccaacatggcgaaaccccgtctctactaaaaatacaaaaattagccgggcatagtggtgggtgcctgtaatcctagctactcagaaggctgaggcaggagaatcatttgaaccaggcaggtggtctctgcagtttcraagcccagcgc

SEQ ID NO: 82905 - DNA, 1303 bp, Homo sapiens
tgttgatctatgaccttacccccaaccctgtgctctctgaaacatgtgctgtgtccactcagggttaaatggattaagggcggtgcaagatgtgctttgttaaacagatgcttgaaggcagcatgctcgttaagagtcatcaccactccctaatctcaagtacccagggacacaaacactgcagaaggccgcagagtcctctgcctaggaaaaccagagacctttgttcacttgtttatctgctgaccttccctccactattgtcctatgaccctgccaaatccccctctgccagaaacacccaagaatgatcaaytaaaaaaaaaaaaagaataaggtcataaaactgcaaacctatttttatttcattcttagactcaacattaacaaattgctacaaaagtttctaaaggattactcccaaagtctgtgcttaccatgctacagaccattagcaaacagatcacaaattggccctgctctacaggccagtttgagcagtgctgtgctatatccctgcatgtctctctgcctttaagacagtgtatgtagtgtgttctcttttccagagcctttttgccaaatagtgtaatattcattttgaaaagacaagttgccccattcacagtaagactcagaattcactcatattgttagttttgtttttcaaataagaaaatttgattccaaagactgtaaagtgcccaccaaccctgacatttatcgtttacctattttacagcatcctcagccacaggatttcaaggctggaaagttactaatgtagccaacaaattgtgggtaatacacatcacatctctttggcttccacatgcaattccctctgagaaaattattattcactaggctctaagggtttggtgacagaaggtgagtttttaaataactgatatgttggtataagtttagagtatttcataattggcattggtatgttttgtaaacctgtaaaatattaataatttttggtctaagacaaaagcatcatcagggtaaaggggaaatgaagttttattgttgttgttgttgggagtggtggtggcagtgttggtggtgctttagagtaatcctgaggataagtgagggaaattgaatctgagcatctaaattctattttgtgtttcccttagctttatattaagttgctctacttttgtatttcttttctttttctctgtccaacaacctccccaccacaacccagaacaaaatatggaaagatatagcacatttctatacctaactatagcacattctatactaactttattatattagctat

SEQ ID NO: 82906 - DNA, 1303 bp, Homo sapiens
tgttgatctatgaccttacccccaaccctgtgctctctgaaacatgtgctgtgtccactcagggttaaatggattaagggcggtgcaagatgtgctttgttaaacagatgcttgaaggcagcatgctcgttaagagtcatcaccactccctaatctcaagtacccagggacacaaacactgcagaaggccgcagagtcctctgcctaggaaaaccagagacctttgttcacttgtttatctgctgaccttccctccactattgtcctatgaccctgccaaatccccctctgccagaaacacccaagaatgatcaactaaaaaaaaaaaaagaataaggtcataaaactgcaaacctatttttatttcattcttagactcaacattaacaaattgctacaaaagtttctaaaggattactcccaaagtctgtgcttaccatgctacagaccattagcaaacagatcacaaattggccctgctctacaggccagtttgagcagtgctgtgctatatccctgcatgtctctctgcctttaagacagtgtatgtagtgtgttctcttttccagagcctttttgccaaatagtgtaatattcattttgaaaagacaagttgccccattcacagtaagactcagaattcactcatattgttagttttgtttttcaaataagaaaatttgattccaaagactgtaaagtgcccaccaaccctgacatttatcgtttacctattttacagcatcctcagccacaggatttcaaggctggaaagttactaatgtagccaacaaattgtgggtwatacacatcacatctctttggcttccacatgcaattccctctgagaaaattattattcactaggctctaagggtttggtgacagaaggtgagtttttaaataactgatatgttggtataagtttagagtatttcataattggcattggtatgttttgtaaacctgtaaaatattaataatttttggtctaagacaaaagcatcatcagggtaaaggggaaatgaagttttattgttgttgttgttgggagtggtggtggcagtgttggtggtgctttagagtaatcctgaggataagtgagggaaattgaatctgagcatctaaattctattttgtgtttcccttagctttatattaagttgctctacttttgtatttcttttctttttctctgtccaacaacctccccaccacaacccagaacaaaatatggaaagatatagcacatttctatacctaactatagcacattctatactaactttattatattagctat

SEQ ID NO: 82907 - DNA, 1303 bp, Homo sapiens
tgttgatctatgaccttacccccaaccctgtgctctctgaaacatgtgctgtgtccactcagggttaaatggattaagggcggtgcaagatgtgctttgttaaacagatgcttgaaggcagcatgctcgttaagagtcatcaccactccctaatctcaagtacccagggacacaaacactgcagaaggccgcagagtcctctgcctaggaaaaccagagacctttgttcacttgtttatctgctgaccttccctccactattgtcctatgaccctgccaaatccccctctgccagaaacacccaagaatgatcaactaaaaaaaaaaaaagaataaggtcataaaactgcaaacctatttttatttcattcttagactcaacattaacaaattgctacaaaagtttctaaaggattactcccaaagtctgtgcttaccatgctacagaccattagcaaacagatcacaaattggccctgctctacaggccagtttgagcagtgctgtgctatatccctgcatgtctctctgcctttaagacagtgtatgtagtgtgttctcttttccagagcctttttgccaaatagtgtaatattcattttgaaaagacaagttgccccattcacagtaagactcagaattcactcatattgttagttttgtttttcaaataagaaaatttgattccaaagactgtaaagtgcccaccaaccctgacatttatcgtttacctattttacagcatcctcagccacaggatttcaaggctggaaagttactaatgtagccaacaaattgtgggtaatacacatcacatctctttggcttccacatgcaattccctctgagaaaattattattcactaggctctaagggtttggtgacagaaggtgagtttttaaataactgatatgttggtataagtttagagtatttcataattggcattggtatgttttgtaaacctgtaaaatattaataatttttggtcwaagacaaaagcatcatcagggtaaaggggaaatgaagttttattgttgttgttgttgggagtggtggtggcagtgttggtggtgctttagagtaatcctgaggataagtgagggaaattgaatctgagcatctaaattctattttgtgtttcccttagctttatattaagttgctctacttttgtatttcttttctttttctctgtccaacaacctccccaccacaacccagaacaaaatatggaaagatatagcacatttctatacctaactatagcacattctatactaactttattatattagctat

SEQ ID NO: 82908 - DNA, 772 bp, Homo sapiens
gggatcctgaagccatattttcaaatcagaaaaatgaaagcctcattgttgtttttcaaatgttttaagtttccttgataaaaggcagtattaggacttctatttctaggtcaagtctatatttacagtaactaataggaaaatattgaagtctgaggttaccagtacaatgtctgaatgcaaaattctggacactggacaaagtactttagaatcagaggccagcaaagctctggaaggctgtgaacagggacaaatgcaatayggttcagcagacagaaagtcagaagtaagattcagatgtagccaagcagggtgggggacagtgaggggggatgtctagctggacttgaagggcgtatgaaagcagctgtccttgcaggggagatttaaaggaaatgactcttcagggggcactgcatttgcaaaaaaaaaaaaaaaaaaaaaaaaaaatctgatatagtatgttttggaaattccaaaatatttgatattgccagcagaagagttggaaagtggcagaaaataagggtctaaaaatagccataagcgaaagtgcaaagtcttgaaggatagagattatgtctctgaacctggttctcaaaattgttgaattattaactatggagatgcgctgtacagaattgaacttaaaatggtcatctgtgtatagcatgtcatcttaaaaggttactaaaataggaaagaacttgcacaggtataaagtgtgtgccattcctcccgtgggctaagggtcttgtctcacttggtg

SEQ ID NO: 82909 - DNA, 772 bp, Homo sapiens
gggatcctgaagccatattttcaaatcagaaaaatgaaagcctcattgttgtttttcaaatgttttaagtttccttgataaaaggcagtattaggacttctatttctaggtcaagtctatatttacagtaactaataggaaaatattgaagtctgaggttaccagtacaatgtctgaatgcaaaattctggacactggacaaagtactttagaatcagaggccagcaaagctctggaaggctgtgaacagggacaaatgcaatatggttcagcagacagaaagtcagaagtaagattcagatgtagccaagcagggtgggggacagtgaggggggatgtctagctggacttgaagggcgtatgaaagcagctgtccttgcaggggagatttaaaggaaatgactcttcagggggcactgcatttgcaaaaaaaaaaaaaaaaaaaaaaaaaaatctgatatagtatgttttggaaattccaaaatatttgatattgccrgcagaagagttggaaagtggcagaaaataagggtctaaaaatagccataagcgaaagtgcaaagtcttgaaggatagagattatgtctctgaacctggttctcaaaattgttgaattattaactatggagatgcgctgtacagaattgaacttaaaatggtcatctgtgtatagcatgtcatcttaaaaggttactaaaataggaaagaacttgcacaggtataaagtgtgtgccattcctcccgtgggctaagggtcttgtctcacttggtg

SEQ ID NO: 82910 - DNA, 785 bp, Homo sapiens
aacaggacaccaagacactcagtccagggtaagcaagtacaaaatccactggctattatgacccacatagagaacagaattcttcaatttaagtgtgtacatagctgtgttaagagttaaataaatcatttacgaggcttaaaaagaaatgcttctcatgtagttctttttcatgtagttctctgaatacaagtcaaagtgcaggtcacgaaagaatccattgttcacaagcgagaaatgttgttggctgtgaggacggttcagaacaagccatcgtagtctgctcaaacagyaaatattggttttaaaaccccaaagcatatcggtcatgttttttatcttccaattgctagaaccaaaattcactgaaacaactctatgtctctgatactattttctagaaatgtgtgtgtatgcgtgtgtgtatgtgtctgtgtatgtttgtttggtaaatccaaatcacacaatcaacgtaaatctttcaggctaagttttgccccagttatttttatgctgtgctttcaaaaaggtcaaaaaagcttacctctgtcagtgtactgggacgctcaggaagccccttctccgcctcggcctcagcgtgcagacatatgccctgggagcccacaatctgttaacaggaagcaggtaaacccgagagcgtccgcctgcgttccagtccagtgcccgtcccagcacacacctgctttttcagacctgccgctcatatgccacagccacgcacaggaccagcgttagcagagtgcaacaccctccgtttggatccc

SEQ ID NO: 82911 - DNA, 1764 bp, Homo sapiens
attaattgacctgaggcctcacaacaaccaaacaagctaaatactattgttatcttattttactgcaaagaaacgccaaaccacagggaaggtacaaggtcacacagctattaagtagtgagtgaagcttgggaatgcaggcagtttggcttcagagtttttgtactataatgtctttcttggatctaaggacataaaggattgcaacagtttataacacataacttagttattgaccagaatttgagtgtgagtctgtcataatcaggattaatcaggtacagtacaccctgtaatgagcaatattggaaatgctcatgtatactataattactctaagacaaatgtcataaacatctttgttttttttttttatcatgggtacaaggcacataaatttatttcaataggacagctgctgcttttgatgcttgttctcacaattccgtggtggtagttgtatttgtttgttctcatgttcctaataaagacatacccaagactgggtaatttataaaggaaagagatttaattgactcacagttccacatggctggggaggcctcacaatcatggcagaaggcaaagggcatcttacatgacagcaggcaagagagcttgtgcaggggaattcccatttataaaaccatcagatctcatgagacttattcactaccacaagaacagcacgagaaagacgcaccccatgagtcacttacctcccaccggatccctcccatgacacgtgggattatgggagctacaattcaagatgagatttgggtggggacacagccaaaccttatcagtatttctctgtgtttctcacaaacatccctgagcactttattgttatcacccaccataggatggtcaggcccatctttcttccccttgaaggagcccaggcttctcctaggcttcagtgttaagggcacagtgggttctgggtgaccctcataaaatcagatcatgaatttaaggcagagccgacttgggctctcactctccaggggagatgttcttagatgaacaaaaattctccttagtcagaaaagcagcatcctcatcaatgtatggaattgtggcaaacatattaagcatgtyattccttaagttaatatctgtcactacataataactcacgataaataaatgtggtcaagaaactatattgtcacaggtacatgtaatagataaagacagggagcacaaccagcgtttgtttaactttgcaaggatcaaaccatcatcagaaccaccctttgtgtcttcattaattttttgttcatgctgattctgaatgtttagtctcaagaggaattatgagccatcagattggatgagtcaccttttagttataatcacaggagcattcaaaaatgaaatcactttattcagctggatgaaccttataaaaagtaaatgacttcatatacatttggcataaggctaatgagctatttttagtttttcctggaattatcttagcccttctttccgccctccgtgatgcctgcctccattttaccccttcccagtgctttcttggtcatgctaatcaaaaaggaaagggggaagaaacatgtggttttgataaccttcaaatcattaaggcaagggggaaaaggcccacaaaaggtggctctgaaacgtggagcgcctttccaagatccaaataaagtgttttctagagagtttcatgttatttttatcatgacttttataatctactactatcttttaaaatctgcattagaatat

SEQ ID NO: 82912 - DNA, 1764 bp, Homo sapiens
attaattgacctgaggcctcacaacaaccaaacaagctaaatactattgttatcttattttactgcaaagaaacgccaaaccacagggaaggtacaaggtcacacagctattaagtagtgagtgaagcttgggaatgcaggcagtttggcttcagagtttttgtactataatgtctttcttggatctaaggacataaaggattgcaacagtttataacacataacttagttattgaccagaatttgagtgtgagtctgtcataatcaggattaatcaggtacagtacaccctgtaatgagcaatattggaaatgctcatgtatactataattactctaagacaaatgtcataaacatctttgttttttttttttatcatgggtacaaggcacataaatttatttcaataggacagctgctgcttttgatgcttgttctcacaattccgtggtggtagttgtatttgtttgttctcatgttcctaataaagacatacccaagactgggtaatttataaaggaaagagatttaattgactcacagttccacatggctggggaggcctcacaatcatggcagaaggcaaagggcatcttacatgacagcaggcaagagagcttgtgcaggggaattcccatttataaaaccatcagatctcatgagacttattcactaccacaagaacagcacgagaaagacgcaccccatgagtcacttacctcccaccggatccctcccatgacacgtgggattatgggagctacaattcaagatgagatttgggtggggacacagccaaaccttatcagtatttctctgtgtttctcacaaacatccctgagcactttattgttatcacccaccataggatggtcaggcccatctttcttccccttgaaggagcccaggcttctcctaggcttcagtgttaagggcacagtgggttctgggtgaccctcataaaatcagatcatgaatttaaggcagagccgacttgggctctcactctccaggggagatgttcttagatgaacaaaaattctccttagtcagaaaagcagcatcctcatcaatgtatggaattgtggcaaacatattaagcatgtcrttccttaagttaatatctgtcactacataataactcacgataaataaatgtggtcaagaaactatattgtcacaggtacatgtaatagataaagacagggagcacaaccagcgtttgtttaactttgcaaggatcaaaccatcatcagaaccaccctttgtgtcttcattaattttttgttcatgctgattctgaatgtttagtctcaagaggaattatgagccatcagattggatgagtcaccttttagttataatcacaggagcattcaaaaatgaaatcactttattcagctggatgaaccttataaaaagtaaatgacttcatatacatttggcataaggctaatgagctatttttagtttttcctggaattatcttagcccttctttccgccctccgtgatgcctgcctccattttaccccttcccagtgctttcttggtcatgctaatcaaaaaggaaagggggaagaaacatgtggttttgataaccttcaaatcattaaggcaagggggaaaaggcccacaaaaggtggctctgaaacgtggagcgcctttccaagatccaaataaagtgttttctagagagtttcatgttatttttatcatgacttttataatctactactatcttttaaaatctgcattagaatat

SEQ ID NO: 82913 - DNA, 1764 bp, Homo sapiens
attaattgacctgaggcctcacaacaaccaaacaagctaaatactattgttatcttattttactgcaaagaaacgccaaaccacagggaaggtacaaggtcacacagctattaagtagtgagtgaagcttgggaatgcaggcagtttggcttcagagtttttgtactataatgtctttcttggatctaaggacataaaggattgcaacagtttataacacataacttagttattgaccagaatttgagtgtgagtctgtcataatcaggattaatcaggtacagtacaccctgtaatgagcaatattggaaatgctcatgtatactataattactctaagacaaatgtcataaacatctttgttttttttttttatcatgggtacaaggcacataaatttatttcaataggacagctgctgcttttgatgcttgttctcacaattccgtggtggtagttgtatttgtttgttctcatgttcctaataaagacatacccaagactgggtaatttataaaggaaagagatttaattgactcacagttccacatggctggggaggcctcacaatcatggcagaaggcaaagggcatcttacatgacagcaggcaagagagcttgtgcaggggaattcccatttataaaaccatcagatctcatgagacttattcactaccacaagaacagcacgagaaagacgcaccccatgagtcacttacctcccaccggatccctcccatgacacgtgggattatgggagctacaattcaagatgagatttgggtggggacacagccaaaccttatcagtatttctctgtgtttctcacaaacatccctgagcactttattgttatcacccaccataggatggtcaggcccatctttcttccccttgaaggagcccaggcttctcctaggcttcagtgttaagggcacagtgggttctgggtgaccctcataaaatcagatcatgaatttaaggcagagccgacttgggctctcactctccaggggagatgttcttagatgaacaaaaattctccttagtcagaaaagcagcatcctcatcaatgtatggaattgtggcaaacatattaagcatgtcattccttaagttaatatctgtcactacayaataactcacgataaataaatgtggtcaagaaactatattgtcacaggtacatgtaatagataaagacagggagcacaaccagcgtttgtttaactttgcaaggatcaaaccatcatcagaaccaccctttgtgtcttcattaattttttgttcatgctgattctgaatgtttagtctcaagaggaattatgagccatcagattggatgagtcaccttttagttataatcacaggagcattcaaaaatgaaatcactttattcagctggatgaaccttataaaaagtaaatgacttcatatacatttggcataaggctaatgagctatttttagtttttcctggaattatcttagcccttctttccgccctccgtgatgcctgcctccattttaccccttcccagtgctttcttggtcatgctaatcaaaaaggaaagggggaagaaacatgtggttttgataaccttcaaatcattaaggcaagggggaaaaggcccacaaaaggtggctctgaaacgtggagcgcctttccaagatccaaataaagtgttttctagagagtttcatgttatttttatcatgacttttataatctactactatcttttaaaatctgcattagaatat

SEQ ID NO: 82914 - DNA, 1018 bp, Homo sapiens
tgttgctcgtcttgcgacataaaataacagcatgctagtggccaaaaggcatgaagtgttcaaacttattcaaagttcaaagtgttcaaaccttttatgtacatgattctttaaaacgagggaaaagggaattgctctgttctcaatcgactgtgtctgagttcttaggatttatattagatccacactcccccccaaattttgaagatggaatgaatgtgttttctcctatatttaccactcaagttttttctttcctacatgctgactgtttgtgtyatggtcattagattctagtactgaaggggttttggtttttgcctttgttctctgtgtgagctatgcagtggcttttgtgctgaaggagggagctcccgtctcatcagtttcagaacttgagtgatggattcgtcgtggctgctgatggtaacggtgggcactggccagcctgttgctcatgcagcgtgggaggtgagcgggcacagtgcccgtggagaggtggtgctgcctgatgagcttagggaaacccggtaaacaccgatgtgctctcccagatgcaaactgagtcacatccctgtcaggaaactgcaaataaatcgtgtgcaaaacggaacaaggatcctattaattaatttgggataactttattttattttttattttttttagagacagggtctctctccattgcccaggctggagtgccgtggtgtgattatggctcactgcagccttgactgcctggattcaagggaccctcccacctcagcctcttgagtagctgggagtacagatatacaccatcacactcagcaaatcttttcattttttttttgtagagctggggtcttgccttgttgcctgggctggtcttgaactcctggcctcccatctcagcctctcccatctcatcctcccatctcagcctctcaaagtgctgggatgacaggcatgagccactatgcctggccctgacatgagactcttaaccaggccattttacaaccaatttcatgca

SEQ ID NO: 82915 - DNA, 1018 bp, Homo sapiens
tgttgctcgtcttgcgacataaaataacagcatgctagtggccaaaaggcatgaagtgttcaaacttattcaaagttcaaagtgttcaaaccttttatgtacatgattctttaaaacgagggaaaagggaattgctctgttctcaatcgactgtgtctgagttcttaggatttatattagatccacactcccccccaaattttgaagatggaatgaatgtgttttctcctatatttaccactcaagttttttctttcctacatgctgactgtttgtgttatggtcattagattctagtactgaaggggttttggtttttgcctttgttctctgtgtgagctatgcagtggctttygtgctgaaggagggagctcccgtctcatcagtttcagaacttgagtgatggattcgtcgtggctgctgatggtaacggtgggcactggccagcctgttgctcatgcagcgtgggaggtgagcgggcacagtgcccgtggagaggtggtgctgcctgatgagcttagggaaacccggtaaacaccgatgtgctctcccagatgcaaactgagtcacatccctgtcaggaaactgcaaataaatcgtgtgcaaaacggaacaaggatcctattaattaatttgggataactttattttattttttattttttttagagacagggtctctctccattgcccaggctggagtgccgtggtgtgattatggctcactgcagccttgactgcctggattcaagggaccctcccacctcagcctcttgagtagctgggagtacagatatacaccatcacactcagcaaatcttttcattttttttttgtagagctggggtcttgccttgttgcctgggctggtcttgaactcctggcctcccatctcagcctctcccatctcatcctcccatctcagcctctcaaagtgctgggatgacaggcatgagccactatgcctggccctgacatgagactcttaaccaggccattttacaaccaatttcatgca

SEQ ID NO: 82916 - DNA, 1018 bp, Homo sapiens
tgttgctcgtcttgcgacataaaataacagcatgctagtggccaaaaggcatgaagtgttcaaacttattcaaagttcaaagtgttcaaaccttttatgtacatgattctttaaaacgagggaaaagggaattgctctgttctcaatcgactgtgtctgagttcttaggatttatattagatccacactcccccccaaattttgaagatggaatgaatgtgttttctcctatatttaccactcaagttttttctttcctacatgctgactgtttgtgttatggtcattagattctagtactgaaggggttttggtttttgcctttgttctctgtgtgagctatgcagtggcttttgtgctgaaggagggagctccygtctcatcagtttcagaacttgagtgatggattcgtcgtggctgctgatggtaacggtgggcactggccagcctgttgctcatgcagcgtgggaggtgagcgggcacagtgcccgtggagaggtggtgctgcctgatgagcttagggaaacccggtaaacaccgatgtgctctcccagatgcaaactgagtcacatccctgtcaggaaactgcaaataaatcgtgtgcaaaacggaacaaggatcctattaattaatttgggataactttattttattttttattttttttagagacagggtctctctccattgcccaggctggagtgccgtggtgtgattatggctcactgcagccttgactgcctggattcaagggaccctcccacctcagcctcttgagtagctgggagtacagatatacaccatcacactcagcaaatcttttcattttttttttgtagagctggggtcttgccttgttgcctgggctggtcttgaactcctggcctcccatctcagcctctcccatctcatcctcccatctcagcctctcaaagtgctgggatgacaggcatgagccactatgcctggccctgacatgagactcttaaccaggccattttacaaccaatttcatgca

SEQ ID NO: 82917 - DNA, 1277 bp, Homo sapiens
tttaaattgaacattggactaaatgaataacagaacggaatgtgagaaatgcactgatttgaactcctgtgtttgtttgaatcatatacattttcagaaacagctaaatttgagtggaaaatacaacagtgttgtaatccaaaatgtcagtttatacctgacttaacatttattgtgctatgtgctgagaatcccaaaggcacatttaattttattaaacacagtgattcattccataaacctaacagccaaggcagtgccttgtcatcttttgacaacttaccatagtttacttcaagtaactaaaagaacatggcatcttcatgctaactagggtcccagatgtaaatgacaacagcaaacatcttagataggatgtgtggtggtgaaggaagactttggtgcgtaataagttatatgatggatttggtgggagtcccagtatcttatgagggtacagacacatggtttctattctgtcttaattcctggtgattcttcagtgtttgtatttaccaaagataaatagacctttcttactttgcttttagaaaatgctttcccraatggtttttcagagaagaaaatttgttaccagatcaatgtacttaaggaaatgaaaagcccttgattagcagccaaggagcctcctaatgaaatgacatttccctccagggatttcaagtggttaataaaatctagtgttctcggtgtaaagtgcttatgtttgctatgtctgctatgtgctgttctgaggtacactcataaacattgatacattaagtggagccccaaaatagatgaatgtgtgtgtccacgtatgtactggagcagaagctttatctacgtctcacacctgagttgtgtagttgaaggtaaatttaccctatgcacagcttcaaatgaactcttcataaacctgacgccttcagaggggaaggcctcacttactaacctgaaaacagcaatagctcctaaaatcctgaggagaatgtaagactgtatttcaaggaaaaactatgccctggaccagacaaagcaattaatgcttggagaaactaatagtctctgatggtttctacagaggcaaataaaccattagactggtctttattattatgtcatttaagtgtgtatataaatatataacgagattattgtctttatgatgtcttcatataaatgtgtgtatataaaatgctcttattttaagtcttagaaacccactaattctagtggaaagcattttaatgttacaggagagtttcacagcactc

SEQ ID NO: 82918 - DNA, 1277 bp, Homo sapiens
tttaaattgaacattggactaaatgaataacagaacggaatgtgagaaatgcactgatttgaactcctgtgtttgtttgaatcatatacattttcagaaacagctaaatttgagtggaaaatacaacagtgttgtaatccaaaatgtcagtttatacctgacttaacatttattgtgctatgtgctgagaatcccaaaggcacatttaattttattaaacacagtgattcattccataaacctaacagccaaggcagtgccttgtcatcttttgacaacttaccatagtttacttcaagtaactaaaagaacatggcatcttcatgctaactagggtcccagatgtaaatgacaacagcaaacatcttagataggatgtgtggtggtgaaggaagactttggtgcgtaataagttatatgatggatttggtgggagtcccagtatcttatgagggtacagacacatggtttctattctgtcttaattcctggtgattcttcagtgtttgtatttaccaaagataaatagacctttcttactttgcttttagaaaatgctttcccgaatggtttttcagagaagaaaatttgttaccagatcaatgtacttaaggaaatgaaaagcccttgattagcagccaaggagcctcctaatgaaatgacatttccctccagggatttcaagtggttaataaaatctagtgttctcggtgtaaagtgcttatgtttgctatgtctgctatgtgctgttctgaggtacactcataaacattgatacattaagtggagccccaaaatagatgaatgtgtgtgtccacgtatgtactggagcagaagctttatctaygtctcacacctgagttgtgtagttgaaggtaaatttaccctatgcacagcttcaaatgaactcttcataaacctgacgccttcagaggggaaggcctcacttactaacctgaaaacagcaatagctcctaaaatcctgaggagaatgtaagactgtatttcaaggaaaaactatgccctggaccagacaaagcaattaatgcttggagaaactaatagtctctgatggtttctacagaggcaaataaaccattagactggtctttattattatgtcatttaagtgtgtatataaatatataacgagattattgtctttatgatgtcttcatataaatgtgtgtatataaaatgctcttattttaagtcttagaaacccactaattctagtggaaagcattttaatgttacaggagagtttcacagcactc

SEQ ID NO: 82919 - DNA, 570 bp, Homo sapiens
acttgttcaaagaagagaagatgggtttttaatagcactcacaaatcaaattcattaagtccctattttgatgtaggagaacagagctatcattgcagcaaaattttccaaggccagtgatgccaggataccaaggagctacatgctgtcatttgcttgggtctctctgacaaccatgaagacactgtcctctttccctctaacaacttgtttgtaaarttgttagactctcgacatatgggacaagtcagcagaatgttagacttcctataatatctcagcaagactgccttgagaactcatggcatgtggatagttcagggagttgtgtgtttttcccaactcagtcattaccaattgtacatcccacatgaaagtcactttagcatttttccatattttagggggaagtggtgactcatgcccgaggggcaggatgagaatataggtctcataggcatcttcaaaccaggttcgcctctgctccacatttgtgccatgaaagagcttcgtttcataacaagccagagaccaattctaaatcagtatctgcacaggcctgaagaattg

SEQ ID NO: 82920 - DNA, 719 bp, Homo sapiens
attctaagccactgagatacctttattttttgcccgacatgcctttctatgcctgggataactatgcatttttcagccacatcacctagtctgtgaagttgtttctgagtccctgcctccctgagttgccactgcacatcctatatcctaggctgcagcagactgtggtgtaatattttgttcctctatctctctcattcaactgtgagctcctccaaagtgaggatggtgtgttatgttctttgtatccttggcatctcttttatggtctggaataaagtagatgctcaataaatgcttattgaatgaaaaggcccagaggaaaataagccctttccattcttagatctctgwcatcatccacaaacccagcttgcatgattcctaagcgttatgtccctgccccacaacccccactcccattggatactccctcctactggctttcctgccattcacttcccatccagcccacctgggccctccctgggaatctccttcacacctagggtaccaactcttcacacccagaaagacgctcaaaattctccttcttcccagcagccctccttaagcaactgtactcaggtctgatcactccctctgacatgtcctgccaaattaggaagcttatttcccactgcattattctaccaggggacttcttgagattttttttcttgcatgtatgtatgttccagctccccgactagagctca

SEQ ID NO: 82921 - DNA, 719 bp, Homo sapiens
attctaagccactgagatacctttattttttgcccgacatgcctttctatgcctgggataactatgcatttttcagccacatcacctagtctgtgaagttgtttctgagtccctgcctccctgagttgccactgcacatcctatatcctaggctgcagcagactgtggtgtaatattttgttcctctatctctctcattcaactgtgagctcctccaaagtgaggatggtgtgttatgttctttgtatccttggcatctcttttatggtctggaataaagtagatgctcaataaatgcttattgaatgaaaaggcccagaggaaaataagccctttccattcttagatctctgacatcatccacaaacccagcttgcatgattcctaarcgttatgtccctgccccacaacccccactcccattggatactccctcctactggctttcctgccattcacttcccatccagcccacctgggccctccctgggaatctccttcacacctagggtaccaactcttcacacccagaaagacgctcaaaattctccttcttcccagcagccctccttaagcaactgtactcaggtctgatcactccctctgacatgtcctgccaaattaggaagcttatttcccactgcattattctaccaggggacttcttgagattttttttcttgcatgtatgtatgttccagctccccgactagagctca

SEQ ID NO: 82922 - DNA, 743 bp, Homo sapiens
tatgctgggaactaagtgtatggtgatgagggaagcagacattacctctccctcatggagtttcctttccataggcacaaagctgatcattcagtggagtccattctcaccatgagaagaacattctactgtcagcaggcagagtgaggatggagacatcactgattcacttggctagttccatgtgggcattccatgtccatggatgaatggataagtaactgatccacaagaggagggtaagtttgaaaaaggcttctcattgcatagagacccaatgtatctgtagatagatgtggctgtacccaacatatattattacattttataagtataactaatgagtccttgtgcaatatgaaagtttatcctaacttctcttaagtgtatgaatttagaattttatatgttaggattttggcagtgtgcccagctgaagctgcattatttwaaaaaaaaattaataggcctaatttttagaatagttttagacttacagaactattgaacagatagtatagagagttctcatgtcctcccccaccaaccctcacaccatttcccctgtttttaacattttgcctcagtatggtacatttgttacaactaatgaatcaatatcgatacattattcttaactaaggtccatcatttatttcaatttccactggatcaattatttagacctttgccatggccttggcatgcacatgtgggtctagctaatgttctgttactgtcca

SEQ ID NO: 82923 - DNA, 728 bp, Homo sapiens
gtggcttgccctcctgttctcttctcgaaaagccacatcctagctgggcgcggtggckcatgcctttaatccaagcactttgggaggccaaggtgggcagatcatgaggtcaggagttcaagaccagcctggctagtatggtgaaaccccatctttactaaaaatataaaaaattagccaggcgtggttgcacgtgcctgtagtaccagctactcaggaggctgaggcaggagaatcacttgaacccaggaggcggaggttgcagtaagccgagattgcaccactgcactccagcctggacgacagagcgagactccatcttaaaaaaaaaagccacatccttcccagttcaggtccagcacacacgtgggtggcccctcatccattcagccttgaggtcccagctcctggcacccccagtggagaccaggccctgctatgtgcttctgtccttctggaaatcaatcgatgcgtagttagcggccagcccctggaagactgagcccatggaacagggcttgaaatgcttagccaaggagctggcaaacagtgggtgctcaataaatgatgactgctgaatgaagaaaagcaccaacccccagccttcagcaaccctcacacctcccaatgctcagcactgcagggtgtaggggccaccctcaaggagctcagatccaacgggggtggagatgaaacaggccagaaacaggggaaggcccagagcaggc

SEQ ID NO: 82924 - DNA, 643 bp, Homo sapiens
cctaccgggttccagcgattctcctgcctcagcctctagggtagctgggattacaggcgcacgccaccacgtccagctaatttttgtatttttagtagagacgggtttcatcatgttggccaggctggtctcaaactcctgacctcaggtaatctgcctgcctcggcctcccaaagtgctgggattacaggcgtgagccactgcgtgccagccaagagggcccatttttaaaaaatgtgtagcatttgtcgaatcagagtgataaacacagaatcactcgccatgatgagtgccagtgataaaataagcatattgtacccatgacaaaaggctccagggggacctccctcacttcttgctccaaaagaagccagactcaggggagcacaaactgttccacgaggtgcaagaacagccagcgctgctccacggcactcgcctcagagyggccagcccatctgcggaggggccactcgtgaaaagacactgagctgctcactcggaatctgtgcagcttacacaaggaaagttacatctcaaaaagtcaagttaggaaaaataaagtaattattaaatgtgtctcagtggctggatgcggtggctcatgcctgtaatcccagctctttgggaggctgaggtggga

SEQ ID NO: 82925 - DNA, 643 bp, Homo sapiens
cctaccgggttccagcgattctcctgcctcagcctctagggtagctgggattacaggcgcacgccaccacgtccagctaatttttgtatttttagtagagacgggtttcatcatgttggccaggctggtctcaaactcctgacctcaggtaatctgcctgcctcggcctcccaaagtgctgggattacaggcgtgagccactgcgtgccagccaagagggcccatttttaaaaaatgtgtagcatttgtcgaatcagagtgataaacacagaatcactcgccatgatgagtgccagtgataaaataagcatattgtacccatgacaaaaggctccagggggacctccctcacttcttgctccaaaagaagccagactcaggggagcacaaactgttccacgaggtgcaagaacagccagcgctgctccacggcactcgcctcagagtggccrgcccatctgcggaggggccactcgtgaaaagacactgagctgctcactcggaatctgtgcagcttacacaaggaaagttacatctcaaaaagtcaagttaggaaaaataaagtaattattaaatgtgtctcagtggctggatgcggtggctcatgcctgtaatcccagctctttgggaggctgaggtggga

SEQ ID NO: 82926 - DNA, 1276 bp, Homo sapiens
cattctatagataagaaaactgaggcttgcaggggggaagccacctgcccagtgttgcccagctaacaaagtgagtcactatttggagccagatggctcccaagcccatactgctaatgactgggtgggaggggcggtttcccaggatctcccaggagcatttttactttagtagttatgcattttatttcatgatgtcagaaaaaaatataaccagcccttcaagcccaacgtttcatggctatgatagatgaagtttttcttttctttttctttttgaagaaaaaaaaaaacctcctaagtaaacaagtagagcaggtgaagctgcccatgggccttgcagggcccacagtaactaagtctcatgcagtatccacctccctccccgcctccacttgtgcacaggcagctgtggccccagagccaggggactctggcaaaagactgtaggccactcaagtatcactgcccaaggcctgttctgtcccaggctccgttgggagctgggagaccctggggaacctcaccatccagatgtgacttctctcatatgaaagaggagagagagggggctcagagaggggaggccacatgcccaaggtctcactgctaataaggagaagcgtgggactcaaaggccagtccctgcactgtcccgggcttgggagaggctgggcttgctgagaacccttcccaggccttcagtacccacgcccccgagagccttctcatcagtcgtgcatcrgcccagctcgggagggcagaaagagcctagaggtcaggatgttttggcaagtttttcaaataatttttccttctaactgtagaggtgagtctaaaaagcagtccaggcagaccccaatggctcatgcctataatccaaccatcttgggaggctaaggcaaggggatcgcttgaggccaggagtttgagcctgagcaacatagcaagaccgtctttacaaaaaatttcacaaattagctggtatagtggcgagtgcctgcaatcccagctactcaggaggctgaggtgggaggatcatttgagcccaggagttcaaggctgcagtgagctatgatcacaccactgcactccagcctgagcaaaagagcaagattctgtcccttaaaaataaataaataaataaataaataaatagcagtatagtgaaatatagtgataagagcttggattcagagctttgggacaggctgagtgacttcggggcacattatttcgtttctctgagcgctggtgtcctcctgtgcaaagtgag

SEQ ID NO: 82927 - DNA, 1323 bp, Homo sapiens
attttttctttcttttttttattattattatactttaagttttagggtacatgtgcacaatgtgcaggttagttacatatgtatacatgtgccatgctggtgtgctgcagccattaacttgtcatttagcattaggtatatctcctaatgctatcctgttagctttttaagattttcttttaatagatccttcacatttcctcttaagtttactcttaaaggtcgggcacgatggctcatgcctgtaatcctagcactttgggaggctaaggtgagcagactgcctgagcgcaggagttcgagaccagcctgggcaacaaggtaaaattgtctctactaaaatayaaaaaattagctgggcatgatggcacttacctgtagtcccagctaggtgggaggctgaggcacaagaattgcccgaacctgggaggcagaggttgcagtgagcctagatcatgccactgccttccagactgggcgacagagcgagactctgtcttcaaaaaatatatatatataagttttctcttaaatattttacttctttttattgctattgtaaatatatttatattttctaagtggttattgcaaagaaaagctattaatttttgtatgctagatatgctgttgtgtagcttcaggcaagttaccctctctagagcttagtttccctaattaacctcatagaattattgtcaggaatgagttagcacacatagagtctagcataaggtaatggctcagtaaatgttacctattattgttattatattaatttggtaatccaccatcctactgaattgatttctcttgttgcttctactagttctgcactccattctcctgatatacagtatttgtgatatacagcatcttcctaatcttgataattttcttacttctttaatgttttatatggatttatctttttattacaatgcctaatactttcagaaaccctactacatacacagtagtacgctgactggtatcttttgacaggcaagaatatttctactgtaaatgcaaataatggctacattaacattctatagcatatgtacaccaacaagtggttatggatattcctcaacttggggcacttaaattgtttcttgactttttcactgttaaaagtaccagtaaaagagtcatctatgcaaaattaatgcaggaacagaaaaccaaacaccgcatgttctcacttataagggggagttgaacaaggagaacacataaacttagggaggggaacaacacatgctggggcctgtcgaggggggacaagaggagggagagcatcaagacaaatagctaatg

SEQ ID NO: 82928 - DNA, 730 bp, Homo sapiens
ggtagtcacaggtccgtggccattctgaaattccacgggatacaatcctccctgctccaagggtagaaaacattgatgaaagccccgggtcagcttcctgggaatggtcctcttaggctcttggctccaccctctgaatcatccttcttttccataaggtatgaccatgtttgctggcttcctgcacttagggagctggggccacaaaggctaccttttgttttaaaatgactctgttccaccgggcatggtggctcacgcctgtaatcccagcactttgggaggccgaggtaggcrgatcatgaggtcaggagtttgagaccagcctgaccaatatggcgaaacccccatctttactaaaaatacaaaaattagccaggcttgatggcatgcacctgtagtcccagctatgcgggaggctgaggcagaagaattgcttgaacctggaaagtggaggttgcagtgagcagagatcctgctactgcactccagcctgggcaagagagtgagactctatctcaaaagaaaaaaaaaagtctccattcctttcagtcaagcaagtacaattaaaaatgttgtgtttcctgtgtatctgattacaatccactgcattagacaaaagccacccttagtttctttcggagacaagccttttctgctttggaccctgcatctactgctgaggaacaatgccctaaagattcttagaggcctttttatctagctgaga

SEQ ID NO: 82929 - DNA, 458 bp, Homo sapiens
gcactccctctgggtgacaaagtgagaccctgtctccaaaagaaaaaatctaaggtagattgtgccttttgtgcctttcctctgctcaagacctttcagtggcttcccacttcactcagtaaaaggcaaaaagtccttttaataacctacaaggcattatgttacccacattgtccctgctcccctacattgtactcaagtctatgatctttttaccattccttgtacaaaggattttcactggctgttctttctgcctggaatgttgttctctcagttatctgcaagtcagactcactgatttccaggtctcagcagttacctcttcgttgagacctactgtgacctcactatgtaattgcagtctgcctccctttccccagcacttatcacccactatcatggaatttactgtgaatgcctccagcagaagataggcttytcttatgatcatggat

SEQ ID NO: 82930 - DNA, 458 bp, Homo sapiens
gcactccctctgggtgacaaagtgagaccctgtctccaaaagaaaaaatctaaggtagattgtgccttttgtgcctttcctctgctcaagacctttcagtggcttcccacttcactcagtaaaaggcaaaaagtccttttaataacctacaaggcattatgttacccacattgtccctgctcccctacattgtactcaagtctatgatctttttaccattccttgtacaaaggattttcactggctgttctttctgcctggaatgttgttctctcagttatctgcaagtcagactcactgatttccaggtctcagcagttacctcttcgttgagacctactgtgacctcactatgtaattgcagtctgcctccctttccccagcacttatcacccactatcatggaatttactgtgaatgcctccagcagaagataggcttctyttatgatcatggat

SEQ ID NO: 82931 - DNA, 528 bp, Homo sapiens
taaaagaggcccaagagaccctcaccccttctgccatgtgcaaacacagtgagaggttggcagtctgcaacccagaagggggacttcaccggaacccggccatgctggcaccctggtctcaaactttcagcttccagaactatcagaaataaacatttgttgtctataagccaccatgtttgcagtatttttgttatagcagcttaaacagactaacacttctagtttgctggcgtcgggaaacttaagagctcagatcaaaaattcatttgtaattagacagttccaattggaaatgatttttaaataaactccttaatgtaaaagttggaacagtgattcccagctaacaggccttgaatcctagtacyagagggagagaggggagggctgtgcagagtggttttaagccattatgcgtacacatacgcatacacatatattctgttattttcagctatgggtaggcactctagatataaatcattaagcagcttttctcactttgttggagtcatttgtttctat

SEQ ID NO: 82932 - DNA, 528 bp, Homo sapiens
taaaagaggcccaagagaccctcaccccttctgccatgtgcaaacacagtgagaggttggcagtctgcaacccagaagggggacttcaccggaacccggccatgctggcaccctggtctcaaactttcagcttccagaactatcagaaataaacatttgttgtctataagccaccatgtttgcagtatttttgttatagcagcttaaacagactaacacttctagtttgctggcgtcgggaaacttaagagctcagatcaaaaattcatttgtaattagacagttccaattggaaatgatttttaaataaactccttaatgtaaaagttggaacagtgattcccagctaacaggccttgaatcctagtactagagggagagaggggagggctgtgcagagtggttttaagccattatgcgtacacatacgcatacacatatattctgttattttcagctrtgggtaggcactctagatataaatcattaagcagcttttctcactttgttggagtcatttgtttctat

SEQ ID NO: 82933 - DNA, 631 bp, Homo sapiens
gagcatttcaagggaattttaggtgtgaagagacttagtattttgattgtagcaaaagacagcaaacatactgagtataaaacaaggagagaaatgcatgagatgaagtgactggattttatcctgagttataattggcaaatattraaagctttacatttgtaaaatgaggagaacggtatttatttcacactttttttctacctaaggaataatgtgatagtgtttatgaatatgccttataaaaatgtcaaagtatttcttgctacaaacatattttttcaataagtagagcatatactttattctttcatctattccaagatttgtctaaggaggagcaagagaggaggatgttttaacattacacttcaagagagccagagttttagtaaacttaattctgaatcatttgcttttaaataatagatgttagacaattttatggcagacatattaattattcattcagataatttaaattgatttcaagttatactatataattttctattaaatttcaatacgactgcaaggaatccattaaattccaaatcattatcattcattttcattaagatacatggacaccaaacgaatgcattctatctcctaaagccggtgatttcca

SEQ ID NO: 82934 - DNA, 523 bp, Homo sapiens
aacctagaggatatttaagtcccagaagaaggcctttagttatcaacatttagcaagttcatgggttgctctagcatataatttttcttttttctttttttttttttggtacttcactgccaggcctacaaatcaatcctttcgacacctattaacctataaaatwcctctattcttctgcagagctaaagaatttatatcactcaacttgtacaaaatgcaaatttgaaataattttccaaagtagaaagtataggatatcagtttgttgggacaaataaatcatgacagatacatttaatatgttaattatttggaaacaaatttttaatgttcatcacagcatgtcttctctattctatttctttctttttatgtaattttcttaaatggctgtttttaaaaagctctgcaatagaattccctaatagtttaagatattttattaagaagctaaattcattttcttaagcacttcaaagactcatggctgaccttgagttaacaacccatgtatgataga

SEQ ID NO: 82935 - DNA, 835 bp, Homo sapiens
ataaagctcagaaatacttgtaaaaatataaaaatcttcagtaatcaacaaggtaaaattcataatgctcaacaatcaaaaattatcagacataaaaaatgaccaatatttgggaggaaaataaatcaattgaaatgaatccaggagaaatatagatattaaaacagaactgtattccatgtgatcaaggagctagaaacaaaattctatgttaaggagagatacaaaaaagtgtttaaaagatgaaaatataacttttagagagcaaaactaaaatgccaaagaaaaaaatactccagataaaattaaaagtgtattagacattgcagawgagaatattggtgcatttgaagatataactatagaaatgacccaagaaaacacagagaaaaagaaagaatggggggaaaacaagcaaacagaatgagtgaggtatggaacaaaggtcaggcagtttcttataaagctaagagtattatatggtctggtctgatgacgtaggaataaaaccaaagcttattttctattctctcattaaacatcaatcaacaaagtatacttctgtgccctgtgatcaccaagaagtgtgtggggatttcaacccactagcaagcaagccattaattctgcagtggacacaagcttgttgctcccacccctcctccaattcaattcctatgcttttacctgtgtttctgattgactggctataaaccagagctcccacaacctccccctacaactccttggattggattaattttctggagcagctcacagaagtcagggaaacgggttcatttgctagtttattataaaagatattacaaaggat

SEQ ID NO: 82936 - DNA, 835 bp, Homo sapiens
ataaagctcagaaatacttgtaaaaatataaaaatcttcagtaatcaacaaggtaaaattcataatgctcaacaatcaaaaattatcagacataaaaaatgaccaatatttgggaggaaaataaatcaattgaaatgaatccaggagaaatatagatattaaaacagaactgtattccatgtgatcaaggagctagaaacaaaattctatgttaaggagagatacaaaaaagtgtttaaaagatgaaaatataacttttagagagcaaaactaaaatgccaaagaaaaaaatactccagataaaattaaaagtgtattagacattgcagatgagaatattggtgcatttgaagatataactatagaaatgacccaagaaaacacagagaaaaagaaagaatggggggaaaacaagcaaacagaatgagtgaggtatggaacaaaggtcaggcagtttcttataaagctaagagtattatatggtmtggtctgatgacgtaggaataaaaccaaagcttattttctattctctcattaaacatcaatcaacaaagtatacttctgtgccctgtgatcaccaagaagtgtgtggggatttcaacccactagcaagcaagccattaattctgcagtggacacaagcttgttgctcccacccctcctccaattcaattcctatgcttttacctgtgtttctgattgactggctataaaccagagctcccacaacctccccctacaactccttggattggattaattttctggagcagctcacagaagtcagggaaacgggttcatttgctagtttattataaaagatattacaaaggat

SEQ ID NO: 82937 - DNA, 835 bp, Homo sapiens
ataaagctcagaaatacttgtaaaaatataaaaatcttcagtaatcaacaaggtaaaattcataatgctcaacaatcaaaaattatcagacataaaaaatgaccaatatttgggaggaaaataaatcaattgaaatgaatccaggagaaatatagatattaaaacagaactgtattccatgtgatcaaggagctagaaacaaaattctatgttaaggagagatacaaaaaagtgtttaaaagatgaaaatataacttttagagagcaaaactaaaatgccaaagaaaaaaatactccagataaaattaaaagtgtattagacattgcagatgagaatattggtgcatttgaagatataactatagaaatgacccaagaaaacacagagaaaaagaaagaatggggggaaaacaagcaaacagaatgagtgaggtatggaacaaaggtcaggcagtttcttataaagctaagagtattatatggtctggtctgatgacgtaggaataaaaccaaagcttattttctattctctcattaaacatcaatcaacaaagtatacttctgtgccctgtgatcaccaagaagtgtgtggggatttcaacccactagcaagcaagccattaattctgcagtggacacaagcttgttgctcccacccctcctccaattcaattcmtatgcttttacctgtgtttctgattgactggctataaaccagagctcccacaacctccccctacaactccttggattggattaattttctggagcagctcacagaagtcagggaaacgggttcatttgctagtttattataaaagatattacaaaggat

SEQ ID NO: 82938 - DNA, 722 bp, Homo sapiens
ctataaaaattgaaaaaaaaaagagataatttaaaaatagccacacctgaaaggtcatcacactggtccttatatgaaagagacaagagagtgaatggggagagagatgggatgacagaagttggcatgatgtgaagaaaaggccacgtgaaggggtgatgaggagttattgaagatggaccaaaggatacagacagcctctggaagctgaaaaaggcaagaaaaaagatttccctctgaaggctccagaaggtgtgtagcccagatgacaccttcactttatacactggacctccagaaatgtaacagaataaaattttgttgttttatgcttcccttcaaacctccatgaataaaatagcctcaccaaggagttgctggcctaagttaactttagaaatgaatggaatctgtaagactaggctaaagaaactgcatgttaagtactgcgctctagtcaataaatttgtttcccataggkatatggggtaacaattctgattctgatatataaatattccttaagcaaggaagcaaatgaatagctcatggtggcagccaggttttccacttctggagtgggaatttgtggattggcatggtgaggagatgagattgatccatatggtaattgtttagacttggagacaacaataagaactcatgttcaacttaatatagatatagatcgttacatgtagagatatttatggacttgtgta

SEQ ID NO: 82939 - DNA, 722 bp, Homo sapiens
ctataaaaattgaaaaaaaaaagagataatttaaaaatagccacacctgaaaggtcatcacactggtccttatatgaaagagacaagagagtgaatggggagagagatgggatgacagaagttggcatgatgtgaagaaaaggccacgtgaaggggtgatgaggagttattgaagatggaccaaaggatacagacagcctctggaagctgaaaaaggcaagaaaaaagatttccctctgaaggctccagaaggtgtgtagcccagatgacaccttcactttatacactggacctccagaaatgtaacagaataaaattttgttgttttatgcttcccttcaaacctccatgaataaaatagcctcaccaaggagttgctggcctaagttaactttagaaatgaatggaatctgtaagactaggctaaagaaactgcatgttaagtactgcgctctagtcaataaatttgtttcccataggtatatggggtaacaattctgattctgatatataaatattccttaagcaaggaagcaaatgaatagctcatggtggcagccaggttttccacttctggagtgggaatttgtggattggcatggtgaggagatgagattgatccatatggtaattgtttagacttggagacaacaataagaactcatgttcaacttaatatagatatagatcgttacatgtagagatatttatggacwtgtgta

SEQ ID NO: 82940 - DNA, 842 bp, Homo sapiens
caggtagaagaaacagtgataatcaagacccatgggatccttaacatcagagagctttcattcaattcccaaaataatcaagaatttgataatttgccttcacagcctataaagaggcttgagtttttaagaagtggtaatgtgttacctggaaaattccctccagctgggtgaatctatttagatctcagctcatgactccccaagatccccaattgctactgtacatggtactggaaagttccatgctcccatgatcgaatgatattccacctcatacctakgcaaacctagcttggtaaagccaaacaccagtccctgccttcacctcctcaatctaaacacgattcaaataaaatgaggactgtcttagataactactgaacagaacacctgactatatatggccttaggaagaaatagcttcaaataaatttagaatcatccagccccactccttcatttgacagatgagaaaacagggagccacagtgggaacataaatgactcaagctaaggaagctgttaagaaagctcagatttcttttttttttttttttaacattggcaaggtagctcgttttcacttctaccccatcctccctcaggctccaatccaacctaactacctttaaaaagttgtttaacaagtcagagctacatctgatattcctattaaagcctcaaatagaataattatttctagctttggttggcgctttgctatactttctgcaacagaaataattgcattttgtcaagcaaacctctacaccatcccaaaaagcaaagaccagcgacctgcagcgagccagcacactcacaggaagtccctcatcaaa

SEQ ID NO: 82941 - DNA, 842 bp, Homo sapiens
caggtagaagaaacagtgataatcaagacccatgggatccttaacatcagagagctttcattcaattcccaaaataatcaagaatttgataatttgccttcacagcctataaagaggcttgagtttttaagaagtggtaatgtgttacctggaaaattccctccagctgggtgaatctatttagatctcagctcatgactccccaagatccccaattgctactgtacatggtactggaaagttccatgctcccatgatcgaatgatattccacctcatacctatgcaaacctagcttggtaaagccaaacaccagtccctgccttcacctcctcaatctaaacacgattcaaataaaatgaggactgtcttagataactactgaacagaacacctgactatatatggccttaggaagaaatagctwcaaataaatttagaatcatccagccccactccttcatttgacagatgagaaaacagggagccacagtgggaacataaatgactcaagctaaggaagctgttaagaaagctcagatttcttttttttttttttttaacattggcaaggtagctcgttttcacttctaccccatcctccctcaggctccaatccaacctaactacctttaaaaagttgtttaacaagtcagagctacatctgatattcctattaaagcctcaaatagaataattatttctagctttggttggcgctttgctatactttctgcaacagaaataattgcattttgtcaagcaaacctctacaccatcccaaaaagcaaagaccagcgacctgcagcgagccagcacactcacaggaagtccctcatcaaa

SEQ ID NO: 82942 - DNA, 911 bp, Homo sapiens
tgcataagaggaggctaaatacttgatgaaactgtatcaatgcctttagggtacgatattatcatttcttaaattgctactttggcaaatgtgaagaccagaattattaaattatactctgctatctggaacagaactcctacctatacagcaaattttgtactaatgtaacagtgaaacataatctcaagcttcttgaaacaaagaaaaatcaatatcctcctaaaacatgcgatataaagtttaaatttttcacaatggattggaaaaagacttgagttctagatctgtctctgtcctttgctagctatggagtcttggacaaatattttcttttctctaggatttgattttttaaccgaaagtcagaaaattgaatgagtaaaacatgtcaagtttttttcccctctaagctttgctcccgtaaagtgacataggacccactgattaaatttagcacagcttctttgctttacaaaacttttgagcactgtcatccatgaatactgcagtgtcttgggagccagaagtctctgagctgtcatatggaagaaaaatatatcctcagagaaagaagattttgttgaccatagagtgtgattacaatgatgacaaaaaaaaaaagagagagagaaaattagcccttcctgaaattcccatgcaamctcagatctaagaggaggcagcaggaatgatgcaggaagcccttcctctcagcaacttgaagaataacattccaggaagcagattgtggacttagttgtcctgtgtctcaagtataacatcatcgctacctagctgtatggatttgaatatcgtaattcttaaattccccatgaatcagtttccttatctgttaaaaaaaaaaaggaaaaaaaaatagcatcctaaaccattatgaggttttaaag

SEQ ID NO: 82943 - DNA, 911 bp, Homo sapiens
tgcataagaggaggctaaatacttgatgaaactgtatcaatgcctttagggtacgatattatcatttcttaaattgctactttggcaaatgtgaagaccagaattattaaattatactctgctatctggaacagaactcctacctatacagcaaattttgtactaatgtaacagtgaaacataatctcaagcttcttgaaacaaagaaaaatcaatatcctcctaaaacatgcgatataaagtttaaatttttcacaatggattggaaaaagacttgagttctagatctgtctctgtcctttgctagctatggagtcttggacaaatattttcttttctctaggatttgattttttaaccgaaagtcagaaaattgaatgagtaaaacatgtcaagtttttttcccctctaagctttgctcccgtaaagtgacataggacccactgattaaatttagcacagcttctttgctttacaaaacttttgagcactgtcatccatgaatactgcagtgtcttgggagccagaagtctctgagctgtcatatggaagaaaaatatatcctcagagaaagaagattttgttgaccatagagtgtgattacaatgatgacaaaaaaaaaaagagagagagaaaattagcccttcctgaaattcccatgcaaactcagatctaagaggaggcagcaggaatgatgcaggaagcccttcctctcagcaacttgaagaataacattccaggaagcagaytgtggacttagttgtcctgtgtctcaagtataacatcatcgctacctagctgtatggatttgaatatcgtaattcttaaattccccatgaatcagtttccttatctgttaaaaaaaaaaaggaaaaaaaaatagcatcctaaaccattatgaggttttaaag

SEQ ID NO: 82944 - DNA, 630 bp, Homo sapiens
acatatactttctgctatatataaaaataaatctttttttatatatagtgttgataaacagatataaatatatgtactataatatagatataaaagaaaaaaactacataccaatatcactcatgaacatagatacaaatttttttaattataagcacgtagtatctacagacatatatatcataaatatatctatggaatatatggaataatgcactataaccaaacaaaaaatgcaagattgaatattttaaattcagtcaatgtaatcaccccattaacaaaaaaaagagagaaaaaccatattatttgaatagatgctaaaaaagcatttgataaaattcaacacatatttatatttgtgaggctaaggaatgtccttggatgctaatccaccatgttgatttctgattaacctctgttctgggaatgcttttcagcttyctactttatgtactattaccgtaaatcctatgcttctgtcaaagcaaccttgaccataagaccacaagtccttccctcaggcagattcacataactttcttgccttttcttggggagttgacttcagttgccctgcacgtttcttgtctatgatatataagccctggatcttggtggtaagcacat

SEQ ID NO: 82945 - DNA, 693 bp, Homo sapiens
gaggtcttttatacttttttaaagaaatattctgtgtcttaaagcatatgttatttcacagtaattccattacacatgtcttacaaaaacttgtttaaaatgttgtgaaaggaaaacatatctagtcttgaaataaatagttaagaagttaatttgtgctgagtttaaaaattcatatcaaaccacatttgagtgtgtatcataaaatcttttaaactgttttattattataatttatgaatgatcaaagaaaaatatataaatatgtaaagcttgttttatatttctatctgaaaacttaaactatttatctgagtatctttaactgggatcatttttctaattggcattccaaataaaagtgttttttaatacatcattaaacagaataaatatccatatttgtctctatggaagaaatgtgaaataatcaataaacattatagtagcttaataaaatatttttgcaaatactcagtgattgatcacattctgcccaagtcaattccagaagaactgcagaatggggagggatttggatatatcatcatgttccggccagtgggctcgacaacctggtccaaggagaaagtrtcatctgtggaatcatcaaggtttgtctacagaaatgaaagcatcatcccactgtctccctttgaagtcaaagtgggtgtgtataataatgaaggagaa

SEQ ID NO: 82946 - DNA, 519 bp, Homo sapiens
ttgacagacttggtacaaatatcatgacatgtgttttgtgctatccatgtggcagtgttttggtttctcaagatgatagaaattttaattttatcatagatatttgcaatccagtttaatcaactatatcaaaccagaactgttaacagtactcacattaaggtgatggccttctaaagcagctttcagaagttttatttgtcaatatcagacataaaggattgacactggagaaacatccattgataaaaataagaaaggatgtagactaagagatattctaagataattagctgagactctcccattttatctccctttctaaaaacatatcaagmatccaagtaagagcaatattattaaggggaaaacttgaatgtacactaattgtatctaagaagtgaatcatttgcaaacttcagagttggattattagcaacaaaccacttcgaacacaactgaaaaattgattatgtcataacaccacagtggagaactgctactcttggaagagaatta

SEQ ID NO: 82947 - DNA, 545 bp, Homo sapiens
aagagaaataaagcatttaaccagaaaattaagacccaaccaagtcacaagaagttgattgtagcaaaagcaatgtacmttggttttttctaataactgttgacacataaatctttaattgctaataatgtattgcttatgcactctgctataccatatatatatatacatatatacatacataatctcatttatgcctcacaataatgctccaaggaaggcatttcttatactggttttacaaatgagaagctgaagctgagagtgaagacacggtttgcccaagttattacatacaggaagatagcagaccagaaattcagatcaggtcgagtcaactacaaaacccatgttctggaaccactaaggtatggactcttcctgttctgcatatcttccttgtgttcctccagatcgattctccacccttctctgcccctctttttgtcctaggaggatgatctgcatggattatttttataagttccattttctctggcttcttgttaaatgtgaccaatagaggtcactggcagggttggagg

SEQ ID NO: 82948 - DNA, 545 bp, Homo sapiens
aagagaaataaagcatttaaccagaaaattaagacccaaccaagtcacaagaagttgattgtagcaaaagcaatgtacattggttttttctaataactgttgacacataaatctttaattgctaataatgtattgcttatgcactctgctataccatatatatatatacatatatacatacataatctcatttatgcctcacaataatgctccaaggaaggcatttcttatactggttttacaaatgagaagctgaagctgagagtgaagacacggtttgcccaagttaytacatacaggaagatagcagaccagaaattcagatcaggtcgagtcaactacaaaacccatgttctggaaccactaaggtatggactcttcctgttctgcatatcttccttgtgttcctccagatcgattctccacccttctctgcccctctttttgtcctaggaggatgatctgcatggattatttttataagttccattttctctggcttcttgttaaatgtgaccaatagaggtcactggcagggttggagg

SEQ ID NO: 82949 - DNA, 704 bp, Homo sapiens
tgcatagcaatttaaaattataatacgacagaaacacattacaaagagagtaaaagccttttgtatttccctccactcactctgagaaaaccactgtatacatctccaggtttttaaatgtaagaatttgcataaacatatcacacacacacacacacaaagttcccacactcataacatgctttttacctaacaatgctgcttaggtttttttycccacatgacactacttttatggtttaatgacactttttgcattttctcacttcatgcgcaagtagcatttactgtgctcctgctgttcctggtctcatctttactttatttcttctccattcctgggaacgatatcagggttctgtctgcagagacaaatttctttttactgacatcatttataaattgttgtgagaaattaattattttgctcctccccactattaatagattaactttttccttctttctctttccttccttccacattttctttctccttttttcctttatttcttccttcctaaaatctcattcctttaagtatggttcatgcttcatgcattttttttttctcgatggaagggatgacaaaatgacaatattccctcattcccattttcaagagtttgtctctatagatcagatttaagtccaaaatagctgtcagtttgttttgccaccttttacttttgggaatttaaatt

SEQ ID NO: 82950 - DNA, 704 bp, Homo sapiens
tgcatagcaatttaaaattataatacgacagaaacacattacaaagagagtaaaagccttttgtatttccctccactcactctgagaaaaccactgtatacatctccaggtttttaaatgtaagaatttgcataaacatatcacacacacacacacacaaagttcccacactcataacatgctttttacctaacaatgctgcttaggttttttttcccacatgacactacttttatggtttaatgacactttttgcattttctcacttcatgcgcaagtagcatttactgtgctcctgctgttcctggtctcatctttacttkatttcttctccattcctgggaacgatatcagggttctgtctgcagagacaaatttctttttactgacatcatttataaattgttgtgagaaattaattattttgctcctccccactattaatagattaactttttccttctttctctttccttccttccacattttctttctccttttttcctttatttcttccttcctaaaatctcattcctttaagtatggttcatgcttcatgcattttttttttctcgatggaagggatgacaaaatgacaatattccctcattcccattttcaagagtttgtctctatagatcagatttaagtccaaaatagctgtcagtttgttttgccaccttttacttttgggaatttaaatt

SEQ ID NO: 82951 - DNA, 704 bp, Homo sapiens
tgcatagcaatttaaaattataatacgacagaaacacattacaaagagagtaaaagccttttgtatttccctccactcactctgagaaaaccactgtatacatctccaggtttttaaatgtaagaatttgcataaacatatcacacacacacacacacaaagttcccacactcataacatgctttttacctaacaatgctgcttaggttttttttcccacatgacactacttttatggtttaatgacactttttgcattttctcacttcatgcgcaagtagcatttactgtgctcctgctgttcctggtctcatctttactttatttcttctccattcctgggaacgatatcagggttctgtctgcagagacaaatttctttttactgacatcatttataaattgttgtgagaaattaattattttgctcctccccactattaatagattaactttttccttctttctctttccttccttccacattttctttctccttttttcctttatttcttccttcctaaaatctcattcctttaagtatggttcatgcttcatrcattttttttttctcgatggaagggatgacaaaatgacaatattccctcattcccattttcaagagtttgtctctatagatcagatttaagtccaaaatagctgtcagtttgttttgccaccttttacttttgggaatttaaatt

SEQ ID NO: 82952 - DNA, 649 bp, Homo sapiens
ttattaggtaatgcaaagggactttctacaaacagtttatttttatccaaagaattttctagaataattctgaaaaaggatagtgcaagattaaaggaatgggcatcaagttaaatagattgtttttgaaatgatacctggggatattcatactttactcactaagacttaaaagaattcccacttcccatcagcgatagcaccattgctatgatggaatgaccagccactcgaatagttcccttatggtgttctttcccctgcatcgaatgtaaagcctggggctttccatccctggtgtatgctgggtccaaaggaaaaagaaatccagaggtgccttgagagggaaaaaaaaagcaattgaagggaagagaaagaagatggttcaagtgagaaacaaggaaaccttgtgtcctcttacaagcttgttagagaatggcaagtayccagaacgcaactaatggctgtaattccctgccctgcctgttctcaaaggctgaagacagaaaaagcattccgggaataggaagcagacacctccataagaaaatctatgtggaagagcttctttttagccatctcaagtgaggcaactcacccttaagagcagccatagggtggcacatgtagtgtgtagggaagggatagt

SEQ ID NO: 82953 - DNA, 595 bp, Homo sapiens
tgacaatcacaagtctgtatggaaagtaattccattttgcagtcttcttagacaaaagacagaaactcttggtatcaaatgaaataaaatacaagaaacattttctcaagtggcctgcccttctcaaatgcctttctagctttgaaaatggagttcattttaaaagtcaagggctgtttttgtagttgtatgagaggtggaagcagaaatggaagaaacaaggccagactgtggccagtggaaatatattgttaagkaaacagtgactgatgacatctgtgcttcttacattacctagggaaaagtcagtctggcaggtgttcttttttggctaggaacccagccagttttctgctgaaatgggatttcaagaggagcctgattactcagaattatactatctctcatccccagactgaggaagttgatggagaagaggaagaaagtaagaatgatttctgagaactgtattcaactcattgtgtgagaactagctcgcgaagaggagaactaaacctgactccaccgttttatcacagctgaatcactctatcaggacatctggagaataaattaatctgaatggaaaccactg

SEQ ID NO: 82954 - DNA, 595 bp, Homo sapiens
tgacaatcacaagtctgtatggaaagtaattccattttgcagtcttcttagacaaaagacagaaactcttggtatcaaatgaaataaaatacaagaaacattttctcaagtggcctgcccttctcaaatgcctttctagctttgaaaatggagttcattttaaaagtcaagggctgtttttgtagttgtatgagaggtggaagcagaaatggaagaaacaaggccagactgtggccagtggaaatatattgttaagtaaacagtgactgatgacatctgtgcttcttacattacctagggaaaagtcagtctggcaggtgttcttttttggctaggaacccagccagttttctgctgaaatgggatttcaagaggagcctgattactcagaattatrctatctctcatccccagactgaggaagttgatggagaagaggaagaaagtaagaatgatttctgagaactgtattcaactcattgtgtgagaactagctcgcgaagaggagaactaaacctgactccaccgttttatcacagctgaatcactctatcaggacatctggagaataaattaatctgaatggaaaccactg

SEQ ID NO: 82955 - DNA, 643 bp, Homo sapiens
agggaggctttacagagaatattctatcagatttgagggaaccactctaagggaatagagagatatttgaagtcaaaactactatagcttacatttctgttccctttattcttttgaacagattaatgctataatttctgaatttgcatatattatttaaacagatacgttgagtgaaagctcctactcgttgattttgtttgtttttcatttttgagatagagtcttgctttgtcacccaggctgcagtgcagtggcatgatctctgcaaccctccacctcccgggttcaaatgattctcatgcttcatcctgccaagtatctgggactataggcatgcaccaccacacctggataaatttttgtattttcagtagagatagggttttgccacactggccaggctactcttgaacccctggactcaaagtgatctgcctgcctaagcctcccaaagtgctgggattacaggcatgagccaccactaccggccgcctatttcttgttatcttagaatgaaatgtgtcttcaccttccctcttgttgacataactagaattttctaycttattgatgctgtacatagaggaggagaagtacacaacggagcaatatcattgttaccaggatgatggttgtacct

SEQ ID NO: 82956 - DNA, 1034 bp, Homo sapiens
tgcttattcctttgcctatgtgctttggcaaaacaaggaatttaacagccaattcctattctagagtcaaaaaacaaaaaagcacccaggaaacagaatcttacaaaacagcctcaataacaacaacaacataaactagaaaacccaacaaaaatagttcagtatagttatttattttcttttctttgcttgaaaagtcttccagaaacaaaaatttattctaggaatgaagaaactaaggaacatttacaatttactacaattataaacttatatttatggcctttggtcagttaagattaaatcctcttaatttcaataggtatggaaggattttctgagcatgctatggtatggcagagagatgaatttgcattttgtatcattttttacttttattaaagggtctaaactaaacatatgaccaagtgcaaactgaaaacgttggcatagcaactaatgctttgaaagcaagtttcctaaaattgtcaagtaatttttacataacattttttcttaactgtttttgtcttgtttcttgatagcagtacrgatatctttcttttatattgtttgtaaagtactttcattttatacattatctcattttagcttaattattactgtatgacaaaaatgagtgtgattgttaatttataaaacttatcgatgaagaaactgcagctaatagaaatttagtaattttcctaaagtaatcctgttagtgattgatccaggttaaattatattatgaaaatttatatctaaattttatatgatttaaacttcacacagcaaaatttccttttgaagtttttttttaaaaaactttgtataaatgaaaatagttcttcactgtgtttttgattttggcattgttttccttaaattacaaagcaaacaatacatagtaatgtctactcgcaatgtttgtaagatttttcttttaactttctgtagacatcctgacaaggatatttctttgtttatatgttctatactgatatgtgaatgattttttttgcaaaggggaa

SEQ ID NO: 82957 - DNA, 787 bp, Homo sapiens
cagcacaaggtcttttcatacatggttttctctgcacatgttgttctttccccccattttcactgaactctctcctgtttaccaaatagatttcagctcaatagttaatatctaaagaaaggtttcctctaggctttttgatatcattatattttcttatatagattccaggtacaataaacatgttattctaataacacaatagcaatattgcattgatttctttgattatttgtttagttgtctctctacctaccagactgaggtctatgcatatacactgacatatttttttcactgtagattactaaagcttaatatgtctagatggttcataataaacattctataggtatttttagaagaactatattaaaatattttatttcaaaatgaaaatatgtctcatttgtttcaaacgagtagtaaaaaatagtgaacatcataaaaattcagaagataaagaaataatatcaaattgaaaggataaagactggcrtcaccaataatgcaatttttaaggtatgtaatgaatgagaaaaagctttttgaaagacaagaagaatatatacagaattcggataacaagaaaggcaagagccaatatggaaagtttctatattactggtgctcaaggtgacagtggctagaccagattgattaaaagggagcatttttgtaggaaaattatgaacatgaaaagttgagaatcaaattacatctatgttagtaaggaaaatctagaagatggatttagtgaatgcaaaaacttagttcacttagggat

SEQ ID NO: 82958 - DNA, 787 bp, Homo sapiens
cagcacaaggtcttttcatacatggttttctctgcacatgttgttctttccccccattttcactgaactctctcctgtttaccaaatagatttcagctcaatagttaatatctaaagaaaggtttcctctaggctttttgatatcattatattttcttatatagattccaggtacaataaacatgttattctaataacacaatagcaatattgcattgatttctttgattatttgtttagttgtctctctacctaccagactgaggtctatgcatatacactgacatatttttttcactgtagattactaaagcttaatatgtctagatggttcataataaacattctataggtatttttagaagaactatattaaaatattttatttcaaaatgaaaatatgtctcatttgtttcaaacgagtagtaaaaaatagtgaacatcataaaaattcagaagataaagaaataatatcaaattgaaaggataaagactggcatcaccaataatgcaatttttaaggtaygtaatgaatgagaaaaagctttttgaaagacaagaagaatatatacagaattcggataacaagaaaggcaagagccaatatggaaagtttctatattactggtgctcaaggtgacagtggctagaccagattgattaaaagggagcatttttgtaggaaaattatgaacatgaaaagttgagaatcaaattacatctatgttagtaaggaaaatctagaagatggatttagtgaatgcaaaaacttagttcacttagggat

SEQ ID NO: 82959 - DNA, 787 bp, Homo sapiens
cagcacaaggtcttttcatacatggttttctctgcacatgttgttctttccccccattttcactgaactctctcctgtttaccaaatagatttcagctcaatagttaatatctaaagaaaggtttcctctaggctttttgatatcattatattttcttatatagattccaggtacaataaacatgttattctaataacacaatagcaatattgcattgatttctttgattatttgtttagttgtctctctacctaccagactgaggtctatgcatatacactgacatatttttttcactgtagattactaaagcttaatatgtctagatggttcataataaacattctataggtatttttagaagaactatattaaaatattttatttcaaaatgaaaatatgtctcatttgtttcaaacgagtagtaaaaaatagtgaacatcataaaaattcagaagataaagaaataatatcaaattgaaaggataaagactggcatcaccaataatgcaatttttaaggtatgtaatgaatgagaaaaagctttttgaaagacaagaagaatatatacagaattcggataacaagaaaggcaagagccaatatggaaagtttctatattactggtgctcaaggtgacagtggctagaccagattgattaaaagggagcatttttgtaggaaaattatgaacatgaaaagttgagaatcaaattacatctatgttagkaaggaaaatctagaagatggatttagtgaatgcaaaaacttagttcacttagggat

SEQ ID NO: 82960 - DNA, 768 bp, Homo sapiens
catgccagaacatgtattaggaccaggtgatatggtgccaaataatatatgtatatcttctggaattttgagtttgctgtctaatagggggactgataacatacaagtagaaaaaatacatattgtgctaagtactgtaaaggaaaggaagagaatattatgatcgagaagcagagsttatagttccgcaccacaactaatttattgtgtgaccctctgataggctactgatgatgagtgggcaccgagcttctataaatttgacgaattaatcctttgaccattatggcgtgatcctctttttattcctgatgatgcttgttgacaaaatattacttcatttaaattaaatttgcctgagatttcctttctaatttgttttcaacctttatgtttagtttaggtgtatctcctttcagcagcgtgtagttggattttttcagtgtgaattttccccccttcttttttactaagggaattgaatttttttgcacttattttgattcctgaaatatttttaacattctttccatcaccttactttgtgtcaggttttttgtttctaaatgtgtctccaccttcttctaaattaactggttttcttaattccattaatttcttattatttcggacatttcactgttttcatttttagtgtgctctgccaaattttaaccttagcaaagtcaaatttaatgttcccaaataaaacctaaaattctttaactcaaattgtatcactcaaagttccaagttattttctatgca

SEQ ID NO: 82961 - DNA, 768 bp, Homo sapiens
catgccagaacatgtattaggaccaggtgatatggtgccaaataatatatgtatatcttctggaattttgagtttgctgtctaatagggggactgataacatacaagtagaaaaaatacatattgtgctaagtactgtaaaggaaaggaagagaatattatgatcgagaagcagaggttatagttccgcaccacaactaatttattgtgtgaccctctgataggctactgatgatgagtgggcaccgagcttctataaatttgacgaattaatcctttgaccattatggcgtgatcctctttttattcctgatgatgcttgttgacaaaatattacttcatttaaattaaatttgcctgagatttcctttctaatttgttttcaacctttatgtttagtttaggtgtatctcctttcagcagcgtgtagttggattttttcagtgtgaattttccccccttcttttttactaagggaattgaatttttttgcacttattttgattcctgaaatatttttaacattctttccatcaccttactttgtgtcaggwtttttgtttctaaatgtgtctccaccttcttctaaattaactggttttcttaattccattaatttcttattatttcggacatttcactgttttcatttttagtgtgctctgccaaattttaaccttagcaaagtcaaatttaatgttcccaaataaaacctaaaattctttaactcaaattgtatcactcaaagttccaagttattttctatgca

SEQ ID NO: 82962 - DNA, 768 bp, Homo sapiens
catgccagaacatgtattaggaccaggtgatatggtgccaaataatatatgtatatcttctggaattttgagtttgctgtctaatagggggactgataacatacaagtagaaaaaatacatattgtgctaagtactgtaaaggaaaggaagagaatattatgatcgagaagcagaggttatagttccgcaccacaactaatttattgtgtgaccctctgataggctactgatgatgagtgggcaccgagcttctataaatttgacgaattaatcctttgaccattatggcgtgatcctctttttattcctgatgatgcttgttgacaaaatattacttcatttaaattaaatttgcctgagatttcctttctaatttgttttcaacctttatgtttagtttaggtgtatctcctttcagcagcgtgtagttggattttttcagtgtgaattttccccccttcttttttactaagggaattgaatttttttgcacttattttgattcctgaaatatttttaacattctttccatcaccttactttgtgtcaggttttttgtttctaaatgygtctccaccttcttctaaattaactggttttcttaattccattaatttcttattatttcggacatttcactgttttcatttttagtgtgctctgccaaattttaaccttagcaaagtcaaatttaatgttcccaaataaaacctaaaattctttaactcaaattgtatcactcaaagttccaagttattttctatgca

SEQ ID NO: 82963 - DNA, 768 bp, Homo sapiens
catgccagaacatgtattaggaccaggtgatatggtgccaaataatatatgtatatcttctggaattttgagtttgctgtctaatagggggactgataacatacaagtagaaaaaatacatattgtgctaagtactgtaaaggaaaggaagagaatattatgatcgagaagcagaggttatagttccgcaccacaactaatttattgtgtgaccctctgataggctactgatgatgagtgggcaccgagcttctataaatttgacgaattaatcctttgaccattatggcgtgatcctctttttattcctgatgatgcttgttgacaaaatattacttcatttaaattaaatttgcctgagatttcctttctaatttgttttcaacctttatgtttagtttaggtgtatctcctttcagcagcgtgtagttggattttttcagtgtgaattttccccccttcttttttactaagggaattgaatttttttgcacttattttgattcctgaaatatttttaacattctttccatcaccttactttgtgtcaggttttttgtttctaaatgtktctccaccttcttctaaattaactggttttcttaattccattaatttcttattatttcggacatttcactgttttcatttttagtgtgctctgccaaattttaaccttagcaaagtcaaatttaatgttcccaaataaaacctaaaattctttaactcaaattgtatcactcaaagttccaagttattttctatgca

SEQ ID NO: 82964 - DNA, 768 bp, Homo sapiens
catgccagaacatgtattaggaccaggtgatatggtgccaaataatatatgtatatcttctggaattttgagtttgctgtctaatagggggactgataacatacaagtagaaaaaatacatattgtgctaagtactgtaaaggaaaggaagagaatattatgatcgagaagcagaggttatagttccgcaccacaactaatttattgtgtgaccctctgataggctactgatgatgagtgggcaccgagcttctataaatttgacgaattaatcctttgaccattatggcgtgatcctctttttattcctgatgatgcttgttgacaaaatattacttcatttaaattaaatttgcctgagatttcctttctaatttgttttcaacctttatgtttagtttaggtgtatctcctttcagcagcgtgtagttggattttttcagtgtgaattttccccccttcttttttactaagggaattgaatttttttgcacttattttgattcctgaaatatttttaacattctttccatcaccttactttgtgtcaggttttttgtttctaaatgtgtytccaccttcttctaaattaactggttttcttaattccattaatttcttattatttcggacatttcactgttttcatttttagtgtgctctgccaaattttaaccttagcaaagtcaaatttaatgttcccaaataaaacctaaaattctttaactcaaattgtatcactcaaagttccaagttattttctatgca

SEQ ID NO: 82965 - DNA, 768 bp, Homo sapiens
catgccagaacatgtattaggaccaggtgatatggtgccaaataatatatgtatatcttctggaattttgagtttgctgtctaatagggggactgataacatacaagtagaaaaaatacatattgtgctaagtactgtaaaggaaaggaagagaatattatgatcgagaagcagaggttatagttccgcaccacaactaatttattgtgtgaccctctgataggctactgatgatgagtgggcaccgagcttctataaatttgacgaattaatcctttgaccattatggcgtgatcctctttttattcctgatgatgcttgttgacaaaatattacttcatttaaattaaatttgcctgagatttcctttctaatttgttttcaacctttatgtttagtttaggtgtatctcctttcagcagcgtgtagttggattttttcagtgtgaattttccccccttcttttttactaagggaattgaatttttttgcacttattttgattcctgaaatatttttaacattctttccatcaccttactttgtgtcaggttttttgtttctaaatgtgtctccaccttcttctaaattaactggttttcttaattccattaatttcttattatttcggacrtttcactgttttcatttttagtgtgctctgccaaattttaaccttagcaaagtcaaatttaatgttcccaaataaaacctaaaattctttaactcaaattgtatcactcaaagttccaagttattttctatgca

SEQ ID NO: 82966 - DNA, 864 bp, Homo sapiens
tttttttccattcttatcctattttacataagaacgaataacttattctctctagagtttgtagcttcatttgcaaaaggggatgcctaagagaggaaagagcaaactaggtgtctttctagcttcaaagattgttattttgtgatttctgtattagttggtttataattgaccagatcaatttgaatcatatgtgtttttctattttctgaattcaacactgttattttctattgtcttgagtactgatgtttccaaatttttaaacctttcccttcttttgttttgttttgtttttttcttccttttttttttggagacagagtcttggtcagtcgcccaggctggagtgcagtggcacaatctcgkctcactgcaacctctgccttctgggttcccgccattctcctgcctcagcctcctgagtagctgggactacaggcgcccgccaccacacccggctaatttttttgtatttttagtagagatggggtttcaccatgttagccaggatggtctcgatctcctgacctcgtgatccacccgcctcggcctcccaaagtgctgggattacaggcgtgagccactgcgcctggccttgttttgttttttctagagagaaatgggccccaatatttgccttataatactttgtaccttgtcctacatttcccccttagaacaatgtacagaacagtcaacatgacaatcagatcaagtttcaccttctgcacttaggtctcttacttagctatcactagtctggaggtgttgggaacataacttaaactctttgaactatagtgttctgtaatgtggcattaataaatctgaagtcaaaagatataaaatatgtaaaagcgc

SEQ ID NO: 82967 - DNA, 864 bp, Homo sapiens
tttttttccattcttatcctattttacataagaacgaataacttattctctctagagtttgtagcttcatttgcaaaaggggatgcctaagagaggaaagagcaaactaggtgtctttctagcttcaaagattgttattttgtgatttctgtattagttggtttataattgaccagatcaatttgaatcatatgtgtttttctattttctgaattcaacactgttattttctattgtcttgagtactgatgtttccaaatttttaaacctttcccttcttttgttttgttttgtttttttcttccttttttttttggagacagagtcttggtcagtcgcccaggctggagtgcagtggcacaatctcggctcactgcaacctctgccttctgggttcccgccattctcctgcctcagcctcctgagtagctgggactacaggcgcccgccaccacacccggctaatttttttgtatttttagtagagatggggtttcaccatgttagccaggatggtctcgatctcctgacctcgtgatccacccgcctcggcctcccaaagtgctgggattacaggcgtgagccacygcgcctggccttgttttgttttttctagagagaaatgggccccaatatttgccttataatactttgtaccttgtcctacatttcccccttagaacaatgtacagaacagtcaacatgacaatcagatcaagtttcaccttctgcacttaggtctcttacttagctatcactagtctggaggtgttgggaacataacttaaactctttgaactatagtgttctgtaatgtggcattaataaatctgaagtcaaaagatataaaatatgtaaaagcgc

SEQ ID NO: 82968 - DNA, 521 bp, Homo sapiens
gaaggataaagttaataagcatataaatctaaacttgaaaagaaaatatattgtaaaagaaattatctacttacatattggcttctaacttcccattacaatgtaatgaacaagtaatttcaccaaatgatccttaatactactacttcgaatarcccatcaaaagatagatggactgaatttcactgtgcatcttacctacttatatgtaacctagatttacaggaaatctaaataacactcaaccaaagatgccataatctaattcctattgaaaatgaaaaatccaaaggtgataatctattgtgatacaaaatataccgtttacacagtattctgaggatacaatcagctctaaatacctgcagacagagggaaagtcgctgtgctcctacccagatttgcttgctttattatacctctctgaggatctcagctaggcagaatcagaggcgcctgtgggactcagaaaccataaacttggagctgtcctctgcggtagtgctgaaagagaactagca

SEQ ID NO: 82969 - DNA, 521 bp, Homo sapiens
gaaggataaagttaataagcatataaatctaaacttgaaaagaaaatatattgtaaaagaaattatctacttacatattggcttctaacttcccattacaatgtaatgaacaagtaatttcaccaaatgatccttaatactactacttcgaatagcccatcaaaagatagatggactgaatttcactgtgcatcttacctacttatatgtaacctagatttacaggaaatctaaataacactcaaccaaagatgccataatctaattcctattgaaaatgaaaaatccaaaggtgataatctattgtgayacaaaatataccgtttacacagtattctgaggatacaatcagctctaaatacctgcagacagagggaaagtcgctgtgctcctacccagatttgcttgctttattatacctctctgaggatctcagctaggcagaatcagaggcgcctgtgggactcagaaaccataaacttggagctgtcctctgcggtagtgctgaaagagaactagca

SEQ ID NO: 82970 - DNA, 723 bp, Homo sapiens
actccacagagctctaaggtattgctgtgtttaggcaattaactgctgcttctcaaggacataagcctatatgttgctgatgtaatttttacaatttctttttcaaaattttgaggatgatcaggaatgaaagaataacctgagaggtggcctagcaagttctctgactgactgtagtctccaagtttagtctgaacagcaaatgaagctaaaagggcagcagtatcataagaacagggcaatcttccagtaagaatgtcttgtgaaatttgtaaaaatactagtagtgggctatccatggaatcatcagccgcctgtaaatcaacatagtcttgcccagtaaaatcaggatgsttgcagactacatctaacagaacttgccactgatcatgtttattcgcactgaaagcttacacagtgttttccagaaggatgttacaagcctctgtatgctgtctgtctcacgtcaactctggtgctcgtacgttgtagactgtgggttctgccagcaggaaattggaaatgtgaggtcacgactgtacacacaagaccttcatatcacagctgcgtcctctcagctgaagaaagcaagcatcaaagccaggcagtgacggggagcggcatgtctgctctaccacccacagcaaccacgtcatgctgtggaactgccatggcctgtgccacccaagaaggccacaaagttctttctcatacactcagcat

SEQ ID NO: 82971 - DNA, 691 bp, Homo sapiens
cattttatttattcttgtgtttgcatctgataatgatccatctttgcttccccatttatttgtatgaagcagaaagattaaaagaaagcaaaatagaaacacaatatggaagaatatcaatgtcccttcgtataagtcattataatgctacttgaatcaaagatacttaaactggttaactgttttaagaccaaaacaatttattcacatcacatttttccggctttttttctttttttttttttttagagcagctttaaattcacagcaaaatgaagaggcagttacagggatttttcacatatcccctgacccccatatatgcaaaacggcctctgtgacccaaaacaaccagcccagtgatacatttgttacaattgatgaacctacactgacacatcattgtcaccaaaaggccatcgtttacattagggttcactcctggtgctgcacattctacggatayagacaaatgtgtaatggcatatatccatcatgatagcttaatacagagtattttcacagtcctaaacatcctctgtactcacctattcatccctctcacctcttaccaaacccctggcaaccactgattttttttattgtttccatagttttgccttctccagaatgtcatgtagttgaaatcatattgtatgtactcatttcagattggcttctttcacttatt

SEQ ID NO: 82972 - DNA, 431 bp, Homo sapiens
gtgcgacccgggattccctcctctcggcgccccaccctcgactcctgttccgctgagcgcgccctccccggcgggcggagactgcagcgccgggggctgaggaaaggtgggtggcgaagcgccgccgggcgcttggtggccgctgccgccgccactgcagctgtgcacgcccgcctctcggaggaaacttgaagccagcagtacargcagggctggaggccgagcggaggtggggcgggaccggttggagcagggactctttaaacacgtgcgtctggaggaggtgggaagctgcggaagggtatggtgtgtgcctcgcgcctaaacgccgcagccgcccctcccggttcttgcagtttcgcctatcggagtgggaagtgtggggacttggggcgttgcctagtgttggttggggatacagtgcaagcctt

SEQ ID NO: 82973 - DNA, 431 bp, Homo sapiens
gtgcgacccgggattccctcctctcggcgccccaccctcgactcctgttccgctgagcgcgccctccccggcgggcggagactgcagcgccgggggctgaggaaaggtgggtggcgaagcgccgccgggcgcttggtggccgctgccgccgccactgcagctgtgcacgcccgcctctcggaggaaacttgaagccagcagtacaagcagggctggagrccgagcggaggtggggcgggaccggttggagcagggactctttaaacacgtgcgtctggaggaggtgggaagctgcggaagggtatggtgtgtgcctcgcgcctaaacgccgcagccgcccctcccggttcttgcagtttcgcctatcggagtgggaagtgtggggacttggggcgttgcctagtgttggttggggatacagtgcaagcctt

SEQ ID NO: 82974 - DNA, 892 bp, Homo sapiens
acgcaccccctgcttgctcaatcgattacgaccctctcacgtggacccccttagagttgtaagcccttaaaagggacaggaattgctcacttggggagctcggtttttgagacatgagtcttgccaacactcccggccgaataaagcccttccttctttaacttggtgtctgagaggttttgtctgtggctagtcctgctacaaggggagaagggatgcaactcccaagaaatatgccctcatataaaatcccaagtcaaaggtcaaactgtgcccttgactggctcaagtcgttagcttggccctctttcaaatgtactttatttccttttgtttctgctctaaagctttttaataaacgttctctcctgctctgaagcctgcctcagtatctccttctgccttatgccccttggttgaattatttcttctgaagaggcaagaattgaggttgctgcagacccatactttggtgccgcctgacttggatacgttccctaactgctaacaccaggacatgttaacccttttcttgcatgtaatttattgcacaataactttttaaaaattttgagtgctgtaaaaggaaaataaaatctcaggcccagaaactcactaagctgaagggctcagtgggaactgggtcacacaaaggatgaagggcaagctgggaactgggtcacacacaccaacttcccattttcttcctgaatagatagctacwtacctccctcaccttttgctcaggaggaaactccttgtaggccccgagacttttaccctaaagcagttctgttgaatttcaccctgacaatgcaaattaaccacttacttttacaggtaagggaccatgaagagacctaaaagtcatcccttcactcacctgagacaa

SEQ ID NO: 82975 - DNA, 1294 bp, Homo sapiens
cttgagcccaggaattcaaggctacagtgagctactgcacggcactgaagcctgggtggcagagcctgactctgcctatcaaaaaaaaaaaaaaaaagaagaaaagtttggtgggttcgtagtatttttttttaaattttagttcatattcgaacaacagaggagacaaggggacacaggtaaagtttgcctgtaaggttaaggagtattttgtttttcattcatacagttaactacagaatattaagacgtggtcaagagtgactgtatattgggagaaaaacgggagggtctggacaagaatgttgagtggccaccttgagggcacaggctaggcagggtaaatatgaatttatgaatgattttattttcttttgtttttctattttgtcaagttttctgctttgtgtatatattacaattgtgatcactaacaaagctcttactaaaatagatgcagttttgttgaactactttgaagacagaggtcaaagaaagaattttttggtgaatctaagttgttttatttaaaaaaagaaagttctcccagtatgcatttacttagtgcctgctttttgcactgcaagaagcagtcatttttttcttgaaatcatcattatttaatacttttcctggtggataaaaagatgcagaaccaaagagcacacccagtttaaggctcatacttgtatagccctctaggagtgtgttaatccttttgcattgctataaagaagtacctgaaactgggtaatttgtaaagaaaaaggggttattttgctcatggttctgcaggctgtacaggaatcattgtgccagcatctgattctggtgagggcctcacgaagcttcttctcatggcgaaaggcaaagggggagcaagtacatcacatggtgagagacggagcaagagacagtgggggtgatctcagactcctttaaacaatcagaactcacagtaactyattaccacagcgagggcaccaagtcatttatgagggatccacccccatgacacaaacacctcccactaagccccacttccaacattgggaatcacatttcaccatgagaattggaggggacaaacatccaagccacaccagggagggaggctgtgtttaggtgaagcacactcagccacccggggagaagctggtagaagggaaatgcctccggatacttgagttcaagtcatcatctactgtgtcctcttccataagaagcttgaccactccgagcctcactttcctcatctacaaaattagtgccatgacatcggccctccaggttg

SEQ ID NO: 82976 - DNA, 1591 bp, Homo sapiens
  misc_feature (1)...(1591): n = A,T,C or G
aaaaacccctagcttcctcactccctgtcctcaggtggctgaagtaagggttgagagcatgtaatatttactcacagtctcccttttgctattatcccagtgttttgtgtgtttcccccaatacacacacacacacacacacacacacacacacacacacgcacgcagtttctttagttggtgatgttggcagtggcagcagttccagcataagggaactgatttctgtccccagggtctgcacgtttcccttacaagaagggctggcccggagcccagaaggtcatgggtaaactcctgcacaggagcctgcggctgtgcctatagctccaataccacttgttgcctacctgaatgcagctgggagaakgcacaggctggagacttagagaacatgtgaacgggaagggaacagagagacaacctaggctttacagatcgggaaactgaggcccggggtcacagagagttggttctaacaggcagctgactgtaaggcaagccctaggcatccagactcagtccctgccactttttaactgcacatgattcaccaggtcacttttctgagcctcagtttccttgtctctgatgtggggaggataggcctaacctccctcatggcagtggtagcagggatactgacactgtgagttaatttcccaaagcagtcattgttaaactctgatttacagggtttagtcttgaagggcaaagtcttccttaaatatctgccattaacctgcaggntagaatgagaggggganaaacaaaagacgtgagaatcaaactaaagacacagacagccactcagaggcacagcatgcactgtctaatttgtagctgtgctcttctgtagaccacctgcccagaccctgtcacagagtccagtggatccttctaaatgtgggtaccaagtcacattgaatctgggcatttgtctggaatgtatcatgcctcactgcatttgccaagctatttgcagaatcaagtcatttcccctcctacagaaattaccataacattttagactcttagaagatacctattaattgctacctagtagtgagttatgcatgcaatgctcttatttctctatacatttttctggactccttgagggcaaacctgtcttgttcatccctgtttgaacatagcacaccatgccacacagcaggactcaaaaacctgtgggtgactcatgagaatatctgtccagctaagaccacactgtttgcataggcttcattttatgcattattttttaacttgtagcattgatatttgtgtgtctgaactgcctccccaagttcagacacagaatagttcacggctaaaggtggcagagttccattgtcctctggaaagtgaaatgattctgagtatttttaatataagctggttgatagttactgtatgaggtgagatgaggtatatggagactcctcctcctcaccacagtcctgtgttgccacttggaggaagccttgtttttattttcctttgcataggggagtgtgattatcctgattagaggtggaacatgttctccttcttgtcaccccctagtgccaacttccttggcctgcaa

SEQ ID NO: 82977 - DNA, 839 bp, Homo sapiens
acatgcatgtgcaagtatctttttgtataatgacttcatttcttctggcacataccaagtagtgcagcccacaggcttcataacatcatctcacacgtacctgaggacagccccaggaagcgggtgctagaatgatcctcactgtgcaggggcaaacctggggagaccctgaraggcaaagtgggttatccagggtcacataagtggtaaggagaagctgggtctaaacccaggtctgtccctcaaagctgggaccctggctatacccaggccttccacagcagctgtagagaggtgatcttcttgtaattacgcacagatatggcgatgtcccagggtaggagatgagaagtcagccaagaggagcacttggggtcttatcacaggaggggccaggtaaggtaaactcaggaaatgacctcacttccttggcaataggtcccaatagaacttggaatccttgtaatcaggcacccataatttagaaacagctccctccccagctcacttggccaagatgctcaagaaaacatcctgctgtagcctgacttatccaggctgtagcctcaggaaaccctggcatgagagccttttctgatgctacagatgtgggttcagccctcaccacaagccattttccaggagacccccaaaggaaacacaggcagccagggcaggccagtccaggataggccatcactgtgagcatgcctgggcagcccacacccctctgcctgagggcaggggaaaggggttgtaaggggaggtctgctcttggcaggaacaggtgggtgggaggtgtcatcctcgaggtcatgtcatgctaacacccaggatcc

SEQ ID NO: 82978 - DNA, 839 bp, Homo sapiens
acatgcatgtgcaagtatctttttgtataatgacttcatttcttctggcacataccaagtagtgcagcccacaggcttcataacatcatctcacacgtacctgaggacagccccaggaagcgggtgctagaatgatcctcactgtgcaggggcaaacctggggagaccctgagaggcaaagtgggttatccagggtcacataagtggtaaggagaagctgggtctaaacccaggtctgtccctcaaagctgggaccctggctatacccaggccttccmcagcagctgtagagaggtgatcttcttgtaattacgcacagatatggcgatgtcccagggtaggagatgagaagtcagccaagaggagcacttggggtcttatcacaggaggggccaggtaaggtaaactcaggaaatgacctcacttccttggcaataggtcccaatagaacttggaatccttgtaatcaggcacccataatttagaaacagctccctccccagctcacttggccaagatgctcaagaaaacatcctgctgtagcctgacttatccaggctgtagcctcaggaaaccctggcatgagagccttttctgatgctacagatgtgggttcagccctcaccacaagccattttccaggagacccccaaaggaaacacaggcagccagggcaggccagtccaggataggccatcactgtgagcatgcctgggcagcccacacccctctgcctgagggcaggggaaaggggttgtaaggggaggtctgctcttggcaggaacaggtgggtgggaggtgtcatcctcgaggtcatgtcatgctaacacccaggatcc

SEQ ID NO: 82979 - DNA, 556 bp, Homo sapiens
tgccaggtggggttttgagcctagacatgcctgctctaaactcaagagcggtgccatgccatagatcactgtgtggatgtggaggcctacagaggagacacctgaggtggcagtgggaatggagggggagggatgagaagcaggagctgcagagggaggcctcctgggcagatggcagtgctgtgttagtcaggcttgggggagtctctaggtgcctgtgtgacccccaggaggcactatccagggtgccgtctggctatgcctctttaagcttgatgggaaccctgggtgtgagggggccagccagggctgaaggtaaggtgcctggggagggaggggacagagacaagccttgtgccttgggccctcaaccctcgccactggaragtgatgttgcctgctcagaccaagtggggtgggactgagagaaagtggtgactgtttataaagcaaggccaagtgcaagaactgctgagtgactgggaacttcctgtgtgcagaccacacctgctttttttttttttttttttgagagtcttgctccgttgcccaggct

SEQ ID NO: 82980 - DNA, 695 bp, Homo sapiens
cttgagcttgggaggttgaggctacagtgagccatgattatgccactgcactccagcctgggtgacagagtgagaccctgtctcaaaaaatttaggaaaaaaaaagaaagaataatacatggaactccagctgattgtgaagtggcagggaggaggggaagaatcacacatgttgaaggagcttctgcgagtgccagccactgcgccaagcccttctcacacaatgctccccaaccctccaacagggagtctcattatcccctttgccaacagagaaactaaggcaggcagagaaggttaagtcagagaaccaagtggaggaaccaggacataagcccrggatgttggtcttcagagctgtccttcctaatcaccgttgttttggggggttatttaagaaattggatcgcatagctgttttttgtgtattgatgagctttcagagatgtctgttatttattagctatttttcagctctgtcgagaggagatccacttcctgtaaaggacagaatggaaatgcccacggcaacccagaaaacagacacaggcctgactcaaggactcctgaaagttttgcacaagcaggtatgggggggcgtagtctctggcctcaggcagctggcctgtgctttccttaccgttcactgtgcattgatgacagagcggggcacaccccagcaatgtatttcaaac

SEQ ID NO: 82981 - DNA, 1274 bp, Homo sapiens
cataaaactgtgctaactttttatattggttcttttcttatgtgtcagtgacaaastttttgagtgaaaagaccctaaaggcattttcccataaactctttgggtttatagtgtgattttacatagcatggtatattttaggagtgtatatatcacgttacagcaaaactgacctatacagatctaaacagaattcaaattatttcatacattccctacatttccatgcctctgtgtctttgtattcatttcatttgctgaaccctgaatgacttcaacctgtacacatagaagctgaatctaatctctagacttatctcttcttccaagaagcctgttattatcttcaaatgtaaatcatttttctctcctttaaacaccattgaactttgtttttttcttccttatttttcctgtcactatttgttcttgctcatattttttctggtaaaatatcaaaatgcttgtggacagaacctgcttcttttatcaattgtatcataaagcattctgcctcatatgtgttaagttttaaaaaacttttgagaacagactatacagaaggaattaaatccactgcacatgaacgtgtactctcttaagatgattttcatcagaatagaaggaatgttctgagttccctattttatcaagattaatcactgtgagaggactataatcaatattttcttttccataaaacaattttcatattggcgctatacacaaatactagctaatggaaacttctggaatgataaatatattctttatctgtgctgtttaatttcatcaccactagatacatgtgagttttaagtgtttaaaatgttgcaattgtaactgactcaatttataactttattcagctcgcagggaagactggccacaccaccctaatcttattatgcaaatgggctttccacttggccatctccatgttatctgctgcttactgtacatatggctagcaaagagaagggaacatggagctgccattttgaatatgcttagtgccagcattcacctgtgaaagcttccagcttgcttgattatgtctgcagttcaattttacaggctgctctttgttagaaaagaaaattatctgggggctgcttttcattaaaaggaaaaccttacaaagaactcggtaccctcactatctgcctaagtaatttcttcttcactcctgtatcactggtatgctgtcaataaatctcatgtcacataataaagaaaaaagaaaggaaaaaaagatatattttttagtacaa

SEQ ID NO: 82982 - DNA, 1274 bp, Homo sapiens
cataaaactgtgctaactttttatattggttcttttcttatgtgtcagtgacaaactttttgagtgaaaagaccctaaaggcattttcccataaactctttgggtttatagtgtgattttacatagcatggtatattttaggagtgtatatatcacgttacagcaaaactgacctatacagatctaaacagaattcaaattatttcatacattccctacatttccatgcctctgtgtctttgtattcatttcatttgctgaaccctgaatgacttcaacctgtacacatagaagctgaatctaatctctagacttatctcttcttccaagaagcctgttattatcttcaaatgtaaatcatttttctctcctttaaacaccattgaactttgtttttttcttccttatttttcctgtcactatttgttcttgctcatattttttctggtaaaatatcaaaatgcttgtggacagaacctgcttcttttatcaattgtatcataaagcattctgcctcatatgtgttaagttttaaaaaacttttgagaacagactatacagaaggaattaaatccactgcacatgaacgtgtactctcttaagatgattttcatcagaatagaaggaatgttctgagttccctattttatcaagattaatcactgtgagaggactataatcaatattttcttttccataaaacaattttcatattggcgctatacacaaatactagctaatggaaamttctggaatgataaatatattctttatctgtgctgtttaatttcatcaccactagatacatgtgagttttaagtgtttaaaatgttgcaattgtaactgactcaatttataactttattcagctcgcagggaagactggccacaccaccctaatcttattatgcaaatgggctttccacttggccatctccatgttatctgctgcttactgtacatatggctagcaaagagaagggaacatggagctgccattttgaatatgcttagtgccagcattcacctgtgaaagcttccagcttgcttgattatgtctgcagttcaattttacaggctgctctttgttagaaaagaaaattatctgggggctgcttttcattaaaaggaaaaccttacaaagaactcggtaccctcactatctgcctaagtaatttcttcttcactcctgtatcactggtatgctgtcaataaatctcatgtcacataataaagaaaaaagaaaggaaaaaaagatatattttttagtacaa

SEQ ID NO: 82983 - DNA, 1274 bp, Homo sapiens
cataaaactgtgctaactttttatattggttcttttcttatgtgtcagtgacaaactttttgagtgaaaagaccctaaaggcattttcccataaactctttgggtttatagtgtgattttacatagcatggtatattttaggagtgtatatatcacgttacagcaaaactgacctatacagatctaaacagaattcaaattatttcatacattccctacatttccatgcctctgtgtctttgtattcatttcatttgctgaaccctgaatgacttcaacctgtacacatagaagctgaatctaatctctagacttatctcttcttccaagaagcctgttattatcttcaaatgtaaatcatttttctctcctttaaacaccattgaactttgtttttttcttccttatttttcctgtcactatttgttcttgctcatattttttctggtaaaatatcaaaatgcttgtggacagaacctgcttcttttatcaattgtatcataaagcattctgcctcatatgtgttaagttttaaaaaacttttgagaacagactatacagaaggaattaaatccactgcacatgaacgtgtactctcttaagatgattttcatcagaatagaaggaatgttctgagttccctattttatcaagattaatcactgtgagaggactataatcaatattttcttttccataaaacaattttcatattggcgctatacacaaatactagctaatggaaacttctggaatgataaatatattmtttatctgtgctgtttaatttcatcaccactagatacatgtgagttttaagtgtttaaaatgttgcaattgtaactgactcaatttataactttattcagctcgcagggaagactggccacaccaccctaatcttattatgcaaatgggctttccacttggccatctccatgttatctgctgcttactgtacatatggctagcaaagagaagggaacatggagctgccattttgaatatgcttagtgccagcattcacctgtgaaagcttccagcttgcttgattatgtctgcagttcaattttacaggctgctctttgttagaaaagaaaattatctgggggctgcttttcattaaaaggaaaaccttacaaagaactcggtaccctcactatctgcctaagtaatttcttcttcactcctgtatcactggtatgctgtcaataaatctcatgtcacataataaagaaaaaagaaaggaaaaaaagatatattttttagtacaa

SEQ ID NO: 82984 - DNA, 523 bp, Homo sapiens
tccttggcacagcccctgagagaaggggctttatcctcatttcacaaatgaagagactcttcaagtctcagaaaggttagtagcacgaacaagctcacacagcaaggggtggagcttggatttgaatccaggtctgtctaacctcaaagactgaagtggggatgaaaataagttgtcattgttgtttgcctktcgggaactgatgtgtggctcatcgaatggctgtggaagtgtttctggctcaggggtaggaaaaggatggtgactccacattcctttggtcaaaacagccaggagttcccagcgggaggatgcaagagaaggtatttgaaaaggaaaaagggccaaacaggttaacctgagattgtcatcagtgattgggtgattggcctgccctctggctcctctgagcagccagctgaggtgctggctgccttgtgatgggggctcgtggggcacagaaatgcttggatctgttgctgtgcagacattcattcaacaaatacccaccaagtgcccacat

SEQ ID NO: 82985 - DNA, 553 bp, Homo sapiens
ttaggggataaatctgtcaagcgattgtgcaattcttggtcttagaaagttctgagattcaactttacctttctaaagtttgctttttaaatcrtctcacagttccttatgcaagaacacacaggcaaagaaaactgcattgctgggttgaagatgaattatttttggaaaaaagttgagtgctttagtgtatggcatctgatatagtcccctcccggcccttcttaccttgggctgagcccttccagaagcaaatttgggacttgcttgtgttctcttgagaccagaatattctatttgtgcacatttacatggagaagagggccactcacattaacgctgccagagccctgggtgtgatggaagaggtcatactggcagtaatgtgtactgaagcgtaaacttaatagtgaagaaaaaaaatgagtgaggctaagtggttattcctgtggaattctagagcatgactaagcaaagtacaacttttggaaagtcaaaaaattttcattttgtgggttgctacagggtttcttttcctatgcactggtgacat

SEQ ID NO: 82986 - DNA, 1016 bp, Homo sapiens
tgcccaggtaaattccaactccagttcagttcccaagtcgaagctcttccacactttgtgtgagaagtcatgttatttaacagaaataatcttttcaggttttatttctgtctctcttcaaatcttggctacatcttgaattcactgataacccagaaagctcttgtgtcagacattagtgctgtctatgtatgcatgaaggtgtgggcctcctcactaaccattctggatttcagtttcctaataaaaatataatctcctaatgtcatcaagtctgcaatggggacagaaaaattaagtttcagaagtgttaaatttgaaaaaaaaaaattccctcgatatcaccaaggaaattctggaccatatattgagaaaattttgttctccttagtcagaagttagaaaacttgcatccatctcaaagcccctttgcctctgatgcagtttactgtctcttaagctgcctgtgacactgaactggcaagggtctgttccatttggcctcccgaagggcttaatattggaaatgaggtgaagtctggtgtccgttttcaaagtgtctcagattaaaagagaaccaaattttatatgccaaaccatcattaaacacaaaacagtacacatgttttaggtgcttttcaattctaaacmttatgcaagtaaaatgttatggaatataagaggttaatggaataagacaacatcaaaggaaaaagaacacttgaaaatcttttagagcaaacttcttactccgagtgggggtgggaggcggatttgaagaaaggccacctaacaaagatgggaataaaggatatttattgtactccacatcaaacatagaatatatcaagaggtatcaaaaaagagacacagggccagacctagcggctcatgcctgtaatcccagcactttgagaggccaagtgggcagatcatttgaggtcatgagttcgagaccagcttggccaacatggtgaaaccccgtctctaccaaaaatacaaaaatcagccaggca

SEQ ID NO: 82987 - DNA, 1016 bp, Homo sapiens
tgcccaggtaaattccaactccagttcagttcccaagtcgaagctcttccacactttgtgtgagaagtcatgttatttaacagaaataatcttttcaggttttatttctgtctctcttcaaatcttggctacatcttgaattcactgataacccagaaagctcttgtgtcagacattagtgctgtctatgtatgcatgaaggtgtgggcctcctcactaaccattctggatttcagtttcctaataaaaatataatctcctaatgtcatcaagtctgcaatggggacagaaaaattaagtttcagaagtgttaaatttgaaaaaaaaaaattccctcgatatcaccaaggaaattctggaccatatattgagaaaattttgttctccttagtcagaagttagaaaacttgcatccatctcaaagcccctttgcctctgatgcagtttactgtctcttaagctgcctgtgacactgaactggcaagggtctgttccatttggcctcccgaagggcttaatattggaaatgaggtgaagtctggtgtccgttttcaaagtgtctcagattaaaagagaaccaaattttatatgccaaaccatcattaaacacaaaacagtacacatgttttaggtgcttttcaattctaaacattatgcaagtaaaatgttatggaatataagaggttaatggaataagacaacatcaaaggaaaaagaacacttgaaaatcttttagagcaaacttcttactccgagtgggggtgggaggcggatttgaagaaaggccacctaacaaagatgggaataaaggatatttattgtactccacatcaaacatagaatatatcaagaggtatcaaaaaagagacacagggccagacctagcggctcatgcctgtaatcccagcactttgagaggccaagtgggcakatcatttgaggtcatgagttcgagaccagcttggccaacatggtgaaaccccgtctctaccaaaaatacaaaaatcagccaggca

SEQ ID NO: 82988 - DNA, 697 bp, Homo sapiens
tgaaactaggcaatgcaggtttggcaagcacaggtgcaatggggcttgaagggttgtagatccagtcttagtccacagacgatttgcagaagcctgactaaagtttaatcgaggagaaagtctttgtcagtctgtgggggatatttgtctcaccagtattgaatactaccatatttcaatttttttctggtttaataattacaaaaagaaattgttctcatgtccttcagttctctttctttctttctctttctttctttctttctttctttctttctttctttctttctttctttctttmtttctttctttctttctttctttctctttctttccttattagaaatgttaagtattttttgctgaggtttagttggccatgtggaaaataaatttttcttagtgattttttcaggtctctgtatcaggtcattcttgcattgctatcaagaaatatatgagactgggttatttataaagaaaataggcttaattggctcacacttctacaggctttacaagaagtacggtgctggcatctgcttggcttctagaaggtgaagggtgagcaggcatgtaacaaggtgaaaatgtgagcaagggagagagagtgaggggggagatgctacacacttttaaaatgaccaaatctcatgagaaattactcaccattgtgaaggcatcaccataccatgag

SEQ ID NO: 82989 - DNA, 1050 bp, Homo sapiens
aatgtgtggctttactatcagatttattggtaaaactatattgatgtgtatgtatgtgtgagaatagatggtaggaattacgtataagatcatcacttcaatgtaaataaaatttaccttctaggccggtcgcagtagctcacacctgtaatcccagcactttgggagggcgggcggattcagaggccgaggcgggcggattcagaggcctaggaaggcagatcatgaggtcaagagctcgagaccatcctggccaacatggtgaaaccccgtctctactaaaaatacaaaaattagctgggcgtggtggcgcatgcctgtagtcccagctgcttgggaggctgaggcaggagaatctcttgaacctcggaggtggaggttgcagtgagcctagatcgcgcctctgcactccaacctggtgacagagagagactccatctcaaaaatgaaaaataaaaaataaaaaaataaaatttactttccaaagtcatacatacatatatatatacatacacacacacacacacacacacacacacacacacacacacacacayatatatatatatatatatatatttttttttttttttttttgagaccagatcttgttctgtgaatcaggctggagttcagtggtgcaatcatggctcactgtaaccttgaactcctgagcacaaaaatcctccttcagccttccaaatagctgggattacaggtgtgtgccaccatgctggactagtttttctttttatttttgggggagagatgaggtctcactgtgtttcccaggctattcttgaacttttggcttcaagcagtactccttccttggcttcccaaagtgcaagaattacaggtgtgagtcaccatgccctggccctagagtgtaattacatatttttcatcacacattctctctaaacacaaagaacacatgctcttaaacaagatccagaaacagacaattctactggctgtatctgtatttactttgaacacattatctcattatacggcagattcttcattgtaacaaacatccctaaa

SEQ ID NO: 82990 - DNA, 1050 bp, Homo sapiens
aatgtgtggctttactatcagatttattggtaaaactatattgatgtgtatgtatgtgtgagaatagatggtaggaattacgtataagatcatcacttcaatgtaaataaaatttaccttctaggccggtcgcagtagctcacacctgtaatcccagcactttgggagggcgggcggattcagaggccgaggcgggcggattcagaggcctaggaaggcagatcatgaggtcaagagctcgagaccatcctggccaacatggtgaaaccccgtctctactaaaaatacaaaaattagctgggcgtggtggcgcatgcctgtagtcccagctgcttgggaggctgaggcaggagaatctcttgaacctcggaggtggaggttgcagtgagcctagatcgcgcctctgcactccaacctggtgacagagagagactccatctcaaaaatgaaaaataaaaaataaaaaaataaaatttactttccaaagtcatacatacatatatatatacatacacacacacacacacacacacacacacacacacacacacacacacatatatatatatatatatatatttttttttttttttttttgagaccagatcttgttctgtgaatcaggctggagttcagtggtgcaatcatggctcactgtaaccttgaactcctgagcacaaaaatcctccttcagccttccaaatagctgggattacaggtgtgtgccaccatgctggactagtttttctttttatttttgggggagagatgaggtctcactgtgtttcccaggctattcttgaacttytggcttcaagcagtactccttccttggcttcccaaagtgcaagaattacaggtgtgagtcaccatgccctggccctagagtgtaattacatatttttcatcacacattctctctaaacacaaagaacacatgctcttaaacaagatccagaaacagacaattctactggctgtatctgtatttactttgaacacattatctcattatacggcagattcttcattgtaacaaacatccctaaa

SEQ ID NO: 82991 - DNA, 631 bp, Homo sapiens
tatgtcttaagaaatgagttgtagccagtaaatttcaaagaaaaaaaggacccgtaagtcaagaacaatttccaaataatgaagagcaaccttgctttatatttcaggggtcttataaaatagtagtgagaagagaggattgtatcgaaggcaacattcatttatttcctacctggtttcaaggcaactttatttatgccttacactgtctaataagagagaaggaaagaacatttggccaacagaaagtattttaaaaatgatgggctgtcccattgtttaccctctaccctctgttccattattaagaattacttttattcagttattaaaatcagtgtttttctaaasttttctaggtgagaaatttcttaaatgagcactttttttctcttcattagactgctggcttcatctggcagaaggcatgtcttttcttcttcttcttctttaaattcacctttgttattatgtacccagcaaaatactagaacaaaataagcactgaataaatgtttcttgaatggaagactaagtgattctctctgttacagagctttcagaattggaggatcttgcttttaagatggacaccaccaagagattttttttcagtgaagctgaaaggaag

SEQ ID NO: 82992 - DNA, 508 bp, Homo sapiens
tgggattacaggtgcctgccacacaccctgctaatttttgtagttttagtagagacagcgttttgccataaaaaaaaaaaaatcaaaatcctcagtttgttccatgaactttggttctgtggatgtgagtttatctatataatgagcatagtgctttcttccagaggattacttttccttaaatatttgctgggtttggttgcatgcccctctggaatctgagctcctaagttatccggcctctgctctatctgattacctggcctcgctccaggattccacacaggggtgtgcctgtggcttcctgggcaatggaggcttctgcttccttccggatggcartgagccccgtcctgatgaccaggactgacatgttcgtggatatgcactactcctgtctcggagcagaagcctctgctgaatgtacgtggcaccagaaggagaggaacaaagggttcaaagttcctggattcctctacttccaccaaccacccttctgattgaccct

SEQ ID NO: 82993 - DNA, 704 bp, Homo sapiens
aagggtaaattatggcttaagctctagctgggaactctgtctacgcaaaatgaggagtttactgtaacacaattgtatgtattcacgaaattctttttccctttattgttctattgtggtaagtttttcatgtcattaaaaattctgcaaaattaatattccatcatttgaatgtatatcaatactaatktgtaagtttttggaaaattacctccttctccttttttttttcttaaattgtaaagaaggttgagatgaatatctttgtccaaaaatttttacccaggaatttaaggaaataatcaagtattcagcaaaaggtatgcctttctttaaaaaaaaaaaaacttgaaatataatgccacattacttttcagaaagattgtaccaagtgacctgcctccagtcaatttgataggcagagatggtatttcattatgattttaatttgcttttctttgactcttagtgacgttgagtaaaaaatgtttttagtctttcacatttctgctgcaatgcttctgtttccttatttgttattaattatctactatgtgccaagaaagccacttgacaccagaaactgaggagtttggcatacaaccccttgtgggctctgaagtggaccacaggctggaggggagggacagagtgagatagaagagcagctggcccaggtctggctgtgttctcagccagtcacc

SEQ ID NO: 82994 - DNA, 726 bp, Homo sapiens
ttcctgccttcttcctagcttctggtgctctaggcaatacttagcgttccctggcttttggacacattactccaatccctccctcctttgttacatggcattttcattgtgcctctcctctgtgtcatcacatggctttttataaagatgtcatttattgaatttaggactcaccctaatccagtatgacctaacctcaacttgattacatctgcaaagacyccatttcaaataaggttacattttcaagtactggggatttggaccacgacatacctatttgggggcataatttaacccacagctgatgccatgacttatattcttcgtacctagaggcagatgtattttaagcttggatagtcccaaagatacctgacactagtcagccatggcgtcagtcccagctggagccctgccacaacagggcagaagtctggcctcatgtcctttggcggatgcagtaggcaatagggcagggtgtaggtcactgactccgaagctccctcatggcctcatgcacgaaagcacacaatcctggatgtgctacagcaggaagtaccaaggccggagtggagcactgactctctcattagtatgccataggacccgcacaagccacttctctgagcatccggtcattactttattgttttgtatgaatgaaagagcagacacttactgggcatttgctatgtgccagagcaggggctggggcctgggata

SEQ ID NO: 82995 - DNA, 633 bp, Homo sapiens
taagaagtgcgaaataatggaataatggcaactttatatcctgaagggaagtataaatcctggatagaaaaggaactcacctaaggggagcaagtgggtgcataaagttgatcttggatacagattggtggtgagcgaggaataatagactgagccaagtccaaggcagggtctttcaaatggtcttctggtgtgagctcagggaattacgtgaagttccaagggagatgggggckgtggggacctgaaagatgaaatcaaggtaaagagcagagccactagagatgctattgggtaccacaagtgtctggagtttcatacacttgagaggagggtacttttcctacattagaggcttgtatacagtgactgttggagtgaaagggtgacctgctcctaacagccatcttaaaatggcatattcaccatggcaagacaatccaaattccttgtaagattcagcacacaggtgctagtctctacttagttctgaaccagttccttgacctgtatttatacctggttccatgttgctcctaaccctgttggtctccgacctttgtgaggttcttctgtttatccagcctgcctcacttgtttgacttgacactgcactgctccttcttggctctg

SEQ ID NO: 82996 - DNA, 524 bp, Homo sapiens
gtggaagggtaagtgaggggtcaggtcaagctgggccatgcaaaccaggcgaaggtgaatagaagcgtccagaggctcccaatcccccaagtagaaagcagttacataagttatgtcaaggttgtgatatattactagcctaactaccacaggctggacacatgacttatttcatttaaacttcgtgacaaacctatagggttctattattgtctccaatgagtaattttcctaaggacaaatgactagggggtaacacagcaggaatcagacttacacacttagtttaggatacaaactgtccagtacaatctctgagttwagccatgaaacttctttaggacaggctcagctctggccagtgcaccccttactgggaagcctgagtcctctgagtttgggttaggaagttgtcaagagtgaaggcattgtatttgcagcatggtatgtatctgtgtgtgtttgtgtatgtgtgtataagtatgtacatgtgaatgtgtacatgtgtatgcatgaatgtgtgc

SEQ ID NO: 82997 - DNA, 674 bp, Homo sapiens
ggagaggactaggggaagatactcgtaaattgctgagactttgcttttctctgtattatatactttcccagcttgcaaaaactattttaaaaaagaatatgggccrggcacggtggctcacacctgtaatcccagcactttgggaggcccaggagggttgatcacctgaggtcaggagtttgagaccagcttgaccaacatggagaaaccccgtctctactaaaaatacaaaattagctgggcgtggtggtgcctgtattcccagctactcaggaggctgaggcaggagaatcactcgaacctgggagcggaggttgcagtgagccaagatcgtgccattgcactccagcttgggcagcaagagcgaaactccctctcaaaaaaaagaaaagaaaagaaaagaatatgatctccccctctccatacctccaaaatattctagccactcatttgaattccaatccacgttctcctagaagtcatggatatcacttcttaactcctaaccaaatcacaagattgttaatagactttaaatgcccttatgacctctgaactccaattgccctctaggcccctgagtcttttggcagtgctggaggctctttggagctttgtttgatttgtaacccccttttgcagcatgggagaaaactttagaggcctggaggtgg

SEQ ID NO: 82998 - DNA, 1054 bp, Homo sapiens
actttcaatgtattttttttcagattgtttcagtttttgttttgtttttctgttaatttttttgggggggatcaggctttctttcttcagggaaattgactttcaattgtaggcattcattacaaaaaagggtcctacacaagcagggcacttaaattctcttaggcactcagccaaacttgtcacctgttgttattgttgttttatataaggcaaaggagttgttataaagataatttctatttctgaagttttaattataactgaaatgttggtaaaaagacttgaaggaaggatttcctcctctgtatccaaagaaaacaaagaattacacagtctataaacatatgagagtagaaaaattgtacaatactgattataattttttgactttaatctcatttagattcagtgcagaatttcaagagcatcaagaaaatacacaatttatatatacacaaacacacacacacatatatatatataaaatataacattcacttgctatgaaaaaccattttggtcactatttcatttctaaactcaatgtgtatatgcaacattaaatgttcttaaatgtaagaaggaatcagttttcaaaaatataaatgagtrcttactttccttggaattaatgataacatatcaaatgggaaaaatgcaattttctttgtggaatcttttataagtctcaatgctgtgtgtgctctaaaaagtttatgttagaaaaaaagttaaagattttttcatagctttcataaaaattgctttataatagtgtgaccacaggagatataaataccataaagtgaggcaaacagtatattttataaatagaaccagcagcatcatacatttatgggatattgtaaatcatctgaattttagttctcagaaacaatgatcacttccatttcaaactctgtattactcagtaaagtagttctgttgtattttaaaatatactcctaccctcacactgatcagcttcattcactattttccaggacagagctaatgcttccatctacagaaaaattcatggtcaaaatat

SEQ ID NO: 82999 - DNA, 1054 bp, Homo sapiens
actttcaatgtattttttttcagattgtttcagtttttgttttgtttttctgttaatttttttgggggggatcaggctttctttcttcagggaaattgactttcaattgtaggcattcattacaaaaaagggtcctacacaagcagggcacttaaattctcttaggcactcagccaaacttgtcacctgttgttattgttgttttatataaggcaaaggagttgttataaagataatttctatttctgaagttttaattataactgaaatgttggtaaaaagacttgaaggaaggatttcctcctctgtatccaaagaaaacaaagaattacacagtctataaacatatgagagtagaaaaattgtacaatactgattataattttttgactttaatctcatttagattcagtgcagaatttcaagagcatcaagaaaatacacaatttatatatacacaaacacacacacacatatatatatataaaatataacattcacttgctatgaaaaaccattttggtcactatttcatttctaaactcaatgtgtatatgcaacattaaatgttcttaaatgtaagaaggaatcagttttcaaaaatataaatgagtgcttactttccttggaattaatgataacatatcaaatgggaaaaatgcaattttctttgtggaatcttttataagtctcaatgctgtgtgtgctctaaaaagtttatgttagaaaaaaagttaaagattttttcatagctttcataaaaattgctttataatagtgtgaccacaggagatataaataccataaagtgaggcaaacagtatattttataaatagaaccagcagcatcatacatttatgggatattgtaaatcatctgaattttagttctcagaaacaatgatcacttccatttcaaactctgtattactcagtaaagtagttctgttgtattttaaaatatactcctaccctcacactgatcagcttcattcactattttccaggacagarctaatgcttccatctacagaaaaattcatggtcaaaatat

SEQ ID NO: 83000 - DNA, 809 bp, Homo sapiens
tttttctattgaattttattcttcagcttgggaattggctcacttaattatggaggccaagaagtcccatgatctgccatccccaagtggagaaccaggaaagccactgccataattcagcctaagtccaaaggtccaaaaaccaggggagctaatgttgtaaaccctgctggtttggcttcaaaggcctgagaaccaggagcaccagtgtccccaagctggaggagacagagtgtccgagtcaaacagaaagagtaaatttgctgtggtttcttttgttgttgttgttgttgtygtcgtcctattctagccctcaagggattagatgatggtcacccacattggtgaaggtggatcttctgtgctctgtctagtcattcaaatgctaacgtcttccagaaacactctcacaaacataaccagaaacaatgttttaccagctatctagacatccctttgccctgtcaagttgatacacaaaaaaccatcataagtaggaatacttgtgaagtatatgtaaatatctctgaaaacatggtaacttgagtcaaagtgaaagttaaatgaaggagtgagccaagcagtactcagggaggagagtggccttggcagagataccaggaatgtcaagcaaagctcaagagaagggaagggtaagagaggcattagagggagatcctgcaggtcagagaggtcatggaagatctttagattgtattatgagtaaggtgagcgtctctatacttacaagcaaaaaagtgactgctgagaataactgaaaaaatgggataaggtcagagataggatcc

SEQ ID NO: 83001 - DNA, 408 bp, Homo sapiens
ttttacatttaaccacatccttttcaatatgtattttcattttgcatcgtaggttttttatttttatttttttataaactgggtctcattatattacccaggctggagtgcagggtttattcacaggcatgatcattgtgctcataatgcactgacacgctggaactcctgggctcaaacaatcttcctgcctcagcctccagagtggctggaactacatgtacacaccatggtgcccagctttctgcattgtagttttgtttttatttttatttttttttgagacagtttctcactctgtcacccagaccggagtgcagtggtgcaagcayagctcagtgcagcctcgacaacctgggctcaagtgatcctcctatctcagcctcctgagtagctgggagtacaagc

SEQ ID NO: 83002 - DNA, 851 bp, Homo sapiens
gcaaatatgatgccattttatatcagggacttgagcaccctcagattttggtagggaggaaggtcatggaaccaatcatctgcagatactgagggatgactgtataccatccctaatctcctcagggatctgtgtccctctagtcctgtgtttgagcatctgatgatgcagaagtgtgagtagaggaaagaaagctgatggatatcaggtgatgagttgatggaactgccactcaataagcatacacaggtgaaatgtagtcaaagtgtgcatgcctttcctcagggccacactagggtctggacacasgaccccatacctgagagcaagacccagggactggcttatctccagaaaagggaaaaagtgacttctgcttatgttagctttgtttttttctatttttctgcctaagtgtctaggggaatgcttttcccagaccattcattaatgagtcatcacaggaaaatgagtcaattaatgtgtcctttaataacaacttttcattgggtcacaaatagtgcctaaaattagatgatgtttctcttctagggtctatgtcatgagtatctgcctccaaggtacagggagactgtatgctctgggtgacagttatttgagtgtgataaaagagacaagtgcagaggggcaggcctggagggcacccattgcaccatgcttcatctccttgaggctgagaagtggacagcgaggaggttggccctggaaccagactgacctggttctctctctcctaccaaccatgtaatcttgggcatctattggaaggtagtttcctcatttgaaaaatggagggtaggatacagtcatgtgttacttaatgaagatat

SEQ ID NO: 83003 - DNA, 851 bp, Homo sapiens
gcaaatatgatgccattttatatcagggacttgagcaccctcagattttggtagggaggaaggtcatggaaccaatcatctgcagatactgagggatgactgtataccatccctaatctcctcagggatctgtgtccctctagtcctgtgtttgagcatctgatgatgcagaagtgtgagtagaggaaagaaagctgatggatatcaggtgatgagttgatggaactgccactcaataagcatacacaggtgaaatgtagtcaaagtgtgcatgcctttcctcagggccacactagggtctggacacaggaccccatacctgagagcaagacccagggactggcttatctccagaaaagggamaaagtgacttctgcttatgttagctttgtttttttctatttttctgcctaagtgtctaggggaatgcttttcccagaccattcattaatgagtcatcacaggaaaatgagtcaattaatgtgtcctttaataacaacttttcattgggtcacaaatagtgcctaaaattagatgatgtttctcttctagggtctatgtcatgagtatctgcctccaaggtacagggagactgtatgctctgggtgacagttatttgagtgtgataaaagagacaagtgcagaggggcaggcctggagggcacccattgcaccatgcttcatctccttgaggctgagaagtggacagcgaggaggttggccctggaaccagactgacctggttctctctctcctaccaaccatgtaatcttgggcatctattggaaggtagtttcctcatttgaaaaatggagggtaggatacagtcatgtgttacttaatgaagatat

SEQ ID NO: 83004 - DNA, 889 bp, Homo sapiens
ccaatcagaaaagactctaacatcaattgaccagtttattttgtctgattgatttttctgttcctcttccatggtgagtgttttctgatgagtattagtatgctcctccccatcatatgttaatctacccttcacataactctctcctggagcttcttatcttcacttgtatattactttccctttcagaacccagaaaaatcagcaaagtcagtggttgctgcccttgagtctatatatattctcacctcagccaactttttcttccatataaaaaagatgacctggtacaccatgtaaagttctgcctactgggagattatttttgagctactgtatttcaaggttactactgtatttcaaccatgtactaagctgacctctttcctcctttttcagcgagtcatagctgcatatggctatagatgtgaaatgacaggggagtgctgaagaaactattgtgagtcacatgggggcctatctgctcataaaacttaactcatcatctctactacttactgctcatgttttatcctgattgtaccatttctactttataatggatgcagctagatttcctcaatttaatgacttggtaggtcattatgatacytcctctatggcttgggataaattctacactgcatcttttctaccactgatgacaatagcaccatcaggtctttcagactacctgacctaattgtgtgattgattatattacattctggatctgctgcagagcccttttgtactcaaggttctgcataaaattggcagctttttatgtcacccagtctgtgagccagaggagtattcctagatgtgttgtcatgagaacccaaagagacctacttggcaccaggctttgttcttgcaatagaagatg

SEQ ID NO: 83005 - DNA, 967 bp, Homo sapiens
gcatatctttaacttcacttcagctagttttcttcctgaatggttattccaaataacactttcggaagtaatgtacaagaattcttgcttctcactgctttcctaaaacttaatattagcagaccttatattttttccttctacttcctttgaatatataacctatcctttgtgatttttcttttggggtttatattatttatttttctaacttcttcagcagattcttagctcattaatttttagtccctttctcattttattatgctcttttaaaagtatgaatttctgattagtatttttgctggatatgacacattatgatttgtagagctgttattaatcagttataattttttagcaactttattgaggtaaaactgacaataaatgtcacatttaaaagtagtcttttaatttcaaatttgttttattttaaaccattttttatttttgatttttgtggatatatagtaggtacgcaaatttatttatttttttttatagtaagacatttaattttattccctttaataaatgaggaatgtggttttattccttccattgtctgcttctaaagtatagatataaacttgtgtctactgcagatgcagataagaaacgtgggaagccacaagaaagccaagtagcctgggaaaaagtgstcattgagccatgagaaaaaattaacatttgatcctgttggtgccacctgaaggcagagatggctgaggacccccgagtgtaagtccagagagctcccctgcagccccaccctgactttccaggatgagccttctctaggaagccactgctcattcggaaagtgaagaacgcctgtgtttccaacaccaaccccagctctgctgacatctcaggatggcaggaccacgcgtgatggaataccaggcaggggagactcaaatttataagttacatgagatattttgaaacaggcacacaatgc

SEQ ID NO: 83006 - DNA, 609 bp, Homo sapiens
aactctgactcaaacaacaacatcaacaacaaaaaaaaacagttctgaagcttaattatataaaactactatacacgaaatttacattagaaaaagagaactgggtgtaggaaagccgggtgtggtgtcctctttaagcgaaggtctctccgcagttggggcatcttcgcttcctcaaggcaaaacggcagatgaacccaaaggggaacaggatgatgaccaagaaaatgcccaggragctgaagcagtcctccagcacccccgaccctgcagacgggacagcttcccatgaccatgatggagttggcagggtaccaggtggtggtctggctgtggatgttgtagaccctggggtggcgggtgggtacccctgtgacgaggtaggggtagggccttggcgggggctggcagggttggcgccatagctgtgcaggcagcatgcatagttgacctggacggactccaggttgtaggccagaggccgcttctgcagcagaggtttgtggtccatggcagacccactcagctcagtcggccccagtggggaccctaatcttgaggagcttcctcacagatgtgtgctgaccagtacctgcataagggatggag

SEQ ID NO: 83007 - DNA, 1810 bp, Homo sapiens
ttttcagattagggatgctgaattggtaagcataatgcagattaatccaaaatctgaaaaaaatcctaaatcaaaaacagttttggtcagaagctttgtggataagggatagtccaagctttttggactgaagctttttggataaggtatagcctataatacataaatacataatacaggataatcactgacctgaatgtatagcatcagtatggtacacaaatatttaaatccatgtactttgttggatattatgttatataaacttcttgtaaaaagtttagagagtaaaatcattcacattaccaaaagatttctcatatttataaaaaggattatagcagcattttaatcagtatctcctaaagtatttatttatgggttgttaaatctaaaagagaaactacagtctggagggctctaaactactgctgattacatatcagttgggaattaagagaaaatctcagatcataatatttaaataaaaacatttacatgaatgatttctaagttttcactttactagacaagaaactaaaattatatgactgtcatgttcaatattggatacttaacaacactacatccaaggaagccaggttttgctgattttaacctcgtcctgttgagtaactccatgcaggtacagtggtacgaacacatgtggacacacagacccagacctttatttcctcggggattctggtaagtgtagaggtgtcttgaccatagtcaatagcagaaatatgcacaaccacaagctctgaaattccatttgattgttgctcttagccttccactttttaggcatatgtcagtcccatttcatcccacccactctctccatttgggaggtggtagagtgagacaatactgaactataccagggctgagaataagtgtctttgaaaagggtcgaatctgtgatgctagagacagccctggaaactgtcaggagttagcccaaccaggactgtgaccagatcccaggctgtccaccacagatttgcaggctacctgcagatgtgactttttcaaatgtactcaaagacaagctgactttggctaatgcagaaattaattaattcctctttttcagtaaactttatcctcctacacttagattgtctgtaagtacatctctggagttgagctcaactagaaagaagctgtctgcatttagttaataccagcattggatgcacacaatataatttgaataatgtagagcaacattttaatcatctctcataagcagtttccccatttgcaacttcctgggaaatcttacattatgaaatgttcattagaactcccactttaaaaccctgctgccattttgtgagtgggcagaagaaaggctggagatgagatttgtctgtctcaaatgattcactccttcatttctggttcactccacagggagcttaaggacatgtgcgtttcatagacatgcctttcttttccttttatcaccttgtwaaatcttaagattgaacatacaattcagcctgtaatcatatcaattcccatgaaaaatattttccttattcactgcctctatttgtgcttatacatctgatcatctttttcctttactttacaattagtttctatgaacagaagaatctgaaagatttaaagactagttagcacagcagcaatttataaatcattaatttgggtactgtctatacatttaatgtgtcctttttcatagtcctatgtgaaatacatatacatatatatatattccactgtttataaacaatattcagttttatttgcataactcaatatattttat

SEQ ID NO: 83008 - DNA, 1810 bp, Homo sapiens
ttttcagattagggatgctgaattggtaagcataatgcagattaatccaaaatctgaaaaaaatcctaaatcaaaaacagttttggtcagaagctttgtggataagggatagtccaagctttttggactgaagctttttggataaggtatagcctataatacataaatacataatacaggataatcactgacctgaatgtatagcatcagtatggtacacaaatatttaaatccatgtactttgttggatattatgttatataaacttcttgtaaaaagtttagagagtaaaatcattcacattaccaaaagatttctcatatttataaaaaggattatagcagcattttaatcagtatctcctaaagtatttatttatgggttgttaaatctaaaagagaaactacagtctggagggctctaaactactgctgattacatatcagttgggaattaagagaaaatctcagatcataatatttaaataaaaacatttacatgaatgatttctaagttttcactttactagacaagaaactaaaattatatgactgtcatgttcaatattggatacttaacaacactacatccaaggaagccaggttttgctgattttaacctcgtcctgttgagtaactccatgcaggtacagtggtacgaacacatgtggacacacagacccagacctttatttcctcggggattctggtaagtgtagaggtgtcttgaccatagtcaatagcagaaatatgcacaaccacaagctctgaaattccatttgattgttgctcttagccttccactttttaggcatatgtcagtcccatttcatcccacccactctctccatttgggaggtggtagagtgagacaatactgaactataccagggctgagaataagtgtctttgaaaagggtcgaatctgtgatgctagagacagccctggaaactgtcaggagttagcccaaccaggactgtgaccagatcccaggctgtccaccacagatttgcaggctacctgcagatgtgactttttcaaatgtactcaaagacaagctgactttggctaatgcagaaattaattaattcctctttttcagtaaactttatcctcctacacttagattgtctgtaagtacatctctggagttgagctcaactagaaagaagctgtctgcatttagttaataccagcattggatgcacacaatataatttgaataatgtagagcaacattttaatcatctctcataagcagtttccccatttgcaacttcctgggaaatcttacattatgaaatgttcattagaactcccactttaaaaccctgctgccattttgtgagtgggcagaagaaaggctggagatgagatttgtctgtctcaaatgattcactccttcatttctggttcactccacagggagcttaaggacatgtgcgtttcatagacatgcctttcttttccttttatcaccttgtaaaatcttaagattgaacatacaattcagcctgtaatcatatcaattcccatgaaaaatattttccttattcactgcctctatttgtgcttatacatctgatcatctttttcctttactttacaattagtttctatgaacagaagaatctgaaagatttaaagactagttagcacagcagcaatttataaatcattaatttgggtactgtctatacatttaatgtgtyctttttcatagtcctatgtgaaatacatatacatatatatatattccactgtttataaacaatattcagttttatttgcataactcaatatattttat

SEQ ID NO: 83009 - DNA, 805 bp, Homo sapiens
aacctccaaggaatgaggctgggggagagaatagagagggaggaagagacagtgttgtcagtggcagtgctggtatccagttcatgtggccacagctgctactgatggtggaggtgatggtgatgatggtggtcacagccagcctagaaaaaggaatttggacttcttctctgaacctcagagcttttcagagacacacaaaaaactttgcaaacacacatacatacatacaaagtgccaggtataaaatacaaaaagaaacccacaaaattgcaagtattaaatgttcaattgaacatccgcaaatgtaacattatgccagctggtcaaagtcagctgcctaagtcaaatagccatatacaaattatattttctttggaaagtgcataaattgcaatgtatttattatgcagtgaggtatgacctccaaaagaaagagggtgtagagctctgtaaatgtccttaaatggctgtgactcattggcaaacactttgtaagatagtaagccccgcatcgatggaggtgggcaaggagagccgggatgactgcctctctggggtgctacagaaggggttcctgaacatgaggagcactgtgttttgtttccacccagagctctcctattttactatggagggctcatgattccttcccttcwcccctccacacacacacacagttgctggaagagacctttgaaatattctaagcccatctccacaattttctgctgaggaaactgaggatatgaaacttgcttgaggtaacacagcaagtcagattcacaccagagacacaaactca

SEQ ID NO: 83010 - DNA, 556 bp, Homo sapiens
acaacctcgcaccagtgcctcgatgccatccttcgtgatctgatcacaccaagagaggttcaggtactccaggtttcggcagccctcactgagagaacaagaaacaaaaacttatgtgcagtctctcctgtagagagttaatgaccaactctgagtttagtacatcacaagaaattccgaaggggagaccatgcctgggacctcttggagtcacctatttcttgctggatccaaygtgaccattaagaaggtttccagaatgttcatagctttgggtatttctcttgacacaaacaatgggcactcttacctgatccccttcaaggagctgtttgtaatagacacacaggaggtcagatccagatgtttcagcttggaacagaatctgctaaggctataacacgtgctgaaaaagagcagacgcactaaagatattttcaaccacgtttctctcccttctctctccccgtggctatttggtcaccaattaatcttcattacttacctgtcagtgatttttgtgcatccattgaggttcaaatgttcaatgtttcgg

SEQ ID NO: 83011 - DNA, 1233 bp, Homo sapiens
ttacaattgcaaagacatagaaccagcccaaacgcccatcaatcaatgagtggataaagaaaatgtcatatacatatacgtatacatatacatatacatatacatatacatatacatatacatatacatatacatatacatatacatatacataccatggaatactattcagccataaaaaggaacaaaataagggcattcacagcaacctggattattatcctaagtgaattaactctggaatggagaaccaaacatcgtatgttctcgctcataaatgagagctaagctataaagatgcaaaggcataaaaatgatacatcggactttggggattcaggggaaatggtgggagggggcgagggataaagattacacattgggtacagggtacactgctcaggtgatgggtgcaccraaatctgagaaatcaccactaaagaacttattcatgtaaccaaccaccacctgctcccagaaaaacctattgaaatacaaaatacattttaaaaaagaataaaatctaagtgctgttaaaacccaaaggagggagtcaaaaattccacctgaaggataaagaaagctttcacagaattgatgatttttgaacttagccttgaagaactggtttggagatggactctaggtaggcagtggaggaatcattactggtggtggtaaaagggctggagcaaaagttcagaggtgttcttctttatgaaagaagtaaaatcagaaagtaaaagaaagctgcctggactaatatcttatctcctctttcttcccattttacttgtcctgaatctattactcttattacctgtctgaggcacatatctctattccatgatctattccagcaggagaagcccaaactttatacagtctgtctaattccatgttccttcttcacctggcaaatagtaaaatcatgtacagtcctgcaccacctaacaatgtttcagacaatgatggaccacatatatgatggtggtcccataagattataagaccgtatttttactgtaacttttctatagatagaatgtttagatacacaaatacctaccattgtgttacaactgcctacagtattcagtacagtcacatgctgtacaggtttgtagcctaggagcaatggcactacaccacagagccttggtgtggagcgggctacactgtctaagaatgtataagtacactatgatgctcgcacaatgatgaaattgccta

SEQ ID NO: 83012 - DNA, 519 bp, Homo sapiens
atctcaaaaaaaaaaagaaaagaaaagaaaagaaatgtatttctcatagagtgcatgtgacagagagggagaaagagcaagacagtgatgcagcagaacttgcttttacgacaaacccactctcgcaataactaatccactcctgcaataacaatattaagccattcatgaggatagagccctcctgacctaattacctcctgtgaggccccaccttccaagactgttgcattgagattacatttccaacacatgaacttttgggggacacgttcaaaccgtagcatttgtctagcaacttcctaatgttcacaactcagatcctgcctcctagayttccctctgcactcccatgctattttttgaaacctataattccatcgctaaaaccaagtcaaagacaaccatacctttgtttcctcatctgcaggaggtgataaccgatagtattcatagaggcaaaataaattaatgccatgtaagaacagcatgtaaaccatagtatcataaaagtattca

SEQ ID NO: 83013 - DNA, 519 bp, Homo sapiens
atctcaaaaaaaaaaagaaaagaaaagaaaagaaatgtatttctcatagagtgcatgtgacagagagggagaaagagcaagacagtgatgcagcagaacttgcttttacgacaaacccactctcgcaataactaatccactcctgcaataacaatattaagccattcatgaggatagagccctcctgacctaattacctcctgtgaggccccaccttccaagactgttgcattgagattacatttccaacacatgaacttttgggggacacgttcaaaccgtagcatttgtctagcaacttcctaatgttcacaactcagatcctgcctcctagatttccctctgcaytcccatgctattttttgaaacctataattccatcgctaaaaccaagtcaaagacaaccatacctttgtttcctcatctgcaggaggtgataaccgatagtattcatagaggcaaaataaattaatgccatgtaagaacagcatgtaaaccatagtatcataaaagtattca

SEQ ID NO: 83014 - DNA, 745 bp, Homo sapiens
gggcaactgtgaatgactattccctttctataccagttccaatagcacagtggagaggggagggaaaaataaacacacacatttctaactttccagcctactgactggtctgccctttcccctggccaacatcctcaaaaatatgataatgaagtggtttgtgtgattgtgaaagagtgtgtgcgtttccctgggctggagccaagggagagaaagaaggtatccaaacacagctgcagttacctctccccgctcagtcatttcagggaaatggactcagcatatctggaaggaggtcaactgggggacaaaataaaaggctctcttggttggttggttctgcacagatcctgaaagcaggcttcaggcctatactataacaatccctctgactttggcaataaaatgaaggagaaacatcacagaaaataccaaaggaagaaccagtcaaatcccattatcacaaactcccagaaatttgtttaattattttaatattttcaatatagctgactggagtgaacattagttaacatgagtaagtgataaattggatctaaattgtcatttrtatctatagagatgttgctataaagaagtatgtccaagttagattttcacctaggcaggttgggaaaaaaaagatgaaaaaatatgtgcattctaactattttctacaaactatatacatagtagattattccattgttgacacttctgaatcatatggccatggaaattaagg

SEQ ID NO: 83015 - DNA, 1838 bp, Homo sapiens
acagaagaatactacatgaaacagaccttgaacaacaggaagaaattggagagctgcagaggattagaagagcattccaagggtagagaagagcaaggccaagagtcagaaatgggcaggaaaattcgagacttaaagacaaatctagaagatattggaagaggagccataaaattcttggcactcatccatagccatcaacagacaaaggaaaacagagtccctgtatcgcaagatgccctataatggtgtctcaaacttcatacattcatgaatttccttcaaagtcttgccatattggcctataggcatatttactctaaattttttctttaagttgacttcttttttcttcagcctcattttaggaaacaatatccatgaaatagcaggtttggtatgccagaaatagtcttctaatacatgttaaataaatatatagccaataagatgtttttaaaagttcatggtttaccaccatatctcattgtgaggaatgttgctcttcagagatagtcactttaaactgagcaccaagaaagctgtatttgttcatgtttataccacatatgacaacttagaccaaacatggagtatgaaattggggataccagatggcattgtaaaagtgtgctgaggcataagttaacttactacagtagaatgataagctaacattttttgaacaactgttatgtgcagcctgtgtactacttacataaaatagcttatgaatgcacatggagtttatagaaaatcaaataacataaccaagcaagtaagctcctaatgcaaacaccttcacattctaaaaccctgacaacctgacattaaattaaatatcatttcaaagtcattttggctcagttttgacttccaacctttgaggaaggttgttgtatcccacttaaaaggatgactatcctttaagggagaagaccacaataccacaagaaacaagaaaaaagatacaaccatcaattatcctacaacatttactaaagacgggagaggtttcacaatagtgtggcagctggttggagtcatggtgtggtttctctttatctgtttatttgctcaaggtacatgcatttatgtctcccaccagcatagtttcctgggtgactaaggaagatttttaactaggattctaattgtgttaatatacacctatcttcatggaaaactaaacgactcatcttccatgggtcacagaaagaaatgaaggaattgtttcttatactcctagttaaatggcctatggctttgggaatttgagcaaggtctgtttctattcccctgttcacccctaaaccatacaaaacccctcttcttcaagtagccatatgtgtttgctgaagtggaacagggcagaaagtaccagctgaagcatgttctgggacacttggagagaacaaccaaaatgattaaatgtttgggaaataagtttcayaacaaaagaaataaaggaatttgggtatattgtgccttaagagaagaaggctgagggcagacatgtgactatgttcccaagggacgggggtagttcttgacaggcagaagacaaggatctgcaggcatatacatgcaagtgaagcaatattgaccttaacagatgtgttatgtgagctctaattccctgtaggtgagaagcaggacagcaaacaagttaggtacacagactctggagctaaattgcagcactcctgactgcatcactacgggctcgctaagcctcagtttccttgcgtgtaaaataacaacaataatagtgcaacaataatagtgcctaccttattaaggtttttgtgaaaattagatttgttaccatatgtaaa

SEQ ID NO: 83016 - DNA, 741 bp, Homo sapiens
ggatcctttatcctggggatggcagctccttcgggcaggggttcctaagaataaaaactgtctcagggtcagaaagtaagcaagagactgtgattttttttatatatataagtgtgatgaccctcagtctcctgatggcattcatccgtgatttcttttgatcgaacagcttgagtagcaccctgttggctgcctatctagtttcccccagggatagtatattctattagccaattatataattttctcttttttcattttatttttaaaattttattatttttaattttggggtacatagtaggtgtatatatttatggggtatgtgagctgttttgatacaggcatgcaatacrtaataatcacatcatggagaatggggtatccatcccctcaagcatttttcctttgtattacaaacaatccaattatactcttttagttatttttaaatgtacaattaagttattattgactatagtcactctattgtactatcaaatagtaggtcttattcattctttctatttttttttgtatacattaatcatccctttctcctccccaccccctctactatccttcccagcctctggtaaccattcctctactatctccacgagttttattgttttgacttttagcacccacaaataagtgaggacgtgtgatgtttgtcttactgtgcctggcttatttcacttaacataatgatctccagttccatcctgttgttgcaaa

SEQ ID NO: 83017 - DNA, 1071 bp, Homo sapiens
ctacatttataggaacaaaataatgtattttctcttttgtagacatggctgcccgaaagcaattcagtattttgcatccttgttcagtcagtaactatgacttattagatgcaggtgagttttttatacatttggaagaggatgtgtcttatacacttgcaagagcattgatgtctctggatctgagtgcccttgtctgcaaaaagaaagagctgaactccaagtaccttcagcactgaaagtctacagctggcaatggctgtaccacaaagattaaaacaaggcaattcagtaagggtaaacaataaattaaaaaaatcactgaaattgaattaacttggtagacaaaagcaacccttagaccaccaacagtcattttgcaaatattaattttttaactaaggaacaattacatacgccttgtctctttaaattagattggaagttccttgaggttaaaaccaatgtttttaattaagaataaaatttccctaggacagatcatactgccagataaayggcctagcaatagaatgtgttcgtagatacattaaaaagaacccaggtcttagagctctcaggccagagatttttctttccattacaattttctgtcatcaaggttcaatgtaggaagcttctaggagagacaataacaattgggaggaagaaatccaagagcattgaaatagacatgagctacacaaggatactaaagtcctggtattgactcttttttaccagcaatatttctagaagaaaatagccccctccatagaagtctctacagaacacgtggacagcacttagtgatgaagcctgggttggcagcccacattgcctgatgtttgtattgaaacccttccctggcagagcctggtgcccagtggtgccgactgggctggctcagtgctgagagacagcttcagggatggacagttgcactctcaggaggttgtatgcataatctcagtttgcaattctattttgtgagaacaaaagggaaacagtgggcactggcttggctgcttttccagatgcttttgaccaggcaggggatgtaaaaaagaa

SEQ ID NO: 83018 - DNA, 1605 bp, Homo sapiens
tctttctttctttctttctttctttccttctctttctttctttcatttttttggagacagagtttcgctcttctcacccagtttggagtgcaatggtgcaatctcggctcactgcaacctccaccttctgggttcaagcgattctcctgcctcagcctcctgagtagctgggaccagagatgcacaccaccacacccagctaatttaggtatttttagtagagacggggtttcactatgttggccaggctggtggtctcaaacccccgaactcaggtgatccacctgccttgggctcccaatgtgctgggattacaggcatgagccaccatgcctggccgatccccctgctctttctactgagtactatcttagctttatggctgttccagctagcccccatatcatagtcatgttcactattagatgacctgctgggataattttgcacattctcctgcccagcaacaccctggttggttgctgcaatgaagacaatggctatgcatagaagaattttaaaataccaatagaggatctctaactctctggcactctactatttgtacatgagggggctgttattgtagaaaaggaagaaacattttcctggttgggattttcatactggcaaattggctattctgatttaaattcatattgttactaattggtgttagaacttttgttctggactgtgcttatgctaagtagagattttccctccttgtttgattatggattagtccacacatttttaccttatgaaaggaagaaacagcttgtgccgcctcgggaggaaatatgtcatctaataattaggctctgaggcactggcatcttgaatactgacctgtgggcaggccgtggasagaatcatggaaaaagctgcattatccagggctttttcctcagatagatttaaaaaacaaatgtctttagagcaaagcactgaagggcgagaagcagcaaacaggcagattattaaagcatttgtcatgaagttacaggtgggctcaggaagggtcccagtcctgcaggccgggctgccttgctgaaaatatcttgtaaattatgagttgttcccccaaagaaatcactaggcaggaaagggcaaagttactccctagcaactctggttgcaatagtttctgaactatagtttcagaaatctgtcaaggcaagggtcagttacacatgggaggctgaatttttgtattggaagactaggtgtttaggattacagcagtgatcattcctggagcatgtgtatttacacttctgtttcaaagaatgagaaatacacacttataatgtcggtgctttttctcatctaaaaaaatgatgaagtatgtcctcttgcatttacagattcactgtttatctttagtctcattaacttatgctgtagttcaattcattttgtttctattcatttcatatagaaatgcactgaaattttgcttcaatctttgtacagtatttggccaaactctctatttggctttagttttggccatagcctttaaaggctgagtaaacaaatgtcccacttctgcgttattgatggtatctctgaacctgagatgatcaatgacagcctgat

SEQ ID NO: 83019 - DNA, 1047 bp, Homo sapiens
gtgaagagctagaggagaagagatgaaaaatacaggcctacaaggtccataggaaagaaacaatgtgaaaggtgctaacattcagagtactggggctttggggacacagaagtgtctaaccagccaggaagtggaggtgacagtggtagtctgggagggaaggtcattgcaaaggcctcttagagaaggagatgctcatgctgagtattgaagaatgaatagaagtgagcttcacagagaagggatagccagcaaggtggacatcaattgcgaagacatagtcgtatccaagttgggaatatctggagtataatgtggctgtgaagtgtctctggcctatagaaagcacatagccatgctaccagtctcttcagggtcaagaaaagctattattctggcctagtgattctcagtcccagcacagattagaatcatgtgagatattttaaatactaacaaagtccaggcctcacccccagagattyggatttaatgagacttgagcatctctatttttaacaagctcccatgtgattggagggggcgggtctcagagtcacatttggagtctcagtaaacagatagctggccttggccactggcaacatggattctcctggttgggctggagcaagctggggctggagtttgcaggttgcctgccccattcctcttcttccttcctgcgtaggcatgtggccactttattgccttcagagggaagaaactcaggctgcagagttttcaggttggctgttcacctggtacaaaggtagttgagtgatctctggccactcccaggtgctcaagctgctgctccagcatccctgcattcctgccttgctgtgagcatttctccaagcacaagcataccctcgtggggagagcagggggtcaggattattggtagtagagggaagccttgtggtacacaccctagatgtatccccaaggaatacatgtcagtacttgtcaaaagcctagattcatgaaatttatcatagtacgtaatagaatttctcccattaaacgcagtgaaatgaacta

SEQ ID NO: 83020 - DNA, 534 bp, Homo sapiens
gtttagatgcagcaaacacattacttacccttggtaagcctccctcccaacagggataataataagcttctcgaacctggtacagaaggtgcatattaatagaataagtaaaatatcactgacacctgtccccacattcttatgccactccctaggaactttcatctaattataactagaagttctcagatggtgtttcatgagtgcttacaaatgaatcaccattgatgctaacagtaggcttcctcttctgatccagacgccttcatggtggatggtctcaggaagtcactgagggcagtacctcatcactaccttgattacagatgctcccctaaaacaaggctgtctcctaatgagactacatagcagcaatctctcaggatgctgcagaggcacggtattcggtttatcattgggagtaatgccccctccacccttccacttgggtcacagagacamatagttttttctgcttttgctagcaatttctctctctagaggacttgcatattgatccttagagccaggaga

SEQ ID NO: 83021 - DNA, 986 bp, Homo sapiens
atcagtggcccgtctcacaagcagaggtgtatatcgaaaactcaagtccttaaggaaaaccttgtggaagaactccctttcactgaaagtaatagatccctccaggctgccccataatggactatgacttctgtgaggaaaggggcataaagaaaggacttggtctccgttttacgcagagcagagcctcataaggaattcatactgcacaagctgagtaatttggttgcagtgtcctgtaaatttgggaaggtataaccaaacagttattacatgtgattgcagggctttaaggagctttaatggtctctgagcaccctgtgcaaatgtatcttgtagaattagtggcaatagaaaaaccaggacgctcggtgacaaactgagctccttcgaatgcacttgaatatgtatgtaagctgctgaagattctgtaatatgaaacaaaatggctctttgcatgcacttaaagaacaacaggaaaactggctgagaagactggaaaagctataggatttttaaaaatggaaagtgaattttattcaagaagatcatttatgattagtcagggaggagtagatgacaacgtttagtgctgaccaggtgccaactacactacacactcacttttggaaaccctcccactacctcattctacagagaaggaaacagaccccagaaakgttaagaggtgcccaaactcatagcaacttaggaagcaacagggctgaaactcagccatggctctggctgaatgtcaagccttgctcctccgagtgcttgctccaaactgtctcaggtgaagaagggatttattgaagagccaggctggaatcctgaatgtcagtgggctgagtttgagaagccagaaatacgttcagactgaacaagagtaccagaaaaacgctgcctcaaagatgaattcgtgatataaattctatgaggtatgactataaactgaagtcaagagactgacttctcgagctgtg

SEQ ID NO: 83022 - DNA, 598 bp, Homo sapiens
gatgtgatgtgtttagcatatgcttgtcatggartaaatgctcaatgaattttaagtgagaaagaaaagactgcttcaaggttagttagaattgtgtgtggctgtgagtaactgaagacctggcaaacttgtcaggaattgtatttgattcataaaacaagaggcttgtgatcggatgctcaggattacatccgcaagaacatccccagggacccaggccccttctatttgcctgctgtaccattctccattctcatagtgtgactctcttactcatggtgtcagaatggctgctgttgcaccttcaagcattctgtccatgatccaggcaatagaaagtgggtgtgacaaacccctttttccacagaagctttgtctttctgtcctagaagacactctccctagatttgtgtctcctcattggtcataaccacccctagctgcaaaagcctctgggaaggtgaaggtgttggccacatgggctgagtgtgtctgagttgatatttgaacttggatcttattaaggccaaagcctcaggccttactacaatgttacccttccccttactgtctctggtgtggcccagttgtacacagg

SEQ ID NO: 83023 - DNA, 644 bp, Homo sapiens
aagtgtcatctattcccatcctgtgcccttactccatggaactttgcctgctgctctgcaaggggacactcttgtcacacaggtgcgtccacagtcagacaacccaataggcatcagtgacattgaatgaatcagtaaatgagctcattctctgggtggactttgcacatccatatgagggatgctcctctgaaagagcattttattttattttatttttttgagacagggtctcactctgtcactcaggctggagtgcagtggtgcgatcacagctcactgcagccttgacttccccaggctcgtgatcctcccacctcagcctccctaatagctgggaccacaggcatgcaccaccacacgcagataatttttatattttttgtagaggcagggtctctctatgttgcccaggctggccttgaactcatggcaccttggcagatcacttgcaatcccaaagtgctgagattacaggtgtgagygactgcacctggcctgaaagaacattttaacaggggacttctggagacaatttcctcatccaaggatgactccactagggaaggtcctagttcagcaagtgcttaggtgggtgatattttgagaagtttctaagggcctctcaaattctcctatctcct

SEQ ID NO: 83024 - DNA, 535 bp, Homo sapiens
aaaatgttctaaaattgattgtgatgacagttacacaattctgtgaatacactaaaaacttatttaattgtacactataaatggatgatttacatggtgtatgcattatgtttcaataaaaaggaagggagagaaagcagaattggtcagagaaaaaagtcaaaatgacaatgcaggcccaacgaagccagccaaccaggcagaactgaaacagccaagcctttatacccctgtctcattcagttactgcatgtcaactgccccggaagggcatgaccttgggggagggagctccctgcagctgtcaaaggggctaacagctggaggccatctgctaaccacactccccatggctgggcagcaaatcctcccttaaagggggatctgagaggcrcatctccatgtctacctcaccaattctaaaacaaaatttaattaattttgatagatatgaccacactacactattgtccctgttatcattgtcattcaagaattcctcacccaccagtaacatttttatatctggcagatg

SEQ ID NO: 83025 - DNA, 606 bp, Homo sapiens
tcagtataggccagctgttgagttgaaatattttatatattcattatgaagaccactaattctttaactacattcctgcaagcctttaccttaatagacaaagagttaccagaaatgtctctcatatacaagactaaactctaaaccctaagatttttagaaccatgctggattttagtaactgctctacagtcaaacatctatttctagctactttaccagcaagtgcttataacacatatcctgctaaaaatcatgccaaactgagacacagagagtactgttctataacgtgttctatgtgtcagccttccagctatacaatgaaagcattcttgtccaccccaaaaccaagcaactactattctaacactgcacagacattgccttagaccagcacttctctaactttgtggytgcagaacaatttacactcttaaaattgaggactcccaaagagctttagcacatgtgggttagtgatatttaccgtattaaattaaaactgagaaaaagttaaaatattatttatacacaataaaaccattacatgttaacataaataacattttttaaagggcaaatatctattttccaaaacaaaac

SEQ ID NO: 83026 - DNA, 657 bp, Homo sapiens
cttaacatagggttgtcagattttcttattttgccaaaattaaaaactactaatattattaagaagtattaaaagaaaatgttcccaccaaaaaaagaaaaagtgcctaatttcaaactaaaggaaagtccttgtggagcaggggagcgttgacaacaatacattcctgtgtgatgcaggctacatcttcctgctcctygctttccctagggacccatgaaaatatccgtgatgggcactggctgccggatgggtgtttggaatccactcatctactctccaagctctggagtgattattttcccatttaaaacaaaaaccaaaaaccttgctacagtattaagtttgaattagggtctgaacgaagttattgtttgctcagacccctcctccgctcttaaacctaaacctccactgccttcatgtaaatgagacaccgtgggggaacagtcctcccttcgggcagccaggcaaccacttggctcacaagagcaatcaagtatctccggcttgaaagttaatagagcactattatttcctaaaagaaaggagaaaatccgcatcccaaacaagtgcatccttcctcgagggcctccaaactaccacgtccaatcatctcccaactctgaaaagttagagcaggtaaccgagggatcc

SEQ ID NO: 83027 - DNA, 1097 bp, Homo sapiens
actgtactatatacagtaatactagraaaattatttaactgaaaactttatgaaggaccaccccatgaaatgagaatacatatattttactacacagataatccgagcaattgtaaataatttatagcagagagttgttatcaaattttagtgtttcttcactaaagtaataacccttaacaagaaaatttaagagaatagtgattggttctgtggggatccctttctttcttcttccattgttctaaactgtaatcagccttttctctgtgtgtgctgcaatttcctaccatgttgttcggagtacaaaggtccttactattccttgcattcagatttttgtgcctaatagtgctgtttgggtttatttgtaagcatgaagcctttatcagcttgcttattaaagagaagattagcttccagattctattttcctatatgaatttccacaaatgaaagcatttgcatatttttttattgtaatatttcactggaatgatgattttgaattttttgaatataataacagttacataagggaaagtcagaagtgaatgataaattagaaaatatgaacatgtgtttttaattcctcttccttaattaatctttattaataaatatgtgatcagtatctcatctgcttatacccccaggcattttaactaatcaagttagtattttatctctctccaattttatctaaggctaagatctctgttcagaaaagtgtagctctttcccaaacattttgcaggattttggggtctagaaaatgtgagtacctctacctcccactaatggtgtgaatttggggtatttctaaggtgaaggatttagaggacaatctttataaactttgttggggggcagtttctatatgttaattatagtgcttgactacccagaacatttcactcatactttttttctgagagagtttttccaaatgtgaagttagagggaaagtagctcataggatcatcctcacttctgtcaccaattgcaagtttgggatgcagggagttatcaaaccatacttggtttcagtaattcctttgaaagtcccacagaactcattgaaagctattatactc

SEQ ID NO: 83028 - DNA, 728 bp, Homo sapiens
ggcgggctgcaggtcccgagccctgcccctcggggaggcagctaaagccgggtgagaaatcgagtgcagcgccagtgggccagcactgctgggggccccagcgcaccctccgcagctgctggcctggcaggcagggccggcctgtcgctccgagtgcagagcccgccaagcccacgcccaccgggaactctagctggcctgcaagtgccgcgcgcagccccagttccaggcagtgcctctccctccacacctccccgcaagccgagggagccggctccggcctcggccagcccagagaaggcctcccacagtgcagcggcgggctgaagggctcctcaagcgcggccagagtggacgccgggaggccgaggaggctccgagagcgagcaagggctgtagagggctgccagcacgctgtcacctctcaataggaagcgttcttttcctcaaagagcttacacaattgtgattacagagtttacactgtgagtacaaattttgcacaatataaaaattaccatagtgcacatcacattgaatgttatggaagtagttaccacagataaataaaaagagaaaaatcccatatcccaggctggggygttggtagacaaaatctttcctaattttttgtatgatagatgtcaaaagtgttcctagtaagcgtgtccagggtacctaccttctctttgggagcctggggaaggctacattattttatataacca

SEQ ID NO: 83029 - DNA, 587 bp, Homo sapiens
ttgttcagatggatggagggctgtcaggcttggtttgcttccgggtctctctagccttcttattgtgacagccaaaaccatactcatggtccttcctgctggattctggatggctcacctccatggaggtcctctcattgctctggttccaatcttgtgctccagttctggctgctaggcctttgcctcacttcctgggtcttctctctcttcctcatggaaatctgctcattccctagtctctctagaatgggccctgccttagacccaaaaccctttccccacctatttgggggctggcttcctgacttagtggttgtgaccctgagacatgacggatgatagatctttctgatgaaaactgtcttccccamcccacacacacactgagcttacaagggcaccttctacttcccaatttgatcttgtacaattgggaggttctttttggttaataaaagcagccaccattgtagtaggtgtttagggccagctcctcctcacagcctcactgcaggttaccataaaagcaagtctcagactgaattcttccccccaaaacagacatttattagcaagcaggctca

SEQ ID NO: 83030 - DNA, 549 bp, Homo sapiens
aaacatgagatgagtaactctgagctggaaacccttaaagaataaactacagctgtccaagggaagggctccttgccaaataactgtcagaatttagaatgcaatcctatactcatcaccattgacaatccagatgttctaaaccaagaaccaaaagtagcatctcgggtatatgggttaggggcagacatcacaaggaaagacccccctasggcaatttgttctcaaaccaatcaagaactcaacctcccatttgcctgggactactccaaccccaaaccctaataaacactttagtccaccaaataataaccctaaaagagtaaaaataattgaggtaaaggatttaaggcaaaccttaaaaattaaaacagggtacagggatgtgaatgcctgggtggaatgggtcaaattttgtgtacaagccctcaacaagagtaactgctacacgtgtgctgtaggacaacctcaggcacaggtggttccatttcccccaggatgggataccgatcttgaaggaatgcattgcatgttggctctataccaaaa

SEQ ID NO: 83031 - DNA, 549 bp, Homo sapiens
aaacatgagatgagtaactctgagctggaaacccttaaagaataaactacagctgtccaagggaagggctccttgccaaataactgtcagaatttagaatgcaatcctatactcatcaccattgacaatccagatgttctaaaccaagaaccaaaagtagcatctcgggtatatgggttaggggcagacatcacaaggaaagacccccctacggcaatttgttctcaaacyaatcaagaactcaacctcccatttgcctgggactactccaaccccaaaccctaataaacactttagtccaccaaataataaccctaaaagagtaaaaataattgaggtaaaggatttaaggcaaaccttaaaaattaaaacagggtacagggatgtgaatgcctgggtggaatgggtcaaattttgtgtacaagccctcaacaagagtaactgctacacgtgtgctgtaggacaacctcaggcacaggtggttccatttcccccaggatgggataccgatcttgaaggaatgcattgcatgttggctctataccaaaa

SEQ ID NO: 83032 - DNA, 549 bp, Homo sapiens
aaacatgagatgagtaactctgagctggaaacccttaaagaataaactacagctgtccaagggaagggctccttgccaaataactgtcagaatttagaatgcaatcctatactcatcaccattgacaatccagatgttctaaaccaagaaccaaaagtagcatctcgggtatatgggttaggggcagacatcacaaggaaagacccccctacggcaatttgttctcaaaccaatcaagaactcaacctcccatttgcctgggactactccaaccccaaaccctaataaacactttagtccaccaaataataaccctaaaagagtaaaaataattgaggtaaaggatttaaggcaaaccttaaaaattaaaacagggtacagggatgtgaatgcctgggtggaatgggtcaaattttgtgtacaagccctcaacaagagtaactgctacacrtgtgctgtaggacaacctcaggcacaggtggttccatttcccccaggatgggataccgatcttgaaggaatgcattgcatgttggctctataccaaaa

SEQ ID NO: 83033 - DNA, 529 bp, Homo sapiens
catcagggagtgtacagagacgggctttgagagctcctccatgcagccccccatctctgggtgggaacaggagacagtcacaaagagaaggctgcagccccaccaggaagttagagattgtatctctctcctcctctttctccccactgcccaaccctaaggaatcaagctggggcgggggggcaggcagtaaagacaatgttcccttcaagggaaaaatctggcaggtgcttaaggcagaggatgaaacaagggctaaattgtgtaggagactggagctttaacctgcgctgctctggactggacctgtcccttctatattgggaagtgactggaaggccacaggagctgaccaaatatcatcaaagaatgggaaagaaaagctcaacacaggacaatggacagcaatgrttagagaaacaaaaacatttatggccatgcccctccactgtcagataatttaatcaatctgctacatatttttcttcctttataaatccataggttggcagtgcgtggtagctcacat

SEQ ID NO: 83034 - DNA, 662 bp, Homo sapiens
tgtccagatgaatcaggtctgctgcaatgtaactttacagtgtcccctcacccagactctagccatgtgacttgctttggctaatgaaatattaatggacatgatgcaaacagaggcrtgaataagcaattttgcatttctgcttgtcctcttcttgcactcttccgtcatcatgagaacatgcctgggtgagaatgctgtaggatgagagacttgaagcagagcctagctattccagtcatccagctgagggcatcctagaccagccaatctttagacatgtggccgagtctagcctagatcagcagagccacctaggcacctacctcagaggtatgactggtaaacacttattgttgcatgccattaaggttttgtggttgcttattatgcagcattattgtggcgatagataactaatacaaaaatatgaaacccaagaatgaatggagtacttaaatcactgaaaggagtacaagcagtatcaattcccattggttatcttatatatatcatatatatatatatatatatatatatatatatatatagtctgtagacttctctgaaacagtttaaaaacagatcctattgtgtgatcaataccaatagaaggactattgaagaatcttgaggcatattctgatgtgggtcctattggc

SEQ ID NO: 83035 - DNA, 1072 bp, Homo sapiens
aaaactactggagtcgtcaattcatttctacaagcacttctgtttgggtgcaatcttactctgacggcttaaattggtctaaattgttctatactgcacatgctgaaaacactaatgtattttagtaatctgccttttggggggcaaaattaacaataatttctggctaagccaaaaacagtacaccagcagatgtatttgcctttcaaaaacacaaggtcacctaggtgagatttttggtgtgtctaatgtctaaaagatgtaaagtgaaaatatgtattggtttttcagagacatttggcttaacatactgtattcaatttctcaaaaataatacgaattttatcagaacggaatacctgttgtagaactctgtgtccttactagaacccacaaactaatattttattgcatccaaaatactgaaaaatcatgttttgcagtctgtctgtacataggaaataaaaaagcttttcttcaattcaacataccccaggtaagttacaaggaaaacaaacaaacaaaataaaccacagagtattaagaagggaaaaaagccaatgcgtaaaatgtcttagataacagatcccaaaaatcccacaatcatatttatattcccagaaaaataagttttgctcttaaaaataagtgaggagatacacctaatgttaaatgatgagttaatgggtgcagcacaccaacatggcatatgtgtacatatgtaacaaacctgcacgttatacacatgttccccaaaacttaaagtataataaaaaaaattaaaaaaataaataaaataatgttccacaaaaaaaaaawaaaaaaataagtaaggaaaggctggctcaactgcaacagaaattacaataacaaaacaacaatagttaacatgtatcaaacactgagtgcttatttcaggcaatcctcacagtaatcccatgaggtaaatattacagtcctccttccttttctttaaaattattttttattggacaaattcctatatctgcaaaaatatatttttaaggcaggtcagaacaagaaagtactctctcagagcgtgtcgtagcag

SEQ ID NO: 83036 - DNA, 718 bp, Homo sapiens
ggatcctgggaataagaagtacaagaagatgtaatctttgccttctgggagcttatatctagtggaaataatcaaatgatgtgtttttgagtcttgtactttcagacttttgactggtttgggtaggtcagccttttcctagggttgctaaatttagcaaacaaaagtaggggacacccagttcaatttgaatttctgataaacaatatttcacartgctaccttttccaactaatggaaaatgagggtgggggtggattactgtataaccgtgaggttaatatccccaaatcattcccattttccaagttcaaatatagagacactggtggagaaggaagactcaaccatgcctccactaaaataagaaacagcgacaataccaaatgccagcaaacatgcagaacaactgggtttacattcattgctggtaagaatgtaaaatgtactctgtgaaatacatgagcagtttcttgagaaattaaacatatacttaccctgtgactcagaaattggactcctgggcatttaccccagaaaaatgaaaatgatgttcacacaaaagcctgtacacaaatgttccaaatgttccaagcagatttatttgcaatagccaagaactgaaaatgacccagatgtccttcaatgggcaaatcgttaaacaaaacgtggtacatccataccacggaatactactcagcaacaaaagggagtgggt

SEQ ID NO: 83037 - DNA, 1304 bp, Homo sapiens
tcctttcccagcatcccacgagtctctttgcctctcttgttttgcatctttgtttcctgcatcccatgtcttcctctttcttggcttacctcctggttttagtggagtaatttaaccaatagcttgttaaaagtgactacaggaggggtaaaccatgttgaaatgttatatgcctgaaattgccttcattctaccctcatatttgattgatagtttggcttgagtatagaattaaaagaaataattttctgtcagattttgaaggctttgctcaatggtgctctagcctcgggtattgtagtaaagaagtccacagccattctgattcttgattacttggtataaaacttgttttatttttttctccctttctctctggaaacttggaggatattttccccagtgttctgaagctttacaatgaygtgccttggtttgtcttaacctggttttctaataacagagcccgaggctggaggcttatgtgctgttatttgggagtacaatctcaggaaacacccaaagagaagcagggaaacaggagagatgatatggcgatgtattatcaagctggctgctgctacaggcaattgattgtgtgatcctatggacctatccaagaagctgcataaattgaattcaggaccacttgaatttacccactgtcttcagtctcccaatgatcaaagctttgctccactcgacataagtttccctatacttccgggttgtgtacccctcagtatcacacacctgatagtcataggagagcaggtgagaggcacagcactgccaagtggtgaagctcaggataggtggccccaagcagccattgctattgaagcttttgcttttaatggctgcagcaacaaactgtctccatgaccatggaaacaggacatactgttgctagtgggtgatctcatcaaaatacaagtgtgtggggcaattgcaaatatctgaattccataccactaaggtctcactttttagccattgtgttggatacttggggggcccttgcaatatttcaatgttcagcatgtaaatgttctcttaaaactcctgttttcagtatagtccccactgccctcaactgtcccaggtgtctcccagcatgtagcttccctagctttctctctccatagaacaaactttcagtcttctgctgggtgcaggaggggcagctgcctgacttcacagtatggagatctgggtgtctagcttcttcttaagtcgactttcagccaatccttttgttttttatcctatcagcaccagtcctttacctgttgggggctccc

SEQ ID NO: 83038 - DNA, 1568 bp, Homo sapiens
gttcaagcgattcttgtgcctcagcctcccgtgtagctgggattacaggtgcctgccaccacgcccagctaattttgtttttgtatttttagtagaggctgggtttcaccatgttggccaggcctgtcttgagctcctgacctcaagtgatctgccagcctcagcctcccaaagtgttgtgattacagatgtgagccaccacgcctggctcaacttttaactttagaactgatataaacatgcctatttttttgggactgactgtagcatacccattcaaagtccaggctttggaatcagacagacgtgggctgaactcagggtttcaccccttgcttgttgtgtgaatgagacatttcactgctttcagcctcaattccctcatctgtaaagtggaaggtgtaaggtcgcctatctgataggtttgccatggkgatatgaagcacacttagtgttggtgccatgagcagaatgagtgttcatttcatatttgttaatgttatttaggtccgaggatgggtatggggtgctttggactctctttttctccctgcttccgccttataaagacatcttgctggtttctgcccattgagagaatccagctccacgtggggggcctgacagatgtcctaatatctccatccaattttttactctgaatggagtctgtgatgtatcacttcaacctgcactttctataaaatgctctccaggcttctggtaggatccagtgccagtgggaagtgtgcatgttcccagcctagatgtcacatgctcccacccaccctggaagcacttgggtatcccctggatgggtaagtctgtgtgtcattgtgccattcctgtctcagaaccaatgctgggcatctctacttgcaggtgctggaaagctttttcatgccagcatacatgcagcacacttctcattttggattcctttatcccacggtgacctttaaactggctgcctgggggcacagaagtactagcacaccattcacttatttattcattcattcattcattcattcattcactcaacaaatatattgttctagtccttaaggcacaactctgagcaagacaggtaaggtctttactctcaagaagctagcatttggtggggagaaacaaaggagaaataactactgtgcacatgtgaggcaattgcagatggtggtctgcagaattgggattgagactgcctgggggtggccactttagactgggtccacaaggaaaggttctctgagctgagcatgagtatttgttcaagaaggctgagttgcatcccaaggtgacacagcttttaagcccacactgagcagctctgaggtcctaggggctgttcgagaacctgggatatagcactgactatgagacaaaaatccctgtcttcatggagcttacatgatgggggcagattcacattcattcatttgttcattaattcattagttcattcagctatttgagagcctactatgtgccaagcactttctaggcactggagaagtaacagtgaatgcaaaggagcaagcatccctgcccacacagagtgcatt

SEQ ID NO: 83039 - DNA, 1568 bp, Homo sapiens
gttcaagcgattcttgtgcctcagcctcccgtgtagctgggattacaggtgcctgccaccacgcccagctaattttgtttttgtatttttagtagaggctgggtttcaccatgttggccaggcctgtcttgagctcctgacctcaagtgatctgccagcctcagcctcccaaagtgttgtgattacagatgtgagccaccacgcctggctcaacttttaactttagaactgatataaacatgcctatttttttgggactgactgtagcatacccattcaaagtccaggctttggaatcagacagacgtgggctgaactcagggtttcaccccttgcttgttgtgtgaatgagacatttcactgctttcagcctcaattccctcatctgtaaagtggaaggtgtaaggtcgcctatctgataggtttgccatggtgatatgaagcacacttagtgttggtgccatgagyagaatgagtgttcatttcatatttgttaatgttatttaggtccgaggatgggtatggggtgctttggactctctttttctccctgcttccgccttataaagacatcttgctggtttctgcccattgagagaatccagctccacgtggggggcctgacagatgtcctaatatctccatccaattttttactctgaatggagtctgtgatgtatcacttcaacctgcactttctataaaatgctctccaggcttctggtaggatccagtgccagtgggaagtgtgcatgttcccagcctagatgtcacatgctcccacccaccctggaagcacttgggtatcccctggatgggtaagtctgtgtgtcattgtgccattcctgtctcagaaccaatgctgggcatctctacttgcaggtgctggaaagctttttcatgccagcatacatgcagcacacttctcattttggattcctttatcccacggtgacctttaaactggctgcctgggggcacagaagtactagcacaccattcacttatttattcattcattcattcattcattcattcactcaacaaatatattgttctagtccttaaggcacaactctgagcaagacaggtaaggtctttactctcaagaagctagcatttggtggggagaaacaaaggagaaataactactgtgcacatgtgaggcaattgcagatggtggtctgcagaattgggattgagactgcctgggggtggccactttagactgggtccacaaggaaaggttctctgagctgagcatgagtatttgttcaagaaggctgagttgcatcccaaggtgacacagcttttaagcccacactgagcagctctgaggtcctaggggctgttcgagaacctgggatatagcactgactatgagacaaaaatccctgtcttcatggagcttacatgatgggggcagattcacattcattcatttgttcattaattcattagttcattcagctatttgagagcctactatgtgccaagcactttctaggcactggagaagtaacagtgaatgcaaaggagcaagcatccctgcccacacagagtgcatt

SEQ ID NO: 83040 - DNA, 979 bp, Homo sapiens
tgcatccttctcggggcagcacctggctctcccaggtgagagaggactccattttcacaggcaggtgtgggagcttcagcacccayctctgggcccagaatgacccactggagaccttacagctctcctgtcacccccagttcctgccccgtctgcaaccttggaggagaatggagctgaagggcctgccctctgtagggtgagaaagggaggctaaagcctggtgcccactgccctggccgctccgcattacaggagctgcgcccttcctttcctggcacagggtccacagccccgaaaccccgctgtgtgggagctgggcacagggcagcaggactaatccctggaacagctcggggaggattatcccagccactgtcagcagcggtgcagccggctcattcccagataggggaggccagagccaggggcctgccgcaagttggaagaggctggggaaggggaggccagcagaggtgtcctggctgtgggtggctctgagggggctctcaggggtggggctgaatctcagtggcaggattatgtaaatcaaaccaattctaggcacagatttaaagcttggaaaaaaaaaaaaaaacccagcctggcggaaagaatttaaattataaaaacttagaagtatgaaatgtgaaatcatcccgtcggtgcttatttaacaacgaaatcatcccgacacaatgagccatatgtgaaaagtcctcctcccccgacacatcccccaacaggcactcctcaaacctctaccacccaagtgctggcatcctccctgtcctgcttcacctgagacaccccttgtctcataagacatgcaactacgggaggggtgacaggaagacaagacacgatttcctcaggcccagtttggtgtggggagaaagcctcctgatcctgaaagcaagaatttgaccagagcagaagtaatcagtatgcagattgactctgtggtatgttaatgttt

SEQ ID NO: 83041 - DNA, 811 bp, Homo sapiens
aacaagattagtttaaaaagttccctatgacttgaagatgttagattaaatgaaaaacttaaataatgtaacctagctcttaagcattaatactggagtttttgtcattgacatcagatgtctttaatacaatggtaattaaggaaaggagtggtaaatattttgtgggctactgaaggaaattatatagacaaattctttattctgtgaaatactggaataacaataggatgtatttgtatagatatgttattttgaatttttttccttcatgttattaaaaggtatctttttaaactgtctttcattatggctttatgtatgtgacattcacagaagttagaattctagtgattgtgcttatatatatgacattgttaatgttacttgtcataaaccagcagcattataccatgaagtatgccaaaagctgtaaatggctggtgggggaagataagtaagtaggaagaacagattcccagtaaaataaaggaataatacattacatttgctttatttactatccgttgtgagcttctgctcaagtaatttgactagcagtaaaaattacaatgcccaaggtaacttagtaaatttaggtcaatatccaaaaacgggggggagcatggtaacagatctcttaagtagtgatgataatgagccatcaggtaacagactagtagttttcagagtyttgattattttgagttaggtttccagataacagtgaagccgtgggaaagggtccattctccagaagaaaaaacagctgtcaggtaaccagctaggtagttggggcttagagtaggag

SEQ ID NO: 83042 - DNA, 751 bp, Homo sapiens
  misc_feature (1)...(751): n = A,T,C or G
tttgtcctggcggggaggagggattgaagaaagtacttcttaattagaaagtttaggaaaagatttgtcattaaaccaaattttgaattatttatatattttattcaagccactttgcattagttttcatgatagtgcacagaattanaatttgtaggaaacattttcttatataacttttagggtttatatttgaaataatatcttttaaaatttattttaccttttttctttctatgtcgtctagtctggggtttttttgcactttaatgaaattacagacttccgtgttttaatctataccactttctactttttgtttctatcacaatgaggattagagttttcatatctgatgtatatacatgggtttcatttggagcagagattcttttttttttttttttttttttttttttaaattatatttttttattgataattcttgggtgtttctcacagagggggatttggcagggtcatgggacaatagtggagggaaggtcagcagataaacaagtgaacaaaggtctctggttttcctaggcagaggaccctgcggccttccgcaggtgtttgtgtccctgattacttgagattagggattggtgatgactcttaacgagcatgctgycttcaagcatctgtttaacaaagcacatcttgcaccgcccttaatccatttaaccctgagtggacacagcacatgtttcagagagcacagggttgggggtaaggtcacagatcaaca

SEQ ID NO: 83043 - DNA, 545 bp, Homo sapiens
ttttcggcctttagactccatgaagcaaccatatccttctgataaatgttctttttgartaggtgtctcttgtaagatgtcaagtctggaatcttactttcaacctttctttcccttctggcttaaaagcttttaaactgatcgttggtacaagacataatctggaatagtttattaggaaaatttttgtcagaaatgtttatgggtatatttacaataaaatgaacacatcagcctctaacttactagctatatttagttttcgcatttcaacaatgaaggttattctacctctagggactgtgatgcaagggttacaaataatatatgtaaaaagaacctatggtgtctggagagtaggagctactcaatgataactattatcatcatcattgtggcagtcctgaaggtcctctgctcacatttcttcaaacaaagaaccagctgttccagtgcaaggagtgtagttagctgacagcccccaagcacaacatctttagaatatgcttcagctttcatgctgaggccaccatcttttcaagcag

SEQ ID NO: 83044 - DNA, 1119 bp, Homo sapiens
ctcagggggttgaaacaggagaacagcttgagcccagaagttcaaggctgtagtgagctatgatcacagcactgaactctaacctgggtgacagaatgagaccccatttcttaaaaaaaaaaaaaaaagtaaatttaaactgttagttaaaagtatattctttattaatgaaatgtattatgatttatgtagttattctgcttcaatacttgcttttttctttgttttttcaggggttgaagggcaagttttctcagcaagtaaaatctcacaagctgcattatctataaataaaaacatagttcagtattctacttatttcaactgtcattaactatgagtccaaaggacaagagaattcaaatttgacaaaacaaaataatatttgtaaaacccctgattttaatgactgcacctttgtcaataattaaacaagaaaaattaatgtatgttgaataataaaaacatccttatcttaagagctccaggtttcacagaagcaaataaaaaatatgtaaaatattttcttttcagttagtagggaaagtcgcatgtgattatacttcttcattcattatcctaccatttccactctccacattttcaagctctttttctactacaattttttcttttttctttttttaaatttcaatagctttaggggtacaagtggtttttggttatatggaaaaattgtacagtggcgaagcctcggcttttagtgtacctgyttactgcaacttttctatcagcattttaaacattctcaagcctgtttcatcaaaaactttccttgtacctcatatccacctcctgctatagcccctgtatctcctcttgcccacaggcaaatttcttaaaagatctgtccacatataccaactttatttcctctcctcctatttacttccaaatccaaagtatccagttgcacttccaccaatatcagcagaaacctttcctgtcctacctcactggaccttactacaacaggctggaacatttctaacctggctcctttttatgtctcttcttcagtcttgagtcttcccttttcctctctctggactcaatccaagcaacaagtatttattgagtgtctgctatgtgccaatt

SEQ ID NO: 83045 - DNA, 2307 bp, Homo sapiens
ccgagcacacagaaaccatgactaggctgagggatacaaggctgaaactctacatgaccctggaattatccattctgggccccattatcttatggtcaatatgagacctctatggagaaagttggggtgatttccccctaaccccgcctgcaggctcctctcttctcagtttcccagcagaactcgctgtagcatgaggctgctccagggtctaaatgcacaggaagaagccctgccccactctccctgctcaagatgggtggtggagggtcagttctgagggctttggtagaaaaggcttgtaaaggagggaaggggctagagtgaggtgtcatgccattctagtggcaagaggaaatagaaaggcctgtgaagaggtgaggtttattagaaaataaagtatagcagggaattctgaatgaaaaaataaaatcagcagagatcctgacacagtcctgttctatgggtgtgcagtaagaatttgcctgggtgtggagaggatttcttttaggttaattaaagtgtcctgtgcgtgaaataaactgtacactttggaagcttacaagttaattttttcatgtgcctgcaacaggactgcaacggtgatggaaatctctgttgagaatgtggacactagaaaatccggggatatgtagtacggaaacccacacacacacccccagactcactgaccacagcaccacatgaattcacaaaagacatgagcaggccccttgcacgggatcccaccccaccttcagagaacacagctgctcccggggactgcagaatgtggccactgtttcttatctagaaaaccatttctcccatcacagtctaggtcctcattcacaacatgaagctcagctcaggctgyctgtctacaggaaagcctgtgagacagggccacattcctcaacatctggattactcatcagtatgagaggggttccccaatacgtaccacgttgtggaactcccaaggatgtctgtaacgacagaaaataaattgctatgagcatcagaccatgctgtgtcctgtgagcacaggacttttcttcacttagtgacattagaaaacaagatggaaaacccagtgttcaaaggaaccccaaagaagcgaacaaatcaactcatactaaagacacacatttttctcagaggatgtttcctctgaagtccatgttggctggcaagtagcctgattttgctccaaagagaacaaaattggtaaggctcactgttacacaacaggtgactgatgctgtcattttctcccactgtcttaaatcaagcctcagtggggacagactctcacttaccatttccctcaaggacactgtgtaactaagatatatatcttcagattctcatatcttaatttaatccaaataagataaagctaagaaagcaacagttttttctcagacaaatccagttggcctgaccttcacctcctctgggtcctcctcctcgccgttgtaactggacagctcctgaagtacatccctgatcagaactaggaggatacaaagtgaccatcagcaccttggtggtggtgctcatgaacaattcagtaacactgcttgaggtgggtttgggaggagggtagcaggcacaggagagatgcaggaagaaagggaatcagggcctttggcttcctagctccaggccacctcataaacatataatagccaatctcaaacagtgcacaccacgcagtgcaggctgtgtgtccctggcagcctcttagggctcctccttcctaatctgacctgagctaacttgccctcttattgatccctgacaaagtcatttcctcctcagaatccacatgtgctgctgatctgtttatcatcccttctagaagattttgtacggaataagaagcaacctttcttaaaataggagatttaattctagccaaaagattttattactaactttctggtacaaggcaaataaaccaagatttgaaaataattttcctaccatttaaagatgacccctacttagcatgtggtatttgttcttccactttcccttttcaacagaatttgtgtgtagcatgatgttcactgctccccatgctcacactgactccagcactggagcagcctgtcatggggagcagcgagggggtgcggggggtgggcactgaccctctccaatccagctgtgcaggagattccagcagggaaaatgggtgcccggctaacacccaagttgagccttgacttttttttattggattctatgtcttgggattgggttccactgaacttctaagacttgccgtgattatct

SEQ ID NO: 83046 - DNA, 2307 bp, Homo sapiens
ccgagcacacagaaaccatgactaggctgagggatacaaggctgaaactctacatgaccctggaattatccattctgggccccattatcttatggtcaatatgagacctctatggagaaagttggggtgatttccccctaaccccgcctgcaggctcctctcttctcagtttcccagcagaactcgctgtagcatgaggctgctccagggtctaaatgcacaggaagaagccctgccccactctccctgctcaagatgggtggtggagggtcagttctgagggctttggtagaaaaggcttgtaaaggagggaaggggctagagtgaggtgtcatgccattctagtggcaagaggaaatagaaaggcctgtgaagaggtgaggtttattagaaaataaagtatagcagggaattctgaatgaaaaaataaaatcagcagagatcctgacacagtcctgttctatgggtgtgcagtaagaatttgcctgggtgtggagaggatttcttttaggttaattaaagtgtcctgtgcgtgaaataaactgtacactttggaagcttacaagttaattttttcatgtgcctgcaacaggactgcaacggtgatggaaatctctgttgagaatgtggacactagaaaatccggggatatgtagtacggaaacccacacacacacccccagactcactgaccacagcaccacatgaattcacaaaagacatgagcaggccccttgcacgggatcccaccccaccttcagagaacacagctgctcccggggactgcagaatgtggccactgtttcttatctagaaaaccatttctcccatcacagtctaggtcctcattcacaacatgaagctcagctcaggctgcctgtctacaggaaagccwgtgagacagggccacattcctcaacatctggattactcatcagtatgagaggggttccccaatacgtaccacgttgtggaactcccaaggatgtctgtaacgacagaaaataaattgctatgagcatcagaccatgctgtgtcctgtgagcacaggacttttcttcacttagtgacattagaaaacaagatggaaaacccagtgttcaaaggaaccccaaagaagcgaacaaatcaactcatactaaagacacacatttttctcagaggatgtttcctctgaagtccatgttggctggcaagtagcctgattttgctccaaagagaacaaaattggtaaggctcactgttacacaacaggtgactgatgctgtcattttctcccactgtcttaaatcaagcctcagtggggacagactctcacttaccatttccctcaaggacactgtgtaactaagatatatatcttcagattctcatatcttaatttaatccaaataagataaagctaagaaagcaacagttttttctcagacaaatccagttggcctgaccttcacctcctctgggtcctcctcctcgccgttgtaactggacagctcctgaagtacatccctgatcagaactaggaggatacaaagtgaccatcagcaccttggtggtggtgctcatgaacaattcagtaacactgcttgaggtgggtttgggaggagggtagcaggcacaggagagatgcaggaagaaagggaatcagggcctttggcttcctagctccaggccacctcataaacatataatagccaatctcaaacagtgcacaccacgcagtgcaggctgtgtgtccctggcagcctcttagggctcctccttcctaatctgacctgagctaacttgccctcttattgatccctgacaaagtcatttcctcctcagaatccacatgtgctgctgatctgtttatcatcccttctagaagattttgtacggaataagaagcaacctttcttaaaataggagatttaattctagccaaaagattttattactaactttctggtacaaggcaaataaaccaagatttgaaaataattttcctaccatttaaagatgacccctacttagcatgtggtatttgttcttccactttcccttttcaacagaatttgtgtgtagcatgatgttcactgctccccatgctcacactgactccagcactggagcagcctgtcatggggagcagcgagggggtgcggggggtgggcactgaccctctccaatccagctgtgcaggagattccagcagggaaaatgggtgcccggctaacacccaagttgagccttgacttttttttattggattctatgtcttgggattgggttccactgaacttctaagacttgccgtgattatct

SEQ ID NO: 83047 - DNA, 2307 bp, Homo sapiens
ccgagcacacagaaaccatgactaggctgagggatacaaggctgaaactctacatgaccctggaattatccattctgggccccattatcttatggtcaatatgagacctctatggagaaagttggggtgatttccccctaaccccgcctgcaggctcctctcttctcagtttcccagcagaactcgctgtagcatgaggctgctccagggtctaaatgcacaggaagaagccctgccccactctccctgctcaagatgggtggtggagggtcagttctgagggctttggtagaaaaggcttgtaaaggagggaaggggctagagtgaggtgtcatgccattctagtggcaagaggaaatagaaaggcctgtgaagaggtgaggtttattagaaaataaagtatagcagggaattctgaatgaaaaaataaaatcagcagagatcctgacacagtcctgttctatgggtgtgcagtaagaatttgcctgggtgtggagaggatttcttttaggttaattaaagtgtcctgtgcgtgaaataaactgtacactttggaagcttacaagttaattttttcatgtgcctgcaacaggactgcaacggtgatggaaatctctgttgagaatgtggacactagaaaatccggggatatgtagtacggaaacccacacacacacccccagactcactgaccacagcaccacatgaattcacaaaagacatgagcaggccccttgcacgggatcccaccccaccttcagagaacacagctgctcccggggactgcagaatgtggccactgtttcttatctagaaaaccatttctcccatcacagtctaggtcctcattcacaacatgaagctcagctcaggctgcctgtctacaggaaagcctgtgagacagggccacattcctcaacatctggattactcatcagtatgagaggggttccccaatacgtaccacgttgtggaactcccaaggatgtctgtaacgacagaaaataaattgctatgagcatcagaccatgctgtgtcctgtgagcacaggacttttcttcacttagtgacattagaaaacaagatggaaaacccagtgttcaaaggaaccccaaagaagcgaacaaatcaactcatactaaagacacacatttttctcagaggatgtttcctctgaagtccatgttggctggcaagtagcctgattttgctccaaagagaacaaaattggtaaggctcactgttacacaacrggtgactgatgctgtcattttctcccactgtcttaaatcaagcctcagtggggacagactctcacttaccatttccctcaaggacactgtgtaactaagatatatatcttcagattctcatatcttaatttaatccaaataagataaagctaagaaagcaacagttttttctcagacaaatccagttggcctgaccttcacctcctctgggtcctcctcctcgccgttgtaactggacagctcctgaagtacatccctgatcagaactaggaggatacaaagtgaccatcagcaccttggtggtggtgctcatgaacaattcagtaacactgcttgaggtgggtttgggaggagggtagcaggcacaggagagatgcaggaagaaagggaatcagggcctttggcttcctagctccaggccacctcataaacatataatagccaatctcaaacagtgcacaccacgcagtgcaggctgtgtgtccctggcagcctcttagggctcctccttcctaatctgacctgagctaacttgccctcttattgatccctgacaaagtcatttcctcctcagaatccacatgtgctgctgatctgtttatcatcccttctagaagattttgtacggaataagaagcaacctttcttaaaataggagatttaattctagccaaaagattttattactaactttctggtacaaggcaaataaaccaagatttgaaaataattttcctaccatttaaagatgacccctacttagcatgtggtatttgttcttccactttcccttttcaacagaatttgtgtgtagcatgatgttcactgctccccatgctcacactgactccagcactggagcagcctgtcatggggagcagcgagggggtgcggggggtgggcactgaccctctccaatccagctgtgcaggagattccagcagggaaaatgggtgcccggctaacacccaagttgagccttgacttttttttattggattctatgtcttgggattgggttccactgaacttctaagacttgccgtgattatct

SEQ ID NO: 83048 - DNA, 1197 bp, Homo sapiens
cacagtttgtaaatgtggatgccatctgaaaccactctttagttgataatgaacgctgacatttgcccaccaagaaattctgtcagtcacctatagtgtacatggtgagatgtatacatcttaattcaattgaaacagagaaaccgagagaaataaaatttccttttcagaggaaagaagacgactttaccrtgtgaacttctgtggcttcctcagagactgtctgccctggcccatgctcctccaggtcttccaggtcacctaggaaacagagtcgctataagcacatgagctccactgagtgaatccctcaggtggtcttggagctgtggacacggggctggcgtgtgtggaaaggtgtgttcacagcacagactcagctgctgccagtccatcctccatggtggagggaaggcaaatggtgaaggaaggcatcaggaaggcctcagaagacagagccttgggtcctctagctaaggcaacctctttgagatgaagtaacccatctcaaacagggcacaccacacagtgtttccctggagcatcgacagcttctccttcctaatctgacctgagctaacttgccctcccttcttgatcccctagaggtcatttcctccccaggatccacatgtcctgctgctgtgtattttgtccctcctagatttattattattattatttttgagatggagttactctcttcttgccccagctggagtataattgtgcaatctcaacccaccaccacctctgcctcccaggttcaagtgattctccagcctcagcctcctgagtagctgggattataggcatgcatcaccatgcccagttaattctgtatttttaggagagatgggttttctccatgttggtcagcctggtttcgaacgcctgacctcaggtgatccacccgtcttggccccccaaactgctggaattacaggtgtgagccaccacgcctgaccagaatattctgtactagaaacaaagcaacctttcttcaatgaggagattaattctattaaaatattctatgtattcactaaccttttgttttaaagaagactaaaccaagatttgaaaatactcaattatcctaccatttaaagatgactgctacttggcccgtgatgtttgtccttctgcccttccttttaacacagtgtgtgtgtgccacgggacctgctgctgctc

SEQ ID NO: 83049 - DNA, 1197 bp, Homo sapiens
cacagtttgtaaatgtggatgccatctgaaaccactctttagttgataatgaacgctgacatttgcccaccaagaaattctgtcagtcacctatagtgtacatggtgagatgtatacatcttaattcaattgaaacagagaaaccgagagaaataaaatttccttttcagaggaaagaagacgactttaccgtgtgaacttctgtggcttcctcagagactgtctgccctggcccatgctcctccaggtcttccaggtcacctaggaaacagagtcgctataagcacatgagctccactgagtgaatccctcaggtggtcttggagctgtggacacggggctggcgtgtgtggaaaggtgtgttcacagcacagactcagctgctgccrgtccatcctccatggtggagggaaggcaaatggtgaaggaaggcatcaggaaggcctcagaagacagagccttgggtcctctagctaaggcaacctctttgagatgaagtaacccatctcaaacagggcacaccacacagtgtttccctggagcatcgacagcttctccttcctaatctgacctgagctaacttgccctcccttcttgatcccctagaggtcatttcctccccaggatccacatgtcctgctgctgtgtattttgtccctcctagatttattattattattatttttgagatggagttactctcttcttgccccagctggagtataattgtgcaatctcaacccaccaccacctctgcctcccaggttcaagtgattctccagcctcagcctcctgagtagctgggattataggcatgcatcaccatgcccagttaattctgtatttttaggagagatgggttttctccatgttggtcagcctggtttcgaacgcctgacctcaggtgatccacccgtcttggccccccaaactgctggaattacaggtgtgagccaccacgcctgaccagaatattctgtactagaaacaaagcaacctttcttcaatgaggagattaattctattaaaatattctatgtattcactaaccttttgttttaaagaagactaaaccaagatttgaaaatactcaattatcctaccatttaaagatgactgctacttggcccgtgatgtttgtccttctgcccttccttttaacacagtgtgtgtgtgccacgggacctgctgctgctc

SEQ ID NO: 83050 - DNA, 1197 bp, Homo sapiens
cacagtttgtaaatgtggatgccatctgaaaccactctttagttgataatgaacgctgacatttgcccaccaagaaattctgtcagtcacctatagtgtacatggtgagatgtatacatcttaattcaattgaaacagagaaaccgagagaaataaaatttccttttcagaggaaagaagacgactttaccgtgtgaacttctgtggcttcctcagagactgtctgccctggcccatgctcctccaggtcttccaggtcacctaggaaacagagtcgctataagcacatgagctccactgagtgaatccctcaggtggtcttggagctgtggacacggggctggcgtgtgtggaaaggtgtgttcacagcacagactcagctgctgccagtccatcctccatggtggagggaaggcaaatggtgaaggaaggcaycaggaaggcctcagaagacagagccttgggtcctctagctaaggcaacctctttgagatgaagtaacccatctcaaacagggcacaccacacagtgtttccctggagcatcgacagcttctccttcctaatctgacctgagctaacttgccctcccttcttgatcccctagaggtcatttcctccccaggatccacatgtcctgctgctgtgtattttgtccctcctagatttattattattattatttttgagatggagttactctcttcttgccccagctggagtataattgtgcaatctcaacccaccaccacctctgcctcccaggttcaagtgattctccagcctcagcctcctgagtagctgggattataggcatgcatcaccatgcccagttaattctgtatttttaggagagatgggttttctccatgttggtcagcctggtttcgaacgcctgacctcaggtgatccacccgtcttggccccccaaactgctggaattacaggtgtgagccaccacgcctgaccagaatattctgtactagaaacaaagcaacctttcttcaatgaggagattaattctattaaaatattctatgtattcactaaccttttgttttaaagaagactaaaccaagatttgaaaatactcaattatcctaccatttaaagatgactgctacttggcccgtgatgtttgtccttctgcccttccttttaacacagtgtgtgtgtgccacgggacctgctgctgctc

SEQ ID NO: 83051 - DNA, 1197 bp, Homo sapiens
cacagtttgtaaatgtggatgccatctgaaaccactctttagttgataatgaacgctgacatttgcccaccaagaaattctgtcagtcacctatagtgtacatggtgagatgtatacatcttaattcaattgaaacagagaaaccgagagaaataaaatttccttttcagaggaaagaagacgactttaccgtgtgaacttctgtggcttcctcagagactgtctgccctggcccatgctcctccaggtcttccaggtcacctaggaaacagagtcgctataagcacatgagctccactgagtgaatccctcaggtggtcttggagctgtggacacggggctggcgtgtgtggaaaggtgtgttcacagcacagactcagctgctgccagtccatcctccatggtggagggaaggcaaatggtgaaggaaggcatcaggaaggyctcagaagacagagccttgggtcctctagctaaggcaacctctttgagatgaagtaacccatctcaaacagggcacaccacacagtgtttccctggagcatcgacagcttctccttcctaatctgacctgagctaacttgccctcccttcttgatcccctagaggtcatttcctccccaggatccacatgtcctgctgctgtgtattttgtccctcctagatttattattattattatttttgagatggagttactctcttcttgccccagctggagtataattgtgcaatctcaacccaccaccacctctgcctcccaggttcaagtgattctccagcctcagcctcctgagtagctgggattataggcatgcatcaccatgcccagttaattctgtatttttaggagagatgggttttctccatgttggtcagcctggtttcgaacgcctgacctcaggtgatccacccgtcttggccccccaaactgctggaattacaggtgtgagccaccacgcctgaccagaatattctgtactagaaacaaagcaacctttcttcaatgaggagattaattctattaaaatattctatgtattcactaaccttttgttttaaagaagactaaaccaagatttgaaaatactcaattatcctaccatttaaagatgactgctacttggcccgtgatgtttgtccttctgcccttccttttaacacagtgtgtgtgtgccacgggacctgctgctgctc

SEQ ID NO: 83052 - DNA, 1571 bp, Homo sapiens
ttttgtgcaagattatttaaaatttattttggcttgcaaattcataattctcaaaaaggtttttctcctgaggacaatgcttgctgacatagtttgtaactgaagctgtcatctatgaatgccatcttcaatcagttcttagttagtaatgaattctcattttacattttcccaccaagaaattctgtaagtcatctraaatgtacatggcagtaagattttcctatctttattcaagtgaaattgaaagaaacctaggaaaatgaaattcccctttcagacaaaaaaagaacaacttacatgggcaacagtgaggagactctgattggatgcttcagggagatgttctgctataaactcctctagatgatctaggagaaatagggtaagtgtcactgcatggattccgctgagggaatccctcgggttgtattgggtggtgtggacatgaggctggcatgtgtgaagaaggttggctaccccagacggagccgcaggccctttctccttggtggtgcaggcaggcaaatgagacaacgaggaaagccatgggaactagagcgttggtcctctggctaacgcaagctcatcaatggcactcagctgatctcaaagatggcacaccataggggcaggctgtgcttccctacaacgtctcaggttcctccttcctaatctgacctgagctaacttgccctccctttgtgatcccttctgaggtcatttccccctcaggatccacatgtgctgctgctgttcatcatccctcctaaaacattttgtactgcataaaagcaacctttcttcaaaaaaatttaacctttggtgatcaagcctggcaactactctgtgtctggcctgaccctgaagtcaaaaaaacttatgacttcactgaacctttgagtcaaacagaattaaaccaagatttgaaaatactcaattatcctaccatttaaaaatgacccgcacttagcttatttgtccttccactcttccttttcaacacgatgtatgtgtccatggagtcagttgctgttcatgctcatgctgactccagcactaggacagatcatcatggggggcagtaggtgggggcgctaacactctccaaactagctgtgcaggaaatcccactggggtgatggacaccagaataacaccccaattcttccttgagctcttattctgcactgtgtattggatgtgtgggctgaataagggcatgtggaacacttgtggccatcatgttattaaacatagcagaatatgtccctgattgttctctgcattttttttttttgagatgaaatctcactgtgttgcccaggctagaatgcagtgccatgatcaaggcttaggtgcagcaaaccaccatgacacatttataccaatgtaacaaagctgcatgttctacacatgcatcctagaattgcaagcaaaataaaaacaataaaaagagtaaacccagaatacataccttctgatggaaagcatacccttttctgcaaatagagaaaagaaaaacattatgagagtcagaccacactgtggcctgtgtgcacaggtctttt

SEQ ID NO: 83053 - DNA, 1571 bp, Homo sapiens
ttttgtgcaagattatttaaaatttattttggcttgcaaattcataattctcaaaaaggtttttctcctgaggacaatgcttgctgacatagtttgtaactgaagctgtcatctatgaatgccatcttcaatcagttcttagttagtaatgaattctcattttacattttcccaccaagaaattctgtaagtcatctawaatgtacatggcagtaagattttcctatctttattcaagtgaaattgaaagaaacctaggaaaatgaaattcccctttcagacaaaaaaagaacaacttacatgggcaacagtgaggagactctgattggatgcttcagggagatgttctgctataaactcctctagatgatctaggagaaatagggtaagtgtcactgcatggattccgctgagggaatccctcgggttgtattgggtggtgtggacatgaggctggcatgtgtgaagaaggttggctaccccagacggagccgcaggccctttctccttggtggtgcaggcaggcaaatgagacaacgaggaaagccatgggaactagagcgttggtcctctggctaacgcaagctcatcaatggcactcagctgatctcaaagatggcacaccataggggcaggctgtgcttccctacaacgtctcaggttcctccttcctaatctgacctgagctaacttgccctccctttgtgatcccttctgaggtcatttccccctcaggatccacatgtgctgctgctgttcatcatccctcctaaaacattttgtactgcataaaagcaacctttcttcaaaaaaatttaacctttggtgatcaagcctggcaactactctgtgtctggcctgaccctgaagtcaaaaaaacttatgacttcactgaacctttgagtcaaacagaattaaaccaagatttgaaaatactcaattatcctaccatttaaaaatgacccgcacttagcttatttgtccttccactcttccttttcaacacgatgtatgtgtccatggagtcagttgctgttcatgctcatgctgactccagcactaggacagatcatcatggggggcagtaggtgggggcgctaacactctccaaactagctgtgcaggaaatcccactggggtgatggacaccagaataacaccccaattcttccttgagctcttattctgcactgtgtattggatgtgtgggctgaataagggcatgtggaacacttgtggccatcatgttattaaacatagcagaatatgtccctgattgttctctgcattttttttttttgagatgaaatctcactgtgttgcccaggctagaatgcagtgccatgatcaaggcttaggtgcagcaaaccaccatgacacatttataccaatgtaacaaagctgcatgttctacacatgcatcctagaattgcaagcaaaataaaaacaataaaaagagtaaacccagaatacataccttctgatggaaagcatacccttttctgcaaatagagaaaagaaaaacattatgagagtcagaccacactgtggcctgtgtgcacaggtctttt

SEQ ID NO: 83054 - DNA, 652 bp, Homo sapiens
aaaccgagtaaacaaaacttcagaaagaatgaaaacaattggaaaataacttcaagaaaaaaatgtaaaatggaaacaatacaagaacaatttgtgccctctgaaaaacagaggttaaagtcagaatttttttgttcttttttttttttttttgagacaaagtctcactctgtagccaggtgctggggtgcagtggcatgatctcggctcacygcaacctccgcctcctgagttcaagtgattctcctgcctcagcctcccaaatagctgggactacaagagtgcgccaccacgcctagctaatttttgtatttttagtagagacggggtttcaccttgttggccaggctggtcttgaactcctgacctcaggtgatccacccgcctcggcctcccaaagtgctgggattacaggcataagccaccacgcccagccaggaaagtatttaaaaacaaattaagcaaagattataaaagtttttggagtaacacatttcccgaaatgatcacgatccacatcaagtctgagccatgttgacatccccacgtcggggcccttcctggtggtcgaggaatctgcaacacagacagaggtgcaagggtcactagagaggcacagaggtagagggaggaggggctccctgggatgggt

SEQ ID NO: 83055 - DNA, 652 bp, Homo sapiens
aaaccgagtaaacaaaacttcagaaagaatgaaaacaattggaaaataacttcaagaaaaaaatgtaaaatggaaacaatacaagaacaatttgtgccctctgaaaaacagaggttaaagtcagaatttttttgttcttttttttttttttttgagacaaagtctcactctgtagccaggtgctggggtgcagtggcatgatctcggctcaccgcaacctccgcctcctgagktcaagtgattctcctgcctcagcctcccaaatagctgggactacaagagtgcgccaccacgcctagctaatttttgtatttttagtagagacggggtttcaccttgttggccaggctggtcttgaactcctgacctcaggtgatccacccgcctcggcctcccaaagtgctgggattacaggcataagccaccacgcccagccaggaaagtatttaaaaacaaattaagcaaagattataaaagtttttggagtaacacatttcccgaaatgatcacgatccacatcaagtctgagccatgttgacatccccacgtcggggcccttcctggtggtcgaggaatctgcaacacagacagaggtgcaagggtcactagagaggcacagaggtagagggaggaggggctccctgggatgggt

SEQ ID NO: 83056 - DNA, 652 bp, Homo sapiens
aaaccgagtaaacaaaacttcagaaagaatgaaaacaattggaaaataacttcaagaaaaaaatgtaaaatggaaacaatacaagaacaatttgtgccctctgaaaaacagaggttaaagtcagaatttttttgttcttttttttttttttttgagacaaagtctcactctgtagccaggtgctggggtgcagtggcatgatctcggctcaccgcaacctccgcctcctgagttcaagtgattctcctgcctcagcctcccaaatagctgggactacaagagtgcgccaccacgcctagctaatttttgtatttttagtagagacggggtttcaccttgttggccaggctggtcttkaactcctgacctcaggtgatccacccgcctcggcctcccaaagtgctgggattacaggcataagccaccacgcccagccaggaaagtatttaaaaacaaattaagcaaagattataaaagtttttggagtaacacatttcccgaaatgatcacgatccacatcaagtctgagccatgttgacatccccacgtcggggcccttcctggtggtcgaggaatctgcaacacagacagaggtgcaagggtcactagagaggcacagaggtagagggaggaggggctccctgggatgggt

SEQ ID NO: 83057 - DNA, 823 bp, Homo sapiens
cttggatcctgccgtgtcccctgcttgacaccaggacctactgagggcctgctggccygcaatactgggtcgggtgggctgctcgcttgtgtgacaaggagcctgggggtgcctccatccctctcacacctttcccaggaggcctgaaccagggggattcatgtcaaccctagtgtctcctcaggatgaactagtgatgctccctgttgtcctcaaggggctgggaagacagagctaggtccccccaaatgagatgttggtgagctgaagagttactgcagacaacacagtgcaaagcccttggagtcctgcacatgggggtgcgaccagcacctcagtgtctccctcactaagcagcctgtggagggctcagccccagcaggctcaggggctgctatggagtgggtgtctgtttcctggagcatgttctcagggcatccttcacttgccttcagaggtctctaaaatatattaaaaatgtcccaacatttcaggacattccaccggcttttcttgctgggcttcctggttttcttcttgggctttctggttttcctgatgggacaacaagaaagtgagcgtagccaagaagaacatgggcacgtgcccacttccctcatcattctgcccactgcacactcacacttcctcttccactttggtcttttctgttgcttcttctgcaggtgcagaggaaggacttgctgacatctgtgaggaagagaacaattgtgcatgtccagagacgccagtgcaggaaaagacctatctgtgaaggcggtgtccagagcagacccagatgttactggggggtccctccagc

SEQ ID NO: 83058 - DNA, 823 bp, Homo sapiens
cttggatcctgccgtgtcccctgcttgacaccaggacctactgagggcctgctggcctgcaatactgggtcgggtgggctgctcgcttgtgtgacaaggagcctgggggtgcctccatccctctcrcacctttcccaggaggcctgaaccagggggattcatgtcaaccctagtgtctcctcaggatgaactagtgatgctccctgttgtcctcaaggggctgggaagacagagctaggtccccccaaatgagatgttggtgagctgaagagttactgcagacaacacagtgcaaagcccttggagtcctgcacatgggggtgcgaccagcacctcagtgtctccctcactaagcagcctgtggagggctcagccccagcaggctcaggggctgctatggagtgggtgtctgtttcctggagcatgttctcagggcatccttcacttgccttcagaggtctctaaaatatattaaaaatgtcccaacatttcaggacattccaccggcttttcttgctgggcttcctggttttcttcttgggctttctggttttcctgatgggacaacaagaaagtgagcgtagccaagaagaacatgggcacgtgcccacttccctcatcattctgcccactgcacactcacacttcctcttccactttggtcttttctgttgcttcttctgcaggtgcagaggaaggacttgctgacatctgtgaggaagagaacaattgtgcatgtccagagacgccagtgcaggaaaagacctatctgtgaaggcggtgtccagagcagacccagatgttactggggggtccctccagc

SEQ ID NO: 83059 - DNA, 823 bp, Homo sapiens
cttggatcctgccgtgtcccctgcttgacaccaggacctactgagggcctgctggcctgcaatactgggtcgggtgggctgctcgcttgtgtgacaaggagcctgggggtgcctccatccctctcacacctttcccaggaggcctgaaccagggggattcatgtcaaccctagtgtctcctcaggatgaactagtgatgctccctgttgtcctcaaggggctgggargacagagctaggtccccccaaatgagatgttggtgagctgaagagttactgcagacaacacagtgcaaagcccttggagtcctgcacatgggggtgcgaccagcacctcagtgtctccctcactaagcagcctgtggagggctcagccccagcaggctcaggggctgctatggagtgggtgtctgtttcctggagcatgttctcagggcatccttcacttgccttcagaggtctctaaaatatattaaaaatgtcccaacatttcaggacattccaccggcttttcttgctgggcttcctggttttcttcttgggctttctggttttcctgatgggacaacaagaaagtgagcgtagccaagaagaacatgggcacgtgcccacttccctcatcattctgcccactgcacactcacacttcctcttccactttggtcttttctgttgcttcttctgcaggtgcagaggaaggacttgctgacatctgtgaggaagagaacaattgtgcatgtccagagacgccagtgcaggaaaagacctatctgtgaaggcggtgtccagagcagacccagatgttactggggggtccctccagc

SEQ ID NO: 83060 - DNA, 823 bp, Homo sapiens
cttggatcctgccgtgtcccctgcttgacaccaggacctactgagggcctgctggcctgcaatactgggtcgggtgggctgctcgcttgtgtgacaaggagcctgggggtgcctccatccctctcacacctttcccaggaggcctgaaccagggggattcatgtcaaccctagtgtctcctcaggatgaactagtgatgctccctgttgtcctcaaggggctgggaagacagagctaggtccccccaaatgagatgttggtgagctgaagagttactgcagacaacacagtgcaaagcccttggagtcctgcacatgggggtgcgaccagcacctcagtgtctccctcactaagcagcctgtggagggctcagccccagcaggctcaggggctgctatggagtgggtgtctgtttcctggagcatgttctcagggcatccttcacttgccttcagaggtctctaaaatatattaaaaatgtcccaacatttcaggacattccaccggcttttcttgctgggcttcctggttttcttcttgggctttctggttttcctgatgggacaacaagaaagtgagcgtagccaagaagaacatgggcacgtgccyacttccctcatcattctgcccactgcacactcacacttcctcttccactttggtcttttctgttgcttcttctgcaggtgcagaggaaggacttgctgacatctgtgaggaagagaacaattgtgcatgtccagagacgccagtgcaggaaaagacctatctgtgaaggcggtgtccagagcagacccagatgttactggggggtccctccagc

SEQ ID NO: 83061 - DNA, 657 bp, Homo sapiens
ttccatcatcacctccatggaaaccagagagatggtgaatatagaaagacttcttggtggaacatatgctttagagatcacatccaaaacctttatggagcatctgacctagacttccagggacaaaacataaaagtgcaagacacttatattcacagtttttgtgaagcaaaatcattttcatatattaagtgttcygatacagaagaaacactgactttccccttctgtgtcaaagaaaatcttataaaacatcctggtaggtgtcttgataggcttgatacaagaaacatggtattttcccctcatctttcctttcttttcccttccttcttcttttctcccccctgcttctttcccttgtacttttttttttttttaattttaaataacaagacttcttagttctttgaacaagtgaactatttctttggggaactgcccctcagctatgccaactctttgataagccagtcatagagccctgtctcacagcggtggctgtgtgaccttgctgatccagacagggtgtattcttaagggtaacaatgatctaaggaaggtttagaaagaaatacagtatccaaaaatagttgtaaaacacgaattgatacttccagagttggatttttatggaccaatcactcatgttatact

SEQ ID NO: 83062 - DNA, 642 bp, Homo sapiens
tgataacacatatatgtatatttgaaaacaaggccacataagcctggctggyacattgggccattttactggctggccttcaaaaataaagattacaaaaaatttatccacatacacttttttatatccctaaagattacaaaaaatttatccacatatacttttttatatccctgtataaaattgatgccaacatgtttggcattttagaaagacactcaaacagattctggaaaaagaaatcgcttcatgggatgaacagactaggtcgcaaatgaaaaagctaaacatttgttttttaaaccacaccacaaatttccaggtaaaactgattgaaacttatgctcagagatattttcactgtacttacatgacttgaaaatctgtaagaaccaaagcccctaaattctactgaacatacttcaaacattttgcctagtaaaattttttttaacactctcaaaaaattttaaaaagaaacaaattttctctggaaaggattttcagcatcttgaatatatatattttctcagagtgtatgcagcccactcttctcttgataatcttcataaaaacgtctcaatgactcaggaattctaggtgtcacagtgctcaaggcctgagtgaaatgtcttttcatga

SEQ ID NO: 83063 - DNA, 570 bp, Homo sapiens
gtttgaatatttgtatcttacccgctaaattggattataaatctagggaaaaaaatgttttccatttttctttctatccagggtgttaagcccagaatcttgcgtaaagatttttcttgagctacagcaactgttgcaaataataatagtgactgcgtgttgagcttcaactgcatgtcatacaccaagatgagcattttgtagttactgttatatataatcttcaggaatcactagtgagccaattattattatccccattttaaggatagggaaactgaggcttagagagatgaaggtcttgtcgaaggtggcagatagaactctaggctctattttacttttctaatctccaaagactgattataagtccgtaggaaatctcaaagcctttgaatatttttctttacagtgggaaaacaatacatttgcaaaatatttctgcattgaggggtttgagattcttacatgagaatatattttcaggcccatgctgaacccctcagagccaggccctttctatgaactttttaagtagtctcagcacattagtrttactgcacctaccta

SEQ ID NO: 83064 - DNA, 687 bp, Homo sapiens
gggagaaaataatagtccagaaatatcaatgacatgtttaggaaacttattgtgtgtcattgagggattaacaaaagtgtgtgtgtgattttaaatcctcaatacagatactttacttgtgaaagaaccagtggctgtccttaaggccaacagagtttggggagcattacgaggtaagttccatgcagtttcattgttactttccagtaaaggaaaattttcagttggtgctttgtgaaattaagcacagcaaaactttgccgccttagatcctttacagaatgctttgttatgtagttccaaaatgatttccattgaacatgtactacataaagcatgggagaggtcagcacagtggctcacgcctgtaatcccagcacttcgagaggctgaggtaggtgatgattgcctgagctcagaagtctgagaccagcctgggcaacatggtgcaactccatctctacaaaaagtacacaaattagccaggcatagtggtgtggacctatagtcccagctactctggaggctgaggtgggasgattgcttgagtccaggacgttgaggctgcagcgagcctagatcacaccactgcattccaggctgggcaacagagcaagacccctgtctcaaaaaaatacaaataaataaatacagcatgggagaaaactcatttgacctctcaaaaaa

SEQ ID NO: 83065 - DNA, 732 bp, Homo sapiens
tcccacctcagtctcccaaagggctgggattaagggtacaagccagaacatctggcctgcatgacttatatttgaaactgagttctacttaaaggaaatccaatacgtaaaattccaaacctacaaaacaaattgaaagatcaataactttttaagtggatagttcattttccatactgcaggttttcttcataaaatgagytttcctagtacatttactccaagatttgaattaagcaggagtcttgagcagcctggccacatatagccaaataccaagtgcttcctggttcacaaaatgacctgtttgtcctcatgacaaccttatttgatctttatgacaaccctacgattacgagaggaatagatactctttccagaatgttttttgttcaaagaacaaacattcatttaaaaaataggcttacttttagctgagcattaaataaatgtgttcattgtagagaagcagaaagaaaaaaagaaatcctccataccccagagaaaaccaccatgattttaagcttttttttttcagtctttgtgctgtgcacagacatggtaatactcattagacaattttattttcagaagtttttcacctaacattataacatgaatattttctcaggatattcagctactcttactgtcatttttcatgattgcacagtataatttccataattatttctaataattgaaatgcttctttgcccattttgttttgag

SEQ ID NO: 83066 - DNA, 952 bp, Homo sapiens
tagtaattttcaggtcatgccattgatttcattagggctccctagtttactactcctattctgctcttactggggtatccccccaactctgcatcacaaaactttctttacatatcccactagtaaatggatgtctgctccaggattgcatcaaatcaactgaaaacacatgcagggcttcccttcactatttctcaaaccactggcatttctattctactatattgccaacacatatcttatgtgattaaattttccatttactaggtagtactcaagttttaaaatgtttgcctaatctccttattattttcatttggttagctatttttttattttgtattttcgctttttagttcaactcccacaacaaaaaaaggatccccctgccaaaggacatataaatccacttggtgaaagcataactcaaaattcagctgttgagtacaaacagatgtcaacattaggatatatatgggaataaaatattagtgtgtaatatttataagaattaataatcatgtattatatatttcaaratagctggaaaacagggttattaattaattaattaattaattaattatttttgaggcaggttcttcttctgttgcccaggctggagtgcagtggtacaatcacagatcactgcagcctcgacctcctgggatcaagccatcctcctgcctcagcctgccaaatagctgggactacaggtgcataccaccaggcctggctaattttttgattgttttgtggagacgaggtctcactatgttccccaggctggtcttgaactcctgagctcaagtgatccactggcctcggcttcccaaagtgcttggattataggcacgagccactgtgccctgctgaagagaggttttttaatgtcctcatcacaaagaaataataaatgtttaagctgattaatatgctaatttccctgatt

SEQ ID NO: 83067 - DNA, 952 bp, Homo sapiens
tagtaattttcaggtcatgccattgatttcattagggctccctagtttactactcctattctgctcttactggggtatccccccaactctgcatcacaaaactttctttacatatcccactagtaaatggatgtctgctccaggattgcatcaaatcaactgaaaacacatgcagggcttcccttcactatttctcaaaccactggcatttctattctactatattgccaacacatatcttatgtgattaaattttccatttactaggtagtactcaagttttaaaatgtttgcctaatctccttattattttcatttggttagctatttttttattttgtattttcgctttttagttcaactcccacaacaaaaaaaggatccccctgccaaaggacatataaatccacttggtgaaagcataactcaaaattcagctgttgagtacaaacagatgtcaacattaggatatatatgggaataaaatattagtgtgtaatatttataagaattaataatcatgtattatatatttcaagatagctggaaaacagggttattaattaattaattaattaattaattatttttgaggcaggttcttcttctgttgcccaggctggagtgcagtggtacaatcacagatcactgcagcctcgacctcctgggatcaagccatcctcctgcctcagcctgccaaatagctgggactacaggtgcataccaccaggcctggctaattttttgattgttttgtggagacgaggtctcactatgttccccaggctggtcttgaactcctgrgctcaagtgatccactggcctcggcttcccaaagtgcttggattataggcacgagccactgtgccctgctgaagagaggttttttaatgtcctcatcacaaagaaataataaatgtttaagctgattaatatgctaatttccctgatt

SEQ ID NO: 83068 - DNA, 565 bp, Homo sapiens
tgcaaccgccacctattgaaagagcaaagccactgaataccatctcatacttgcaaggggtttttaacatctcaaagcactttcacatcttactggatcctcacaaccctgtcagttgtaaaggtagctagaccaggatcatagggaggtgccactattcctattaattcattctccattccttttaacctcacagagcactaaattgtacccacccactgcttcttrcacctggccttgagaagtaggaaaaagaaatgagatatgatggaaggcacttgttcaagagctattgcacagaagcctggatcttaacaatgcttagacaatcaagagtctgtgaacccttggacctgtaaacaaaagatgtaagcagatgcactttcctgaatagcatgtcagattctcaaacagtcaatggcccaaaaacagattagaaactactgttctactgtacagatcagatgggggtaagcatttatgaaagaaataaagttaatttttgtttcagtgccttccactggccaggcaccctaaccctataaaaatgcccacctgcctactt

SEQ ID NO: 83069 - DNA, 565 bp, Homo sapiens
tgcaaccgccacctattgaaagagcaaagccactgaataccatctcatacttgcaaggggtttttaacatctcaaagcactttcacatcttactggatcctcacaaccctgtcagttgtaaaggtagctagaccaggatcatagggaggtgccactattcctattaattcattctccattccttttaacctcacagagcactaaattgtacccacccactgcttcttgcacctggccttgagaagtaggaaaaagaaatgagatatgatggaaggcacttgttcaagagctattgcacagaagcctggatcttaacaatgcttagacartcaagagtctgtgaacccttggacctgtaaacaaaagatgtaagcagatgcactttcctgaatagcatgtcagattctcaaacagtcaatggcccaaaaacagattagaaactactgttctactgtacagatcagatgggggtaagcatttatgaaagaaataaagttaatttttgtttcagtgccttccactggccaggcaccctaaccctataaaaatgcccacctgcctactt

SEQ ID NO: 83070 - DNA, 1593 bp, Homo sapiens
acgtttggggtgagaagtgccttcaacccaagagttttcaagggtttggtcctgctttcagaagggtagcaggtctgtgtttgatacaacctatgagtcttcttgcctcttgttcacattagatattttcttatctctatgtcttggtttttcaaaattgttcagtgtctagatctagaacaatgtacaaatcagtggaggagagagttgagtctttagaacttaaaatgaatggttcccttgaagattatcagcatgagaatcagatgtgttcagaaaatgagaaggattagacaaagctctggataataatggttgtaatcagtcatattgacagagagttttctcatcttctccaatttcttcttgtgaaatgatttccattctgaaaataactgctttctttatcagcttggtattgatgagaaaagaggaataactttccttatttttttcacatgttgattcttttttctctagtgggtgttagtcataaatgaatataaactaagaaatgctagatttcccagagttggcagtttataacttcattctgataaaaactttaaagcagttaagaacaagtatagttaaaactgcagttagatcaaaagggataagtgttcctacccttttacttcatatacatctggtataaagatctgaacacaaaattggttacatcttcaacatgtatgatcagggctgcaatcgtttcagcaggatccattcatcttgcttctccagttgagctagtgctttgtgagtcagcctggaaactttctgtataaattgcctctcttttccccagaggcctcgttatcttaccttcaaattggtacaaagtatctcaggaaatagaaccagagtgtcccatcacagttagtaatgtcatgctgtggccctaccacctccttctgtaaaacatactttttaatcttttagtagatagtttgttgtttatttcattaaaaaaagttttttagagttcccccacatatggctagaaataagtagaaacaagtacagaatgtctcatgcttgtggttcctttgtgaattggcacacattccttcttcctctggggatacaatttgccccttctctaactatcttaaaatacttcaacataggttkggttttttgtttgttcttttttaaaaaatcaagatcgtgattctgactttctgtatctcctcttccttgggctccatgcagagattgagatcccctgctatgatttgtctattttttttctgcagataatgtcagtttttacatttgaaacttcagatgtttcaaatttttgttgaggaattttagagctatggccaatgtttttgatgtagtttatgcttccagcttaaatttttgctttgcagcaatgaacattttaatcaccattcaataatctcaaccggtgaccttttccaaaaaaatttgttcatgtaaataagttagattttaggtatatcattaaaacagaaagcgaacttttgcatgtgagaagaaatcattaattgcttcaagcagaatatccgaatgactaattttaatatcaatatcaatattgacatttcaatatccttacca

SEQ ID NO: 83071 - DNA, 824 bp, Homo sapiens
cagatagatattctgctttgtttcaaaaggttagaagaagaagctgtaggtgttctggcatgcatatactgcttaaatcctcataatagttcacacacacacacacacacacacacacacacacacacacacatatatatatatatatakagagagagagagagagagagagagatgaaaaagctgaggctcgagtcctttatttaaaatacagctctaggaccatctaacttccaagctctaaaatccatgctttgacaagccaaagaaccagacacggtgaagaagggtgagaagacagggacataaaggaaagtcctggagattggggtgagacagtgcacaaggagcagaaattagagaagaggatgtggaagagacatgtggaaagggccaggaagaaagggagaagaaaatgcagggactgccagggctacagttcaagtggataattccagtcctggtagcaattagagctgacccatttggcagtgcctgcccctctgcaggggtttgttgccaccctctttcctgccaagactgtttacacaaccttttttagccctggctagagtagcctggttctatccagcatggagaatttggtttccacctctactacactaccaagtggaaagaagaggtgtactgtaatctaggtgggggaagctgtgtagcagaaacttggggacttctagaagctgcctgtccctcatgccccctggagtacaatggagccaaaggtactccattctcagcatcttactctatctttgacatcttcttttgactcagtagatcctttcaaatccccatctctgaga

SEQ ID NO: 83072 - DNA, 795 bp, Homo sapiens
aaaattcaataaatcgatgattatggtttcctagagcaatttcattgaatttccatgaacctccaacatcaggggagtacataaattatacaagactataaagtctgacacagtaaaagtggttcattctgaaaaaggaaatgaattctttgaccttgactatcaaaacaccgccattgcttattctatactttcctttggagtttacaattgagaagcctgttcattttgttttgattcattaatacttttggggtttgagcttatggacacaattttcctaaatcttaggaagggtaggctgatcaacaaaacagccaacaatattgtttgtggcaccctccaaattgtcagtggccttagttaggatcagggctcactgtacttggaaaacggtgggcayaaaattaccagtcacctcagataataaagaagttgtacgtgcatgtcggcttctttgctttttaaacagacgtgtggcatatatttatctaagaaatactagagaagaaccagccaagtgtagagactgagggtggggtatccataataaactatttagtttgaatccctgttccacatctcactagctgtgtgaacttaagaaaattactttacccttctgtgcctcagtattctcgtctacaaaccgggaatcataatcacacctacatcataatgttgcaaagagaatccaatgtgtgaggatttgtaaggaactcgggaaagcttattgaagctcttgggtaactcaaagataactcatgggagatttttcatggttttttttttttt

SEQ ID NO: 83073 - DNA, 601 bp, Homo sapiens
ttcctagggttctgatttctaatccttcctaacccagctcactgccccccaccaccaccctccatccccccattctgcctcagtttctcctttcctgattcccacaatttccagcaatcagtcttggcctcagattcctgtccttcaggttccagtgttccttgggtcctctctctcctgtgatcctctctgattaggggtgggagggtgtgagttggaattaaacccagcctttattggagtcctagggctggattctgcattgtgctctgctgtgtcattgcaccttctcgtttccgctctttctgacttgcttcatcctcttcatactctaagctcagccagcgcatgttgaccccaccggtggagcgccgctccttcccacctsctgcttctccttctccatctccacctctccatcttctgctcctggccattcctggcacggggacccgagctctgagctcttgcctttttctggggcaccgtcttctccttctcgtcaccccgggcagtgcccctgggctcctcggctgctgcgggcctgggccacccgtgtcagcgcggccctgctgacagcgcagttcacacccggggcggc

SEQ ID NO: 83074 - DNA, 841 bp, Homo sapiens
gataccatgaggaatgggcatccctgcaatattgtcatggctgtcaaaattgttattggagctgggcaagtgggcgctctcctgccattccatcctgcttagatttcccattcaacaccaatcttatttcctttkttttttttgacagagtctcgctctgtctcctaggctggagtgcagtggtgggatctcggctcactacagtctccacctccagggtttaagtgattcttgtgcctcagcctcccaagtagctgggattgcacgtgcacaccatcaagcctggctatttttttttttttttgtatttttagtagagacagggtttcaccatgttggccaggctggtcttgaactcctgacctcaattgatctccccgcctcagcctcccaaagtgctgggattacaggtatgagtcaccacatctggccccatttcctcttataccataagtcattgcctgcagatgtgttttctccattagtttgcaaaagcttcctgagagtaggtctgtgcctcatttattctggaatctccctggcatgaagcacagggtttatcctcagtaggcattcaacaaatgtttaatttcactcaacagctcctcttaccactgcccccaccttatctgcaggtggctaagtacaatcagaacaagtaggtatcataagatttagtccagagtcaatttgggaagaaattactttagtgatatgaaaagaaaccatgctatttagtcagaatacttctgagagtatcccctgtccaagcatttgctgaatttctatctactaattttcaggtggaacagtatggttgcagagagtccatttggacaca

SEQ ID NO: 83075 - DNA, 841 bp, Homo sapiens
gataccatgaggaatgggcatccctgcaatattgtcatggctgtcaaaattgttattggagctgggcaagtgggcgctctcctgccattccatcctgcttagatttcccattcaacaccaatcttatttcctttgttttttttgacagagtctcgctctgtctcctaggctggagtgcagtggtgggatctcggctcactacagtctccacctccagggtttaagtgattcttgtgcctcagcctcccaagtagctgggattgcacrtgcacaccatcaagcctggctatttttttttttttttgtatttttagtagagacagggtttcaccatgttggccaggctggtcttgaactcctgacctcaattgatctccccgcctcagcctcccaaagtgctgggattacaggtatgagtcaccacatctggccccatttcctcttataccataagtcattgcctgcagatgtgttttctccattagtttgcaaaagcttcctgagagtaggtctgtgcctcatttattctggaatctccctggcatgaagcacagggtttatcctcagtaggcattcaacaaatgtttaatttcactcaacagctcctcttaccactgcccccaccttatctgcaggtggctaagtacaatcagaacaagtaggtatcataagatttagtccagagtcaatttgggaagaaattactttagtgatatgaaaagaaaccatgctatttagtcagaatacttctgagagtatcccctgtccaagcatttgctgaatttctatctactaattttcaggtggaacagtatggttgcagagagtccatttggacaca

SEQ ID NO: 83076 - DNA, 738 bp, Homo sapiens
tagtttggtgatggcagctgccactgtaatgtctgacctatggtgctcttcagtgatgctggggctcccctcacaaatttatttctcacagtcatggtgacaggtgtgtcctctggacactcctggggtgggtgagcaggtcttacaagataaatcctctctaacattctaatcaccctaagrcctttggatacctcccttcagtatatgaaggcaactctggaatttcaacttcatttaacgtagtccatcttttggtccatgtttcagtcaaacaatcaaacaaactgttagaacactttcctatcccttgccctagaagatggagtccagaatctctgcttagtgggcccatatgaataaattcatcctgatccaactttatgtttcttacaccattattccacacttttaatatccatttctactcatattctccagatttctgtgtgaaaacaagtttgtatgtgcttagtgtatatgtgtgtgttggccagttaagacgtgaaataccttgatagcctttattttttcttttcattcttcttttttgtgacagttcttaaaaatttcttttctttatgttcactcaagactaaaatactgactgggacaatttatatttcataggtttagtatgttttaaatacctgtctgtgtgtgtgtgtgtgtgtgtgtgtgtgtctgtgtgtgtgtgtgtgtgtctgtgtgttgtgtgcaggaggtttaggtcactgt

SEQ ID NO: 83077 - DNA, 537 bp, Homo sapiens
agaaggtaggctggggtagaaggagcacaaaataaaccaaaacattccaggtggtgagyatgaggattatgggaaggattagcttttctacttctcattcagctgttgaatagccagattattctgactatgcatatgattgacaagttgctaagcagataatatttaccctctttctttctctctgtctatccacacacgcactccctgcttaaaaattttaaacactataataaataaataaccttaatctattctccaaatgatattcacgggtaacattttttcttttgcaagtctcgttgagaaataatgatatgattagggagtattgtggctctgtgagaattttgctagttacttatttttatcattatagatatctcatctgtataatgggaaaaatttttttttactgtattgtgattgtgagaattaatgtctataatgcatgcaagactcctggcatactaaagtagcatgtctcagataacctagcagagtgtttgtaattaacagaattaatagacttcatat

SEQ ID NO: 83078 - DNA, 742 bp, Homo sapiens
catccccaagatatctcattatgttatgtgcaaatgttccaaaattttgaaaaaaaaatgaaatctgaaacacttctggtctcaagcatttccaataagggatattcaacctatagttcccaaaaaattacaacaatagtggggttggagacagtaaagaaaataagacaaaggttctgtcaccagagaacttactttctgagagaagaaacagaaatagctatcaatatctggcattatattgtgcragtattatgaagaaaaagacacgaatctggggataaagactgatgaaacatgtcatgttaaataggaggagaaaaacattgagcagaaataagaatagtatgaaagagtcaatgaatattgaggaacaaaacattctaagaggtagctacagaggtgactgataagatggaatcttattgtaccacttatttattgaatatttttccagaaaaagaagcaagcaaatagcaaagaagaatcaaaataaaacactggagattatagatttattttgaaatgctagcgactgtcctgaatacaacgtattttctacttaacttactattccgttttatttgatctgtaactcatgaaaatgctaaaacttctggaaaggtgatctttgatgctggggagggtcaccaggaaacgccagctgccagccttccatggccctcactgggattgcattcattaccacagcacaggacccacttcgttcctgtagtctcaa

SEQ ID NO: 83079 - DNA, 771 bp, Homo sapiens
atttatttgagccaaggtagaggattgtagcccaggattaggcccaagttgcctaatgctctggagaacaagagagaggctcacttttttttgtttgtttttgttttgttttgtttgtttgtttgtttttgagatggagtctcgctctgtcgtccaggctggagtgcagtggtgcaatctcggctcactgcaacctctgcctcctgagttcaagcgattctcctgcctcagcctcccgagtagctgggactacaggcgcttgccaccaggcccggctaattgaggctcacgtttttaaaggatgaatcaggagaagagggaaattacaaaagttgtttgtcaggaattctcattggtttacaggaataccattggttggtaattacacatacattgttggcctatagggtgtatgtcattttatggctacttggagtcagtctagagcccctattgcaaattgtccacctttgttgaagtattatttttttttaaattccattataggaagaaagkttagaaaaagtgaaaattctcagaataccaaagaggtttaagatactgtactcggcaaaaaaattaaaaaattaaaataccaggcacagttggtagctcccctttgccaggagaggcaacagttttgtcctgccaaacccatggttggattcaccccaaaagcagcagcagcggatttcccacaagggagtgccccaaaccatcctgggaaggcaccagttgtgattccaaagaaagaagcaatcaacgcctgga

SEQ ID NO: 83080 - DNA, 613 bp, Homo sapiens
cctaattaattcagtggatggcccacagtagttactcggtaaacattacatcaaaacactgaaaaatcttgagctaggtgattttaaaggtctggccgttttttgatatgtatgtttctacttgtaccatttatcaggtaaattcatgaaatttgtaccagatcttttttacattttcatttatgttttgttttagaaataaagcacatttttcaaaactgcaaattgatgaaagtgtatgttaatgatgtccatgtttaatgtttcaaagaattttcacattatgacatttcctcttcaaagcaatcctatccttatgaacgatactattgccatttttttcagatgatggaatgggttcattatagggccttaggaaaattcctaaattattctgtgtttcagtgatttctctgtcccccattttactctcccattctgatttctgactgagcacaatgttcaaatgccttttctgcataaaatatacaaaaagatactgttggcagaaaaaaaaawttctgtctaaaacgtgtgccaaatatgaacaataaaaaagaatgcctaattatgtaaagtttactgcttaatttaaaagcctttctattgtaca

SEQ ID NO: 83081 - DNA, 691 bp, Homo sapiens
atgtttttgattactgaagtcttattttagcattatttactgtagcatcaacttctctaagattgaagaggtttataactgaaatgttctgtaggactgtggtcaaatactggtgcacctcctctagtttttcaagtatgtgtactagcacatggtgttttaagacacacttgtattaatacagaagagtggaagggcagtgttgggaaaccracaaattttaacgttttctaaagggaagagaatacatatggcacaaaaatcagatagtaagtacccagatatagatgcaaagtacatcttagtcaccaaaaactatttagtttttctttgtaagttttgtgttattttgaaaatagaatggaacaattttctccccttgaaagccagcatattttttaagaattatatcgggtctctatttgaaaatagtccttctattcgctttgtatactcccacaggtctttagtgaagctgcaataatgcacctttttatttaaagaatgagtttagggaattgtgtctgtttcaagttgtccctagtcattttttaggaaagcatgaatgaatttcaagggctcttaaatgaaggttaaataaagaacatgaaagaggatatttagggacttgtggaaattattctgttaattgtaatttcctcttatgaaaacagttatttactgccaggtg

SEQ ID NO: 83082 - DNA, 647 bp, Homo sapiens
ttttccttgctgggtttgcaagctccgtggggatgtatttctgcctggtactgtggctggcacacagaaggggctcactgagtacctgggtgagaaagaaaagggaaactaaaggaaaagatagggtgataggrgagatgtgaatacactggtgtgctccccaggttcccacagcagagtgcagccacttgttcatataccctctggatcaggtcccctggacatgggatgagatgaagcatatggtagcactttaaggaacaagcctttgaaatccccttctgagctttactgggtacttagctctttcttctgctttggaaagcttcaaagttatttccaagccctaattaccccacacaccatagccccaggcagctgccaaacttggccaaacttggcctcaacactcccagttgcaaattagaaaactaagcaccaaagtaaaagcttgcctgggtcccaaagagaaaatccacctgaaatgttccttgttcctcaggaaaccacctatggaacaagggctgagggctgagaattctttgggcctcagtttcctcacatgagtgtgagacgttccctgctgtacaattccttgattctcccctgtggatttacccagttcaggggctgcaaggaggtagcac

SEQ ID NO: 83083 - DNA, 1362 bp, Homo sapiens
tccattccccactcctgggaaggtgatgggcacatttgtccaagtcctcttttgctttaacttcttggggcttcccacagcctcgctggcccaccaagcccaaggatggagcttcccaaaacttggaatgttcccaagggagggatcttttccctggtgtgctcacccttgcattaaattaagaagcatgaaaaatggttattactttcagaattcttaactgttacagcgcttttagtctcagccagaccctgtttagtcactttgtctatttgaaccctcacagcaacccttaagaggaatactctttatgacagcatcttactaatcagacgacaacacaaggagataagtaattagcccaggacagagggtggaagtggtgccgcgggtctcaatccactcagcttttcaaggcaaagaggtcaatgatgcaacttctctttggcctggctatgtcttcagcacctctttattgcttgaaatctttaaacaaaaacaaatgtcaaggtcaatccggagagcaacagaagtgatacagagggatatatataattgtacggctaccttccatgtctgcaaggtgagactgattcttattttcagtactgtcaaagagtttgctttttctataaatacattaaggaaatatgattgtttaaaagaaaatgttatggaaaatagcagcgcaggtgttggcagaaatggcaagaatcgttttgcatctgttatgcagacagggactatcttgctcgtggctttatatatgcagtgtggatccctatttgtggatgggtaggggtccctctctgatccacaggtcatatgctcatgttattgttaggaacaacatgggacatacagctaagcccaccaggactggtttatttgtctggaagtactaaaatgtccctgtgctatgaataaagataataaaatcatagctattacagactacttgagacatgccaaacgctatattaagttctctatatgaattaagtgatttgttcctaccagccagaccctgttattatgcaagggaacagagtaggagcctgaaccacagagaggttgtttcaccctggtataaatgacacacctgaaatttacactcatgcaacatcattccttcaaccaccaccctatgtcactacttcatgtaaaacrcaaggacatgaaaaacctggcacagggacagcagagggaagagtaacaagcgggcagtcaatctttcttcatagctcttaacctccctgagcatccgtgtgccatctatccagtcagggcacaatggagtcaactaaccaagggtccttccagctaaaaactgtgacaggcagagcttagcatccacttaca

SEQ ID NO: 83084 - DNA, 673 bp, Homo sapiens
tccttaacgtggctgttgcgcaccctgggggcggccctttggctcacgctcgctttggaggggctgtgctcctggcggtacgcggcgtccctgctataatcccggccctcccgaatttcccggagattgcactccattcctgcccttgggcggtccgggaacccagcctcaggtggtcgcggtatccccacccccgcaccccgcaccagtgacgtgagcttcgsctctgtgggagtccatgtgctaccccagcctagtgctcacgtccccagataagaccgaggcgggaagcgcagcgagggagttgtgtgcagaggaccagcctcccatgtgatcttcgacccacctgcatagtcacccaggtcctttggcctcatttttccttttcacagcacacagcaacaggccagatacagggctctgcctccctcccttccattctccactcctgagggggcgatgtgcatatttgcttaagtcctcttttgctttaacttcttttgggcttcccacagcctagctggcccaccaggactaaggacatccaaagcttgggacgtcaccaagggagggatcttttccctgatgtggtgaccctacattaaattaggaagcatgaaaagtgcttatttcactttcagaattcctgactattgccgagcttttggtcttg

SEQ ID NO: 83085 - DNA, 1765 bp, Homo sapiens
cctctgatttgccccttatggcaaccagttgggctggtcttgggctacatcttcatttgcacaggagtaactttgtaacttcacttcagcttctaattggttgctttctgcaatcagtcagactgatagcggaccactacttcttgtacatagagtgtacactaagcaaccaatgagaaacctctagaggatatttaaaccatagaaaattctataaccaggcccttgagccactcgctggggccagctcccaccctgtgcagtatacttttgttttcaataaacctccgcttttgttgcttcctccctcccttactttgtacattttgtcaaattctttgttcraggtactaagaacctggacaccctgcaccggtaacagtggtactgtgggtctcaatccagtcagcttttcaagggaaagaggtcaagggcaaactttccctttggcctgggtatgtcttcagcacctctttactgcttgaaatctttaaacataaacaaacgtccaggtcaattctggaagtgacagaagggatgtatatgtaattttatggctaccttccatatctgcaagtgtgactgattctttttctcagtagtgtcaaagagtttgcttttcctataaatatattaaagaaatatgattacttaagagaaaatgttaaggaaaataacagcgcaggcgatagcagaaatggcaggaatccttttgcatttgttatgcagacagggactgtcttgctcgtggctttatatatccaatatggatccttatttgtggactagtggaggaccctctctgggccacaagtcacgtgctcctgttattgatgagaacaacatgggacacacagctaagcccaccaggcctggcttatttgtctagaggtagaaaaatatccctatgctatgaataaagattacaatcaaagctattacagactagtcagcacaagccaggcaccattttaagttcttcacatgttttaagtgatttgctcctaccagcagactctattattatgtcaattcacagttgaggagactgagccacagaaaggttgcgtcacccacatataagtgacgcagctgggatttgcactcatgcatgctgactgcatcatggtgccctcaacaaccaccctatgctactgtgtcatgtaaaacccaaggacactgaaaatctggcacagagacagcagtgggaaggacactgagctagcagtcaatccctctgcatagctctgtgacctctcagcctcaacatgccatctcacccatcagaggcacagctgcactaactaaccaaggtcccttctagctctgaattgtgacagacagttctacaaaggaagaaatggaggctcagagaggttgagcaacctgcctaggtctcacagccagtaggtggtgaagtgggcagttaaacaagactgccctgaccctgaaccccatgctctttgcacagcctgccttctggaaccctctcttcaaaaggagtacctgcaggccagcatggtcctgattcctggcccgcttgaccccttttcttctttgaacatcaaatagcaattcccgcaacaaatagccagaggaactaattgctgccattaattacaagttacctggggccccctactccttcctaatgaacaccaccacactttagaaactgcataatatgccatcacctccgcataggcggactcaaagtacttcatctggaactaatccttctctgtactccagcttgctgggagga

SEQ ID NO: 83086 - DNA, 1765 bp, Homo sapiens
cctctgatttgccccttatggcaaccagttgggctggtcttgggctacatcttcatttgcacaggagtaactttgtaacttcacttcagcttctaattggttgctttctgcaatcagtcagactgatagcggaccactacttcttgtacatagagtgtacactaagcaaccaatgagaaacctctagaggatatttaaaccatagaaaattctataaccaggcccttgagccactcgctggggccagctcccaccctgtgcagtatacttttgttttcaataaacctccgcttttgttgcttcctccctcccttactttgtacattttgtcaaattctttgttcaaggtactaagaacctggacaccctgcaccggtaacagtggtactgtgggtctcaatccagtcagcttttcaagggaaagaggtcaagggcaaactttccctttggcctgggtatgtcttcagcacctctttactgcttgaaatctttaaacataaacaaacgtccaggtcaattctggaagtgacagaagggwtgtatatgtaattttatggctaccttccatatctgcaagtgtgactgattctttttctcagtagtgtcaaagagtttgcttttcctataaatatattaaagaaatatgattacttaagagaaaatgttaaggaaaataacagcgcaggcgatagcagaaatggcaggaatccttttgcatttgttatgcagacagggactgtcttgctcgtggctttatatatccaatatggatccttatttgtggactagtggaggaccctctctgggccacaagtcacgtgctcctgttattgatgagaacaacatgggacacacagctaagcccaccaggcctggcttatttgtctagaggtagaaaaatatccctatgctatgaataaagattacaatcaaagctattacagactagtcagcacaagccaggcaccattttaagttcttcacatgttttaagtgatttgctcctaccagcagactctattattatgtcaattcacagttgaggagactgagccacagaaaggttgcgtcacccacatataagtgacgcagctgggatttgcactcatgcatgctgactgcatcatggtgccctcaacaaccaccctatgctactgtgtcatgtaaaacccaaggacactgaaaatctggcacagagacagcagtgggaaggacactgagctagcagtcaatccctctgcatagctctgtgacctctcagcctcaacatgccatctcacccatcagaggcacagctgcactaactaaccaaggtcccttctagctctgaattgtgacagacagttctacaaaggaagaaatggaggctcagagaggttgagcaacctgcctaggtctcacagccagtaggtggtgaagtgggcagttaaacaagactgccctgaccctgaaccccatgctctttgcacagcctgccttctggaaccctctcttcaaaaggagtacctgcaggccagcatggtcctgattcctggcccgcttgaccccttttcttctttgaacatcaaatagcaattcccgcaacaaatagccagaggaactaattgctgccattaattacaagttacctggggccccctactccttcctaatgaacaccaccacactttagaaactgcataatatgccatcacctccgcataggcggactcaaagtacttcatctggaactaatccttctctgtactccagcttgctgggagga

SEQ ID NO: 83087 - DNA, 732 bp, Homo sapiens
atctcccctcacacttgtgcagcattttaaggttgatcaaggcactgggtgggcgtgtatcatctcattcaatccacaaaacacactttgtaggatagatttgcatatgttcattttacagacgagaaaccaaagtttcgagaaattgaatggttagttcatggtcatccagcaaataccagttgttgagagccccagtctgtctgccgtccacaccatgtgcaggtccacctggcaatgtgcttcaggagacaaggcgggtgggcatcatggatggccattctgggctatggttcagtaagttttgcagaaagcacgctggatgggagtctagatacacctgaaaagcatcagatacatctagatacatctgaaaagcccatggcttttcaaggtttatttctcccttagagaaacggaaggtgrtttgaagggacaatgaggctccaggatctggccccggggtactctctgcctcctgctacccccgggttttagaggctgggaactgccagttttcaaactgctttttaggtctgcagaaacttcaaccttttaaaaaaggaaacataagaactccaacttataaaatggacgcaaacggcactgaaggtaggagcctcttccgacctcctcgaatgatcaccccagccagtttcaggtcctggctttctgggtgagaatagtgaccgaaaaccacatgggaatgcagaaagcaagtaacaaaacaac

SEQ ID NO: 83088 - DNA, 1392 bp, Homo sapiens
ctcgtgatccgcccgcctcggcctcccaaagtgctgggataacaggtgtgagccaccgctcccggcctatcttgctttttaattttatttttttagagacgttcactccctatgttgcccaggctggactcgaactcctaggctcaagtgatcctcccaagtagctgggactacagcagtaggcgccacctcgcccaccttgctttttaatttaaagcagggtctgcatatcatctgaagtaatctctctttggggacaccccgcatgtccagaactgccatccggtattgtggtggccctaaggctaggggtagcatggagacttaagtgcaaaggaggacctggacaaatgtgcccacacatcctctcaggcgaggagaatggacaggagagagaggccgatccgtgttccccgtgttgctatgtaaggaggtgcgggaccgaggaacctaggtgtggacagggacaggcaaggcgggggacgaagagaaatgaaagccacatcggtggcggatgttctgaacacaactcgctcgctaccgcacgttccccgctccgcactcagcggatcccgggacggcagcaggtgggctgcacacggactctgggacaagtcgagctgaaaaccgcggagctaggggtggggtggagacgcccgcgacgccaaggctggggtcccggaacacgctgggaggagggtggaaggcaacctcggggaaactgggaaaggcggcctggacttcgggaacaccgcgtacctgcgggggcacagccccacccgagcgaacgggctccaaaggggaggtcccgcggtgcscaccgcgcagagctcagggggtggtgcgcccggcccttctgcggcgcacagcccagcccaggaacgcgggcggtgcggactcagcgggccgggtgcaggcgcggagctgggcctctgcgcccggcccgacctccgtctataaatagagcagccagttgcagggctccattctgctttccaactgcctgactgcttgttcgtctcactggtgtgagctccagcatcccctttgctcgaaatggaccccaactgctcttgcgccactggtaagggaagctctgcgccctggaatccccatttcccagccctattacagagggtctctgggtttcaggaagtcgcattttaagttctgagcgacggggactccagtacttcgttagatgctttcttcctgatcacgcccctgagagcattgccctcatccctgggcctctacgtcagagttaagaatactgaggctcaaggctgaactgctccacatcacccagttggtcatgggcctgctggctgggccccagtgctctgtccaggctctgagcaatcagtgtggttgggggtgctggaaacattg

SEQ ID NO: 83089 - DNA, 581 bp, Homo sapiens
atggcgagctgaagaggcggctagagtcgggacaggttgcacgcgggttcgctgggacttggaggaggcgtggtggagtgcagcgcggcaagcagtgtttatagctagaaagagccgggacgagtgcaaaagccccgccccggccgggcgctgcctgcacacgccccgcgctgagtcacttgcggctccaggcgaaacacccggccgcgcgcactgggccgggcgcacccggctctgcacacgggccgcgggcggtcagttccctgaaggcggcccacttgcgccycggggacgcctcggcgcggaaggggctgggtgcagcgggaggacacagtgtaccgggtgctgggtgcccacgccgtgcgcctccgccgtgtgcacagctcccctccctcctgtcctgtactcgaacctgagccgttagcgcgcgggtgaaagcgggacttgggaatgctgcttgcattcccaaaccggttggaagtgcagacaggttacaactctgtagcagccaaggcttaataattgtgcagcatcacagtaaacccgtggggtggttactgatgacgtatccgttgcatgtt

SEQ ID NO: 83090 - DNA, 1691 bp, Homo sapiens
cccaagaggtggaggaggctgggcctgccacgagagatgtgccggaactgggctgggggtgcaagcccgggaagatggatccagcttcaagactctgggagcagccacacctggtcatgggtctcctggactgagatgtcctcccaaacttctgaaccataaactacttttactcatcattggctccccagtgcccagcacagtgcctggcccttggagggtgataaatgaatacatgtccctactaggctgtgaactcctttaagggaggcaccacttggggatcactacagtattgccccctcctcccctccccagtgcctgccacagtgacctgctgatgaccatggatccaaatccctttctcctcrttagaagctctcagtccaaaatccgtggttccatgggtcagactgaggcccaggtggtccttatgggtgaatgatggagaccccaccaagctgagaactgggaggaatgatctccactgtttatggccaggccggttttttgcctttctgaatggcaacggcatatttcagcagaggtcctcagtagagccacatgcaggagatacatgcatttgtccactcgtcactcacttagtcatttgttcacttatatatccactctctcactcatgccttcagtcatttgattactcatctgattaattcatccattcatccaacattgtgcagaacattgaacaggtttagagatgcttcaggcacagtttttttacctgagagctcccagattggggcgagaaaggtaagagccatgaagacaaataatcatacagcagcttagcaagtagtaaatgtcatgagaaatgtacagacacatcagccaagggatacagagagagagatttctcccaactaagaaagggagtgatcagaggtagcttcctggaggaagtataatcagcaccagctccagaatttctccatggcgattgggtacggatggcagcttgtcagggaagctagtagctgcatcctctacagggcactttacaaaagactgaaagataggccgggcacaatggctcacgcctgtaatcccagcactttggaaggccgaggtgggcagatcacttgagctcaggagttcaagaccaggctgggcaacatggcagaaccccatctctaatacacaaaaaaattagccaggtgtgggggcttgtgcctgtggtttcagctattcaggaggctgaggtaggaggatcctttgaacccgggaggtagaggttgcagtgagccgagatcgtgccactgcactctagcctgggcaacagaatgcaaccccaactcaaaacaaacaaacaaactgaaaagtagtcagctgcccataccaaagattggggttataatggagatgaagaggtggttaaatctctcccaagtcccctcttgctgcttctgctttgtgtgtggtctagaaggaaaggttgcatgttctggatgggcacaactccctgattttccaccctctcactcatggggagggtgcagtcagtagaggttcttggtgggaacttctaaatctcagggccaaggatagaggcccctgcctgcccatagtaagggcttttacagtcaaccagggagataggatgaggccccgagccgaggcaggaggagcccctgtgaaggagggaacagaaatggcagataatagaatgc

SEQ ID NO: 83091 - DNA, 1691 bp, Homo sapiens
cccaagaggtggaggaggctgggcctgccacgagagatgtgccggaactgggctgggggtgcaagcccgggaagatggatccagcttcaagactctgggagcagccacacctggtcatgggtctcctggactgagatgtcctcccaaacttctgaaccataaactacttttactcatcattggctccccagtgcccagcacagtgcctggcccttggagggtgataaatgaatacatgtccctactaggctgtgaactcctttaagggaggcaccacttggggatcactacagtattgccccctcctcccctccccagtgcctgccacagtgacctgctgatgaccatggatccaaatccctttctcctcgttagaagctctcagtccaaaatccgtggttccatgggtcagactgaggcccaggtggtccttatgggtgaatgatggagaccccaccaagctgagaactgggaggaatgatctccactgtttatggccaggccggttttttgcctttctgaatggcaacggcatatttcagcagaggtcctcagtagagccacatgcaggagatacatgcatttgtccactcgtcactcacttagtcatttgttcacttatatatccactctctcactcatgccttcagtcatttkattactcatctgattaattcatccattcatccaacattgtgcagaacattgaacaggtttagagatgcttcaggcacagtttttttacctgagagctcccagattggggcgagaaaggtaagagccatgaagacaaataatcatacagcagcttagcaagtagtaaatgtcatgagaaatgtacagacacatcagccaagggatacagagagagagatttctcccaactaagaaagggagtgatcagaggtagcttcctggaggaagtataatcagcaccagctccagaatttctccatggcgattgggtacggatggcagcttgtcagggaagctagtagctgcatcctctacagggcactttacaaaagactgaaagataggccgggcacaatggctcacgcctgtaatcccagcactttggaaggccgaggtgggcagatcacttgagctcaggagttcaagaccaggctgggcaacatggcagaaccccatctctaatacacaaaaaaattagccaggtgtgggggcttgtgcctgtggtttcagctattcaggaggctgaggtaggaggatcctttgaacccgggaggtagaggttgcagtgagccgagatcgtgccactgcactctagcctgggcaacagaatgcaaccccaactcaaaacaaacaaacaaactgaaaagtagtcagctgcccataccaaagattggggttataatggagatgaagaggtggttaaatctctcccaagtcccctcttgctgcttctgctttgtgtgtggtctagaaggaaaggttgcatgttctggatgggcacaactccctgattttccaccctctcactcatggggagggtgcagtcagtagaggttcttggtgggaacttctaaatctcagggccaaggatagaggcccctgcctgcccatagtaagggcttttacagtcaaccagggagataggatgaggccccgagccgaggcaggaggagcccctgtgaaggagggaacagaaatggcagataatagaatgc

SEQ ID NO: 83092 - DNA, 1575 bp, Homo sapiens
agatcaaaattattctttgacttctataaattgccacttatattggaagaataggcaattttctattccaaagtgttttttgttatctattgctgcataacaaaccacataatggcttaaaacaatactaatttattatttctcatgattctgtgggtagactgggtggtttttctgctctgtgtggtgtcaaccacagtgttgggatagctgggagatamaaaacaatatcactcagatggctggcatttgatacaggctgctagctgggagcttagaagttggtcgggggcttcagttctctatgtggtcctatatatatagcggtctgggcttcctcacagcatggcagtcaggctcaggagaaagcattccaagtgtgtaatatgagaagctgcagatctcttaaggcccagcctctgcagttacagtgtcacctccaccacattctatttgtcaaaacaagttacagaagcagcccagattcaagaggagaggtggaaaaccatgtttctcaatgggaagagtgtcaaagaatttgtggccacccaccagaccaaagccaatgagttaatagtattggatatccttaggctataaagagcctgagctacagaaaattactgagccagtttcaaacttacaactgctttctccagactttctgttacataacagaattaagagtactcattgctaaagatactgttgggtgggtgttttgttacttgcagccaaatggatcctaaataataaagtacttcactttcatcaccaaatttcagcaggaaggctgtgctaggatgacttagctaacagatcagagtgagagaatttgagtgaatttctcctgaacaaatatgagacagttttctagggactctcagaagcatggccaagttcttgtacagatagttgagactcaaagtcatcacaatctggatctaatataaatatgattttaattggactcacaggctggtgagttgcagagggcagacattgacagtcagatctcctacaatgactagctgattatacctaatcaagttgtcttagtgccactcaaagtgccaatctgcaatgaaataagaagattgcaccagaatgtaaaccaacacactgcttccttcattgagaagtcttgccaaaaaaaaaaaaaaaaaaaaaaaagtaagctgaactaaacagcatgcttagtgatacagttgaattacactcaggcacaagttccttatctcctctctctttgctaactggtaacaaacagttgcggacctatagttgttctacaaaccacacaggctaattaatgggttataaaggtcaggcaacaggctagactacatacgataatttacaaggaaagaaatcccatgattctactctgaaacccactccagtgattcacagcaaaggacttcttttcatttaaatgtgctggctaccaaattatgaaattttgttgaataatattgaatcagtgtatttgtagatatcattccccacatttttttaaagtctatgtctaatttaactatttaactaatttgaaatttgttcacaaatgagaaa

SEQ ID NO: 83093 - DNA, 1575 bp, Homo sapiens
agatcaaaattattctttgacttctataaattgccacttatattggaagaataggcaattttctattccaaagtgttttttgttatctattgctgcataacaaaccacataatggcttaaaacaatactaatttattatttctcatgattctgtgggtagactgggtggtttttctgctctgtgtggtgtcaaccacagtgttgggatagctgggagataaaaaacaatatcactcagatggctggcatttgatacaggctgctagctgggagcttagaagttggtcgggggcttcagttctctatgtggtcctatatatatagcggtctgggcttcctcacagcatggcagtcaggctcaggagaaagcattccaagtgtrtaatatgagaagctgcagatctcttaaggcccagcctctgcagttacagtgtcacctccaccacattctatttgtcaaaacaagttacagaagcagcccagattcaagaggagaggtggaaaaccatgtttctcaatgggaagagtgtcaaagaatttgtggccacccaccagaccaaagccaatgagttaatagtattggatatccttaggctataaagagcctgagctacagaaaattactgagccagtttcaaacttacaactgctttctccagactttctgttacataacagaattaagagtactcattgctaaagatactgttgggtgggtgttttgttacttgcagccaaatggatcctaaataataaagtacttcactttcatcaccaaatttcagcaggaaggctgtgctaggatgacttagctaacagatcagagtgagagaatttgagtgaatttctcctgaacaaatatgagacagttttctagggactctcagaagcatggccaagttcttgtacagatagttgagactcaaagtcatcacaatctggatctaatataaatatgattttaattggactcacaggctggtgagttgcagagggcagacattgacagtcagatctcctacaatgactagctgattatacctaatcaagttgtcttagtgccactcaaagtgccaatctgcaatgaaataagaagattgcaccagaatgtaaaccaacacactgcttccttcattgagaagtcttgccaaaaaaaaaaaaaaaaaaaaaaaagtaagctgaactaaacagcatgcttagtgatacagttgaattacactcaggcacaagttccttatctcctctctctttgctaactggtaacaaacagttgcggacctatagttgttctacaaaccacacaggctaattaatgggttataaaggtcaggcaacaggctagactacatacgataatttacaaggaaagaaatcccatgattctactctgaaacccactccagtgattcacagcaaaggacttcttttcatttaaatgtgctggctaccaaattatgaaattttgttgaataatattgaatcagtgtatttgtagatatcattccccacatttttttaaagtctatgtctaatttaactatttaactaatttgaaatttgttcacaaatgagaaa

SEQ ID NO: 83094 - DNA, 1214 bp, Homo sapiens
tatccttatattctgtgcccatcctgtaagttctagtcacatacgacttctgcactctttcttgacaccaatattccaatcttttgccttccaaatttctgattaccagctaatccagtgcccattagccattaccaatgaatctgtgttgacctggacctctgaacatctttatgttcaagcaacattgacaagttctacccattgagaggttttctttcccccacttcaagatcaccactgagtggtgctataatgctacatcagttgacttccaactgacacaagaatgtcacgcaggtgcatccacaaaccaggatcgatttttttttctttttcagataacttattcattgggccctccgaggaatctatagttgttgattaagggagagggtgatgcagcaggtgatgccctaacagcgtgagcctcccctcccggctcagacaatacactgtgtcttcaagaccatgtaacagtgaaaaatgaagaatgagaagactattcttatagcatagttaatcaactaacacccagctcatgaaaaggaaaccaggactgtttctcaaagggagaatagtcaactgacaaatagggcatagctttgctccacaaccccaaggaaccacactgtaattctcctagaggggcttgcyacaggttccatgcaccatcctcatctgatacagacacttcagccactattagatcagctgggttattagggccaagtggtagcactgcttgctctgcagtctggaccatctgaaaagccttttaatactctgggccctactccaagttggtagccatacaggtagctcagtaaatgggtccaagcagcacatccaaatgtggtatgtctccaaaagccaaaagagatctgccaagcttgtgcctctttcacagtggaaggtgcaggaactagttttttttttttttttttttggcgggtgggggagtctcgctctgtcaccaggctggagtgcagtggtgcaatctcggtttactgcaattcttctgcctcagactcccaagtagctgggactacacgtgcgcaccaccatgcccagctaatttttgtatttttagtagagacggggtttcaccctagtctttcactttggatggggtatcccaaaatgctccaggccactggccctctatcagctttactgaggtgatgggtccttatgttcctatgattttttaa

SEQ ID NO: 83095 - DNA, 1214 bp, Homo sapiens
tatccttatattctgtgcccatcctgtaagttctagtcacatacgacttctgcactctttcttgacaccaatattccaatcttttgccttccaaatttctgattaccagctaatccagtgcccattagccattaccaatgaatctgtgttgacctggacctctgaacatctttatgttcaagcaacattgacaagttctacccattgagaggttttctttcccccacttcaagatcaccactgagtggtgctataatgctacatcagttgacttccaactgacacaagaatgtcacgcaggtgcatccacaaaccaggatcgatttttttttctttttcagataacttattcattgggccctccgaggaatctatagttgttgattaagggagagggtgatgcagcaggtgatgccctaacagcgtgagcctcccctcccggctcagacaatacactgtgtcttcaagaccatgtaacagtgaaaaatgaagaatgagaagactattcttatagcatagttaatcaactaacacccagctcatgaaaaggaaaccaggactgtttctcaaagggagaatagtcaactgacaaatagggcatagctttgctccacaaccccaaggaaccacactgtaattctcctagaggggcttgccacaggttccatgcaccatcctcatctgatacagacacttcagccactattagatcagctgggttattagggccaagtggtagcactgcttgctctgcagtctggaccatctgaaaagccttttaatactctgggccctactccaagttggtagccatacaggtagctcagtaaatgggtccaagcagcacatccaaatgtggtatgtctccaaaagccaaaagagatctgccaagcttgtgcctctttcacagtggaaggtgcaggaactagttttttttttttttttttttggcgggtgggggagtctcgctctgtcaccagrctggagtgcagtggtgcaatctcggtttactgcaattcttctgcctcagactcccaagtagctgggactacacgtgcgcaccaccatgcccagctaatttttgtatttttagtagagacggggtttcaccctagtctttcactttggatggggtatcccaaaatgctccaggccactggccctctatcagctttactgaggtgatgggtccttatgttcctatgattttttaa

SEQ ID NO: 83096 - DNA, 1214 bp, Homo sapiens
tatccttatattctgtgcccatcctgtaagttctagtcacatacgacttctgcactctttcttgacaccaatattccaatcttttgccttccaaatttctgattaccagctaatccagtgcccattagccattaccaatgaatctgtgttgacctggacctctgaacatctttatgttcaagcaacattgacaagttctacccattgagaggttttctttcccccacttcaagatcaccactgagtggtgctataatgctacatcagttgacttccaactgacacaagaatgtcacgcaggtgcatccacaaaccaggatcgatttttttttctttttcagataacttattcattgggccctccgaggaatctatagttgttgattaagggagagggtgatgcagcaggtgatgccctaacagcgtgagcctcccctcccggctcagacaatacactgtgtcttcaagaccatgtaacagtgaaaaatgaagaatgagaagactattcttatagcatagttaatcaactaacacccagctcatgaaaaggaaaccaggactgtttctcaaagggagaatagtcaactgacaaatagggcatagctttgctccacaaccccaaggaaccacactgtaattctcctagaggggcttgccacaggttccatgcaccatcctcatctgatacagacacttcagccactattagatcagctgggttattagggccaagtggtagcactgcttgctctgcagtctggaccatctgaaaagccttttaatactctgggccctactccaagttggtagccatacaggtagctcagtaaatgggtccaagcagcacatccaaatgtggtatgtctccaaaagccaaaagagatctgccaagcttgtgcctctttcacagtggaaggtgcaggaactagttttttttttttttttttttggcgggtgggggagtctcgctctgtcaccaggctggagtgcagtggtgcaatctcggtttactgcaattcttctgcctcagactcccaagtagctgggactacacgtgcgcaccaccatgcccagctaatttttgtatttttagtagagamggggtttcaccctagtctttcactttggatggggtatcccaaaatgctccaggccactggccctctatcagctttactgaggtgatgggtccttatgttcctatgattttttaa

SEQ ID NO: 83097 - DNA, 1214 bp, Homo sapiens
tatccttatattctgtgcccatcctgtaagttctagtcacatacgacttctgcactctttcttgacaccaatattccaatcttttgccttccaaatttctgattaccagctaatccagtgcccattagccattaccaatgaatctgtgttgacctggacctctgaacatctttatgttcaagcaacattgacaagttctacccattgagaggttttctttcccccacttcaagatcaccactgagtggtgctataatgctacatcagttgacttccaactgacacaagaatgtcacgcaggtgcatccacaaaccaggatcgatttttttttctttttcagataacttattcattgggccctccgaggaatctatagttgttgattaagggagagggtgatgcagcaggtgatgccctaacagcgtgagcctcccctcccggctcagacaatacactgtgtcttcaagaccatgtaacagtgaaaaatgaagaatgagaagactattcttatagcatagttaatcaactaacacccagctcatgaaaaggaaaccaggactgtttctcaaagggagaatagtcaactgacaaatagggcatagctttgctccacaaccccaaggaaccacactgtaattctcctagaggggcttgccacaggttccatgcaccatcctcatctgatacagacacttcagccactattagatcagctgggttattagggccaagtggtagcactgcttgctctgcagtctggaccatctgaaaagccttttaatactctgggccctactccaagttggtagccatacaggtagctcagtaaatgggtccaagcagcacatccaaatgtggtatgtctccaaaagccaaaagagatctgccaagcttgtgcctctttcacagtggaaggtgcaggaactagttttttttttttttttttttggcgggtgggggagtctcgctctgtcaccaggctggagtgcagtggtgcaatctcggtttactgcaattcttctgcctcagactcccaagtagctgggactacacgtgcgcaccaccatgcccagctaatttttgtatttttagtagagacggggtttcaccctagtctttcactttggatrgggtatcccaaaatgctccaggccactggccctctatcagctttactgaggtgatgggtccttatgttcctatgattttttaa

SEQ ID NO: 83098 - DNA, 1214 bp, Homo sapiens
tatccttatattctgtgcccatcctgtaagttctagtcacatacgacttctgcactctttcttgacaccaatattccaatcttttgccttccaaatttctgattaccagctaatccagtgcccattagccattaccaatgaatctgtgttgacctggacctctgaacatctttatgttcaagcaacattgacaagttctacccattgagaggttttctttcccccacttcaagatcaccactgagtggtgctataatgctacatcagttgacttccaactgacacaagaatgtcacgcaggtgcatccacaaaccaggatcgatttttttttctttttcagataacttattcattgggccctccgaggaatctatagttgttgattaagggagagggtgatgcagcaggtgatgccctaacagcgtgagcctcccctcccggctcagacaatacactgtgtcttcaagaccatgtaacagtgaaaaatgaagaatgagaagactattcttatagcatagttaatcaactaacacccagctcatgaaaaggaaaccaggactgtttctcaaagggagaatagtcaactgacaaatagggcatagctttgctccacaaccccaaggaaccacactgtaattctcctagaggggcttgccacaggttccatgcaccatcctcatctgatacagacacttcagccactattagatcagctgggttattagggccaagtggtagcactgcttgctctgcagtctggaccatctgaaaagccttttaatactctgggccctactccaagttggtagccatacaggtagctcagtaaatgggtccaagcagcacatccaaatgtggtatgtctccaaaagccaaaagagatctgccaagcttgtgcctctttcacagtggaaggtgcaggaactagttttttttttttttttttttggcgggtgggggagtctcgctctgtcaccaggctggagtgcagtggtgcaatctcggtttactgcaattcttctgcctcagactcccaagtagctgggactacacgtgcgcaccaccatgcccagctaatttttgtatttttagtagagacggggtttcaccctagtctttcactttggatggggtatccmaaaatgctccaggccactggccctctatcagctttactgaggtgatgggtccttatgttcctatgattttttaa

SEQ ID NO: 83099 - DNA, 653 bp, Homo sapiens
ttattttcttttctttttccttttttttgagatggagttttgctcttgttgcccaggctggcgtgcaatggcacgatctcagttcaccgcaacctccgcctcccagttcaagcgattctcctgcctcagcctcctgagtagctgggattacaggcatgcaccaccatgcctgggtttcaccatgttggtcaggctggtctcaaattcctgacctcaggtgatccactcacctcggcctcccaaagtgctgtgatgacaggcatgagccaccacgcccggcctcaggatggcttaatttctatatgtcaagcacaagcctgtcttggaggattttccctctgcaggaatggtctccccaacccctgcttcacatacagatcttattctgatgtcagtttaaatgtcaccgtcttcctaagatcaaggcttgccacttcctcctaagtggttacccagtgtctctctaacacatcattctgtcttcttttctctccatttgctcatggctacatgacactttmtttttttcttttctttttttttttttcgagatggagtctcactctgttgcccaggctagagtgcagtggcgcaatctcagttcactgcaagctctgcctcccgggttcaagcgattctcctgcctcagcctc

SEQ ID NO: 83100 - DNA, 1450 bp, Homo sapiens
atcctcaatactttggctcagtggccccaaaccaagtttctgcccctggctccccttcttcgagttacacctcacctgaactgcccaccttgctcccactggcacaatctctcgggtcagctcctatcagatcaaatggatgtgtttatttttatatgtatcatctctccaccaaccagattaaaaattccttgactgcaggaaaacttgtcttgtttaccgtaggatttctagcacccagcacatattagggagaaagcaatgatttgtggcatatggaaaggcatcagccttcatgctttgtgactcccctcttcttccttgctcaccagaatccgagaccccccagtatcactccagctcctcagttccctttgcctggaaaaatgaccagcatctttcccatttttctagtggaaacttagttaaataaaattattccagtatattaaggaacttgcacactggaagggcatctcatcatttggttaaccttccacagataaaggtatcggctttgtcagaccattgaccttgggggtcaggttacaaatcctctggaaaaaccccaaagggtaagtaagaaagtttttacaactttacagctggctgggctccatttscagagatctttaattaattgatttgaggaaaggccatagtgtttccattagttccctggattctaattagagccatggttaagaccctcaagacttagcagacctcggtctctgctgcggtgtctgagccacggggcaatggaagaagcacaatgggtctcaggtgagtctcctcagccttcaccatacactcagaccccatgagcgagcacacgccggagtaacctcggcgcagccaagaaaaggtacggactctctgagatccaagatccttaacctgaggtgtggcttcaactccactaaaacatattctgatccagcaatctctacaacttcatcacaaccctgaggggtgaaaatggaggcttcgtcattttatttgttcaaatttattctactaagtgatacaactggaaccaccaaccaggtatgtctgaccctaaaggctgtgcttagtcttttattaaagactgagctatatacaagctaaaccttcctaatatctttttagaaaactaactggtaaccaataggatcttctgagtcacagctgggccttcaagcatgcatgccagggccactgcctctgaaactcaaagtcaagtcagatctctcacaaagaaatccacatacctggaattttccttgtgggccagctctccctgtcttcaagcacggcccagaaggacctgccttgtgattaagcctggaagtgctgggcttgaagggacttggcaaccatttgtttccttaatgcccagctataagcaacagagtttatagttgcagatgaattttttctcttattgcaaatggctttgatttaa

SEQ ID NO: 83101 - DNA, 1450 bp, Homo sapiens
atcctcaatactttggctcagtggccccaaaccaagtttctgcccctggctccccttcttcgagttacacctcacctgaactgcccaccttgctcccactggcacaatctctcgggtcagctcctatcagatcaaatggatgtgtttatttttatatgtatcatctctccaccaaccagattaaaaattccttgactgcaggaaaacttgtcttgtttaccgtaggatttctagcacccagcacatattagggagaaagcaatgatttgtggcatatggaaaggcatcagccttcatgctttgtgactcccctcttcttccttgctcaccagaatccgagaccccccagtatcactccagctcctcagttccctttgcctggaaaaatgaccagcatctttcccatttttctagtggaaacttagttaaataaaattattccagtatattaaggaacttgcacactggaagggcatctcatcatttggttaaccttccacagataaaggtatcggctttgtcagaccattgaccttgggggtcaggttacaaatcctctggaaaaaccccaaagggtaagtaagaaagtttttacaactttacagctggctgggctccatttccagagatctttaattaattgatttgaggaaaggccatagtgtttccattagttccctggattctaattagagccatggttaagaccctcaagacttagcagacctcggtctctgctgcggtgtctgagccacggggcaatggaagaagcacaatgggtctcaggtgagtctcctcagccttcaccatacactcagaccccatgagcgagcacacgccsgagtaacctcggcgcagccaagaaaaggtacggactctctgagatccaagatccttaacctgaggtgtggcttcaactccactaaaacatattctgatccagcaatctctacaacttcatcacaaccctgaggggtgaaaatggaggcttcgtcattttatttgttcaaatttattctactaagtgatacaactggaaccaccaaccaggtatgtctgaccctaaaggctgtgcttagtcttttattaaagactgagctatatacaagctaaaccttcctaatatctttttagaaaactaactggtaaccaataggatcttctgagtcacagctgggccttcaagcatgcatgccagggccactgcctctgaaactcaaagtcaagtcagatctctcacaaagaaatccacatacctggaattttccttgtgggccagctctccctgtcttcaagcacggcccagaaggacctgccttgtgattaagcctggaagtgctgggcttgaagggacttggcaaccatttgtttccttaatgcccagctataagcaacagagtttatagttgcagatgaattttttctcttattgcaaatggctttgatttaa

SEQ ID NO: 83102 - DNA, 805 bp, Homo sapiens
tgcatacaaagctgctaaaagctgagccatatgcttttcttcagtgtatgaatgaagaaaagaaattttagtgtttttcccttttttcccgtttaacagcacctttaccattctgccttctgaagttaccacaatgatgccatttcttcagcaggtgaaagccttctttgtttttgttttgtattgttttaattgttttggattcattcaggtttgttgcatgagtatattatrcagtcttggtgtttgggcttctgtggaacccatcacccaaatagaaaacatagtacccaataagtagtttttcaaccccttctcctcttctaccccatccccttctagagtccccagtatctatggtttccatttttatgtccatgtgtacctggattaattcatgtttataattttccaagagagaatgtggctgtcctttgaaccacacctctttcattccatctattttctgtctcttggaatacagcataaccatttctgaaaagttctccctcactttccaggagaaaggggggacatatttcaagagtttcaatacctattagaggaataacagcgattattaatcaggtggctgcaaagctctgtacaagatcatttttggtccatcaagttgtctctcatggcttcgtatgaacatggtacaggtgatagggtttgggggtggattcctgatggaaaggggaaccccggctcaaggctgaaaaatggacaggcagcctgatgggaaggctgactgatcaaacagttccactgagccccaggctggggagtctcctagttatga

SEQ ID NO: 83103 - DNA, 1065 bp, Homo sapiens
aaatccatcctattgatgttagcataggcctcatttgaccaaaagagagctgtattatttatgaagacatttactattccagaatgtcaagaagttgcagaaacatccaatgagagtcaatttagctttctgtttcctgactgcaagtgaacaaacgcttcttacctgcagtgcacaaccatcggaccagcatcgggagggttacaggttttgactctacgtaagaaagctagaaaaggtgtagggtgttctggaacaccatgatcaggccaggcggtgaactggaattgtctcacttctctcttctcacttgaaccattctgtgaaataggaatatcagctgaaattctgttttccaagcctcaggtggtaatgatgaataacagggaagaggtaatgctaaaatgtgctattttaattcctttctaccaccctgtagcctttgggaagacacactctttggaaatagaaaccccaagctatttgtaaatgacaaatatttgcgcaggaagacaaaattcttaggtgagaagcattatatttttcaggtttaactaccaggagagctcctatcacattttacaggaagagctagttcttcttcatctactcttcattggctgaaactttcatttggagcaagagttttatatttactgataaatcgccagacaagaagaaaaatggctgagtgataatggaagatytatttcattcttcactgttgccattgagatcaagatttaagtaaagccttaagagatttcatttctcaaaagaagctttctttaaacaatagagaagggaaagggaggagaaaaagatgaaaagcaaaccttgtaaagtgcaaatgttcgaacacaatatgtggccagctccacagtatcaagcagcgttacttgaacgagtccgtgggtttctgtgcctctgctaggccaatactggtcacacttcacctacaagaaacaagtgacacattcagggcaaatgctcatcaatttctctattaactttgctttgagttgctgttgaaggaaaacagcttttctgcacttcattttatgt

SEQ ID NO: 83104 - DNA, 538 bp, Homo sapiens
agtccctgaagcactgacacctgctgagggtcgtgactgtcacccagctctttgagtcccggagtccgccaggtcctggcacagagaggcctcagagcgtggatgtgggataaatccaggcgtgtgtgggtgggttggtctctgcaatctcagtaaacatctggccgcagggcctggcaggaagctgacctcgtgggcaccacgcggctggcagctgtggccggtctataaatacattctaaacgcggaccagcccgtgtgcattcctgcctcgcccgccctggagtgccctcccagcggaagaaaagccgccagcggccctccgtgcccggccaagyggtcactcccggtgagtgggagcatgcccacagcagggtcagcccagggcccgcggcatccgattgttagctgagcgctcagggcctgcctggagctgggagccgcatttagctctgggaaaggctgtccacaccagcagcctgctttgcttggatgtctaggctgtgtttatgccggaccggtgcctggggaataatta

SEQ ID NO: 83105 - DNA, 538 bp, Homo sapiens
agtccctgaagcactgacacctgctgagggtcgtgactgtcacccagctctttgagtcccggagtccgccaggtcctggcacagagaggcctcagagcgtggatgtgggataaatccaggcgtgtgtgggtgggttggtctctgcaatctcagtaaacatctggccgcagggcctggcaggaagctgacctcgtgggcaccacgcggctggcagctgtggccggtctataaatacattctaaacgcggaccagcccgtgtgcattcctgcctcgcccgccctggagtgccctcccagcggaagaaaagccgccagcggccctccgtgcccggccaagtggtcactcccggtgagtgggagcatgcccacagcagggtcagcccagggcccgcggcatccgattgttagctgagcgctcagggcctgcctggagctgggagccgcatttagctctgggaaaggctgtccacaccagcagcctgctttgcttggatgtctrggctgtgtttatgccggaccggtgcctggggaataatta

SEQ ID NO: 83106 - DNA, 2085 bp, Homo sapiens
gtgattgttgttttgcgggacccttgtgtttatgcttttattgtggacctttttaaacatatacaagagcagcgagagacatgtcacagccccacacccccggcacctggctgcaatgggtgctggcccctgggcagcctggcttcatctgtctctgcccccatgcttattcttgctgtgcttttacaagcggattctagataccaggtcatttcgcctgtaaggacttcagcaagagccacagccaggccttgagaggcccggcagactggccctgggcggcgccggcggtgcgtgtgctgttagtgattcaccagcacgagtgagttgctcacctgtgtgattcaaactggagttggttcgaggttgtccacccacatatccctttggccatgttctgttaggccttcgtggtggggagaggaaggggcagctgtcatggctgagccacagtggggatgtcgtctgtgcctgggtggcaggggaagaactgggaggccttggaaaggtggaaggctctagtgcagggtgattgcccacggacgtgctgctatgcaaatgagtgcatgtgctggtgggggcaggcacagagggatgctgcaggaaggaggcaccgaccacccagaggggtgagtgtgagtggcattatgaggagaaaggtagctagggaccacagggctgagtcaggccctcaggacagccagtgcagacgcacagcagacccaggacaaaatcggcacccaactgggtcacccgtgaatccccacctggggtcatgttggtcaggacacttttcagcttcaggaggacagaacgcaactccaaacagacttagcagaaaggagactctattggctcacataaccaggctgtgcagggggacttcaggcatagctggatccaggtattcaaacatcagcatgaggatccagtctaacagggcggggagggggtcagccctcccggaaccacatgaacacagggcaggggagggtagctccacacagcatgcttgaggtgctgttgccaacaatgggagattggtggtggacaggcaaggaacagatgtccacacagaggggacatttgcagccacaggatgggccagggctagaaaggaggatgaggagagcagagcaagagcatctgagccctgagccttggggtgtggcctcatacaggacgaggctggcacacgggtagcccctgggctaccgctgtggtttggccaccactgtttttaaaatattagaagtgcaygagaatatccaagcttctgttggaaaccagaggggagtggccacatgggcccgtggtgcctcccggcaacagtcaggtggggccgactgctgccaccccttgggatgggccatgagtttccccagcgtgccctgtggcccacctgcctccctggcgtcctcccccagcaactgaggcatttgcatcagggccttgggggctggagaggactccagtgggaagggctggggagtgagtggacacaggtccccagggaagtgaacaccaatgagatttcaccaaacacccatgagagcagagcagagggtgcagctgggccccacggaccctgtgggtgctcagagtacccccaggaagtgcacgtgggtgtgcaggctcccggcactccaagccgcctcggtggggccacagcgtctgtcccggtcatagcccgccctgccaagccctgcccagcccgccccacggcccaggccagaaacgcctccagccctgcagctcttggcctcagaagcggaaaagcctctgcagttagcaacacaagacggttcctgcgtcctcccgacccccgcccccaaaacacacacacacacacatcagagcgtcttggcagctggtgagcgctaacgtggctgaattgcttttggggactttgaaggaaattaattaaaaccagctgagatgggaaagctggaaggtggcgggagccagggacaactttccacagggcctgggagggagcagcccggagccgaccacgccaccacgagccaccgtgtccagccaggcccgacgacctgcccggcctcgccaaaggtgggactgccc

SEQ ID NO: 83107 - DNA, 395 bp, Homo sapiens
agctgggagcaattatgcctctggtttgagctgtgctgctccctctgggtggccacaccaccccctccctccgaccaaycaaccaaagaagtgcttcatctcgagttggaagtatgtcacccccgccccccaccaccaacaaggaaggaccctctttgtccctttcccagtgacaagtgtgagtgagcttggctttggctggttcttctctaacaggctgacaacagggagataaactcagacccagcacccaggaggtgggaacctcagggaaaggacaccggctctccgtgtttgaatctgatgttctttctttcttctcatgtggcagagaagagacaggacaatggacgggtgtattacgtgaaccataacactcgcacgacccagtggga

SEQ ID NO: 83108 - DNA, 395 bp, Homo sapiens
agctgggagcaattatgcctctggtttgagctgtgctgctccctctgggtggccacaccaccccctccctccgaccaatcaaccaaagaagtgcttcatctcgagttggaagtatgtcacccccgccccccaccaccaacaaggaaggaccctctttgtccctttcccagtgacaagtgtgagtgagcttggctttggctggttcttctctaacaggctgacaacagggagataaactcagacccagcacccaggaggtgggaacctcagggaaaggacaccggctctccgtgtttgaatctgatgttctttctttcttctcatgtggcagagaaragacaggacaatggacgggtgtattacgtgaaccataacactcgcacgacccagtggga

SEQ ID NO: 83109 - DNA, 983 bp, Homo sapiens
taaactaacacgtttgttacatgtgtcccttgttgccctttgagatggacacttaatatttaaatgtattactgttagaccctgtccatcagaaggtgaagcagaggacagaaagatactgagtgcacagcctccgtggcctggccagaaccacaccatagtcagtggcctcttatcagaaaggaatgcyggtcagttgctgtgtggaaaccacaaaagggaaggcagcgtgaggccattggttgaaatcagcagtgaacaagtcttttgagagggttgatttttgttcgacactgaggaaagaaagacttatggtggctagggaaggagggggtgtaacgaggtgtctctgacctcgcatctcatcatggctgggaattaaggtttttaaggtttctctggcgtcttcttggccaagagggggtccattcagttggttgaggagcttaggattttattattatttctcagtattgtggactgtcctgtcatttttttggacagtgtctttagaagagcaggagtttaaaatttttgatgaagccacaaaatgctttttaaaaaaaggtttcacattttatttatttatttatttatttatttatttatttatttatttatttatggagacggagtcttcctacattgcctgggccagtctcaattgatcctcctgcctcagcctcccaaagtgctgggattacaggcatgagccactgcacctagcctcattttattagatatttttgctttctacaaatttcttccctatttccccctctccctagctccttgcaaccatcatcccgctttctcactcaattagtttggctactccaggtaacatttaaatggaaccacacaggatttgtctttttgccacgggcttctttcacttagcagaatgtcctcgaggttcatccatgtggtagcctgtgtcaaaatttccttcctttttaaggttgagtaatactcatatgtat

SEQ ID NO: 83110 - DNA, 983 bp, Homo sapiens
taaactaacacgtttgttacatgtgtcccttgttgccctttgagatggacacttaatatttaaatgtattactgttagaccctgtccatcagaaggtgaagcagaggacagaaagatactgagtgcacagcctccgtggcctggccagaaccacaccatagtcagtggcctcttatcagaaaggaatgccggtcagttgctgtgtggaaaccacaaaagggaaggcagcgtgaggccattggttgaaatcagcagtgaacaagtcttttgagagggttgatttttgttcgacactgaggaaagaaagacttatggtggctagggaaggagggggtgtaacgaggtgtctctgacctcgcatctcatcatggctgggaattaaggtttttaaggtttctctggcgtcttcttggccaagagggggtccattcagttggttgaggagcttaggattttattattatttctcagtattgtggactgtcytgtcatttttttggacagtgtctttagaagagcaggagtttaaaatttttgatgaagccacaaaatgctttttaaaaaaaggtttcacattttatttatttatttatttatttatttatttatttatttatttatttatggagacggagtcttcctacattgcctgggccagtctcaattgatcctcctgcctcagcctcccaaagtgctgggattacaggcatgagccactgcacctagcctcattttattagatatttttgctttctacaaatttcttccctatttccccctctccctagctccttgcaaccatcatcccgctttctcactcaattagtttggctactccaggtaacatttaaatggaaccacacaggatttgtctttttgccacgggcttctttcacttagcagaatgtcctcgaggttcatccatgtggtagcctgtgtcaaaatttccttcctttttaaggttgagtaatactcatatgtat

SEQ ID NO: 83111 - DNA, 983 bp, Homo sapiens
taaactaacacgtttgttacatgtgtcccttgttgccctttgagatggacacttaatatttaaatgtattactgttagaccctgtccatcagaaggtgaagcagaggacagaaagatactgagtgcacagcctccgtggcctggccagaaccacaccatagtcagtggcctcttatcagaaaggaatgccggtcagttgctgtgtggaaaccacaaaagggaaggcagcgtgaggccattggttgaaatcagcagtgaacaagtcttttgagagggttgatttttgttcgacactgaggaaagaaagacttatggtggctagggaaggagggggtgtaacgaggtgtctctgacctcgcatctcatcatggctgggaattaaggtttttaaggtttctctggcgtcttcttggccaagagggggtccattcagttggttgaggagcttaggattttattattatttctcagtattgtggactgtcctgtcatttttttggacagtgtctttagaagagcaggagtttaaaatttttgatgaagccacaaaatgctttttaaaaaaakgtttcacattttatttatttatttatttatttatttatttatttatttatttatttatggagacggagtcttcctacattgcctgggccagtctcaattgatcctcctgcctcagcctcccaaagtgctgggattacaggcatgagccactgcacctagcctcattttattagatatttttgctttctacaaatttcttccctatttccccctctccctagctccttgcaaccatcatcccgctttctcactcaattagtttggctactccaggtaacatttaaatggaaccacacaggatttgtctttttgccacgggcttctttcacttagcagaatgtcctcgaggttcatccatgtggtagcctgtgtcaaaatttccttcctttttaaggttgagtaatactcatatgtat

SEQ ID NO: 83112 - DNA, 983 bp, Homo sapiens
taaactaacacgtttgttacatgtgtcccttgttgccctttgagatggacacttaatatttaaatgtattactgttagaccctgtccatcagaaggtgaagcagaggacagaaagatactgagtgcacagcctccgtggcctggccagaaccacaccatagtcagtggcctcttatcagaaaggaatgccggtcagttgctgtgtggaaaccacaaaagggaaggcagcgtgaggccattggttgaaatcagcagtgaacaagtcttttgagagggttgatttttgttcgacactgaggaaagaaagacttatggtggctagggaaggagggggtgtaacgaggtgtctctgacctcgcatctcatcatggctgggaattaaggtttttaaggtttctctggcgtcttcttggccaagagggggtccattcagttggttgaggagcttaggattttattattatttctcagtattgtggactgtcctgtcatttttttggacagtgtctttagaagagcaggagtttaaaatttttgatgaagccacaaaatgctttttaaaaaaaggtttcacattttatttatttatttatttatttatttatttatttatttatttatttatggasacggagtcttcctacattgcctgggccagtctcaattgatcctcctgcctcagcctcccaaagtgctgggattacaggcatgagccactgcacctagcctcattttattagatatttttgctttctacaaatttcttccctatttccccctctccctagctccttgcaaccatcatcccgctttctcactcaattagtttggctactccaggtaacatttaaatggaaccacacaggatttgtctttttgccacgggcttctttcacttagcagaatgtcctcgaggttcatccatgtggtagcctgtgtcaaaatttccttcctttttaaggttgagtaatactcatatgtat

SEQ ID NO: 83113 - DNA, 2084 bp, Homo sapiens
tcccaatggggaactttctattatagctcttaatttcaccattgtccaaatgaccaacaaaaaaatagcccaagaggaatttagcttgagttcaggcttcctgtcccatcttctgacctaagagcctaggctcttgacattaaactgcctgtacatgaatctttgcatcatttggcttactttctgtagagcttctctgtgtctgtttgcttatctgtaaagcggggataataatattaatctacctttagggttcccatgttaaatgagaacatatatgtaaatgcatagcacacacagtgcctggaacataatgttagagttcagtgaatattatatacttctgtagccattattattacctttatttatttatcctttttttttttttttttggagacactctcactcactctgtcacccaggctggaatacagtgacgtgatcttggctccctgaaacctctaccttctgggctcaaatgatcctcctacttcagcctcttgagtagctgggactacaggcatgcaccggtagtgcagctagttttgtttattttttgtagaggcagggtctcattatgttgcccaggctggtctcaaactcctgggctcaagygatcctcccgccttggcctcccaaagtgttaggataacaggcgtgagccactgtgcccagccacctttattgttgagagtagtttttatcgccccatgttgcatggtacaaattgtctctgggtctctgtttctctgtctggagaggggtgatcttttcttcactggatggtatttgaaacatctcacagttgcaaagtagtagatgcttactaagtagtagaagagcctcgtttggtgaaacagatgaaccgaaggacagggaggcttagacattttcactgagtgggcaaagtcaagctgcaaaaagaacttgagagcacatgctgcctgttgccttgtgttctctgaagatgtctgataggttttctgctgctaaattccacacttttctttgtgatttctgcattgcttctcatttacttggatggattgttgagtcatcttttctagataaaacatgtctaggccaggcatagtggctcatacttgtaatcccagcactttgggaggctgaggtgggaggatcgtttgagctcaggagtttgagaccagccttggcaacatagcaagaccccatctccccaaaaataaaaaaatgagccaggcgtggtgctgtgtgcctatagtccagctactggggaggctgaggtggaaggatcacttgagcccaagagtttgaggctgcaatgagctatgatcgtgccactccagcctgggcagcagagtgtgaccctgtctctaaacaaacaagtgaatgacaacaacaaaaagtgtcaacatatgcattgactaaaagttgtttaatgccccttgacttttattgccaagggaatcatctttctagctatagagaaaattgctttggataagttttgagctcttcttgcctaatgggggaaatatttcatctgagcctgtccagtgattcttgtttatttgtaacatttgagcccaataaaaataatgtgatggtcacaggatattttgccaattatttcagatgtaggggcaattcactctggatttgtttacttgaagtggaaaagtttacacaaagttaccttctgagcttttaccaaaaaggaaacttccctgggtctctctgcttggaaccagcttctgtttagtccaaaactagaggggctattaaaggtcttgtttccaataaatggcaggagaagggaatatgatgacttaggtaggaaacacttctgtccttttcacagtgacttatgtctgtctgctttctactttgaacccccaggacgcacagacattcgggtgcttcagccagaacaaccccagcaaccggcgagcaaagccccggtgctcggagccggcaccgccagcccgtcaagaactcaggccacagtggcttggccaatggcacaggtgagtgatggcaccgcacgccagcctgcactgaagctgtgggctctcacccgttctaacgtggacacggga

SEQ ID NO: 83114 - DNA, 673 bp, Homo sapiens
agaatgcatgacagggagctggggtggagagcaggggagagaggaccggaagcrtgctctgcgaagcctaactgccctggaagggcgaggtggcacagagcgccttgcctgggcctggctggctgctttgtctcatcagggctgactggaagtgggatgtgggcaggggcaccagaagagggaacagccaatcagggagcacctctgaagggaggccgctgggtgtttgggtgggagggaggagcctgaaggcatcccatggcctggagcctatggtcagtcccacaagaagatgagtgggaaacattcaagaagtgttttagaaaaaaacgtcccgaaaatggttaaaatgggaactgaggaatgtgctcaattacttggaaggtttgttctggtgggaagaagaatgccccatgggtgcagaggaaacggtgctccagcccctgccgctgtcatcgtgggcacatcctggcgaggccctttgagatggtgcagccgtgcacaccccctctgcatatggtctctgtttctgccaaaccacatctcgaaaggctcaggatgaaaatgtaggtgatagactcggggcctcaggtggaaggaacccctccttgaaacccccaggacaccatgcccgtgaagagtttcactgattgtctgcccaaggttctgagca

SEQ ID NO: 83115 - DNA, 673 bp, Homo sapiens
agaatgcatgacagggagctggggtggagagcaggggagagaggaccggaagcatgctctgcgaagcctaactgccctggaagggcgaggtggcacagagcgccttgcctgggcctggctggctgctttgkctcatcagggctgactggaagtgggatgtgggcaggggcaccagaagagggaacagccaatcagggagcacctctgaagggaggccgctgggtgtttgggtgggagggaggagcctgaaggcatcccatggcctggagcctatggtcagtcccacaagaagatgagtgggaaacattcaagaagtgttttagaaaaaaacgtcccgaaaatggttaaaatgggaactgaggaatgtgctcaattacttggaaggtttgttctggtgggaagaagaatgccccatgggtgcagaggaaacggtgctccagcccctgccgctgtcatcgtgggcacatcctggcgaggccctttgagatggtgcagccgtgcacaccccctctgcatatggtctctgtttctgccaaaccacatctcgaaaggctcaggatgaaaatgtaggtgatagactcggggcctcaggtggaaggaacccctccttgaaacccccaggacaccatgcccgtgaagagtttcactgattgtctgcccaaggttctgagca

SEQ ID NO: 83116 - DNA, 660 bp, Homo sapiens
cctaacctcgtgatccacccacctcagcctcccaaagtgctgggattaaagccgtgagccaccctgcccagccagtaaaatgttttacttattctgatttaagttttcaaagatgagtttaaacccttttctaacttctttaaggaggcagcatgttaggaaacactttgatcttgaccaaaacagcttccccatattgcggccatgggactgacggggccttgtttggaggaagtaaacctcaggggaggtttgggcagtcaacactcacatttgccctggggcccccctgcctgtgctgcccaaggctccagctctggcctgttggtagccctgaatccagcgggcagcagtctctggctctgcagggcgctcacctgctgaactttctaaaatttggatgtcaaccctcaccctgcagagrttcagatctgtggctccggagcccagcgaggcacctgcattttaaggagctccagcagggccatctgctgttggcagagcccttcaccacctctgccatctcccaggctgttagctcccaccttccatttgccccacctatatcccctgtctttgcacaatcactgcagccctgactgctgttcccagtgtccgtgggtctcattctccagatctgtgatttctacgtgaagtgca

SEQ ID NO: 83117 - DNA, 568 bp, Homo sapiens
tggcgttgatgaaatacctttagtcagttgctaagatctacgtatcaggagattccaccttgaaattcagattcattgcytccctgggccccaattcttcctggctggagctggaggctgtgcctgcgcacacccacccaggacagcatttcacttttagaaaaataatatattgagataaaattcacgtgatgtaagagcaactaatttaaactgaataagtcaatggcgcttaatatcatctatttgcaatcttgtacaagctcaatcctatctaggtccaaaacatttgcatcatgcccattagcagccagtccctactcctcctccccgtctcctcccccggcccctggccccgactcgtctactctgtttctatgaatctgtctgttctggacatttcatagaaacggaatcttgcaaaacgtgtccttctgtgtctggcttctttcactcggcattatgctttcaggttctgcccatgtggtagcgcgtgtccagacttcatgcctttttatggcagaacacgacagcatcacgtgtttgcgcctgtatcgccgttatccac

SEQ ID NO: 83118 - DNA, 568 bp, Homo sapiens
tggcgttgatgaaatacctttagtcagttgctaagatctacgtatcaggagattccaccttgaaattcagattcattgcctccctgggccccaattcttcctggctggagctggaggctgtgcctgcgcacacccacccaggacagcatttcacttttagaaaaataatatattgagataaaattcacgtgatgtaagagcaactaatttaaactgaataagtcaatggcgcttaatatcatctatttgcaatcttgtacaagctcaatcctatctagktccaaaacatttgcatcatgcccattagcagccagtccctactcctcctccccgtctcctcccccggcccctggccccgactcgtctactctgtttctatgaatctgtctgttctggacatttcatagaaacggaatcttgcaaaacgtgtccttctgtgtctggcttctttcactcggcattatgctttcaggttctgcccatgtggtagcgcgtgtccagacttcatgcctttttatggcagaacacgacagcatcacgtgtttgcgcctgtatcgccgttatccac

SEQ ID NO: 83119 - DNA, 2657 bp, Homo sapiens
cctcccacagggatgccctccctccctgcctttttttttttttgagatggagtcttgctctgtcactcaggctggagtgcagaggcatgatctcggctcattacaacctccgcctcctgggttcaaacgattctcttgcctcggcctcccaaatarctgggactacacgtgcccaccaccatgcccagctaatgtttgtattattagtagagacggggtttcaccatgttggccaggctggtctccaactcccgacctcaaatgatccacccacctcggcctcccaaagtgctgggattacaggtgtgagccaccgcacccggccgaatagtacattttaatttattcctataaaaattagaagagctgggtcctttttctttcactagatagggaacttcctgcccctgtctgaagggcagctgtgcaggaagaggcctgcctgcatttcccacaggaacggcctagggcgtgtgatgctcttcttcctggtccacagatgaagaagctgaggctcaaagaaccatctggctaagggcatacagtcagctgccgggaggtggaactggatccaggcccttccaggtcctgccccgagctgcccaaactctttggggtcttcgctgcctttcagaggagtttctcccctccctggagtttgcctccgagtctaacccctcacctcctgcgggaggaatcccccaacaccagagaaaaagcccagatgcgacgccccagggctgtgcacccaccagccatgcccgcccctccctgtgtggctaagagggggcagatggagagccagggacgtggaggctgctccattcttctctgcctggagtggcactccactcaggcagctgggggagggggaccttgcatctcagccctggggtctgggggacacccctgtgccctgctccttccccgggcgtgaaggggacccctgcatctcagccctggggtctgggggacgcctctgcgtcctgctccttccccgggcgtgaaggggacccctgcatctcagccctggggtctgggggatgcccctgcgtcctgctccttcccagggctcattgcccatctgtttaggccagagtatcagaatgtggctgtggacttcttacaatcagagaaaaggaaaaccccccagatgtttgaaatacttttgtagaacggagttggaaggaactgatgcaggcgccctgctcgtgtcggataggggctgtggtcagggccactgaccaccccaaaacccccaatcaaagaggtaaggtggctttggctctgaggggtagggtcaggtgtccaggtggaggggctcaaggcgctggtggaacctgggccgagacccagtccagaaagggggtccctcattcatgaatacagactaccaacatggccaacgtggctgctctatctgttaagacccgggtgctcagcccgcatgggaaaaatgtctatttggccttagagaaaatggtttccttctgaaaagctatgggtatcactgagaagattgcaaattctgtaaaaagtcctcatggatgtgttaaaaattaaacagacttttttttttaaagttagtttatttcagtttctaccttctgacaactcaaggtgcaatatatacacatgtttttcttcacagcaaacacctttgattttagcactgttttgagatcttcacccttgaaactttctcaaccttaaaacagagtttgtagaacatcaccgagcgggacacaagattgcaaaaatgcaacagagaagatactggtgtcactgcacgccacttgggggctaccaacaaggtaatgtctggatgtgagcaccgcgagtctaggaaagagaaagcagagggcgtgtgcatgggagacgccactgatagttccaacgggggccaccaggttcaagaaggcggcaggtcaaccgtgttctgacacatttacatgttttaaggggatccatgtgtgttgtctgaatttctagcttttcctagtgttccaacgtttgccttctctttctccacgtgtccacccagaagaccctaagcaacagccccaggctcaccgggatggcagggactcctccccaacagccaaagccaagccaagctgtctcttgcagggagatctggagtccaccccttagggctgcacctcccagagtgcatgcggtcgtcccccacctctatttcatgagcaaatcatctaggattaaggagggagcgggcgcagccccccagttctagtcaatgcacaggggatttactgacaggcatcccctttttaaagtgcaaagtcccttatagcgctgctcaagggagttcaggctgcagtgcactcaggctctgactgttttgtcaggtcccagagtctgcagataaagtggggagctgggttctccccaaatcgtactgtcctgcaggaggggtgtagaagggaagttggagtaaacaaacccagcccatcgtctctccccttggatatggtgaatttttccctttccaacagtaactaagaaaccccacccccacccccagcccctgtgggagcgctgtcccactgaaatcccgtggccacgtgcatccccaggcacagctacaggcagcgccgcgctcccaaggactctcactcactgcactctgcaggcta

SEQ ID NO: 83120 - DNA, 2657 bp, Homo sapiens
cctcccacagggatgccctccctccctgcctttttttttttttgagatggagtcttgctctgtcactcaggctggagtgcagaggcatgatctcggctcattacaacctccgcctcctgggttcaaacgattctcttgcctcggcctcccaaatagctgggactacacgtgcccaccaccatgcccagctaatgtttgtattattagtagagayggggtttcaccatgttggccaggctggtctccaactcccgacctcaaatgatccacccacctcggcctcccaaagtgctgggattacaggtgtgagccaccgcacccggccgaatagtacattttaatttattcctataaaaattagaagagctgggtcctttttctttcactagatagggaacttcctgcccctgtctgaagggcagctgtgcaggaagaggcctgcctgcatttcccacaggaacggcctagggcgtgtgatgctcttcttcctggtccacagatgaagaagctgaggctcaaagaaccatctggctaagggcatacagtcagctgccgggaggtggaactggatccaggcccttccaggtcctgccccgagctgcccaaactctttggggtcttcgctgcctttcagaggagtttctcccctccctggagtttgcctccgagtctaacccctcacctcctgcgggaggaatcccccaacaccagagaaaaagcccagatgcgacgccccagggctgtgcacccaccagccatgcccgcccctccctgtgtggctaagagggggcagatggagagccagggacgtggaggctgctccattcttctctgcctggagtggcactccactcaggcagctgggggagggggaccttgcatctcagccctggggtctgggggacacccctgtgccctgctccttccccgggcgtgaaggggacccctgcatctcagccctggggtctgggggacgcctctgcgtcctgctccttccccgggcgtgaaggggacccctgcatctcagccctggggtctgggggatgcccctgcgtcctgctccttcccagggctcattgcccatctgtttaggccagagtatcagaatgtggctgtggacttcttacaatcagagaaaaggaaaaccccccagatgtttgaaatacttttgtagaacggagttggaaggaactgatgcaggcgccctgctcgtgtcggataggggctgtggtcagggccactgaccaccccaaaacccccaatcaaagaggtaaggtggctttggctctgaggggtagggtcaggtgtccaggtggaggggctcaaggcgctggtggaacctgggccgagacccagtccagaaagggggtccctcattcatgaatacagactaccaacatggccaacgtggctgctctatctgttaagacccgggtgctcagcccgcatgggaaaaatgtctatttggccttagagaaaatggtttccttctgaaaagctatgggtatcactgagaagattgcaaattctgtaaaaagtcctcatggatgtgttaaaaattaaacagacttttttttttaaagttagtttatttcagtttctaccttctgacaactcaaggtgcaatatatacacatgtttttcttcacagcaaacacctttgattttagcactgttttgagatcttcacccttgaaactttctcaaccttaaaacagagtttgtagaacatcaccgagcgggacacaagattgcaaaaatgcaacagagaagatactggtgtcactgcacgccacttgggggctaccaacaaggtaatgtctggatgtgagcaccgcgagtctaggaaagagaaagcagagggcgtgtgcatgggagacgccactgatagttccaacgggggccaccaggttcaagaaggcggcaggtcaaccgtgttctgacacatttacatgttttaaggggatccatgtgtgttgtctgaatttctagcttttcctagtgttccaacgtttgccttctctttctccacgtgtccacccagaagaccctaagcaacagccccaggctcaccgggatggcagggactcctccccaacagccaaagccaagccaagctgtctcttgcagggagatctggagtccaccccttagggctgcacctcccagagtgcatgcggtcgtcccccacctctatttcatgagcaaatcatctaggattaaggagggagcgggcgcagccccccagttctagtcaatgcacaggggatttactgacaggcatcccctttttaaagtgcaaagtcccttatagcgctgctcaagggagttcaggctgcagtgcactcaggctctgactgttttgtcaggtcccagagtctgcagataaagtggggagctgggttctccccaaatcgtactgtcctgcaggaggggtgtagaagggaagttggagtaaacaaacccagcccatcgtctctccccttggatatggtgaatttttccctttccaacagtaactaagaaaccccacccccacccccagcccctgtgggagcgctgtcccactgaaatcccgtggccacgtgcatccccaggcacagctacaggcagcgccgcgctcccaaggactctcactcactgcactctgcaggcta

SEQ ID NO: 83121 - DNA, 2657 bp, Homo sapiens
cctcccacagggatgccctccctccctgcctttttttttttttgagatggagtcttgctctgtcactcaggctggagtgcagaggcatgatctcggctcattacaacctccgcctcctgggttcaaacgattctcttgcctcggcctcccaaatagctgggactacacgtgcccaccaccatgcccagctaatgtttgtattattagtagagacggggtttcaccatgttggccaggctggtctccractcccgacctcaaatgatccacccacctcggcctcccaaagtgctgggattacaggtgtgagccaccgcacccggccgaatagtacattttaatttattcctataaaaattagaagagctgggtcctttttctttcactagatagggaacttcctgcccctgtctgaagggcagctgtgcaggaagaggcctgcctgcatttcccacaggaacggcctagggcgtgtgatgctcttcttcctggtccacagatgaagaagctgaggctcaaagaaccatctggctaagggcatacagtcagctgccgggaggtggaactggatccaggcccttccaggtcctgccccgagctgcccaaactctttggggtcttcgctgcctttcagaggagtttctcccctccctggagtttgcctccgagtctaacccctcacctcctgcgggaggaatcccccaacaccagagaaaaagcccagatgcgacgccccagggctgtgcacccaccagccatgcccgcccctccctgtgtggctaagagggggcagatggagagccagggacgtggaggctgctccattcttctctgcctggagtggcactccactcaggcagctgggggagggggaccttgcatctcagccctggggtctgggggacacccctgtgccctgctccttccccgggcgtgaaggggacccctgcatctcagccctggggtctgggggacgcctctgcgtcctgctccttccccgggcgtgaaggggacccctgcatctcagccctggggtctgggggatgcccctgcgtcctgctccttcccagggctcattgcccatctgtttaggccagagtatcagaatgtggctgtggacttcttacaatcagagaaaaggaaaaccccccagatgtttgaaatacttttgtagaacggagttggaaggaactgatgcaggcgccctgctcgtgtcggataggggctgtggtcagggccactgaccaccccaaaacccccaatcaaagaggtaaggtggctttggctctgaggggtagggtcaggtgtccaggtggaggggctcaaggcgctggtggaacctgggccgagacccagtccagaaagggggtccctcattcatgaatacagactaccaacatggccaacgtggctgctctatctgttaagacccgggtgctcagcccgcatgggaaaaatgtctatttggccttagagaaaatggtttccttctgaaaagctatgggtatcactgagaagattgcaaattctgtaaaaagtcctcatggatgtgttaaaaattaaacagacttttttttttaaagttagtttatttcagtttctaccttctgacaactcaaggtgcaatatatacacatgtttttcttcacagcaaacacctttgattttagcactgttttgagatcttcacccttgaaactttctcaaccttaaaacagagtttgtagaacatcaccgagcgggacacaagattgcaaaaatgcaacagagaagatactggtgtcactgcacgccacttgggggctaccaacaaggtaatgtctggatgtgagcaccgcgagtctaggaaagagaaagcagagggcgtgtgcatgggagacgccactgatagttccaacgggggccaccaggttcaagaaggcggcaggtcaaccgtgttctgacacatttacatgttttaaggggatccatgtgtgttgtctgaatttctagcttttcctagtgttccaacgtttgccttctctttctccacgtgtccacccagaagaccctaagcaacagccccaggctcaccgggatggcagggactcctccccaacagccaaagccaagccaagctgtctcttgcagggagatctggagtccaccccttagggctgcacctcccagagtgcatgcggtcgtcccccacctctatttcatgagcaaatcatctaggattaaggagggagcgggcgcagccccccagttctagtcaatgcacaggggatttactgacaggcatcccctttttaaagtgcaaagtcccttatagcgctgctcaagggagttcaggctgcagtgcactcaggctctgactgttttgtcaggtcccagagtctgcagataaagtggggagctgggttctccccaaatcgtactgtcctgcaggaggggtgtagaagggaagttggagtaaacaaacccagcccatcgtctctccccttggatatggtgaatttttccctttccaacagtaactaagaaaccccacccccacccccagcccctgtgggagcgctgtcccactgaaatcccgtggccacgtgcatccccaggcacagctacaggcagcgccgcgctcccaaggactctcactcactgcactctgcaggcta

SEQ ID NO: 83122 - DNA, 2657 bp, Homo sapiens
cctcccacagggatgccctccctccctgcctttttttttttttgagatggagtcttgctctgtcactcaggctggagtgcagaggcatgatctcggctcattacaacctccgcctcctgggttcaaacgattctcttgcctcggcctcccaaatagctgggactacacgtgcccaccaccatgcccagctaatgtttgtattattagtagagacggggtttcaccatgttggccaggctggtctccaactcccgacctcaaatgatccacccacctcggcctcccaaagtgctgggattacaggtgtgagccaccgcacccgrccgaatagtacattttaatttattcctataaaaattagaagagctgggtcctttttctttcactagatagggaacttcctgcccctgtctgaagggcagctgtgcaggaagaggcctgcctgcatttcccacaggaacggcctagggcgtgtgatgctcttcttcctggtccacagatgaagaagctgaggctcaaagaaccatctggctaagggcatacagtcagctgccgggaggtggaactggatccaggcccttccaggtcctgccccgagctgcccaaactctttggggtcttcgctgcctttcagaggagtttctcccctccctggagtttgcctccgagtctaacccctcacctcctgcgggaggaatcccccaacaccagagaaaaagcccagatgcgacgccccagggctgtgcacccaccagccatgcccgcccctccctgtgtggctaagagggggcagatggagagccagggacgtggaggctgctccattcttctctgcctggagtggcactccactcaggcagctgggggagggggaccttgcatctcagccctggggtctgggggacacccctgtgccctgctccttccccgggcgtgaaggggacccctgcatctcagccctggggtctgggggacgcctctgcgtcctgctccttccccgggcgtgaaggggacccctgcatctcagccctggggtctgggggatgcccctgcgtcctgctccttcccagggctcattgcccatctgtttaggccagagtatcagaatgtggctgtggacttcttacaatcagagaaaaggaaaaccccccagatgtttgaaatacttttgtagaacggagttggaaggaactgatgcaggcgccctgctcgtgtcggataggggctgtggtcagggccactgaccaccccaaaacccccaatcaaagaggtaaggtggctttggctctgaggggtagggtcaggtgtccaggtggaggggctcaaggcgctggtggaacctgggccgagacccagtccagaaagggggtccctcattcatgaatacagactaccaacatggccaacgtggctgctctatctgttaagacccgggtgctcagcccgcatgggaaaaatgtctatttggccttagagaaaatggtttccttctgaaaagctatgggtatcactgagaagattgcaaattctgtaaaaagtcctcatggatgtgttaaaaattaaacagacttttttttttaaagttagtttatttcagtttctaccttctgacaactcaaggtgcaatatatacacatgtttttcttcacagcaaacacctttgattttagcactgttttgagatcttcacccttgaaactttctcaaccttaaaacagagtttgtagaacatcaccgagcgggacacaagattgcaaaaatgcaacagagaagatactggtgtcactgcacgccacttgggggctaccaacaaggtaatgtctggatgtgagcaccgcgagtctaggaaagagaaagcagagggcgtgtgcatgggagacgccactgatagttccaacgggggccaccaggttcaagaaggcggcaggtcaaccgtgttctgacacatttacatgttttaaggggatccatgtgtgttgtctgaatttctagcttttcctagtgttccaacgtttgccttctctttctccacgtgtccacccagaagaccctaagcaacagccccaggctcaccgggatggcagggactcctccccaacagccaaagccaagccaagctgtctcttgcagggagatctggagtccaccccttagggctgcacctcccagagtgcatgcggtcgtcccccacctctatttcatgagcaaatcatctaggattaaggagggagcgggcgcagccccccagttctagtcaatgcacaggggatttactgacaggcatcccctttttaaagtgcaaagtcccttatagcgctgctcaagggagttcaggctgcagtgcactcaggctctgactgttttgtcaggtcccagagtctgcagataaagtggggagctgggttctccccaaatcgtactgtcctgcaggaggggtgtagaagggaagttggagtaaacaaacccagcccatcgtctctccccttggatatggtgaatttttccctttccaacagtaactaagaaaccccacccccacccccagcccctgtgggagcgctgtcccactgaaatcccgtggccacgtgcatccccaggcacagctacaggcagcgccgcgctcccaaggactctcactcactgcactctgcaggcta

SEQ ID NO: 83123 - DNA, 2657 bp, Homo sapiens
cctcccacagggatgccctccctccctgcctttttttttttttgagatggagtcttgctctgtcactcaggctggagtgcagaggcatgatctcggctcattacaacctccgcctcctgggttcaaacgattctcttgcctcggcctcccaaatagctgggactacacgtgcccaccaccatgcccagctaatgtttgtattattagtagagacggggtttcaccatgttggccaggctggtctccaactcccgacctcaaatgatccacccacctcggcctcccaaagtgctgggattacaggtgtgagccaccgcacccggccgaatagtacattttaatttattcctataaaaattagaagagctgggtcctttttctttcactagatagggaacttcctgcccctgtctgaagggcagctgtgcaggaagaggcctgcctgcatttcccacaggaacggcctagggcgtgtgatgctcttcttcctggtccacagatgaagaagctgaggctcaaagaaccatctggctaagggcatacagtcagctgscgggaggtggaactggatccaggcccttccaggtcctgccccgagctgcccaaactctttggggtcttcgctgcctttcagaggagtttctcccctccctggagtttgcctccgagtctaacccctcacctcctgcgggaggaatcccccaacaccagagaaaaagcccagatgcgacgccccagggctgtgcacccaccagccatgcccgcccctccctgtgtggctaagagggggcagatggagagccagggacgtggaggctgctccattcttctctgcctggagtggcactccactcaggcagctgggggagggggaccttgcatctcagccctggggtctgggggacacccctgtgccctgctccttccccgggcgtgaaggggacccctgcatctcagccctggggtctgggggacgcctctgcgtcctgctccttccccgggcgtgaaggggacccctgcatctcagccctggggtctgggggatgcccctgcgtcctgctccttcccagggctcattgcccatctgtttaggccagagtatcagaatgtggctgtggacttcttacaatcagagaaaaggaaaaccccccagatgtttgaaatacttttgtagaacggagttggaaggaactgatgcaggcgccctgctcgtgtcggataggggctgtggtcagggccactgaccaccccaaaacccccaatcaaagaggtaaggtggctttggctctgaggggtagggtcaggtgtccaggtggaggggctcaaggcgctggtggaacctgggccgagacccagtccagaaagggggtccctcattcatgaatacagactaccaacatggccaacgtggctgctctatctgttaagacccgggtgctcagcccgcatgggaaaaatgtctatttggccttagagaaaatggtttccttctgaaaagctatgggtatcactgagaagattgcaaattctgtaaaaagtcctcatggatgtgttaaaaattaaacagacttttttttttaaagttagtttatttcagtttctaccttctgacaactcaaggtgcaatatatacacatgtttttcttcacagcaaacacctttgattttagcactgttttgagatcttcacccttgaaactttctcaaccttaaaacagagtttgtagaacatcaccgagcgggacacaagattgcaaaaatgcaacagagaagatactggtgtcactgcacgccacttgggggctaccaacaaggtaatgtctggatgtgagcaccgcgagtctaggaaagagaaagcagagggcgtgtgcatgggagacgccactgatagttccaacgggggccaccaggttcaagaaggcggcaggtcaaccgtgttctgacacatttacatgttttaaggggatccatgtgtgttgtctgaatttctagcttttcctagtgttccaacgtttgccttctctttctccacgtgtccacccagaagaccctaagcaacagccccaggctcaccgggatggcagggactcctccccaacagccaaagccaagccaagctgtctcttgcagggagatctggagtccaccccttagggctgcacctcccagagtgcatgcggtcgtcccccacctctatttcatgagcaaatcatctaggattaaggagggagcgggcgcagccccccagttctagtcaatgcacaggggatttactgacaggcatcccctttttaaagtgcaaagtcccttatagcgctgctcaagggagttcaggctgcagtgcactcaggctctgactgttttgtcaggtcccagagtctgcagataaagtggggagctgggttctccccaaatcgtactgtcctgcaggaggggtgtagaagggaagttggagtaaacaaacccagcccatcgtctctccccttggatatggtgaatttttccctttccaacagtaactaagaaaccccacccccacccccagcccctgtgggagcgctgtcccactgaaatcccgtggccacgtgcatccccaggcacagctacaggcagcgccgcgctcccaaggactctcactcactgcactctgcaggcta

SEQ ID NO: 83124 - DNA, 2657 bp, Homo sapiens
cctcccacagggatgccctccctccctgcctttttttttttttgagatggagtcttgctctgtcactcaggctggagtgcagaggcatgatctcggctcattacaacctccgcctcctgggttcaaacgattctcttgcctcggcctcccaaatagctgggactacacgtgcccaccaccatgcccagctaatgtttgtattattagtagagacggggtttcaccatgttggccaggctggtctccaactcccgacctcaaatgatccacccacctcggcctcccaaagtgctgggattacaggtgtgagccaccgcacccggccgaatagtacattttaatttattcctataaaaattagaagagctgggtcctttttctttcactagatagggaacttcctgcccctgtctgaagggcagctgtgcaggaagaggcctgcctgcatttcccacaggaacggcctagggcgtgtgatgctcttcttcctggtccacagatgaagaagctgaggctcaaagaaccatctggctaagggcatacagtcagctgccgggaggtggaactggatccaggcccttccaggtcctgccccgagctgcccaaactctttggggtcttcgctgcctttcagaggagtttctcccctccctggagtttgcctccgagtctaacccctcacctcctgcgggaggaatcccccaacaccagagaaaaagcccagatgcgacgccccagggctgtgcacccaccagccatgcccgcccctccctgtgtggctaagagggggcagatggagagccagggacgtggaggctgctccattcttctctgcctggagtggcactccactcaggcagctgggggagggggaccttgcatctcagccctggggtctgggggacacccctgtgccctgctccttccccgggcgtgaaggggacccctgcatctcagccctggggtctgggggacgcctctgcgtcctgctccttccccgggcgtgaaggggacccctgcatctcagccctggggtctgggggatgcccctgcgtcctgctccttcccagggctcattgcccatctgtttaggccagagtatcagaatgtggctgtggacttcttacaatcagagaaaaggaaaaccccccagatgtttgaaatacttttgtagaacggagttggaaggaactgatgcaggcgccctgctcgtgtcggataggggctgtggtcagggccactgaccaccccaaaacccccaatcaaagaggtaaggtggctttggctctgaggggtagggtcaggtgtccaggtggaggggctcaaggcgctggtggaacctgggccgagacccagtccagaaagggggtccctcattcatgaatacagactaccaacatggccaacgtggctgctctatctgttaagaccsgggtgctcagcccgcatgggaaaaatgtctatttggccttagagaaaatggtttccttctgaaaagctatgggtatcactgagaagattgcaaattctgtaaaaagtcctcatggatgtgttaaaaattaaacagacttttttttttaaagttagtttatttcagtttctaccttctgacaactcaaggtgcaatatatacacatgtttttcttcacagcaaacacctttgattttagcactgttttgagatcttcacccttgaaactttctcaaccttaaaacagagtttgtagaacatcaccgagcgggacacaagattgcaaaaatgcaacagagaagatactggtgtcactgcacgccacttgggggctaccaacaaggtaatgtctggatgtgagcaccgcgagtctaggaaagagaaagcagagggcgtgtgcatgggagacgccactgatagttccaacgggggccaccaggttcaagaaggcggcaggtcaaccgtgttctgacacatttacatgttttaaggggatccatgtgtgttgtctgaatttctagcttttcctagtgttccaacgtttgccttctctttctccacgtgtccacccagaagaccctaagcaacagccccaggctcaccgggatggcagggactcctccccaacagccaaagccaagccaagctgtctcttgcagggagatctggagtccaccccttagggctgcacctcccagagtgcatgcggtcgtcccccacctctatttcatgagcaaatcatctaggattaaggagggagcgggcgcagccccccagttctagtcaatgcacaggggatttactgacaggcatcccctttttaaagtgcaaagtcccttatagcgctgctcaagggagttcaggctgcagtgcactcaggctctgactgttttgtcaggtcccagagtctgcagataaagtggggagctgggttctccccaaatcgtactgtcctgcaggaggggtgtagaagggaagttggagtaaacaaacccagcccatcgtctctccccttggatatggtgaatttttccctttccaacagtaactaagaaaccccacccccacccccagcccctgtgggagcgctgtcccactgaaatcccgtggccacgtgcatccccaggcacagctacaggcagcgccgcgctcccaaggactctcactcactgcactctgcaggcta

SEQ ID NO: 83125 - DNA, 2657 bp, Homo sapiens
cctcccacagggatgccctccctccctgcctttttttttttttgagatggagtcttgctctgtcactcaggctggagtgcagaggcatgatctcggctcattacaacctccgcctcctgggttcaaacgattctcttgcctcggcctcccaaatagctgggactacacgtgcccaccaccatgcccagctaatgtttgtattattagtagagacggggtttcaccatgttggccaggctggtctccaactcccgacctcaaatgatccacccacctcggcctcccaaagtgctgggattacaggtgtgagccaccgcacccggccgaatagtacattttaatttattcctataaaaattagaagagctgggtcctttttctttcactagatagggaacttcctgcccctgtctgaagggcagctgtgcaggaagaggcctgcctgcatttcccacaggaacggcctagggcgtgtgatgctcttcttcctggtccacagatgaagaagctgaggctcaaagaaccatctggctaagggcatacagtcagctgccgggaggtggaactggatccaggcccttccaggtcctgccccgagctgcccaaactctttggggtcttcgctgcctttcagaggagtttctcccctccctggagtttgcctccgagtctaacccctcacctcctgcgggaggaatcccccaacaccagagaaaaagcccagatgcgacgccccagggctgtgcacccaccagccatgcccgcccctccctgtgtggctaagagggggcagatggagagccagggacgtggaggctgctccattcttctctgcctggagtggcactccactcaggcagctgggggagggggaccttgcatctcagccctggggtctgggggacacccctgtgccctgctccttccccgggcgtgaaggggacccctgcatctcagccctggggtctgggggacgcctctgcgtcctgctccttccccgggcgtgaaggggacccctgcatctcagccctggggtctgggggatgcccctgcgtcctgctccttcccagggctcattgcccatctgtttaggccagagtatcagaatgtggctgtggacttcttacaatcagagaaaaggaaaaccccccagatgtttgaaatacttttgtagaacggagttggaaggaactgatgcaggcgccctgctcgtgtcggataggggctgtggtcagggccactgaccaccccaaaacccccaatcaaagaggtaaggtggctttggctctgaggggtagggtcaggtgtccaggtggaggggctcaaggcgctggtggaacctgggccgagacccagtccagaaagggggtccctcattcatgaatacagactaccaacatggccaacgtggctgctctatctgttaagacccgggtgctcagcccgcatgggaaaaatgtctatttggccttagagaaaatggtttccttctgaaaagctatgggtatcactgagaagattgcaaattctgtaaaaagtcctcatggatgtgttaaaaattaaacagacttttttttttamagttagtttatttcagtttctaccttctgacaactcaaggtgcaatatatacacatgtttttcttcacagcaaacacctttgattttagcactgttttgagatcttcacccttgaaactttctcaaccttaaaacagagtttgtagaacatcaccgagcgggacacaagattgcaaaaatgcaacagagaagatactggtgtcactgcacgccacttgggggctaccaacaaggtaatgtctggatgtgagcaccgcgagtctaggaaagagaaagcagagggcgtgtgcatgggagacgccactgatagttccaacgggggccaccaggttcaagaaggcggcaggtcaaccgtgttctgacacatttacatgttttaaggggatccatgtgtgttgtctgaatttctagcttttcctagtgttccaacgtttgccttctctttctccacgtgtccacccagaagaccctaagcaacagccccaggctcaccgggatggcagggactcctccccaacagccaaagccaagccaagctgtctcttgcagggagatctggagtccaccccttagggctgcacctcccagagtgcatgcggtcgtcccccacctctatttcatgagcaaatcatctaggattaaggagggagcgggcgcagccccccagttctagtcaatgcacaggggatttactgacaggcatcccctttttaaagtgcaaagtcccttatagcgctgctcaagggagttcaggctgcagtgcactcaggctctgactgttttgtcaggtcccagagtctgcagataaagtggggagctgggttctccccaaatcgtactgtcctgcaggaggggtgtagaagggaagttggagtaaacaaacccagcccatcgtctctccccttggatatggtgaatttttccctttccaacagtaactaagaaaccccacccccacccccagcccctgtgggagcgctgtcccactgaaatcccgtggccacgtgcatccccaggcacagctacaggcagcgccgcgctcccaaggactctcactcactgcactctgcaggcta

SEQ ID NO: 83126 - DNA, 614 bp, Homo sapiens
attttggggaatcgttttctgagccaccacaagctccacaaatattccattggattattctctaggcttccaaactttctgctgaataactgttagttaattattattcttttgaaaatgatatgtccttttattctgtggtcgcttttatgaagttttatttgtctttcattttctgcagttttagtatgactagttgtgtcagattttttagtattcattcttgttgacattcatggggtttcttgggtctgtgacttgatatcttttatcacttggcagtaggctcrtcaaacattgcccatttcctattctttttctctcctgaaatcccaattacatgtatgtttgaccttttcaccatgtcccatgtgttacctaagttttttactgaatgctgggcattgtgtatacaaaattatggagataatttgaggctctcatgatgttacttttctccaggaggattacttttgattctggcaagcagttcgaataaatacagattaccctaatccagtctgagcctgatttggtttgaaatcaaattttagtctttagaaggatcaggttattttcattttaactttattcctagggtgtaggtcttctgg

SEQ ID NO: 83127 - DNA, 614 bp, Homo sapiens
attttggggaatcgttttctgagccaccacaagctccacaaatattccattggattattctctaggcttccaaactttctgctgaataactgttagttaattattattcttttgaaaatgatatgtccttttattctgtggtcgcttttatgaagttttatttgtctttcattttctgcagttttagtatgactagttgtgtcagattttttagtattcattcttgttgacattcatggggtttcttgggtctgtgacttgatatcttttatcacttggcagtaggctcgtcaaacattgcccatttccyattctttttctctcctgaaatcccaattacatgtatgtttgaccttttcaccatgtcccatgtgttacctaagttttttactgaatgctgggcattgtgtatacaaaattatggagataatttgaggctctcatgatgttacttttctccaggaggattacttttgattctggcaagcagttcgaataaatacagattaccctaatccagtctgagcctgatttggtttgaaatcaaattttagtctttagaaggatcaggttattttcattttaactttattcctagggtgtaggtcttctgg

SEQ ID NO: 83128 - DNA, 1495 bp, Homo sapiens
tgtggataatgagacacaaatagataagtattgtgctttgcttagccaaggccatatacctggtaagtggagagatgggttcgcatataactagaggtcaagttcttaaactgaatgctaattttgcccccttcagatatagcatgcactctccaatttgccatagcccccaaccagcacactgtattctttcatgttatctgcttgacccttgttgaatttaggtttgtaatttcaagctgaaataatagaagacacaaggaaactgtgagagatgaaagacagactagattaggacaggagagagagagagagagagcaaaaaagagaggaaaggtcaaccagttgttttagaggaaatgtagctcaaagctctaaaatatctatgtgtaaatgtgtatctgttgctaccattagtagtattttcagagtttggaaaagacactacaccttcatatccacatgcccacagacttatacacagaactatttctttcccagtgaagctttacttactgtagaagacaaccactgcattcttactggacagagggttttgcatttctcaactagatcacaaattctttctaaattgatgcatgacatcctaaaggctgcttaaattcctttaaattttattacttgattgaaactttctcatgagacattttagctttcattgccctctgcctatgagatcattgttatcttatatctgatagcttgcaaaggagtctaaatctttagtaggttttataagtgaaatatcttacttgacactcattatgatgtaaaactatttacaaatatcatcaaaccacaaataaactactctcaattaatatatagtttctaggaggaggttttataattatgtaattatatatatatgtaatatatatattacatatatacataatttgggagccaattctgtagaatttaagtcatattggtttattgtgaatgaaatgcagagcagtttgttatttttctaatcaatctcagtatgatagatttctactaagcctttgctgtactgtgtggttgcctggagccttgcgtgtgtcatcatcacaacttttttctctttttcatcttgacttaagatagttgtagggtatctgtgaggacaaatatataagatggcttttgttgttcaagtgttctccattctctggtatatgctactagagtagaaagaaaactaattacattcatctaggactgtgctttataatcatatattcaaaactggaaaaaaagcttcctaattcatctatgtttcaatttgtgcaacattacagaattaatgtgcaacattattatttgaaagtatacatctagctcctaacagtgtgaaagttgaaagtaaaggagaaaacaaggcacaacaacaaatattatagttagatgtatatttttgaataataagttcagttmtgtctgtatgtcctctttataaaatggttaggttgatgctgcatagaaacca

SEQ ID NO: 83129 - DNA, 1146 bp, Homo sapiens
ggtggggacacagagccaaaccacatyaaccactatgcttacataagagaggggggccttcatgtcttcatctcttcctgcttggacagagtcttggttacctccttcttggcctgaagtggctcctcggggcactcctgtacttccttggtcttaaccttgggggcctatctggttagccaggggcttcttgcaggccttctctgccttcagcttgcggatgtgtttcaggagaatctgcttgattctcattcacctaaaagataatgtaatttttaagagaaaaaaagtcagatatgttatttttctttgagtaccatggccacagccatacatcttgctcaggcaaccgaagaggcatgcctccagcatcctctgccatgacgaaaaggcctcataggatcccagtgaaaccaaccaaacagtcaatgccaactctagccagcagatctggaagttgatcaaagatgggctgatcccactagactatgacggtccattcccaggttccatgccagaaaggggcaggcacatgggtacatgtagtcctaatggccctgcagatgctggaatgtcccagaaggtaacctgcatgaggaagaggaggactctgcaccagtttcttagaagatacagtgaatctgaaattgaccaccacctgtatcacagcctgtacctgaaaaagacttgccattttagaacctagcactgacttgcccatgcaggaccctgcagagtctcctttctctctgccatggcaacctgcaatgtaacaaccagtgatgctccatcagtcttgactcctgagtaaagagctgaaggatgactgcttaggatcagagctacagacaccacagctccagagagaaatacactttgttgttttaagctggaatttgtgggactgtttattattgcagcataacccagcccatcatgacagacacagcatcttccttattccagacaacaatcagacaagggagacaatattgctaaaaaaaaaaaaaaaaaagtaacttatgtaaaagtggagacttgggaaactaaataattcatgtccgaagtcacactgccagcatttgacctgtctcattccaaagcccactgtgtttccaccttatcactttgactcaaaaaatgttt

SEQ ID NO: 83130 - DNA, 1062 bp, Homo sapiens
atgtaaactttaagaacaatggaatttgatggctgtaggtgaatttgatggatgctctaaaaattatgagaagctgaaagcatttaataggcaattgaaaatcaaatgtgaaagccagagggcctgtgtatcttacaaagaggctctcatcttttgaagagggagatcagataaagctgtggacccgcccaggacttaattgtcagagcaactcagctccagaaaggtttaaactactaacctaggcaggtgggctatacaaaggtaagagccccctggttgagatagaatggaaccctgacatatagactggtgacatatcaggggattccctccatctccaaatcttgagcacccagattcccctgaattaacccctctacatgcctggagacaatgcaaaggcccctctcctcaaagtcagtgtgttccccacccccactcctcgacccacccaggatcttcccctatgtctcctcctggccttgaggcctagacagacctagaktcaagtctcagcagaatccagctgggaagctctgggcctaataacggaggaaagggaatatacctcaaaggcgttgcaagactgagtcaccacgtatcagcaaaagacaagatcctataaatgggaaaggattctaagggtgcttggtcagtcaagaaggctaacataaaattgatgaatgcagaatgtattgatttgtgggcattcttctgtaatacaagatttgataccccaggaaggatcccagaagatggtgtgaattcaataccaggatggttgctaccaggatgggtgccagggcgctgatgtacaagctgaaatgtgaaaaagtggtggcaagtagccaagccaagggaggttgtgggtggctggcattgggacagggcaatgttaggaggcttctcctgagttgttggccaggcctcactgctcttgctgctgctcaatcactgctgcagactgtcctgttctcctcaaagagtctgctcctcaaactcctactccccaaggcacagaatttaagcttctcagagctttctacctccagaaaatct

SEQ ID NO: 83131 - DNA, 1062 bp, Homo sapiens
atgtaaactttaagaacaatggaatttgatggctgtaggtgaatttgatggatgctctaaaaattatgagaagctgaaagcatttaataggcaattgaaaatcaaatgtgaaagccagagggcctgtgtatcttacaaagaggctctcatcttttgaagagggagatcagataaagctgtggacccgcccaggacttaattgtcagagcaactcagctccagaaaggtttaaactactaacctaggcaggtgggctatacaaaggtaagagccccctggttgagatagaatggaaccctgacatatagactggtgacatatcaggggattccctccatctccaaatcttgagcacccagattcccctgaattaacccctctacatgcctggagacaatgcaaaggcccctctcctcaaagtcagtgtgttccccacccccactcctcgacccacccaggatcttcccctatgtctcctcctggccttgaggcctagacagacctagagtcaagtctcagcagaatccagctgggaagctctgggcctaataacggaggaaagggaatatacctcaaaggcgttgcaagactgagtcaccacgtatcagcaaaagacaagatcctrtaaatgggaaaggattctaagggtgcttggtcagtcaagaaggctaacataaaattgatgaatgcagaatgtattgatttgtgggcattcttctgtaatacaagatttgataccccaggaaggatcccagaagatggtgtgaattcaataccaggatggttgctaccaggatgggtgccagggcgctgatgtacaagctgaaatgtgaaaaagtggtggcaagtagccaagccaagggaggttgtgggtggctggcattgggacagggcaatgttaggaggcttctcctgagttgttggccaggcctcactgctcttgctgctgctcaatcactgctgcagactgtcctgttctcctcaaagagtctgctcctcaaactcctactccccaaggcacagaatttaagcttctcagagctttctacctccagaaaatct

SEQ ID NO: 83132 - DNA, 1062 bp, Homo sapiens
atgtaaactttaagaacaatggaatttgatggctgtaggtgaatttgatggatgctctaaaaattatgagaagctgaaagcatttaataggcaattgaaaatcaaatgtgaaagccagagggcctgtgtatcttacaaagaggctctcatcttttgaagagggagatcagataaagctgtggacccgcccaggacttaattgtcagagcaactcagctccagaaaggtttaaactactaacctaggcaggtgggctatacaaaggtaagagccccctggttgagatagaatggaaccctgacatatagactggtgacatatcaggggattccctccatctccaaatcttgagcacccagattcccctgaattaacccctctacatgcctggagacaatgcaaaggcccctctcctcaaagtcagtgtgttccccacccccactcctcgacccacccaggatcttcccctatgtctcctcctggccttgaggcctagacagacctagagtcaagtctcagcagaatccagctgggaagctctgggcctaataacggaggaaagggaatatacctcaaaggcgttgcaagactgagtcaccacgtatcagcaaaagacaagatcctataaatgggaaaggattctaagggtgcttggtcagtcaagaaggctaacataaaattgatgaatgcagaatgtattgatttgtgrgcattcttctgtaatacaagatttgataccccaggaaggatcccagaagatggtgtgaattcaataccaggatggttgctaccaggatgggtgccagggcgctgatgtacaagctgaaatgtgaaaaagtggtggcaagtagccaagccaagggaggttgtgggtggctggcattgggacagggcaatgttaggaggcttctcctgagttgttggccaggcctcactgctcttgctgctgctcaatcactgctgcagactgtcctgttctcctcaaagagtctgctcctcaaactcctactccccaaggcacagaatttaagcttctcagagctttctacctccagaaaatct

SEQ ID NO: 83133 - DNA, 1062 bp, Homo sapiens
atgtaaactttaagaacaatggaatttgatggctgtaggtgaatttgatggatgctctaaaaattatgagaagctgaaagcatttaataggcaattgaaaatcaaatgtgaaagccagagggcctgtgtatcttacaaagaggctctcatcttttgaagagggagatcagataaagctgtggacccgcccaggacttaattgtcagagcaactcagctccagaaaggtttaaactactaacctaggcaggtgggctatacaaaggtaagagccccctggttgagatagaatggaaccctgacatatagactggtgacatatcaggggattccctccatctccaaatcttgagcacccagattcccctgaattaacccctctacatgcctggagacaatgcaaaggcccctctcctcaaagtcagtgtgttccccacccccactcctcgacccacccaggatcttcccctatgtctcctcctggccttgaggcctagacagacctagagtcaagtctcagcagaatccagctgggaagctctgggcctaataacggaggaaagggaatatacctcaaaggcgttgcaagactgagtcaccacgtatcagcaaaagacaagatcctataaatgggaaaggattctaagggtgcttggtcagtcaagaaggctaacataaaattgatgaatgcagaatgtattgatttgtgggcattcttctgtaatacaagatttgataccccaggaaggatcccagaagatggtgtgaattcaataccaggatggttgctaccaggatgggtgccagggcgctgatgyacaagctgaaatgtgaaaaagtggtggcaagtagccaagccaagggaggttgtgggtggctggcattgggacagggcaatgttaggaggcttctcctgagttgttggccaggcctcactgctcttgctgctgctcaatcactgctgcagactgtcctgttctcctcaaagagtctgctcctcaaactcctactccccaaggcacagaatttaagcttctcagagctttctacctccagaaaatct

SEQ ID NO: 83134 - DNA, 1062 bp, Homo sapiens
atgtaaactttaagaacaatggaatttgatggctgtaggtgaatttgatggatgctctaaaaattatgagaagctgaaagcatttaataggcaattgaaaatcaaatgtgaaagccagagggcctgtgtatcttacaaagaggctctcatcttttgaagagggagatcagataaagctgtggacccgcccaggacttaattgtcagagcaactcagctccagaaaggtttaaactactaacctaggcaggtgggctatacaaaggtaagagccccctggttgagatagaatggaaccctgacatatagactggtgacatatcaggggattccctccatctccaaatcttgagcacccagattcccctgaattaacccctctacatgcctggagacaatgcaaaggcccctctcctcaaagtcagtgtgttccccacccccactcctcgacccacccaggatcttcccctatgtctcctcctggccttgaggcctagacagacctagagtcaagtctcagcagaatccagctgggaagctctgggcctaataacggaggaaagggaatatacctcaaaggcgttgcaagactgagtcaccacgtatcagcaaaagacaagatcctataaatgggaaaggattctaagggtgcttggtcagtcaagaaggctaacataaaattgatgaatgcagaatgtattgatttgtgggcattcttctgtaatacaagatttgataccccaggaaggatcccagaagatggtgtgaattcaataccaggatggttgctaccaggatgggtgccagggcgctgatgtacaagctgaaatgtgaaaaagtggtggcaagtagccaagccaagggaggttgtggktggctggcattgggacagggcaatgttaggaggcttctcctgagttgttggccaggcctcactgctcttgctgctgctcaatcactgctgcagactgtcctgttctcctcaaagagtctgctcctcaaactcctactccccaaggcacagaatttaagcttctcagagctttctacctccagaaaatct

SEQ ID NO: 83135 - DNA, 690 bp, Homo sapiens
tgtttcaacctctgcctgttacgcagttccaaagtcacttccacaattttgggtatctttacagcagtaccccactacccagtaccaatttactgtattagtctgttctcatgctgctaataaaaacatacccgagactgggtaatttataaaggaaaggagtttaattgactcccagttccacgtggctggggaggcctcacaatcatggtggaagaggaaggaagagcaaagacatgtcttacattgcagcaggcaagagagtatgtgcaggggatctcccctttacaaaaccatcagatcttgtgagacttattcactatcatgagaacagtataggaaaaacctgcccccatgattcaattacctcccaccaagtttctcccatgacacttggaaattatgggaggtacaattcaagatgagatttgggtggggacacagcaaaccatattatgtatgacccaccagaaaaaaaaaccctggtggatgaacaaataaagtgttaaaaattgaacacataatcatgtgcactccacaataagagaataatcccagatataaaatgagcctcaagttgtcaccccattttaggaaacagtcacaagctagcctaccttcttaaccacctccttagatattcctgccctgcaactctrtataatcagagaacccacagctattctaagg

SEQ ID NO: 83136 - DNA, 550 bp, Homo sapiens
acacatgcacatgtatgttcactgcagcaccatccaccacagcaaacacatggactcaacctaaatttccatcaatgatacactggacaaagaaaaatgtacatatataccatgaaatactatggagtcataagaaaaatgagatcatgccccttgcagagatctgcatggagctggaggccattatccttagcaaactaacacaggaacagaaaaccaaatactacttgttctcacttatgagtgacaagtaaataatgagaacacggacacggtgggggaatgacacactggggtctttcaaaaagtggaaggtgggaagagaggatcaggagaaataatggtactaagcttaatacctgggttattaaataatctatacaaccccatgacacaagtttacctatgtaacaaacctgcacttgtaycctaacacttaaaagtttttaaaaagacctatttgtaccttttaaagaggaatcagccagtaatttcaaagatgattttgtttataaaacataatcttccacttgtccagtaaatgctcttc

SEQ ID NO: 83137 - DNA, 660 bp, Homo sapiens
tcagcctccagagtagctgggattacaggtgcctgccaccatgcccagctaatttttctatttttagtagaggcagggttttaccatgttggccaggctggtcttgaactcctgacctggtgatctgcccgcctcagcttcccaaagtgctgtgataacaggtgtgaggccactgtgcctggccataattgtacattttaaaataagtaaaagtgtagaattcgattgtcagtaatacaaaggataaatgctagaggtgacggataccayatttagcacatgattattatgtattatatttgtgtatcaaaatatgccatatatggcataagtatatatactcatatacccacaaaaattaagaaaaataaatttaattgattaaaataagaataaatatttacccaacaggaatattattatttaatttatctatactttaaagccactggcaagagattaacatgttaaaaatgttgaaaccattaacttcacacataatgtaaaattttaaaaatgtgctgcattttattatataaaagtacaattagtacaataatatactaataatatactactagttttctcataatgcaaaagaacaatactcttaacacctacctcttatatcactcaagagtataagttaaccacaaagaa

SEQ ID NO: 83138 - DNA, 793 bp, Homo sapiens
atgcaactttatgtcatgagaactgcctacagaagtattatgacatatctctttttatttttcttttttttgagacagaattcgctcttgttgcccaggctggagtgcaatggtgtgatcttggctcacggcaaactccacctcccgggttcaagtgattctcctgcctcagcctcccgagtagctgggattacaggcatgtgccaccaygcccagctaattttttatttttttttagtagagacggggtttctccatgctggtcaggctggtctcaaactcccagcctcaggtgattcgcccactgtggcctccaaaagtgctgggattatgggcatgagccactgtgcctggccgacatacctctttttcatcacctagatgatgtgaccattttattttccatgtccctggcatattttgggtatagtgacatatcattgagttcaacacccattggatggggttatctgggagatttaattcccctcttctgtctgcaccctgaccactagggattgtgacgaatcactggtctcagcaatcaggggatttgttttttttgcctggtcctcgcccacagagaacattgtaacatatccctggtctcagcactcaggtgatgtgactcttctgactgtattctgctttcaggaggggattgtagcatattcctaatggagcaccaaggtgatgtgacactgctgcctggtccctgccctcagagaagattgtgacatatcactgccctgaaacccaggtgatgtgagtctactggtcggtccctattcac

SEQ ID NO: 83139 - DNA, 793 bp, Homo sapiens
atgcaactttatgtcatgagaactgcctacagaagtattatgacatatctctttttatttttcttttttttgagacagaattcgctcttgttgcccaggctggagtgcaatggtgtgatcttggctcacggcaaactccacctcccgggttcaagtgattctcctgcctcagcctcccgagtagctgggattacaggcatgtgccaccacgcccagctaattttttatttttttttagtagagacggggtttctccatgctggtcaggctggtctcaaactcccagcctcaggtgattcgcccactgtggcctccaaaagtgctgggattatgggcatgagccactgtgcctggccgacatacctctttttcatcacctagatgatgtgaccattttattttccatgtccctggcatattttgggtatagtgacatatcattgagttcaacacccattggatggggttatctgggagatttaattcccctcttctgtctgcaccctgaccactagggattgtgacgaatcactggtctcagcaatcaggggatttgttttttttgcctggtcctcgcccacagagaacattgtaacatatccctggtctcagcactcaggtgatgtgactcttctgactgtattctgctttcaggaggggattgtagcatattcctaatggagcaccaaggtgatgtgacactgctgcctggtccctgccctcagagaagattgtgacatatcactgcccygaaacccaggtgatgtgagtctactggtcggtccctattcac

SEQ ID NO: 83140 - DNA, 510 bp, Homo sapiens
gcaaaaattttctcccatgctgtatgttatctgtttactctgttgatagtttcttttgctgtgcagaagctcttttttttttttttttgagatggagtcccgccaagatcgcgccactgcactccagcctgggcgacagagactcagtctcaaaaaaaaaaattaaagactacrtaagagacattacgacatttttcaaacattaccttcaaataaagagtgttcttctcacataattatacagattcaaaatataagtagattgtgaatttaggattattttcccgactactcacctagacagaataatcattgaaaaccatggaaagattatgtcataaacgaagtagtggcaacacagatgaaaaacacatcgatatttctatagatgacatacggctaattcatatataaattaagcatcacattgtctaaaattgtacagagttgaaaattatcattcaattcataatatcaagctttgaaagcaaaaatacaattaactgatct

SEQ ID NO: 83141 - DNA, 510 bp, Homo sapiens
gcaaaaattttctcccatgctgtatgttatctgtttactctgttgatagtttcttttgctgtgcagaagctcttttttttttttttttgagatggagtcccgccaagatcgcgccactgcactccagcctgggcgacagagactcagtctcaaaaaaaaaaattaaagactacgtaagagacattacgacatttttcaaacattaccttcaaataaagagtgttcttctcacataattatacagattcaaaatataagtagattgtgaatttaggattattttcccgactactcacctagacagaataatcattgaaaaccatggaaagaktatgtcataaacgaagtagtggcaacacagatgaaaaacacatcgatatttctatagatgacatacggctaattcatatataaattaagcatcacattgtctaaaattgtacagagttgaaaattatcattcaattcataatatcaagctttgaaagcaaaaatacaattaactgatct

SEQ ID NO: 83142 - DNA, 1236 bp, Homo sapiens
tttttcccagcaagacatgcacctattctttccacaatttcttccacaatgtgtatttttttcacaaataccttcaaatacttgctcttattcctaaaaaaaaaaaagtgattatcagcctgagccctccactttttattgccatcattttcaagttgcacaaacactctcttgaataygatgaacattcatttgacattcctaagcaggcttacattaattttagttccccactgaatttcaaacaggagcctccacattgacattaaaaatattaacatctgcagtggcactgcaatctgctgaggcgtggattgttgctctgactcgccacatctttccacttgttctttttttagaaagagcaaagcagagggatttggcagggctattcaaactgccactcagagcagctctagagaaggaaggctagcctggaccctattgcgttctagttggcagcaaatccttcattcaaggtctttctgtggaaaggcaatgctggcttgtcccctcacccacactgacgtctgtcctgtgtgtcagagataactttccagccatgaaatggcagctactattaattttacgaaggcttctaaaacagcttttctttaatctgttcttttgccccaagtgagattttttccctctttgttgtttacaataatgcagtcagtgaaaagaagccaagcttctgatttaggtgtggtgggataaatttgttcaaaatatgtttaaaaaattgagtcttttgtgccctttgtggacaaggcaaactataatagggagaacttccttctgaagctcttttccacccctttcagccttgcttatttttatcatgtctcatcaccattattacccattatatttatatctgtgtttagcaggcagatttgcttggtgtctataaaggtgtaatgagcaatttgggttaatgattttctgcagctgctcaaaacagttggtactaacgtcatcgtttatgccttccaaaagaaattcaagcaaggcatcagatgtgcaccaaattggctttgcctgttgaatggaggaagtagaagcatagacagtggtgggatgtgtgtgaaataacaattcatgcatctttcatttcctagttggatgaatgctagcagggagcctctctcataaaagaatctttggccttgggagaaaaatctgggttcaatatttctactcagcagcatatgagctatgtgaccttgagca

SEQ ID NO: 83143 - DNA, 1236 bp, Homo sapiens
tttttcccagcaagacatgcacctattctttccacaatttcttccacaatgtgtatttttttcacaaataccttcaaatacttgctcttattcctaaaaaaaaaaaagtgattatcagcctgagccctccactttttattgccatcattttcaagttgcacaaacactctcttgaatatgatgaacattcatttgacattcctaagcaggcttacattaattttagttccccactgaatttcaaacaggagcctccacattgacattaaaaatattaacatctgcagtggcactgcaatctgctgaggcgtggattgttgctctgactcgccacatctttccacttgttctttttttagaaagagcaaagcagagggatttggcagggcwattcaaactgccactcagagcagctctagagaaggaaggctagcctggaccctattgcgttctagttggcagcaaatccttcattcaaggtctttctgtggaaaggcaatgctggcttgtcccctcacccacactgacgtctgtcctgtgtgtcagagataactttccagccatgaaatggcagctactattaattttacgaaggcttctaaaacagcttttctttaatctgttcttttgccccaagtgagattttttccctctttgttgtttacaataatgcagtcagtgaaaagaagccaagcttctgatttaggtgtggtgggataaatttgttcaaaatatgtttaaaaaattgagtcttttgtgccctttgtggacaaggcaaactataatagggagaacttccttctgaagctcttttccacccctttcagccttgcttatttttatcatgtctcatcaccattattacccattatatttatatctgtgtttagcaggcagatttgcttggtgtctataaaggtgtaatgagcaatttgggttaatgattttctgcagctgctcaaaacagttggtactaacgtcatcgtttatgccttccaaaagaaattcaagcaaggcatcagatgtgcaccaaattggctttgcctgttgaatggaggaagtagaagcatagacagtggtgggatgtgtgtgaaataacaattcatgcatctttcatttcctagttggatgaatgctagcagggagcctctctcataaaagaatctttggccttgggagaaaaatctgggttcaatatttctactcagcagcatatgagctatgtgaccttgagca

SEQ ID NO: 83144 - DNA, 1236 bp, Homo sapiens
tttttcccagcaagacatgcacctattctttccacaatttcttccacaatgtgtatttttttcacaaataccttcaaatacttgctcttattcctaaaaaaaaaaaagtgattatcagcctgagccctccactttttattgccatcattttcaagttgcacaaacactctcttgaatatgatgaacattcatttgacattcctaagcaggcttacattaattttagttccccactgaatttcaaacaggagcctccacattgacattaaaaatattaacatctgcagtggcactgcaatctgctgaggcgtggattgttgctctgactcgccacatctttccacttgttctttttttagaaagagcaaagcagagggatttggcagggctattcaaactgccactcagagcagctctagagaaggaaggctagcctggaccctattgcgttctagttggcagcaaatccttcattcaaggtctttctgtggaaaggcaatgctggcttgtcccctcacccacactgacgtctgtcctgtgtgtcagagataacyttccagccatgaaatggcagctactattaattttacgaaggcttctaaaacagcttttctttaatctgttcttttgccccaagtgagattttttccctctttgttgtttacaataatgcagtcagtgaaaagaagccaagcttctgatttaggtgtggtgggataaatttgttcaaaatatgtttaaaaaattgagtcttttgtgccctttgtggacaaggcaaactataatagggagaacttccttctgaagctcttttccacccctttcagccttgcttatttttatcatgtctcatcaccattattacccattatatttatatctgtgtttagcaggcagatttgcttggtgtctataaaggtgtaatgagcaatttgggttaatgattttctgcagctgctcaaaacagttggtactaacgtcatcgtttatgccttccaaaagaaattcaagcaaggcatcagatgtgcaccaaattggctttgcctgttgaatggaggaagtagaagcatagacagtggtgggatgtgtgtgaaataacaattcatgcatctttcatttcctagttggatgaatgctagcagggagcctctctcataaaagaatctttggccttgggagaaaaatctgggttcaatatttctactcagcagcatatgagctatgtgaccttgagca

SEQ ID NO: 83145 - DNA, 638 bp, Homo sapiens
ctactcttgacacttacatttaacgttgtattggggttctagtgaggacaatcagttaagaagaaataaacagaatgaaaattgtgatgaaaaagtaaaactattactatttttgcgtcatgaatggcatgatctgtatggtcgtccctctgtatccctgggggaytggttctaagaacactgtggataccaaaattggcacatgctcaagtgcattatataaaataacatagtatttgcatatgatctacatcctccttcataactttaaatcatctctagattacttaaaataccaaatattatgtaaatattatgtaaagagttatgctatattttaattggtattttattgtatcttttttcggaaaaaaaaaaatccatgaaggtagaagctgtgaatacagagggatgactatacatggaaaatccagagtaatccacaaaaacaaacaaaaatcttttagaactaataaattagctgtcaaggttccaagatataagatcaatatagaaaattcattgtatttctagacactggcaatgagcagtcgagaaataatattaataaaacaattccatttacaataacatccaaacaataacaaggaatatatttaacaacagaagtgtaatac

SEQ ID NO: 83146 - DNA, 1146 bp, Homo sapiens
tgcatacggaagggaatggtggtcacaatgcccacacccatttactcatagagcagtcaaatgctagcacagtaaggaattgactattcagttctagagataagggagtgacacgtcactttacagagcaccattgcatccacagagcaggaagagagaaggtgttaactgatatacataaaagtcatctgaatgtgtgccaggcagttggagcscttgacctacgtagagtaatatatttgtataaagactacttacagacatatggggtcttgtagtttgagtctgcaatttaagatatactgcaacttactgcttttaatgtgaagagggtccagtcatttttgtagtagtacttcagtgttgggacaacacttacctacctgctccttgtacttaggcaggtgttagagaaaaatatctgtctactgtaaggggaggaatggaaaaggatccattctgtagatccactcaaacgatcatggccagagccatacatactattagaggacatacttaaaacttcatatgtgacgatgaatttatctcatgtttcagaaggctcctgaaagcaagggcattaatattcacatcttatttatagaacacttaaaacttgccaggaagtgtggtaaatatttttcatgacttctctaatttataaaatttgagatataattatagcatttttacagaaatataaatggattcttacatcaatttgtaataatttacataaattttacatggtggaaactggtggcgccaaaatttgaactcaagcaacttggcatgagaccctgttttcttttactcggctgtcagggaagaattcaaatgacctggaaagggacgtcaccataagcaagaacacaaggtggactgggccttcgttgtttctggacgtatcataagcaacaatttaaataagtcagaaaacatttacataatattctaacataccaactccatatgcattcatatggatcggtatatatactgtatttcaagaaaaaaatacaagatgtagtttcatgttaaaatttcagtgaaataacatttgtgtatgcatatactatttctggaagttcatacatgaaactgatgtggttacctatatgaaacagtactaggtggacagtagtg

SEQ ID NO: 83147 - DNA, 1146 bp, Homo sapiens
tgcatacggaagggaatggtggtcacaatgcccacacccatttactcatagagcagtcaaatgctagcacagtaaggaattgactattcagttctagagataagggagtgacacgtcactttacagagcaccattgcatccacagagcaggaagagagaaggtgttaactgatatacataaaagtcatctgaatgtgtgccaggcagttggagcgcttgacctacgtagagtaatatatttgtataaagactacttacagacatatggggtcttgtagtttgagtctgcaatttaagatatactgcaacttactgcttttaatgtgaagagggtccagtcatttttgtagtagtacttcagtgttgggacaacacttacctacctgctccttgtacttaggcaggtgttagagaaaaatatctgtctactgtaaggggaggaatggaaaaggatccattctgtagatccactcaaacgatcatggccagagccatacatactattagaggacatacttaaaacttcatatgtgacgatgaatttatctcatgtttcagaaggctcctgaaagcaagggcattaatattcacatcttatttatagaacacttaaaacttgccaggaagtgtggtaaatatttttcatgacttctctaatttataaaatttgagatataattatagcatttttacagaaatataaatggattcttacatcaatttgtaataatttacataaattttacatggtggaaactggtggcgcyaaaatttgaactcaagcaacttggcatgagaccctgttttcttttactcggctgtcagggaagaattcaaatgacctggaaagggacgtcaccataagcaagaacacaaggtggactgggccttcgttgtttctggacgtatcataagcaacaatttaaataagtcagaaaacatttacataatattctaacataccaactccatatgcattcatatggatcggtatatatactgtatttcaagaaaaaaatacaagatgtagtttcatgttaaaatttcagtgaaataacatttgtgtatgcatatactatttctggaagttcatacatgaaactgatgtggttacctatatgaaacagtactaggtggacagtagtg

SEQ ID NO: 83148 - DNA, 598 bp, Homo sapiens
atgaaatactttttttaaaaaaagatatatgacatatttgtgttttctgccaaaaattttgatatacagcttgcttgattaaacacctggtctcagggttgacttctccactaggcttggcaggcgcagtgccaaaggctcatgatacttttaggggcccatgaaaacatcttattgtcttaaaatcaggagcaaaaaaacaaataaataaacttttaagtcaaataarattttttcacatgtaacaatagtatatttgcatttataccactgcagttataaaatgtaatttctgatatttttatgtgaagaaagggaatcaaaggcaaaaatgcctagggcccttgaaagtcgtaatgcagttcttcctggttagttttctttaaaacagtagcaaaagcaataatacctatcttcctgcaaaaaaaaaatcttttaataaggttattttgcgaagcagaacatttggagcattctaatttaactgtaaatagtcttaaatgattgcagaatgtaacatacctttagtgccagactcgaaaatgtatttgaaacattgcacttaaagctcagctgcttatccaggtttccctctgga

SEQ ID NO: 83149 - DNA, 513 bp, Homo sapiens
ttttaactcatttattaaacatatttttaaaaatatctactaaatgccaggcactgttcttggtgctggaatttcacaatcaacaaaaatagatatagtcttggccctaatgaagtttaaaatacagtggaaaagagacatggcaccatagtcacacacattagtatataactataattgtgacagttattgtgatagactgttagttatttccaatgtccattcttctctcctttgtaataaaactttgatttaaaaaaaatctgggaaaaaagcccccaagaatagtaaccatatttctcagtctctgttayagcaaggtgggagcaaattactaagatctggctaataagacatgaataaaagagctctctgcactttctgcatcattttttttctgtaaagctaaaactgctctaaaaaatagagtctattaaaagaagaaagaaagatggtgcagcttccagttgttaagagtgtggctgtgacagtgaactgttctggaccgtgtgg

SEQ ID NO: 83150 - DNA, 688 bp, Homo sapiens
aaagagaaacatgtcttttggctcttttcatgtgtcctaatagggaaactcttgggtctaaatgtagaggtacaggagctgtgttcatctctagcaaaaaaatagagctggcctgttgagcctgggaacagggtttgcatctgcctgaaatttatgagcaagcgtagcctatttttcttgtacttctttgtctcaaagaaaacttattaacaaccaaggagaaggtgaagttcaactccgttgcaggatctccctggaatactcttttagccaccttttgtttttgcagtaaaaggaggaatgagcattgaatgaagacaaggatgaagactgaccatctaaaacatctgttagtgatagtttggsttttattttggggaaattcagtgcttttgcaaaaaccaaatggttttgtgggtctggcgctggactgagtgttgggaatgtggattctggtctctgttttgtcattaacagagtggccagttttgggatcatcccttacatctactctctgcttcatatttactgcctgaaatagaggatttcttctgtttgctttcaagggatattataatttaatttttattttatttattgttggagacaaggtcttcttctgttccctaaactggagtgcactggtgcaattatagctcactgcagcctcgacctcctggccttaagg

SEQ ID NO: 83151 - DNA, 688 bp, Homo sapiens
aaagagaaacatgtcttttggctcttttcatgtgtcctaatagggaaactcttgggtctaaatgtagaggtacaggagctgtgttcatctctagcaaaaaaatagagctggcctgttgagcctgggaacagggtttgcatctgcctgaaatttatgagcaagcgtagcctatttttcttgtacttctttgtctcaaagaaaacttattaacaaccaaggagaaggtgaagttcaactccgttgcaggatctccctggaatactcttttagccaccttttgtttttgcagtaaaaggaggaatgagcattgaatgaagacaaggatgaagactgaccatctaaaacatctgttagtgatagtttgggttttattttggggaaattcagtgcttttgcaaaaaccaaatggttttgtgggtctggcgctggactgagtgttgrgaatgtggattctggtctctgttttgtcattaacagagtggccagttttgggatcatcccttacatctactctctgcttcatatttactgcctgaaatagaggatttcttctgtttgctttcaagggatattataatttaatttttattttatttattgttggagacaaggtcttcttctgttccctaaactggagtgcactggtgcaattatagctcactgcagcctcgacctcctggccttaagg

SEQ ID NO: 83152 - DNA, 688 bp, Homo sapiens
aaagagaaacatgtcttttggctcttttcatgtgtcctaatagggaaactcttgggtctaaatgtagaggtacaggagctgtgttcatctctagcaaaaaaatagagctggcctgttgagcctgggaacagggtttgcatctgcctgaaatttatgagcaagcgtagcctatttttcttgtacttctttgtctcaaagaaaacttattaacaaccaaggagaaggtgaagttcaactccgttgcaggatctccctggaatactcttttagccaccttttgtttttgcagtaaaaggaggaatgagcattgaatgaagacaaggatgaagactgaccatctaaaacatctgttagtgatagtttgggttttattttggggaaattcagtgcttttgcaaaaaccaaatggttttgtgggtctggcgctggactgagtgttgggaatgtggattctggtctctgttttgtcattaacagagtggccagttttgggakcatcccttacatctactctctgcttcatatttactgcctgaaatagaggatttcttctgtttgctttcaagggatattataatttaatttttattttatttattgttggagacaaggtcttcttctgttccctaaactggagtgcactggtgcaattatagctcactgcagcctcgacctcctggccttaagg

SEQ ID NO: 83153 - DNA, 1540 bp, Homo sapiens
ctggggatgatcattagtgtcccctcccccagcatgtagggctgtgccaggcacaaggaggaggcttgcggcattcccactgaggacagactacccgggaaagcactcggacagcctcagggaagatgagggtgggtccaggagatgccaagggcaggcccttgggcaggtttttcaacagtgcctctgccccaccacccctgtgcccttgcctgtcaccacagggtctcggagaggagagccatgtggctcagcatggccaggggcaggctagactgtcctgctgcagaggacccactggggcccagtgggacagccctccccctccccctgggactccatggcctgtgctgtcctcctgcccaagaagcttccctctgaggcatctcgggtccgggtccgtcctgctcacccagggccaggagcccccaggaggcccacggtaagaaggagcgcaagacataaacaatttccccctcctctgccgaaggctctggtgtcagcgtgctttgcctgcmgtggcctttccccggggcagcgagggcctgagtgggcgcctcccccaacgcctcctgggtgtcagccccagactgccccacggctccacccctgttcagagccactcagcccctgggaaaggtggctgggtcatgagttggggatatgagggggatcagtgcctgctagttggtgccagaaaaccacctttgctggacttggcattgagggttggcaagggggcctcggagacactctcctccctcctacctgtacccccagggtacccgtggtcactcagttcctgactgcctgctttgggttgggatcccaggacccaccctctcctggcttctgctgagccatgccctccgcggtgggggggtcccctgcctgatgccacggccttgcgagtgtcactcagagcccctgctgcacggagccgtgctgtgggtttcttttcctgtgtggacctgcagagaagctgccttgtcactgtcccctcattgctggggtataaatcctcattgtcactatcttcttggccctctgccaccagctgtggactctggggacactcaggactcaggcctggaattttccccaaggtttttcctaggtgcattggtgtaaacagggtcccctcttgccccagaggctgagctcccatgggcagggggagagtgggagcagttgtctgagggccaggctgcgggaacagggtctggggtttcctgtggaaatgctgaagagtgcccgcccctgccctggctccggccagcatctggtcaccctggcgggcagggagtggcagctgcagaacgcatgaaagtggtgggtggggtgggagtggctggtgctgactttgtccaaaggccagaggtgcggtggggcccctgacaccatgtggctaagggcttctccattcaccaggactgttctcacagagtctttccagagaggctgcaaagggcctcttatctccaaaaacgtctattttataggcacctggatgtctactgtgtcctgatacagaggagag

SEQ ID NO: 83154 - DNA, 1571 bp, Homo sapiens
catcagatggaacacataggttcctaacaaggcccacagtttcagttttgtggtggcgcctcttgaacctctcttactctagatcaggcgccgcccctgacccccactgctcctcccaccacttgtgatttgttgcagaaaccagatcagctgtcctgcaaatgtgtcgcctatcacgcagctgtttgcctctctgtggtgtcgcctcgccccatgtctcctgcaaatggaagctgtgctgcagaaatgcccttagattcaggctcatctttctttgccagaagccttcgtgggcagagctgtgagagccacatggaagcacctgtgatgctaagtgtgccccgtgggtccaggtggccagagcccgaacccaccctgtgatgcaaagtgtgcccagtgggtccaggtggccatagccctgacctaccctgtaatgctaagtgtgccccgtgggtccaagtggccacagcccgaacccaccctgtgatgctaagtgtggccagtaggtccaggtggtcatagcctgaacccaccctgtgatgcccttgttttgtcattactgatctcatccatgacccttgcgagaaataattatgtcatgagaggtggcaaaattgtggtttctctcatgatctcatctcttcacaatgagtagctgaaattcttctatcaaaaacaacaacaacaaaaatggctgggcacagtggctcacacttgtaatcccagagcttttgtgggccaaggtgagagaggccaggagcttgaatccagcctgggcaacaagaccccatctctacaaaaacataaaacattagccaggtatggtggtgcgtgcctgtagtcttagctactcaggggctaaggcagaaggatcctttgagcccaagaagttaaggctgcagcgggctgtgattacaccactgcacttcagcctgggtgatgcagcgagaccctgtctcttaaataaaacaaacaggctgggtgtggtggcttacacctgtaatcccaccactttgagaggccgaggtgggtggatcacctgaggtcaggagtttgagaccagcctggccaacatggtgaaaccccatctctactaaaaatacaaaaaattagcagggcctggttgtgggcgcctgtaatctcagctactcaggagtctgaggcaggagaatcacttgaacccacgaggcagaggctgcagtgagccgaggttgkgccattgcactccagcctgggcaacagagcaagactccgtctcaaaaaaaaagaaaccaaccaaacaaaacccaaaaaaacttgctgttgtccactagagttattgagttaccctgaaatatagtttaaaagggaaattcttaattcttttcttttaattgacaatgttccgaatagagagttggagccttgtttttccagtggactaccgatgggttttggtttggtttctctctttaaatctatttatagcttttgtgtattcattgtgtattcagcaattacacacaatgaatacacaaaaaattacacaaccaatacacaaaaggtataggcagatttaaaaagcaagatac

SEQ ID NO: 83155 - DNA, 580 bp, Homo sapiens
aagtgggagtgaaagcgtcggtgcattgagccaatgtgtgtgtgtgagggtgagcacgagggaggcatgagtgtgagtgtgaggggattactgggtgtgcraatgagacacccagtgtaagtgtaagtcagtgagggttggtgagtgtgaggaagtatgagtgggtggcaggcacaagtgtaagtgtgcgattgagtgtgagcatttgtgtaaatgtatgagtgccttgtgtcagtgtgagcacgagtgatgttattgtgaatgcgtgtgagtgaatgtgagcattttgcttgtgtcagtgaatgggaggttataacagtataggtgtgagtgtaaagtgagaaagtgtgtgggtaaaggtgtgagtgggtgagtaatcggtcattactagtgttgaggagtgtgagtgcatatgtgagtttttgtatgcattgggaggggtaagtgtatgtgagagtgcatgggagtgtgtgtcagcttgcatctgtttgtgcatacgtgtgactgggattgtgtgtgtgtgattgcgacagtggtgtgagtgcacctgaaagtgtgagggtgggtgtatgagtgccca

SEQ ID NO: 83156 - DNA, 1024 bp, Homo sapiens
aaacttggattggaaactgtctctactaaaattacaaaaagagtatttaagtggtgcagattaaatataaccaagattgtggagatatttaaaacacgaaattaaaaatataatagatgcactgttgcaaattactatttgaattatagatcattttcctattgcctagaaacaatacatagctaaaattccctaactacttttacgacacatatttagaaggttttaaaaatgtctgtagtcccagctattcggcagggcaaggcaggagaatcacttgagcccaggagttttagaccagcctgggcaacatagtgagggcccatctctaaaaaaaacaaaaaaaaagaaaacttcggaaatgtttcttgaactaacttaaaagccgccttccacttctcactttgaattagtttgaattaatttacaaactgcaatatattttaaaggagcttattgtagaaaataagttgataaaaaaataaggatatatctttagggatttgtctttagggacttgttaccaagcatgtctattttccctcccgccgcttctccaaacaggctggtgtacagggagcaacaccggagctggtgcacgctggggtttgtgcagagcatcgctctcacgctgcaggtgtgcggcaccctcagctccctgcagtggatcacgctgctcatgaaggtcgtggaagggcacgcacccttcactgccacctcgctgcagaggcaggtaatgtgctgccaggcaaaaccagttccctgagagaggcctccatgtactgaagttccctgccctcagagtcaggggcctttattcmgtaacgagtgcagaaagggtctagaagtgacagggtagattttctggaggcaaggggcagaggtccttgataattggtaagttgctaaccttcagtttacctgcttttctcttaagtggtaaatcctgcaactacttactcatctgcttcacagaatttgtagtgtaattgtcttaagaattaaactaaaaataattcttttt

SEQ ID NO: 83157 - DNA, 1024 bp, Homo sapiens
aaacttggattggaaactgtctctactaaaattacaaaaagagtatttaagtggtgcagattaaatataaccaagattgtggagatatttaaaacacgaaattaaaaatataatagatgcactgttgcaaattactatttgaattatagatcattttcctattgcctagaaacaatacatagctaaaattccctaactacttttacgacacatatttagaaggttttaaaaatgtctgtagtcccagctattcggcagggcaaggcaggagaatcacttgagcccaggagttttagaccagcctgggcaacatagtgagggcccatctctaaaaaaaacaaaaaaaaagaaaacttcggaaatgtttcttgaactaacttaaaagccgccttccacttctcactttgaattagtttgaattaatttacaaactgcaatatattttaaaggagcttattgtagaaaataagttgataaaaaaataaggatatatctttagggatttgtctttagggacttgttaccaagcatgtctattttccctcccgccgcttctccaaacaggctggtgtacagggagcaacaccggagctggtgcacgctggggtttgtgcagagcatcgctctcacgctgcaggtgtgcggcaccctcagctccctgcagtggatcacgctgctcatgaaggtcgtggaagggcacgcacccttcactgccacctcgctgcagaggcaggtaatgtgctgccaggcaaaaccagttccctgagagaggcctccatgtactgaagttccctgccctcagagtcaggggcctttattccgtaacgagtgcagaaagggtctagaagtgacagggtagattttctggaggcaaggggcagaggtccttgataattggtaagttgctaaccttcagtttacctgcttttctcttaagtggtaaatcctgcaactactyactcatctgcttcacagaatttgtagtgtaattgtcttaagaattaaactaaaaataattcttttt

SEQ ID NO: 83158 - DNA, 1498 bp, Homo sapiens
  misc_feature (1)...(1498): n = A,T,C or G
ccctccccacccatgcaccttccgtccaagcaggagtgcagcctgcttgggctcaatgtcccctcttctgagaagcagcccggcccaatcctgagcgcccctggtgccgcaatcctcacgcgtatggggctggccgttgatgtcgcctgggctgggggtgcacctgcagcacaaacacgtgactgagcatcttcttgtcccggaccctctcggcgttggaccccaggaagcccctccaggggggcttcagtcgcccacccacctacaaagcccctcatctgcagcggcggcttcgttcccgggacgcgccccaggctctgctcaagcatggcccgcagaccctcaggagcccccgaaacatgatgacctccagccacgtgccagctgccaggagggggcttcaagaccccagatgagcacccgnnnnnnnnnnnnnnnnnnnnnnnnnnnnnnnnnnnnnnnnnnnnnnnnnnnnnnnnnnnnnnnnnnnnnnnnnnnnnnnnnnnnnnnnnnnnnnnnnnnnctcctagagaggaggaaggtgggtcgtcaagcatatgggtattttatgggttgaagcgtggtccccccaaaagatatgaccctgtcctaattcccagaatgtgtgaatacggccttttttggatggagggcctttgcagatggaattaagtgaaggatgaggagatgaggtcattctgggttattcaggcaggccctacatccaagggctggtgtccttataggagtcatagggacagacacagagaaggcctcttgagaatggtggctgagcaggagggatgcagccacaagccaaggatgcccaggccaccagaatgcatgactgctgcttgaagccactcagtttgtggtcattcattacatcagctaagccaggtctgcacatacctgcagagcaggaactctggaggagaagccagacccgaaaagggacagtttcccctctggccaggacctcaccccatcaacccagctgcccacgatgtctgctgggccaacatcccnagcctacagctgccagcctgccctgggctcagccaagggaagagggagctgtgaacaagtcagccctgggccccttcagggagccaatgacctcctcccttcctccctcatgcattcatcccttcatttgttcattcagccatccattcatcactctttccataaacaggcttggcacctcccacgcgcctagatatgaatgcagtatcaatrtgtccctttcaggggcccacagcaggcaggtaagcacacccacaaattcataactccagaggggacaggaggcccaacagaagaatcacaagagaagccacaagggcctcagctctgcctggggcaacagggagaagccccctagactggtgtctggaggcccaccctggactgacacagaggctttcctgatgggcaaagaaggaggcctccctctggtttgtgaaggagatggtggcatggagagctggaggtg

SEQ ID NO: 83159 - DNA, 1108 bp, Homo sapiens
ctcattgtagagatctttcaccttcctggttagctgtattcctgggtagtgtgtgtgtgtgtgtgtgtgtgtgtgtgtgtgtgtggcaattgtgaatgggatttcctttttgatttagctctcagtttagttgttgttggtgtatacaaatgctagtgctttttgtacattgattttatagcctgcaacattgctgaagttgtttatcagctgaagttgatactgattttaatgataaaaaattcctccaatatatgataaatctagacaataggttttattgtattttttgagattgtatatgtttcttttatatttcctgtttgatcacagtatttaaaatattttaatactattaaatgtaaagtattttttaaattttgtcattaatttctacttatatgtgatttctgattaatacatttgtattattcattttcttgtaatgtgtcaagtttttccttgtagtcaactacaacaaattttatgaatattctatttttatttgaaaagactgtgtgtgtgtttattaccttcttaatcatgctcttttcattttctatatctttactaatttttgttgattttatttgtcctggattgagaatctgtgttttagattcttcattttagtgtatttttctctaaagcattttttagttttattttctcttacaaacttatttttattttttcttgaagctctgtattttcttcctcatgaagatttttgctgcattattgaggctatagacattaatatctggtgttttctttgagtattaaarcttttaatattataaagtgaactagaatctattatgattttattctgaaagtaatcatgctagacactaatattttattcttcactctcttcctacttctccatagttcatcattgtcacgtttttatgtttaggctttctggatttcattgttttaggtttgtctcgagtgttctggatagggtgagtaagcctctctaactttttaaatattatcaatacgtttggcttcagttctcttgtggtcgtttcatttctattttatttttttctatcactttttattatttaagttttatactttcgttcaaatgctcaaa

SEQ ID NO: 83160 - DNA, 1108 bp, Homo sapiens
ctcattgtagagatctttcaccttcctggttagctgtattcctgggtagtgtgtgtgtgtgtgtgtgtgtgtgtgtgtgtgtgtggcaattgtgaatgggatttcctttttgatttagctctcagtttagttgttgttggtgtatacaaatgctagtgctttttgtacattgattttatagcctgcaacattgctgaagttgtttatcagctgaagttgatactgattttaatgataaaaaattcctccaatatatgataaatctagacaataggttttattgtattttttgagattgtatatgtttcttttatatttcctgtttgatcacagtatttaaaatattttaatactattaaatgtaaagtattttttaaattttgtcattaatttctacttatatgtgatttctgattaatacatttgtattattcattttcttgtaatgtgtcaagtttttccttgtagtcaactacaacaaattttatgaatattctatttttatttgaaaagactgtgtgtgtgtttattaccttcttaatcatgctcttttcattttctatatctttactaatttttgttgattttatttgtcctggattgagaatctgtgttttagattcttcattttagtgtatttttctctaaagcattttttagttttattttctcttacaaacttatttttattttttcttgaagctctgtattttcttcctcatgaagatttttgctgcattattgaggctatagacattaatatctggtgttttctttgagtattaaaacttttaatattataaagtgaactagaatctattatgattttattctgaaagtaatcatgctagacactaatattttattcttcactctcttcctacttctccatagttcatcattgtcacgtttttatgtttaggctttctggatttcattgttttaggtttgtctcgagtgttctggatagggtgagtaagcctctctaactttttaaatattatcaatacgtttggcttcagttctcttgtggtcgkttcatttctattttatttttttctatcactttttattatttaagttttatactttcgttcaaatgctcaaa

SEQ ID NO: 83161 - DNA, 1108 bp, Homo sapiens
ctcattgtagagatctttcaccttcctggttagctgtattcctgggtagtgtgtgtgtgtgtgtgtgtgtgtgtgtgtgtgtgtggcaattgtgaatgggatttcctttttgatttagctctcagtttagttgttgttggtgtatacaaatgctagtgctttttgtacattgattttatagcctgcaacattgctgaagttgtttatcagctgaagttgatactgattttaatgataaaaaattcctccaatatatgataaatctagacaataggttttattgtattttttgagattgtatatgtttcttttatatttcctgtttgatcacagtatttaaaatattttaatactattaaatgtaaagtattttttaaattttgtcattaatttctacttatatgtgatttctgattaatacatttgtattattcattttcttgtaatgtgtcaagtttttccttgtagtcaactacaacaaattttatgaatattctatttttatttgaaaagactgtgtgtgtgtttattaccttcttaatcatgctcttttcattttctatatctttactaatttttgttgattttatttgtcctggattgagaatctgtgttttagattcttcattttagtgtatttttctctaaagcattttttagttttattttctcttacaaacttatttttattttttcttgaagctctgtattttcttcctcatgaagatttttgctgcattattgaggctatagacattaatatctggtgttttctttgagtattaaaacttttaatattataaagtgaactagaatctattatgattttattctgaaagtaatcatgctagacactaatattttattcttcactctcttcctacttctccatagttcatcattgtcacgtttttatgtttaggctttctggatttcattgttttaggtttgtctcgagtgttctggatagggtgagtaagcctctctaactttttaaatattatcaatacgtttggcttcagttctcttgtggtcgtktcatttctattttatttttttctatcactttttattatttaagttttatactttcgttcaaatgctcaaa

SEQ ID NO: 83162 - DNA, 2899 bp, Homo sapiens
  misc_feature (1)...(2899): n = A,T,C or G
gaatcccttgaattccttgaatttccaaaatcccagaaaaacagcattttgttctgttctgccttgtatcttttagcagtttgcatatctgtccttgctattagactatagctatatcatatatayatatatatatatatatatatatatattccttacaggcaagattttggctttggaatcatgctatcactcaggtgccagtccatggttttggagacagtaagcgctctggacatgtttctgtatagaagtgacttttcttctcttttcgttctagaccctgcatccaagccagcaagtaagtgctgaatctggatgtttctaccactgtctctcagacccagctgtcatggtcccatttcagggccccagcccccctgtcccccaacccccagctgtcccttctgaatcattgcatcggctgccacctgaataaccccacctcaccaccacttctggaaccttggtcagcagcttcctgggcacagaaaattcagagtcctctgccttgctctcaaaactctgggatagaccccagcccacctgtccaagctcattcctcctctctagcccttctgcttgccccctccctctgcctcttaccctctagccattctggatcccttgctgttccccaaacttcctttgatgttctcaaattgctttgttcaaactgaactctacccttggccagcttactatgactgttcattgcgtgcttaccaagtgccaagtccgggtttcaggttatgtaactagaggttatataaactcagaagtttgttctggtgagataacacatcctcattacacctaataccctttatgaaccgttagaatgttctttggttaatcattttccccttggaattgagtgacctttactagtgtattgccccacaatttatcaaagcaaagaatccagtgtcaaaaagagaataaggaggaggtgaagagaactcagatctcaaaaaaagtccccccaaaattcatcgtcattatatagcagttctagcggaaataatcactgcatcccatgtttatccccagtgctatacacacggcctgcaagtcttaatggtttcgatacagtaaatagtgctgtatttccttttgtctgagaggatctccctggttgttttagcagtcaagaaaagtgaataacatgcacatttgaccctccatatacttgggcttcacatctgcagattcagccaacagcagattgaaaatatttggggggaacaacaatgaaaaaaaaacagtacaaataatacaaataaaaaaccaatactgtaaaacaactatttacatagcatttacatttattaggtaaaagtaatcaagagatgactagaggtttaaaggaggatatgggtaggttatatacaaatactgtgtcattttataaaaggagcttgagcatctagattttggtatggggaaggagggttgtcctaaactaatcccttcagaataccagggactactctgctagactagcgattctcaaagtatgagccaggaaatcctagggatccccagtaatttttcaggagaattttacaaagtcaaaactatttccgtaataatgttacttgattttctcattgtcattctcccacaagtgtacagtggagttttccagaagctacatgggggatgtgtaatatcacaatagatagaatgcagaagctgacatgagaatccacctctctatagagccaagtactaaagagagagatgcaaaaactgtaaaacgatgccannnnnnnnnnnnnnnnnnnnnnnnnnnnnnnnnnnnnnnnnnnnnnnnnnnnnnnnnnnnnnnnnnnnnnnnnnnnnnnnnnnnnnnnnnnnnnnnnnnngcaaaacctatttaagagccaaaatataactggaggagaggttgttatgtaaggggattttttaaaagacatccttcacagaattgggcagattcagtagagggtcttttaaaagatagaaaaattgcctaggtgtggtggctcgcgcctgtaattccagcactttggcaggctgaggtgagtgaatcacttgagatcaggcatttgagatcagcctggccaatatgatgaaactccatctccataaaaaatacaaaaaaaaagaaaattagctggatgtggtgccatgcgcctgtagttccagctacttgggaggctgaggcaggagaatcagttgaacctgggaggtggaggttgcaatgagccaagatcccaccactgcactccagactgggtgacagagcaagactccatctcaaaagatagaaaaatttaaaagatagaattttagttttatccatggaatatttataaacattcaccatattgttgtcactaactacatatgaatattgagcacttgaaatgtggctattccaaattgagatatactgtaagtgtcaaatatatgctagattttgaagacttaacaacaaaaaaagctacgttaaacagttcacatgttgaaaggataatatttgggatacatctggttaaataaaatgcattattcacattaattttagtggtttctttttgctggtgtttaacatgcccactagaaaagtttaaattatgtatgtggtttacatgatatttctattggacacttcggtattagaccatgaagttaacctagtaagaattttttttaagtagtgtcttcacaagaaacattctcctattacaatccaacactccctctctggaaactgaactctgtgtttcattctctgatcacagacatccattgcacctacattggcccaattccactgaactgagtcaacttctttgaaacctctacttcctctgagtgcttaggtctcctgtggtcacctctctatcttttgcaagatgggaccact

SEQ ID NO: 83163 - DNA, 2899 bp, Homo sapiens
  misc_feature (1)...(2899): n = A,T,C or G
gaatcccttgaattccttgaatttccaaaatcccagaaaaacagcattttgttctgttctgccttgtatcttttagcagtttgcatatctgtccttgctattagactatagctatatcatatatacatatatatatatatatatatatatattccttacaggcaagattttggctttggaatcatgctatcactcaggtgccagtccatggttttggagacagtaagcgctctggacatgtttctgtatagaagtgacttttcttctcttttcgttctagaccctgcatccaagccagcaagtaagtgctgaatctggatgtttctaccactgtctctcagacccagctgycatggtcccatttcagggccccagcccccctgtcccccaacccccagctgtcccttctgaatcattgcatcggctgccacctgaataaccccacctcaccaccacttctggaaccttggtcagcagcttcctgggcacagaaaattcagagtcctctgccttgctctcaaaactctgggatagaccccagcccacctgtccaagctcattcctcctctctagcccttctgcttgccccctccctctgcctcttaccctctagccattctggatcccttgctgttccccaaacttcctttgatgttctcaaattgctttgttcaaactgaactctacccttggccagcttactatgactgttcattgcgtgcttaccaagtgccaagtccgggtttcaggttatgtaactagaggttatataaactcagaagtttgttctggtgagataacacatcctcattacacctaataccctttatgaaccgttagaatgttctttggttaatcattttccccttggaattgagtgacctttactagtgtattgccccacaatttatcaaagcaaagaatccagtgtcaaaaagagaataaggaggaggtgaagagaactcagatctcaaaaaaagtccccccaaaattcatcgtcattatatagcagttctagcggaaataatcactgcatcccatgtttatccccagtgctatacacacggcctgcaagtcttaatggtttcgatacagtaaatagtgctgtatttccttttgtctgagaggatctccctggttgttttagcagtcaagaaaagtgaataacatgcacatttgaccctccatatacttgggcttcacatctgcagattcagccaacagcagattgaaaatatttggggggaacaacaatgaaaaaaaaacagtacaaataatacaaataaaaaaccaatactgtaaaacaactatttacatagcatttacatttattaggtaaaagtaatcaagagatgactagaggtttaaaggaggatatgggtaggttatatacaaatactgtgtcattttataaaaggagcttgagcatctagattttggtatggggaaggagggttgtcctaaactaatcccttcagaataccagggactactctgctagactagcgattctcaaagtatgagccaggaaatcctagggatccccagtaatttttcaggagaattttacaaagtcaaaactatttccgtaataatgttacttgattttctcattgtcattctcccacaagtgtacagtggagttttccagaagctacatgggggatgtgtaatatcacaatagatagaatgcagaagctgacatgagaatccacctctctatagagccaagtactaaagagagagatgcaaaaactgtaaaacgatgccannnnnnnnnnnnnnnnnnnnnnnnnnnnnnnnnnnnnnnnnnnnnnnnnnnnnnnnnnnnnnnnnnnnnnnnnnnnnnnnnnnnnnnnnnnnnnnnnnnngcaaaacctatttaagagccaaaatataactggaggagaggttgttatgtaaggggattttttaaaagacatccttcacagaattgggcagattcagtagagggtcttttaaaagatagaaaaattgcctaggtgtggtggctcgcgcctgtaattccagcactttggcaggctgaggtgagtgaatcacttgagatcaggcatttgagatcagcctggccaatatgatgaaactccatctccataaaaaatacaaaaaaaaagaaaattagctggatgtggtgccatgcgcctgtagttccagctacttgggaggctgaggcaggagaatcagttgaacctgggaggtggaggttgcaatgagccaagatcccaccactgcactccagactgggtgacagagcaagactccatctcaaaagatagaaaaatttaaaagatagaattttagttttatccatggaatatttataaacattcaccatattgttgtcactaactacatatgaatattgagcacttgaaatgtggctattccaaattgagatatactgtaagtgtcaaatatatgctagattttgaagacttaacaacaaaaaaagctacgttaaacagttcacatgttgaaaggataatatttgggatacatctggttaaataaaatgcattattcacattaattttagtggtttctttttgctggtgtttaacatgcccactagaaaagtttaaattatgtatgtggtttacatgatatttctattggacacttcggtattagaccatgaagttaacctagtaagaattttttttaagtagtgtcttcacaagaaacattctcctattacaatccaacactccctctctggaaactgaactctgtgtttcattctctgatcacagacatccattgcacctacattggcccaattccactgaactgagtcaacttctttgaaacctctacttcctctgagtgcttaggtctcctgtggtcacctctctatcttttgcaagatgggaccact

SEQ ID NO: 83164 - DNA, 1514 bp, Homo sapiens
aatataaaagcaagaacatcacaaaatgaaaaacataaaatgttcaataaaagtaaatctcagtatgaatcaaataaatgtactgttaaaacaataacagagcattttccttgttagtaaagatttaatgggaacgaaagcaagcaggtaggaaagtggtgaaattgaattccttgcaattatctgtgaaaatataagtttagtaataattctcaatagactttacatatatacatatacaatttcatctaaagattgcttttctagaaatgggtcttgttagaaatactgtttaaatatatagctaaaataagcttaactaaattttattttaatattaagaggttggacgcggtggctcatgcctgtaatcccagcactttgggaggccgaggcgggcagatcatgaggtcaggagatcgagaccatcctggctaacatggtgaaacctcgtctctactaaaaattacaaaaaattacctgggcgtggtggcgggcgcctgtagtcccagctactcgggaggctgaggcaggagaatggcgtgaacccgggaggcagagcttgcagtgagccgagattgcgccactgaactccagcctgggcgacagagcaagattccgtctcaaaaaaaaaaaaaaaaaaaaaaaaaaaagggagagagatgaacatacatgtaaacaattaamggccaaatcaattagatgattacataatagtatggggttcttaaaaggtgggctgctattataagacatagaagggtgtatagtgagcagccatgaataatgaacatgttttctataatgaagagaatagtaatgtaaactaaaacaagtgtagtgatttttacttcgaaaaaaaatctccactttcatccacatcacatgtattatgaatgaccttcatggcatgatgccatagcacacatacaatagtgtccatttatatatctaccatgaaaaagatcagttatcatggacaatatccatctttttggtaaaacaaaagaaaaatcaaatgaagtaatctataaagattaaaacatgaatggctacatatttcataaaaagctaaattgtactttgctgaaaatgcctcttaggtaataataaacttctggttgatgcatttattagtatttttattgcttcttaataaatcatggtgcaagaatttcaaattcttacaaagtaatgtgatggaacaaattactggaaaataaaacaataatagaaccatgacaacaaaacaaatgtcttgctatttttttttattttggtgcaaaatatagcttaattgagttgctttctgaacacttaacccataaggtgtgtgattactataatcagtagtgcttacagagattcatgagcacagcaaagagagaaataggttttgaacaatgggtgcacaaaatgaatgcttcacgaagaatccatgccttgtaaaacattggctgcttcctgccctatctctaaccttgaaaaagtcaaagcaggtgctgttaatcttc

SEQ ID NO: 83165 - DNA, 561 bp, Homo sapiens
tgttwttcttttgaaaattaattaaaatattcactaaaagatataatttgtattggagtgctttgtatattttatacattttatatatctattttctatattgtgtataattttacaaatttggagatctgtaaaggtcttgcaatgtatgttcacaaacatccaattttcaatatatctcctttaagcaaacttgatatataaatattgctggctgcctattttttaagataataaagttgcagtttcctacattaaatagtgtaccattttatttgacagtttatatatagataaatgtgacttccagagggatacaagaagttttccgtttcctaattacattatgtatgaagaattttttctaactttttcctctaaggaacttagtttaaaattgttaatgatttaatggctatttgaattatgcaaagttaattttttgtatgtgaaacataggagcctagatacctgttcttatcctgaggagattgttccaaaccatatctaagccatatttgtcaggatagggtaaacccatgcagtagtttagccaccgcc

SEQ ID NO: 83166 - DNA, 533 bp, Homo sapiens
atcttcctctctctctttctcccatgatgaacatgtttgaatgccttcaggtcatctaaaataataggcttacttaggttagaataacttaatctgaaatttgcacgaggacagttattttgttttcctgaaacaatctgttgctcaaatctaagtgttgatagtccagatgcagccagattttttcaaatttttgtaagtctccgtgaaatatcttactggaagcagaaaatacaagccaatacacactgtaattttagttgtcacattgcttagaactacagagttaggaagcatgtagccaatctaagtcatcaagggcaacagctttaataaatttattgmcagtacacacaaagactacatctttctaaactctaatgtcgatttcttagaaattactaattgctgatccaatcctatgtagcctatgagtatactatagaattacatcagtccaaagtatcatgtctacattaattaaggaaatgctaccattcaataacaaacaaaaatatgtaatggctcaatca

SEQ ID NO: 83167 - DNA, 1515 bp, Homo sapiens
tgctagacatcattctccttgtcttgccagtcctagaacacaaaaaagcaaakaggaaaagcaaatagaaacctgccagtactggaacactgagaagtaaacagaaaaagcaaactaaaaaaattgcttccaagattttgctcacaacctgagatgatacaagaaaaggacttaaaaaaaaaaaaacaaaacaaaacaaaacctaagcttatcaatcaagcaggtacagaatataaacaacaaacaagtcatcattttgcctttagtaagatgccacaccaacacaccaccaacttcccaggttggataagagcacggggccagatgtcaaaattgtaaagcttgtcctaaggtggcaggacacaaggaagcatttttgttgttaattgatgttgcctttagcattgccaaaaaccccctcagattttggccaaggctttcccagttacacaaatgacttacattaaatgggctggatgatcttactagtcccaggtccacactgaggttgcagttctgttttgaggaaactccggggtgcaaagccagagcacgtggacaatggagggtgccaacaaagagttgggatacttcctcaatttttatcttccttggaattttagcttttgctaggaaaataccttcgttctttactttgtgaaaaaagagacttggaggagacttcaagttcccttccagtcagtgggatttagaattggccagagtttccaggaatcacaggcctttgtagaaagtggaactgccctacctgcctttcacatgtgcaccacgagtcggggggacatggcccaagtggctgggtgggctccctgaggaatcagcaggtccacattcaagagtctccgtaagaagtacttagaaaaaagtctctctttcattaatttcataagggtagtgggataataaaaacagtatacaaataaggaggttgtaaaaatgtttgcttttaacaaagagggaaaaaataataactccagagacttaaatctaggttagatgaattgcggcaacatgaatcctgctaaccccagtttacaacctcattgcaattgcagttttcagattctcattaacttcagtgaaaagtgcatctgcctctgagttatcttaggtgggcgaatgtggggagatgctttcattaaaaaaaaaaaaaaaaagatctgctggatatttccaaaccggaattcattgaagttgctcctaggcaggaaatttataagttgaaattagtgataaaacatacaagaatttccaaagctaagcaaaatgcccagcaaaattaaaaatgtcctctgtccttgtggacaccatgattgcttatcagggatgtccaccattctgcactgataaaaagtgaccactgcatatgaaatagctccttaattgaaagcgagagtcactgtgcctttctttgcttactggtatttttaatttctaggaggtgggaggtagaaagagcagaacatgcaaataaagcaaatggaaagacacaaa

SEQ ID NO: 83168 - DNA, 962 bp, Homo sapiens
ataaatggatagatgatagaagatagagagatagatacttaatacacccttgtcaatatcccccaaagtactgtataaaaaataggaacagatcaaggtgtacttacaatattccttagtcataataatggttaaattgaactatagcagtaacaaatgtaaaacaattgtaataggagttatttggtgccagatttgttagtaaaakaataaacaagtaagtatgaggtattggaaaaatctgtgaatttttattgtatttatttcttgcataatatttatcacagagttacttcattcttccaagaaaggataattatgtacacatgaccttatttacaagtggatggctaaaaatgacccagatgccttgtgtattatctaggcaatctgccaggaagttggccacagcagagaggatcagaaagttcccactcagtccagacatgtagagtaataaacattttcatcttgctgtactgttattgctacaaataataagctagaaaatttagatcttgatcaaagtgtttggatgtctatacgttattatacaggttgtatgttagcaagtcagccatagcaggcaaacaaccttatacggtttcaatcataacctaaatgacctgccatgttaaaagcaaaaccaaactaaatatagtgtgtcttccactaaggatgaagaaaacagattaggtaaatttaaagtgtataaacttgtaaattgtatatatggcactagaatgatgtaatattacccatgtgtgaaaaacctgtgaatatcattatactattcaaagaagccagccctcaagttagtttgataataaaaacaacaaatatgtacatatgtattgtaaaattacagcattcagaccctttgctttacagagcacttatctagtttaaaatcaatgcatatatttattaattcataaagcaggtatttaatgagcacttgc

SEQ ID NO: 83169 - DNA, 2159 bp, Homo sapiens
aggttttccacatgttaggcaaattttctagaatgttttgaaagggaaaaaattctgcagactgcctcagttactgaaagagttctctttctcccctggctggggagggatccagttctgtctcaccgtgttatcgaaaagatctgaaactacaactcttcatttggattctgctgttatgaaatgcagtttggggtatcttgttacactttactcccagaagtgttaaaggaagtgcctgtcatcaaaattcaaaaataaatataaaaatgatgctggcagagctcaaaaactaaaaggatcagcattttgcttcagtttcctgttcataaaactttataaaaacaacccacccatttaaaaaaaacctgtaacaatagttcactattcttttcctaaatgcttgcctcatgccactctgaaattaggtgccatcacrtttcctgagttatgggccccaaacaccacatccttttcctccctcccacacccccaccccacctggcatcattcctgaatttagatgcttctccagtttctgagctcagtagacagatgccaacattctccctcctacctgtcctgaagtggccaagcatctgtaccagctggaagcaggaataattgaggcttccttcccccaaattaattctcacttcctagagaagcttttaatatggaaggttaaattataaagtgaagagctagtaaactgaaaaagaataagatatttccctcccactctgcctttacagcaaaattttctttgtggaatactcaacactctgtccttctttctggaagaacatagaatacaagctctagaacaagcttttccaacccatggcccacaggctgcatgcatcccaggatggctttgaatgtggcccaacataaatttgtaaactttcgtaaaacgttatgagacttttttttgcgattttttttaagctcatcagctattgttagtgttagtgtattttatgtgtggcccaagacaattcttcttccactgtggcccacggaagccaaaagattggacacctctgctttagaatgagaagcctgggttcaaataccaagttttcacttgccaactatatgactttggacagtttacttaatgatgacaaacatcagtttaagcatctataaaatggggatatgagagtttcaaggttttaatgagttaaaaacacatgaataatccaataagataatatgtatgtcagatttctaagcatacagttagcacgtcatgctattattaacccttccggtaaataaatcatccttctccctttttttttaaatgaattaaggaaaaaaggtggaatttggagaacttttccaacactccttgcttccaaagacattaattctttgatttaatcttataatttcaaaaaaggatatgactgttgcacatatataaaagaagcagcagagtgaagagtgaactgacctaaattagaagacatgggccaggtgcagtggcttacacctataatcccaacactttgggaggccaaggtgggaggatcactagagcccaggagtctgagactagcctgggccacaaagtaagacctcatctctacaataataataacaattattattataacaattagccaggcacagtggcatatgcctatggtgacagctactcaggaggctgaggcagggtgattgcttgagcctaagagtttgaggctgcagtgagctatgatcgtgccactgcattccagcttgggcaacagagcgagaccccacctctaaaaaaattaaaaaaaaaaaaaaaagaagacatggtatacaatctggccctaccattaagtctgtggtcttgggcaagtcaagtgatctctctgagacatagattcttgaaccatataacaaggtgatttaaacataaatgtgtatgcttctgtgattctattaaacagcaaagactgaagtgtatatggagtattatcttgattttatgctatttaatttcaggaaagctttcaaataaaaattcatatcttatgtactgatgaaagcaccctgtctaaaattagcatgtttggtataggcagcccacattttgggttggttcagcatggtaatattttatgaaggctcatcagaaaattaagctcaatgtactcatt

SEQ ID NO: 83170 - DNA, 719 bp, Homo sapiens
tcaaggctcccacagataaactgaggcaacatctttgagccaggctcctggactgcatatttgctaagctggccacaaacactgcttggccttcctcagaacccagtggtgggaagcagccctctgcggtgcaaggaagaaaaccagggatgtcccccaccctctgccacccactgcccagtgcaaatacagtgcccatccctcagcagcaagtaattaaatgttcccagggtggcctgtaaattcttcacttctctctttgggaggtagaaaggaaaggaattcctactgaatatttctctatttttctatctgtgggtgaatgtgggttgagagactgtgtatgtgtaagcatggccccccaaccctgtgccttacacaactaggtatttacacaccagatgaaccctgcagggaaaggcaagtccccagctgctgtggaattttaagagatctttctggaatggccttatgggatgtctggttctaattgcctccatcagccagagctggcgagctggcaggagcaatgagaggtgmaactgaacagattccagttcacatcagacccccagccctgccagagtccccccagggccagaaaagagaacaaacgtggccaagacggtgggtggtggtgtggtggaaagaacactctgctggaagttggaaggcccagcctgcggcccagccctgctgctaacgccctgcctctcttt

SEQ ID NO: 83171 - DNA, 738 bp, Homo sapiens
aatataattttggtcctgttagagttgtttctttttctttgtgaaagtgggcgtatttttttttattccatttcccctctaatccctgcattgttgaagggatctatttttgtattgagcttaggtttagagctggcccttactatacagcatggttcttcatctcaaggcataacctttttagaatctcaactgaatcttcaaaatgttctgcttgggacagaagtccaacgtctctcagcaaagcaggacttctggtttctctgttcagctcccagtcctgcagcatgtgacccttgctaggccttgtgtatgggcagctgagttctcagccacagacccacagtccatccccatgcagacttcagtggcctgattttctgtgcagtatcttcttttctgatatcccaccccacaaatttcagccatgtctrtatcccaaagcttcaatctctgcctccttagctctttttattgcagcaggagaatttccttgggaaaaaaactggggtgaccatggaactcacgtcatatagttcacttgtctcccaaatcacattcccctattgcctattgctccgtgtctgaaaacatttgcctcatgtgtttttccccatttgtagttgttttaagtgaaggcaagttatgtaccagttactatgtcaggatcagacacagaaatccccatgtgtttttaattctttgcaagattagtcttcctgatgatgcagagtggta

SEQ ID NO: 83172 - DNA, 672 bp, Homo sapiens
tggccratcttgttcaccacttgtctttgtaaataaagttttattggaatacaaccacgcccctccatttacaacccatctgtggctgctttcatgctacagtggtggctttggatagttgagagagatactgaccatgtggtctacaagcctaaaatattatatttgtctctttacataaaaagtttgccagcccctgctctaggccaacatcatcatgttaacaacacagaaagagaggcatgggcagattaaggaatttgccaaactcatagagcaagtcagggcagaggctgggacagcctggcgctcctgatttacattggcccagagttcttacctggtctaaagctctccgtctgattctaggtagaagctgtgctggggagaagccttgtggggatagaggagccggttccatgaaagaagtctatgcagttggggcagaaccctgagacttctgcagcagggacagttctgttgcattctgtatgggtcagcgtgaggctaccacacctcagggctgctgagcttaagagaggagccaaatggctctcttgataggaaatggggcttcaggttgaaatcagatgagagctggcctctgaggacattttaaccacaggtcacagctcttggtaaactttagttggcttttgaaccacggggaga

SEQ ID NO: 83173 - DNA, 672 bp, Homo sapiens
tggccaatcttgttcaccacttgtctttgtaaataaagttttattggaatacaaccacgcccctccatttacaacccatctgtggctgctttcatgctacagtggtggctttggatagytgagagagatactgaccatgtggtctacaagcctaaaatattatatttgtctctttacataaaaagtttgccagcccctgctctaggccaacatcatcatgttaacaacacagaaagagaggcatgggcagattaaggaatttgccaaactcatagagcaagtcagggcagaggctgggacagcctggcgctcctgatttacattggcccagagttcttacctggtctaaagctctccgtctgattctaggtagaagctgtgctggggagaagccttgtggggatagaggagccggttccatgaaagaagtctatgcagttggggcagaaccctgagacttctgcagcagggacagttctgttgcattctgtatgggtcagcgtgaggctaccacacctcagggctgctgagcttaagagaggagccaaatggctctcttgataggaaatggggcttcaggttgaaatcagatgagagctggcctctgaggacattttaaccacaggtcacagctcttggtaaactttagttggcttttgaaccacggggaga

SEQ ID NO: 83174 - DNA, 672 bp, Homo sapiens
tggccaatcttgttcaccacttgtctttgtaaataaagttttattggaatacaaccacgcccctccatttacaacccatctgtggctgctttcatgctacagtggtggctttggatagttgagagagatactgaccatgtggtctacaagcctaaaatattatatttgtctctttacataaaaagtttgccagcccctgctctaggccaacatcatcatgttaacaacacagaaagagaggcatgggcagattaaggaatttgccaaactcatagagcaagtcagggcagaggctgggacagcctggcgctcctgatttacattggcccagagttcttacctggtctaaagctctccgtctgattctaggtagaagctgtgctggggagaagccttgtggggatagaggagccggttccatgaaagaagtctatgcagttggggcagaaccctgagacttctgcagcagggacagttctgttgcattctgtatgggtcagcgtgaggctaccacacctcagggctgctgagcttaagagaggagccaaatggctctcttgataggaaatggggcttcaggttgraatcagatgagagctggcctctgaggacattttaaccacaggtcacagctcttggtaaactttagttggcttttgaaccacggggaga

SEQ ID NO: 83175 - DNA, 750 bp, Homo sapiens
tcctatmcatccctctctcttaccctctccctctaggtactggttcttaggttaaatcttgagttccttacgtaagagtaccaaacagtgacggctctggtggttccgtactgagtcagcctacctaagcccaaaggacatttcccagatttttccttctttctatggccctcgttatggttggccataagagaaattggcatgagatttggaaagcagaccaaccatcacaacacttgaaggttggtgcagggctacaggtgccatcacagctcatgaacacaaacagacaccagcatttacctacttgcttacctccttagcatggagcagcggccagttctgcagctcccctcagctcctgctgagttttggctcaggtgtgtgtgcacccctatggtaaagggcacatacctcttctatagggttagttgtggtgaaagacagggaaaggttccaggttgcccttgatctctcctgtatcaggtccagcttatcttcctgcatccttctcccactattgtgagaagtctaattgctatgggaaattatttcatatcactaagagtgactctgcctccctgatgaaaccatgagcaagaaaacctaaaggatgagttctctgaattggttctggagttggctctctgatctgattatatttaaaagcgttaatgactctgatgccagtagtaaaggggacctggtggtaacaaaagagttaattacattatcacctataaatacctg

SEQ ID NO: 83176 - DNA, 750 bp, Homo sapiens
tcctatccatccctctctcttaccctctccctctaggtactggttcttaggttaaatcttgagttccttaygtaagagtaccaaacagtgacggctctggtggttccgtactgagtcagcctacctaagcccaaaggacatttcccagatttttccttctttctatggccctcgttatggttggccataagagaaattggcatgagatttggaaagcagaccaaccatcacaacacttgaaggttggtgcagggctacaggtgccatcacagctcatgaacacaaacagacaccagcatttacctacttgcttacctccttagcatggagcagcggccagttctgcagctcccctcagctcctgctgagttttggctcaggtgtgtgtgcacccctatggtaaagggcacatacctcttctatagggttagttgtggtgaaagacagggaaaggttccaggttgcccttgatctctcctgtatcaggtccagcttatcttcctgcatccttctcccactattgtgagaagtctaattgctatgggaaattatttcatatcactaagagtgactctgcctccctgatgaaaccatgagcaagaaaacctaaaggatgagttctctgaattggttctggagttggctctctgatctgattatatttaaaagcgttaatgactctgatgccagtagtaaaggggacctggtggtaacaaaagagttaattacattatcacctataaatacctg

SEQ ID NO: 83177 - DNA, 750 bp, Homo sapiens
tcctatccatccctctctcttaccctctccctctaggtactggttcttaggttaaatcttgagttccttacgtaagagtaccaaacagtgacggctctggtggttccgtactgagtcagcctacctaagcccaaaggacatttcccagatttttccttctttctatggccctcgttatggttggccataagagaaattggcatgagatttggaaagcagaccaaccatcacaacacttgaaggttggtgcagggctacaggtgccatcacrgctcatgaacacaaacagacaccagcatttacctacttgcttacctccttagcatggagcagcggccagttctgcagctcccctcagctcctgctgagttttggctcaggtgtgtgtgcacccctatggtaaagggcacatacctcttctatagggttagttgtggtgaaagacagggaaaggttccaggttgcccttgatctctcctgtatcaggtccagcttatcttcctgcatccttctcccactattgtgagaagtctaattgctatgggaaattatttcatatcactaagagtgactctgcctccctgatgaaaccatgagcaagaaaacctaaaggatgagttctctgaattggttctggagttggctctctgatctgattatatttaaaagcgttaatgactctgatgccagtagtaaaggggacctggtggtaacaaaagagttaattacattatcacctataaatacctg

SEQ ID NO: 83178 - DNA, 750 bp, Homo sapiens
tcctatccatccctctctcttaccctctccctctaggtactggttcttaggttaaatcttgagttccttacgtaagagtaccaaacagtgacggctctggtggttccgtactgagtcagcctacctaagcccaaaggacatttcccagatttttccttctttctatggccctcgttatggttggccataagagaaattggcatgagatttggaaagcagaccaaccatcacaacacttgaaggttggtgcagggctacaggtgccatcacagctcatgaacacaaacagacaccagcatttacctacttgcttacctccttagcatggagcagcggccagttctgcagctcccctcagctcctgctgagttttggctcaggtgtgtgtgcacccctatggtaaagggcacatacctcttctayagggttagttgtggtgaaagacagggaaaggttccaggttgcccttgatctctcctgtatcaggtccagcttatcttcctgcatccttctcccactattgtgagaagtctaattgctatgggaaattatttcatatcactaagagtgactctgcctccctgatgaaaccatgagcaagaaaacctaaaggatgagttctctgaattggttctggagttggctctctgatctgattatatttaaaagcgttaatgactctgatgccagtagtaaaggggacctggtggtaacaaaagagttaattacattatcacctataaatacctg

SEQ ID NO: 83179 - DNA, 750 bp, Homo sapiens
tcctatccatccctctctcttaccctctccctctaggtactggttcttaggttaaatcttgagttccttacgtaagagtaccaaacagtgacggctctggtggttccgtactgagtcagcctacctaagcccaaaggacatttcccagatttttccttctttctatggccctcgttatggttggccataagagaaattggcatgagatttggaaagcagaccaaccatcacaacacttgaaggttggtgcagggctacaggtgccatcacagctcatgaacacaaacagacaccagcatttacctacttgcttacctccttagcatggagcagcggccagttctgcagctcccctcagctcctgctgagttttggctcaggtgtgtgtgcacccctatggtaaagggcacatacctcttctatagggttagttgtggtgaaagacagggaaaggttccaggttgcccttgatctctcctgtatcaggtccagcttatcttcctgcatccttctcccactattgtgagaagtctaattgctatgggaaattatttcatatcactaagartgactctgcctccctgatgaaaccatgagcaagaaaacctaaaggatgagttctctgaattggttctggagttggctctctgatctgattatatttaaaagcgttaatgactctgatgccagtagtaaaggggacctggtggtaacaaaagagttaattacattatcacctataaatacctg

SEQ ID NO: 83180 - DNA, 687 bp, Homo sapiens
ctcccatgacccgtggggattatggggactacaattcaagatgagatttgggtggggacatagccaatccacatcaatttctttttggaatgatgaaaatgttctggaattagatagtggtgagggttgcacaacattttgaatatattccaaattaataaatggttcacattttgaatatattcaaaattaataaatggttcactttcaaagggcaaattttatggtgtgtgagttatatctcaakaaaactgttattaaaaaaagaacactgcatttagtgatgaacgaacaatagagcgagatggaggtacctaagaaaactcccaaggttcttgctttggtgactgggtagatgactgtgttatcaacaagatggagatcaccaaaaaaggagacattgtggggtgacaatggggataaaattgaggtagttggtgttgatttatttttaattgtgtttaaggtctgtataacatccaattgtacttgaactggtgtttggtctacgccatagatacaaatctggtaaatcttatcccagaaagtgaatggctccccaaatttttctgcctttacatattccagaagtacaacataatcttattaatagcatctccctttgcatgccagtgattctcattcaaggagtggagcatgtcagaatctgccatgtacaagactgta

SEQ ID NO: 83181 - DNA, 605 bp, Homo sapiens
aatgcaaaaattagctgggcgtggtggcacacacctgtagtcccaggctgaggcaggagaatcacttgaacccgggaggtggagtttgcaataagccgagatggcgccactgcactccagcctggcaacagagcaagactccgtctcaaggaaaaaaaaaaaaaaaaaaaaaaaaggaccaaagaattaggtatgacatcatcccttcaaaatgtcatctttctccacattccatcttacccatttataggaggttaaattcatgtgtcattttttagtaraatttactgataaaagctggccctttagtggtatcaggtctgtgactgatatgtcacaagttgatgatgactttcccattgttaataattctacagctgtctatcttattcatcctggtccttattcttggtacagctcttctttaaatcacagaagtaaaagttccatatgtatttattataaaagatatgcatatggatactttaaaacgttttattgttccctgtttaagcacagtaatttctactagaatttttgtcatagaaagataaatcttctccctttgctactttctgctttcatcttctttgattcttccttgg

SEQ ID NO: 83182 - DNA, 662 bp, Homo sapiens
gatcccttgagcccaggagttcaggaccagcctgggtaacagggagatcctcatctctatagaaaatttaaaaacttaattagcctatcatggtggctcacacctgtaatcccagatacttgggaggcttttttgagattatagtgagttatgatccagctactgtactccagcctggtgacagagtgacatcttctctctacaaaaataaaaataaaataaaatctatgacatttaactgattacatatttaaccatttaattggaataaataatatcctgattatgacatttcaatagacatattatttattttaatatttgaataragtaaataaagtcctatttttctttcaatttgtcatttattttatgttgctttgaatacaaaactaatgctgcaattgtgtacaccattaaatcattaggttctaatttccttgatctattatgaaaagagaatttcaatttgaatatccgggcattatttgcagaatattgttattctgcaaatatattctgtaatatttaaatatcataatcaagcaaagtcttaaatgtgacacctgaaacaattatagacaaagaaaatactagtaatatagctcacagataaagcttatttagtataaagtatgcaaggaacttcggattcagacaat

SEQ ID NO: 83183 - DNA, 1142 bp, Homo sapiens
tgagaaggattcaatacatgtgataaaggccttcacagaaagggagactcattatctaaaggacagatatagagaaaggccaggtatgtttctttgatgaaaggacattgcaaatccaatgtcttgggctgaatggcagtgtcagaaatgggaccaaggtctcagggtccccaaatggaggccaaaggccttatatttctgtcaaggtaagaggagaaaagaaagaaattcagacttttttttttttgatactggagtccacataatatttccaggtcytcttagggagaaaaactggtgacattggaaggttttagaatgaatgcattgaccagtagtgcttatctacctgtgatatggctttggtccatattggatgtcagtgaccatggttctcacttatgagcacattattggcattgaccccctgacttcttgtagcacaaaaatcaccattgcctgaggagacatactctttgacaactcagaattcaagccataacagtggggcatatcctgcctgccacctaaactacccaagccccaatggattatttaacaaaagcagtactacatggtaaagtggagaataggatattactttattaattcaggactacaacaaactatcccttttaagcaacctgtaaggatccattggattctcctgtggtgacctggggcccaggactcacagacatgcttactgacagcatggcattgtcacgtgcatcagtgtgaagagaccaccaaacaggctttttgtgagcaacaagactgtttatttcacctgggtgcaggcaggctgagtccgaaaagagagtcagtgaaggaagatgggcgggggtgggcattttataggatttgggtaggtagtggaaaattacagtcaaagggggttattctctggcaggcaggggtgggggtcacaaggtgctcagtgggggagcttctgagccaggagaaggaatttcacaaagtaatgtcatcagttaaggcaggagccagccattttcacttcttttgcttcttcacttgtttcaggccatctggatgtatacatgcaggtcacaggagatatgatggcttagcttgggctcagaggcctgacattcctgtcttcttatattaataagaaaaat

SEQ ID NO: 83184 - DNA, 1142 bp, Homo sapiens
tgagaaggattcaatacatgtgataaaggccttcacagaaagggagactcattatctaaaggacagatatagagaaaggccaggtatgtttctttgatgaaaggacattgcaaatccaatgtcttgggctgaatggcagtgtcagaaatgggaccaaggtctcagggtccccaaatggaggccaaaggccttatatttctgtcaaggtaagaggagaaaagaaagaaattcagacttttttttttttgatactggagtccacataatatttccaggtcttcttagggagaaaaactggtgacattggaaggttttagaatgaatgcattgaccagtagtgcttatctacctgtgatatggctttggtccatattggatgtcagtgaccatggttctcacttatgagcacattattggcattgaccccctgacttcttgtagcacaaaaatcaccattgcctgaggagacatactctttgacaactcagaattcaagccataacagtggggcatatcctgcctgccacctaaactacccaagccccaatggattatttaacaaaagcagtmctacatggtaaagtggagaataggatattactttattaattcaggactacaacaaactatcccttttaagcaacctgtaaggatccattggattctcctgtggtgacctggggcccaggactcacagacatgcttactgacagcatggcattgtcacgtgcatcagtgtgaagagaccaccaaacaggctttttgtgagcaacaagactgtttatttcacctgggtgcaggcaggctgagtccgaaaagagagtcagtgaaggaagatgggcgggggtgggcattttataggatttgggtaggtagtggaaaattacagtcaaagggggttattctctggcaggcaggggtgggggtcacaaggtgctcagtgggggagcttctgagccaggagaaggaatttcacaaagtaatgtcatcagttaaggcaggagccagccattttcacttcttttgcttcttcacttgtttcaggccatctggatgtatacatgcaggtcacaggagatatgatggcttagcttgggctcagaggcctgacattcctgtcttcttatattaataagaaaaat

SEQ ID NO: 83185 - DNA, 974 bp, Homo sapiens
ccagatttcagctggagtcagccccccacacccaggaatcacctacaaactcacgagcctcacgctgctccacccctgtgtcttgcatctcttcacccccaggcctcagggaccctcctgtggctcccagttactctccagccatccccaggttcctgcgggagtcagccccatgcacccaggagtcccccagagactcacaggtctcgggagaatatgagcggtcccccagccctgactcctcaagattcatgcctgcctcacccagcttctccctctcccctcccagaaactcagacccaaggggcagctcctcaccagggatgtggaagtcctctacatcatcccgcagggcttcaccactctcacatccatcatcaacagaattccacaactttacgtttccctttcctaaccaagcaggacagtcactcatgtcattgtgttctcccgtgtcctcctctggagattcttcacagtcacctcattcatcaataatgtaccatatgttcttactgccatcatccagcagctcacccccagccacccatgactctcctgtctgtcccagctactctccaactacgcccagatttcagcgggagtctgtaccccacaccccagaaacacctacaaactcacagacctcagtgagatcctcgccagtctctctcacgtcttcacccccagcccttacggaccctccagtctgtcccagctactctccaaccacgcccacatttcagcgcgggtcagttccaggaaccctgggatcaccaccaagcccaccactttcactgagttactccccagtctccagcacgtctttatctccaaccctcagggactcgcctgtctgtcccagctactctccaagcacgcccacacttcagcgggagtccgttgcagrcacccagaaatcaccaccaaactcaccaatttcactgcgttactccccagtctctctcatgtct

SEQ ID NO: 83186 - DNA, 432 bp, Homo sapiens
actcatcacaacaaataatgccgtaaacttgaccatcactccccatatatttctcattctcacgctttttaaaaaatgagaccgggagcggtggctcacgcctgtaatcccagcactttgggaggccgaggcaggtggatcacgaggtcaggagatcaagaccatcctggctaacacagtgaaaccccstttctactaaaaatacagaaaattagctgcgcgtgatggcaggcgcctgtagtcccagctacttgggagactgaggcaggataatggtgtgaactcgggaggcagagcttgcagtgagccaaggtagtgccactgcactccagcctgggcaacagagcgagactccatgtcaaaaaaaaaaaaatgagatgaccatttcacctaaaatataccctcttaagtttttttttacgtgtacaatac

SEQ ID NO: 83187 - DNA, 432 bp, Homo sapiens
actcatcacaacaaataatgccgtaaacttgaccatcactccccatatatttctcattctcacgctttttaaaaaatgagaccgggagcggtggctcacgcctgtaatcccagcactttgggaggccgaggcaggtggatcacgaggtcaggagatcaagaccatcctggctaacacagtgaaaccccctttctactaaaaatacagaaaattagctgcgcgtgatggcaggcgcctgtagtcccagctacttgggagactgaggyaggataatggtgtgaactcgggaggcagagcttgcagtgagccaaggtagtgccactgcactccagcctgggcaacagagcgagactccatgtcaaaaaaaaaaaaatgagatgaccatttcacctaaaatataccctcttaagtttttttttacgtgtacaatac

SEQ ID NO: 83188 - DNA, 1063 bp, Homo sapiens
atatttccttttgataagttcctggtagtgggattgctgcatgaaaatttatcttaagtgcaaaaagaagttagagcttcccagagctgtgtgaaggaggaagatctgtgttcccagcctgctttagggagttagcattgatctcgtggtttggtaagagtgtggactgcagatgcagcctcgtaacccacagctatgttcagagtgctcctctgccgtgggtactgcatcccatgggagggtgtgaaagcactggtaatggtggtgggagtgcaccccagttcttacagtgcaccccagttcttactgtgcactccagttcttactggctggcactattggctcaacctgcatctggtgttgcccttcaagcagcagtgaataaagtggtaaaaaaagaaaaatctttagaagaaaggaactcctatgtggattatgagattagggctaatgaaaagcatgtccccaaagaagaaacgggtatcccagcccctcttcaatcatgaataagcttttgaatggttacctcatttgtaatttcaggtatatgtttaatatctaygaaaggatttggagcccaatattcaaactgatctgtttacatacctccatatttctaatcccaattcagattttctttagctggttgtgttcctggaccaaatcaagattctggctgcttgttctcatggtccagtaatgagatgcagacaaacttggaaagaagagattttatttctgtaaccaggtatagggagaaggctggggaaaacatcaccagacaaactcaaagttaccaagtttttccagagcttatatatcttctaagctgtatgtctgtgtgtaagtgtgcattttcctaaggacaaaagtgactgattccacctaatctataactaagttctgggtcctggagaccttcctccggagcctcagtaagtttgcctaatctagatggggtcctggtgctggaggtgattactgttatcttgtctccagctaaggtgtggaggtctgggggagtttcttcagacatccaacagaagtttttaatcctaaatgc

SEQ ID NO: 83189 - DNA, 861 bp, Homo sapiens
aattttaatcagcaattaaaaaaagaataaactttctccactcaacatcataggtgaacctcacagatayagtattgagtgaaagaaaagagatttcctctgggagagggagtagtgtgcagtgagtggatattgactgggaaggagcaagagagacccttcttaggtgttggaaacgctctgtagcttgactgagatagtgtagcatacatgagtgcatgacgtatgaatgaaattatatgtgaaaattcataacagtcatgtgcttaacattaatgcactttactatattttatatctcaataaaaaaattaagtgccatctttctgcaaccctcaatgtccctgtgatgacatgcctaagacagataccatccctctgctatgactggcaacaccactgtcacaccttggcacattcctgctgttggatcacactcccctttgggtaccctctatacctcagggagagccccatgttccatgatctttattttttcttttcatctttggttttttaaacagcattctcctgaggcatctttaggactcttccaaggaacctggggcttggggcaaattctaattaatccagaaataattcattttccctagacagaagtcctcgtcattgctttcttcccctccagctggatccagccacctcgggccctgtggggggaggggacacagaggcataaagcctggcaccacctgccctgccagctctgcttgaattagtccttccctccacatgaggccgggggcctttccctgttaaaatggactttctcttattgtctttatcttttcatgttttgtggaaattaaaagatgagtgacttccaggcagcgccagagg

SEQ ID NO: 83190 - DNA, 861 bp, Homo sapiens
aattttaatcagcaattaaaaaaagaataaactttctccactcaacatcataggtgaacctcacagatacagtattgagtgaaagaaaagagatttcctctgggagagggagtagtgtgcagtgagtggatattgactgggaaggagcaagagagacccttcttaggtgttggaaacgctctgtagcttgactgagatagtgtagcatacatgagtgcatgacgtatgaatgaaattatatgtgaaaattcataacagtcatgtgcttaacattaatgcactttactatattttatatctcaataaaaaaattaagtgccatctttctgcaaccctcaatgtccctgtgatgacatgcctaagacagataccatccctctgctatgactggcaacaccactgtcacaccttggcacattcctgctgttggatcacactcccctttgggtaccctctatmcctcagggagagccccatgttccatgatctttattttttcttttcatctttggttttttaaacagcattctcctgaggcatctttaggactcttccaaggaacctggggcttggggcaaattctaattaatccagaaataattcattttccctagacagaagtcctcgtcattgctttcttcccctccagctggatccagccacctcgggccctgtggggggaggggacacagaggcataaagcctggcaccacctgccctgccagctctgcttgaattagtccttccctccacatgaggccgggggcctttccctgttaaaatggactttctcttattgtctttatcttttcatgttttgtggaaattaaaagatgagtgacttccaggcagcgccagagg

SEQ ID NO: 83191 - DNA, 861 bp, Homo sapiens
aattttaatcagcaattaaaaaaagaataaactttctccactcaacatcataggtgaacctcacagatacagtattgagtgaaagaaaagagatttcctctgggagagggagtagtgtgcagtgagtggatattgactgggaaggagcaagagagacccttcttaggtgttggaaacgctctgtagcttgactgagatagtgtagcatacatgagtgcatgacgtatgaatgaaattatatgtgaaaattcataacagtcatgtgcttaacattaatgcactttactatattttatatctcaataaaaaaattaagtgccatctttctgcaaccctcaatgtccctgtgatgacatgcctaagacagataccatccctctgctatgactggcaacaccactgtcacaccttggcacattcctgctgttggatcacactcccctttgggtaccctctatacctcagggagagccccatgttccatgatctttattttttcttytcatctttggttttttaaacagcattctcctgaggcatctttaggactcttccaaggaacctggggcttggggcaaattctaattaatccagaaataattcattttccctagacagaagtcctcgtcattgctttcttcccctccagctggatccagccacctcgggccctgtggggggaggggacacagaggcataaagcctggcaccacctgccctgccagctctgcttgaattagtccttccctccacatgaggccgggggcctttccctgttaaaatggactttctcttattgtctttatcttttcatgttttgtggaaattaaaagatgagtgacttccaggcagcgccagagg

SEQ ID NO: 83192 - DNA, 679 bp, Homo sapiens
gcagactcaatcccttctgacaaagtgtcacgtctctccctgccccccaataaggccctagaagacagtgatatttttaccatacagcttaaaaacacagtctgagcccaattcaattgcatatgaaacaaaaaacatctggaagtgagtttatgtggtatttcagattgtcttcaagtcctatcatccaaaaagaggggggtaggaaagatgaatttttttttccttcttttctctgaggcgaggggaaacaaggggaaggaaagaaaaaggcaaaagcaaagctatgtattcctaaactgttgataacaataaaatataatggaacgctgatttccttctgtagggtaaaagctgatgcagggtggtacatctctccacatagtacatgtggcaagcagctgccatattatatacaattatagtaaaagrataatagaaaaaatggtactagaaaaaatggtaatagaaaaaatagtaaaagaataatagaaaaaaaaaaatgtttgttttttttcccccacctctaacaatccctgccttgcaagggccgcctcctcagctctgcagctgttaggaacccaccatctttagaagaaaaaataggactgacagtctagccaaaattttgctttaaaaaaaaaaaacaacccatcaacattcctgtggtgattacggt

SEQ ID NO: 83193 - DNA, 679 bp, Homo sapiens
gcagactcaatcccttctgacaaagtgtcacgtctctccctgccccccaataaggccctagaagacagtgatatttttaccatacagcttaaaaacacagtctgagcccaattcaattgcatatgaaacaaaaaacatctggaagtgagtttatgtggtatttcagattgtcttcaagtcctatcatccaaaaagaggggggtaggaaagatgaatttttttttccttcttttctctgaggcgaggggaaacaaggggaaggaaagaaaaaggcaaaagcaaagctatgtattcctaaactgttgataacaataaaatataatggaacgctgatttccttctgtagggtaaaagctgatgcagggtggtacatctctccacatagtacatgtggcaagcagctgccatattatatacaattatagtaaaagaataatagaaaaaatggtactagaaaaaatggtaatagaaaaaatagtaaaagaataatagaaaaaaaaaaatgtttgttttttttcccccacctctaacaatccctgccttgcaagggcckcctcctcagctctgcagctgttaggaacccaccatctttagaagaaaaaataggactgacagtctagccaaaattttgctttaaaaaaaaaaaacaacccatcaacattcctgtggtgattacggt

SEQ ID NO: 83194 - DNA, 539 bp, Homo sapiens
tgcaaatctgtatctttatctatctaaagagaaatagatattatagtagaagcggtaagaaaattttaccaaatgccttagttttagtcataagaagctttttttctaatgttaaaactttataagaaatgataaattttactctatttccacaattcagaaaatgacacttgcaaatttttaagtttgaaaccaacttttcaaaacaaacaaacaaaaaaccctttatttttcaacttttattcctttacatataatttaaatttctcctagtggcattcttatttagaggaatttaccaaacagtatccttacctttgatayggcaaggccttttagataagaaaaaggctccccaactggggaggcacagataagtgaggtgtactatcaaacatctactcatcatagaaagcatgctggaatgtactccacatttccttacattgcaaaccctgagccttggctctattagtgtcgggacaaagcgggtaactgggcagacttttcataaaaataaggtggggcttgtttgtgtg

SEQ ID NO: 83195 - DNA, 1291 bp, Homo sapiens
  misc_feature (1)...(1291): n = A,T,C or G
ttcctgcatatgaatatttttaaacttctcttcaagcacctaatggcattgacgttctgtaacatttacagaagatatgccatttgaatacttatcagccaccagtggttttcatctcatagatggaacctcttactcattccacaaatatttattaagcataggctatggttcagatcctgggccaagagtacagggcccagcggagagccagatggactcccttctagcctggtgtaccttaataactgccaatcgtgcaaataatgcatgatgagacagcaagatcagttagctatcacaggacaagtgaaacagccaaactgaatgtcagacacccgccagcagtgactggtgttctcctttgcactgggctctgagaaagcatcatcagaaatgtaaaacgacttctctcctccttatgtttgggggatacaacaattattctcaagaaacaattaggccagcctgggcaagatggcagaccctgtctccataaatactaaaaaaattagttagagctgggaaggacagtggggggcaaggtgggaggtgagggtggttgatgggtacaaaaaaatagaagaatgaataagacccagtatttgactgcacaaaagggtgactatagtcaataggaacttaattgtacatttaaaaataactaaaagcatgtaattggattgtttgtaacacaaaggataaatgattcaggggacgggtaccccattctccatkatttcacattgtgattatttcacattgcatgcctgtatcaaaacatctcatataccctataaatatatacacctactatgtacccacaaacattaaacataaaaaaaaataagtacaaaaaatagccagatgtggtggtgcttgcctgtggtcacagctacgggggagtttgaggggggagaattctgttgagcacagaaatgtgaggtggcagtgagctataatcacacaactgcaccccagcctgggtgataaagcaaggccctgtctcaaaaaaaaaaaaaaagacaattagggaaaaatataaagcagttcatgattagctcccaattaactgtattcactgcagagacctgtggggaatagaacattctatattcattccttagagctcatccacataggaattttctcaggaagatttcacatgttaatcatgaatttttnaggannnnnnnnnnnnnnnnnnnnnnnnnnnnnnnnnnnnnnnnnnnnnnnnnnnnnnnnnnnnnnnnnnnnnnnnnnnnnnnnnnnnnnnnnnnnnnnnnnnnaa

SEQ ID NO: 83196 - DNA, 739 bp, Homo sapiens
tgaagaatatgtttgggatgtcactttacatgttggctgaaccacgaatccaggcaattctaactctttyggttgtccacaatcttattagttttttgggtgcaaagttgattccttggaagattcactgtaataaatgctgctgttctctcccattctccttaagtcaccaaatctcatgtctttcaacatctgttctatctaggagatctccgtcagcttacctgtgagcactcaatttttttgtccttaacctctgactttggaggggaagtatttccattcccttgaaatactacccaagccccaacttgtggtcatggtcccactccttccagactcctccagggtccacatctaactatcatactttggctatcctgaattttcttcttcttcttctttttttttcttttttttttttgagacggagtctcgctctgtcgcccaggccggactgcggactgcagtggcgcaatctcggctcactgcaagctccgcttcccgggttcacgccattctcctgcctcagcctcccgagtagctgggactacaggcgtgagccaccacgcccggccttcttttttttttttttgagacagagttttgctcttgttgcccaggctggagtgcaatggtgcgatctcggctcactgcaaccaccaccaccttctcctgcttcagcctcctgagtagctgggattacaggtgcctgccaccatgcttggctaattttttg

SEQ ID NO: 83197 - DNA, 739 bp, Homo sapiens
tgaagaatatgtttgggatgtcactttacatgttggctgaaccacgaatccaggcaattctaactctttcggttgtccacaatcttattagttttttgggtgcaaagttgattccttggaagattcactgtaataaatgctgctgttctctcccattctccttaagtcaccaaatctcatgtctttcaacatctgttctatctaggagatctccgtcakcttacctgtgagcactcaatttttttgtccttaacctctgactttggaggggaagtatttccattcccttgaaatactacccaagccccaacttgtggtcatggtcccactccttccagactcctccagggtccacatctaactatcatactttggctatcctgaattttcttcttcttcttctttttttttcttttttttttttgagacggagtctcgctctgtcgcccaggccggactgcggactgcagtggcgcaatctcggctcactgcaagctccgcttcccgggttcacgccattctcctgcctcagcctcccgagtagctgggactacaggcgtgagccaccacgcccggccttcttttttttttttttgagacagagttttgctcttgttgcccaggctggagtgcaatggtgcgatctcggctcactgcaaccaccaccaccttctcctgcttcagcctcctgagtagctgggattacaggtgcctgccaccatgcttggctaattttttg

SEQ ID NO: 83198 - DNA, 739 bp, Homo sapiens
tgaagaatatgtttgggatgtcactttacatgttggctgaaccacgaatccaggcaattctaactctttcggttgtccacaatcttattagttttttgggtgcaaagttgattccttggaagattcactgtaataaatgctgctgttctctcccattctccttaagtcaccaaatctcatgtctttcaacatctgttctatctaggagatctccgtcagcttacctgtgagcactcaatttttttgtccttaacctctgactttggaggggaagtatttccattcccttgaaatactacccaagccccaacttgtggtcatggtcccactccttccagactcctccagggtccacatctaactatcatactttggctatcctgaattttcttcttcttcttcttyttttttcttttttttttttgagacggagtctcgctctgtcgcccaggccggactgcggactgcagtggcgcaatctcggctcactgcaagctccgcttcccgggttcacgccattctcctgcctcagcctcccgagtagctgggactacaggcgtgagccaccacgcccggccttcttttttttttttttgagacagagttttgctcttgttgcccaggctggagtgcaatggtgcgatctcggctcactgcaaccaccaccaccttctcctgcttcagcctcctgagtagctgggattacaggtgcctgccaccatgcttggctaattttttg

SEQ ID NO: 83199 - DNA, 1568 bp, Homo sapiens
tccccctccaaccaccggactacaggcgaatgccatggtgccaggccctcactcaaccttttaagaccctactggtaatctccattattaaaaagcttaactgtttcaccataagtgataatcacattagccaaaacacccaggcctaggagattgtaacttctgtaacatcaagacacaagcagaacgtaaataacgcaaatcaaaacttcttttttctttttttgacggagtctcccccccgtcgccctgtctggcgtacagcgtcgcgatctcggctccctgcaacctccccctcctgggttcaaccaattctcgtgcctcagcctcccgagtagctgggattacaggcaccggccaccacgcctggctaaattttgtatttttagcagagacgggttttcaccgtgttggccaggctggtctcaaactcctgacctcaagtgatcccctgcctcagcctcccaaagtgctgggattacaggcgtgagccaccaaaaccggccaagacttctgattaattcagagaaggctatcaaactgcatttgatgaaatctcaaaaacaataccaaataaattgtgtttagtagcttttacatatggatggaaattttcagcagatttgtttgaagctcttctgctgctcctctcagacacctagctgtagtttgaagtaaataattcaaacaggcctggaccagtgggtcacacctgtaaccccaacactttgggaggctgaggtgggaggatcacttgagcccaggagttccagaccagcttggacaacaaggcaagacccttgtctctacaaaaaatttaaaaattagccgggtgtggcggtgcgcctgcaggtgggcgaatccattgagcccaggaggtcgaggctacagtgagttctgttcgtgccactgtactccagcctagacgacacagagagactctgtctctaaataaataaataaataaatccatctccaggatcctattagacagcacaaaagaactttgatatgcctatttcaaattataaaacatacacgccacaaattttcttcctcttatttagtagtcagtggtatcattaccgtaggaacgccgattttaaagactctattaagcataaattatgttaagacagaatctataacaaattctacgaattcaagagacagttaacctggtcatttccaagcctcaaattacagccttgtcagaattctattgcttgctggtacttcaacaycctctagataagtttcatatactgagttcctaggaggactctgacaccaactcacagttcccaccgggcaatgagctcgccctttgttaggggccacggagcggctccgcccagcgcgctgccccggcccgaccccgggctggcgcggtcagtggtgcacgcgcacccgccccaagtcagcaccttccgagagccatagggtcgtcgcgcggctcaccccgcgattgcggcgtccacgctggcctctaagagcccccgatgtgctttcttctcgaaaaagctccctttttaaagccttgcacctacagggactcgggggtgcgt

SEQ ID NO: 83200 - DNA, 1568 bp, Homo sapiens
tccccctccaaccaccggactacaggcgaatgccatggtgccaggccctcactcaaccttttaagaccctactggtaatctccattattaaaaagcttaactgtttcaccataagtgataatcacattagccaaaacacccaggcctaggagattgtaacttctgtaacatcaagacacaagcagaacgtaaataacgcaaatcaaaacttcttttttctttttttgacggagtctcccccccgtcgccctgtctggcgtacagcgtcgcgatctcggctccctgcaacctccccctcctgggttcaaccaattctcgtgcctcagcctcccgagtagctgggattacaggcaccggccaccacgcctggctaaattttgtatttttagcagagacgggttttcaccgtgttggccaggctggtctcaaactcctgacctcaagtgatcccctgcctcagcctcccaaagtgctgggattacaggcgtgagccaccaaaaccggccaagacttctgattaattcagagaaggctatcaaactgcatttgatgaaatctcaaaaacaataccaaataaattgtgtttagtagcttttacatatggatggaaattttcagcagatttgtttgaagctcttctgctgctcctctcagacacctagctgtagtttgaagtaaataattcaaacaggcctggaccagtgggtcacacctgtaaccccaacactttgggaggctgaggtgggaggatcacttgagcccaggagttccagaccagcttggacaacaaggcaagacccttgtctctacaaaaaatttaaaaattagccgggtgtggcggtgcgcctgcaggtgggcgaatccattgagcccaggaggtcgaggctacagtgagttctgttcgtgccactgtactccagcctagacgacacagagagactctgtctctaaataaataaataaataaatccatctccaggatcctattagacagcacaaaagaactttgatatgcctatttcaaattataaaacatacacgccacaaattttcttcctcttatttagtagtcagtggtatcattaccgtaggaacgccgattttaaagactctattaagcataaattatgttaagacagaatctataacaaattctacgaattcaagagacagttaacctggtcatttccaagcctcaaattacagccttgtcagaattctattgcttgctggtacttcaacaccctctagataagtttcatatactgagttcctagkaggactctgacaccaactcacagttcccaccgggcaatgagctcgccctttgttaggggccacggagcggctccgcccagcgcgctgccccggcccgaccccgggctggcgcggtcagtggtgcacgcgcacccgccccaagtcagcaccttccgagagccatagggtcgtcgcgcggctcaccccgcgattgcggcgtccacgctggcctctaagagcccccgatgtgctttcttctcgaaaaagctccctttttaaagccttgcacctacagggactcgggggtgcgt

SEQ ID NO: 83201 - DNA, 1520 bp, Homo sapiens
caagcaattctcctgcctcagcctcccaagtagctggaactacaggcacacgccaccacgcctggctaattttttgtattttagtagggacgagtttcaccatgttggccaggatgatctcaatctcctgacctcgtgatctgcctgcctcggcctcccaaaagtgctgggattacagctgtaagccaccatgcccggcccccagagatacttttaagtgtttcctgagcactgggggaacatgaagagggagaaaattagatctcagagagcccaagggacagttttaagtagactcgtgacccaggtttgtccttttctgagtagactagaggttccatctctttattctgggatgtccagtaataaaatggggctagtagggcttgcaagcaatgaggtatttatgaagtacaattaatgtatgcaaagggctttgagatccttcagattaaaaagtgtcctgtgcaggtgcaagatggactggtgttgctgtgagggcaaatatattttgtgggtgttaccattgttgttgaacaaggcagtgggggaaaaagtagttaagattatgtggcacgatccttcaacatgacccagaactgggccataggaaacttgtacagactatcacatcagatgatggagagaaacatcactgagaatgcataaatccccggaggcagaatggttaatttcgtgaggcacagtcatgtctagacaaatctggtggggctatttagaaaaacacatatggtacttctggctttacaaggaaggggaccaagtcacattactcagcaaatatctttccttagtctgaacttggcttctaagattttctgagaactgagctttttttttttcttttttttgagatgaagtttcgctcttgttgcccaggctggagtgcaatgatgtgatcccggctcactgcaacctctgcctcccgggttcaagcgattctcctgcctcaggctcccaagtagctgggattacaggcgaccrccaccacacccagctaatcttttaaaaaatatatttagtagagacgggggttcaccatgttggccaggctggtcttgaacttatgacctcaggtgatccgcctgcctctgcctcccaaagtgctgggattataagcgtgagccaccacgcctggcctgagcattttttctaaataatcttgaaaggcctggtgctgggttaatagcaggaactaggctagtagcgtaattaaacatccccatattgcaacacttaaacatatgggaatcccaatgagttcctaatgtataattcctaaatttaatcctaaattgttccaatgaatccttttatatgaccttggctaattatgtaatatcttaatctccagtggtaatgataaatgtgaaaatgatggcgtgagttgattcatttctccttgcagatattctatcaggaccaatgataagggcttctagaaataaaacctcagcagacaggaaactgccttcaaacttcagcaatcaagaatatta

SEQ ID NO: 83202 - DNA, 1520 bp, Homo sapiens
caagcaattctcctgcctcagcctcccaagtagctggaactacaggcacacgccaccacgcctggctaattttttgtattttagtagggacgagtttcaccatgttggccaggatgatctcaatctcctgacctcgtgatctgcctgcctcggcctcccaaaagtgctgggattacagctgtaagccaccatgcccggcccccagagatacttttaagtgtttcctgagcactgggggaacatgaagagggagaaaattagatctcagagagcccaagggacagttttaagtagactcgtgacccaggtttgtccttttctgagtagactagaggttccatctctttattctgggatgtccagtaataaaatggggctagtagggcttgcaagcaatgaggtatttatgaagtacaattaatgtatgcaaagggctttgagatccttcagattaaaaagtgtcctgtgcaggtgcaagatggactggtgttgctgtgagggcaaatatattttgtgggtgttaccattgttgttgaacaaggcagtgggggaaaaagtagttaagattatgtggcacgatccttcaacatgacccagaactgggccataggaaacttgtacagactatcacatcagatgatggagagaaacatcactgagaatgcataaatccccggaggcagaatggttaatttcgtgaggcacagtcatgtctagacaaatctggtggggctatttagaaaaacacatatggtacttctggctttacaaggaaggggaccaagtcacattactcagcaaatatctttccttagtctgaacttggcttctaagattttctgagaactgagctttttttttttcttttttttgagatgaagtttcgctcttgttgcccaggctggagtgcaatgatgtgatcccggctcactgcaacctctgcctcccgggttcaagcgattctcctgcctcaggctcccaagtagctgggattacaggcgaccgccaccacacccagctaatcttttaaaaaatatatttagtagagacgggggttcaccatgttggccaggctggtcttgaacttatgacctcaggtgatccgcctgcctctgcctcccaaagtgctgggattataagcgtgagccaccacrcctggcctgagcattttttctaaataatcttgaaaggcctggtgctgggttaatagcaggaactaggctagtagcgtaattaaacatccccatattgcaacacttaaacatatgggaatcccaatgagttcctaatgtataattcctaaatttaatcctaaattgttccaatgaatccttttatatgaccttggctaattatgtaatatcttaatctccagtggtaatgataaatgtgaaaatgatggcgtgagttgattcatttctccttgcagatattctatcaggaccaatgataagggcttctagaaataaaacctcagcagacaggaaactgccttcaaacttcagcaatcaagaatatta

SEQ ID NO: 83203 - DNA, 542 bp, Homo sapiens
gttggatcagcctagtttctgagtcttttacatttctgcggggtccttaatttttccctattwgtgccttcatttccttcactgccatttacatgattattccccataatcagtgcttccatccaactgcccctacagtccagcacacttttaagcacttttcttgaacactacaaggtcacaattatactaatttcagcaattagtcttgaacttttttgttttagacaaaaatttttctgttcttctcaatttactctccaaacacccctccctttctttttgttaacgagtgccataagccttctctttcccttctgccttataggaatagatagtgggaattaccttggaatttggaggtcttttcttcacatagggacaatttgaagtttttggtattctctgtctcctagtgaggttgaagtgataaactatggatgatgttgtttatactattccttgattttaatattttgaggatggatccacggagacagtttgatttaagaacgagctattaacttttagaaattattttc

SEQ ID NO: 83204 - DNA, 1041 bp, Homo sapiens
aatatattgtgtgtatttggctttgaaaagtgagacaaaaacagcagtagcaaatgccagtgtttcagaagctaaagagaaatttgaaatttaatatcaacatttatttttaatatcgttaacttttgaatggatcaaattattgcttagcttggactgcctcatttgaataggctggggaaattccaaattggcagtttcctctawgttctggaaaacaattttataaaatactgaaacatttgatatctctctggagcaccaatgctatagtaaattattcattcattcattcatttattcaacaaaacttgcaacttactatacctgagccactgtggtaagcctcctaggaaagaaaaaaatatatataactggttacttgtgtacataatgataagcaacaattaatagttgtaggtgattagtgtaacattccaagtgccagcaatggatactataatataataaagatggggggaattggggaactagagtagtaatggaaggctttgcccaggagaaagagcttgaaaaggtgagttggatttatatggagggaaatgaatagagaaagcatctcaggaaagagaagcaatatacagaactttatagcatcagtcatgaaaaagacaataaatagaccagagaacatagaacttcgtaattacttcaatagttgtcttagtctgttttctgttgcttaaaacagaataactgaaagtgggtaatttataagaaaaggaatttattccttatagttatggaggccgagaagtccaaggtcaagggaccatatctggtgagagccttcttgctggtgaggactctctgcagactcccaaggctgtgcaggatgtctcatggtaaggggactgagtatgctagctcaggtgtctcccttttcttagaaagccaccagtcctactctcataataatccattaattcatgaatccgtgaatccagaaatggattaattcgtcatgaaagcagagccctcatggcccagtcacctcttaaaggccccacttctcaatac

SEQ ID NO: 83205 - DNA, 1041 bp, Homo sapiens
aatatattgtgtgtatttggctttgaaaagtgagacaaaaacagcagtagcaaatgccagtgtttcagaagctaaagagaaatttgaaatttaatatcaacatttatttttaatatcgttaacttttgaatggatcaaattattgcttagcttggactgcctcatttgaataggctggggaaattccaaattggcagtttcctctatgttctggaaaacaattttataaaatactgaaacatttgatatctctctggagcaccaatgctatagtaaattattcattcattcattcatttattcaacaaaacttgcaacttactatacctgagccactgtggtaagcctcctaggaaagaaaaaaatatatataactggttacttgtgtacataatgataagcaacaattaatagttgtaggtgattagtgtaacattccaagtgccagcaatggatactataatataataaagatggggggaattggggaactagagtagtaatggaaggctttgcccaggagaaagagcttgaaaaggtgagttggatttatatggagggaaatgaatagagaaagcatctcaggaaagagaagcaatatacagaactttatagcatcagtcatgaaaaagacaataaatagaccagagaacatagaacttcgtaattacttcaatagttgtcttagtctgttttctgttgcttaaaacagaataactgaaagtgggtaatttataagaaaaggaatttattccttatagttatggaggccgagaagtccaaggtcaagggaccrtatctggtgagagccttcttgctggtgaggactctctgcagactcccaaggctgtgcaggatgtctcatggtaaggggactgagtatgctagctcaggtgtctcccttttcttagaaagccaccagtcctactctcataataatccattaattcatgaatccgtgaatccagaaatggattaattcgtcatgaaagcagagccctcatggcccagtcacctcttaaaggccccacttctcaatac

SEQ ID NO: 83206 - DNA, 696 bp, Homo sapiens
tcagtttagtatgagcctcttctccatcagctagtactaggcccccgttcccgctaattctaataacagcaagccattcagagggaccttagccaagccaggctttcagttgaggttaatatacctccttctctatccaaataggtaacttcgggcaaggtacttaacttttctragccatggtttcctcatctgtcaaatggccactatagtaatgtcacgggattcttgaggtgttgcttgtccagctgaaagccacagggccaatggcacctttgcccaagttttcctcaggcctgctgggcttgtactgcccacttagcctggcaggctgcactcagctcgctctactggcctggatcccatacctgccaagagcgagtggagcggtaaggggtatatgagtgagcaagcatggggtccggccactgtgcacagccaggcatgctggtggtgggtggggcagacagctccaggtgccagcccaggtgtaccataagcagcttccatagctggcactggggaatccagtggtgctcagaagcttgaagacaccaggaaccgcagagccccaaagagggtgtcacagccctggctgggggagatcctaggtctgggctccctgaagggccgcaactcttctctccttctctcttctctccttgtcacccacagtgtggtgagcaaggggtgtgt

SEQ ID NO: 83207 - DNA, 696 bp, Homo sapiens
tcagtttagtatgagcctcttctccatcagctagtactaggcccccgttcccgctaattctaataacagcaagccattcagagggaccttagccaagccaggctttcagttgaggttaatatacctccttctctatccaaataggtaacttcgggcaaggtacttaacttttctaagccatggtttcctcatctgtcaaatggccactatagtaatgtcacgggattcttgaggtgttgcttgtccagctgaaagccacagggccaatggcacctttgcccaagttttcctcaggcctgctgggcttgtactgcccacttagcctggcaggctgcactcagctcgctctactggcctggatcycatacctgccaagagcgagtggagcggtaaggggtatatgagtgagcaagcatggggtccggccactgtgcacagccaggcatgctggtggtgggtggggcagacagctccaggtgccagcccaggtgtaccataagcagcttccatagctggcactggggaatccagtggtgctcagaagcttgaagacaccaggaaccgcagagccccaaagagggtgtcacagccctggctgggggagatcctaggtctgggctccctgaagggccgcaactcttctctccttctctcttctctccttgtcacccacagtgtggtgagcaaggggtgtgt

SEQ ID NO: 83208 - DNA, 729 bp, Homo sapiens
agcctaggattaagtattgcctttagttgtcatgcctctttaatcttctatagctcataacatttactcatgcacacacaaaagcatcccttttaattcagacatcagttttatttgaattacacactttccaaattaacgttgcaaggaatccctgtcaatccactgctcctagatttgtcctcaatggcactcattcttcctgatccctccttacactggaactccaggtagcacaaagtctgtttgggtggtaggtatagttatgccctcccaaagcatttttttttctccttacccttgaaaagatctacaactgcaaattttgcgccaagtaaatgtgaactggcactatttatttaaaagattatagccttcaatacatggctggagaatgccacacagactcttgtrtagtggccaactaacaaatcactccattgccctaaaatattttctcaatcgcctcctccacctgtctccctctgaagtaccacgagcttttggccaacggagagagctcattcctcttcgatcactctgataaatgtagagcggagatggctgtggttgaaaggtacaaccgaaacaaaggctccagatgagaactttggtgactatagtttatatctgagcctagtagacagttactaatctgtataaatgctgtagtcaagccatatgggtgagagaaacgactactaaatggaaatcaccgacacactggcg

SEQ ID NO: 83209 - DNA, 729 bp, Homo sapiens
agcctaggattaagtattgcctttagttgtcatgcctctttaatcttctatagctcataacatttactcatgcacacacaaaagcatcccttttaattcagacatcagttttatttgaattacacactttccaaattaacgttgcaaggaatccctgtcaatccactgctcctagatttgtcctcaatggcactcattcttcctgatccctccttacactggaactccaggtagcacaaagtctgtttgggtggtaggtatagttatgccctcccaaagcatttttttttctccttacccttgaaaagatctacaactgcaaattttgcgccaagtaaatgtgaactggcactatttatttaaaagattatagccttcaatacatggctggagaatgccacacagactcttgtgtagtggccaactaacaaatcactccattgccctaaaatattttctcaatcgcctcctccacctgtctccctctgaagtaccacgagcttttggccaacggagagagctcattcctcttcgatcactctgataaatgtagagcggagatggctgtggttgaaaggtacaacckaaacaaaggctccagatgagaactttggtgactatagtttatatctgagcctagtagacagttactaatctgtataaatgctgtagtcaagccatatgggtgagagaaacgactactaaatggaaatcaccgacacactggcg

SEQ ID NO: 83210 - DNA, 752 bp, Homo sapiens
catcacccaagtagtgaacatagcacctgataggcagtttttcaacacttactcccgacttgttcatgtccagggatgttcctgcagcattatttcatggagctaggttaggcgtatgttcttactaccattttatgggtgagacaactgaggctctgggaaattaagaagtaaccatttttaaaaattgtggtaaaataaatataacatgaaatctaccattttaaccatttttaagtgtacgatttagtggcattaaatccacttatggtgttgcacaaccatcaccactatccatttccagaacttttcatcatcccaaagagaatcccaaattctgtatccattaaatagtaattccccattcacacctcctccagctcctgataaccactaatttactttcttctttataaattgactattctaggcacttcatatacagtatttgtccttttgtgtctggcttattccacttagcaaattgtttcaaaggttcatccatgttgtagcatgtatcagaatttcattcctttttacagctgaataacattccattgtatggctatagcagtttgtttatccatttatcccttaatgaacatttgggttrttttcaccttttagctattgtgaacactactgctatgaacattgatgtacaagtatttgttcaagtccctgctagtaattcttttgaatatatatctaggagtggaattgctggtcatgtgtttaattttttcgggaat

SEQ ID NO: 83211 - DNA, 701 bp, Homo sapiens
ctccttcttgccagatgactcaaaacctgccaccattgctgtggactaccagtgcttccagaaccccctgcccagacccactcccaaatttctttttttttttaatttttaaattttaagtttttacatttatttattttattttatatataaaaatgtatatgtatgtcaaaacatcatgtcatgcatgatgtttaactgtaagcatagttaatagtcaaataattagttcagttaagcaatttaacatatccatcatctcacatagttactttgtgtgtgtgttgtaagagcacttaaaatctactgtcagcaaattttcagtatacaatacaatattaactataatccttatgctgtatgttagatctctagacatattacttatagataattacacatttgtaccctttgacctacatctccccactccgtaaacctcctccttcttgccccacacctggcaaccatcattctactctctctttctatgtattcgacttttctcagattccacatataattgagatcgtgcagtatatttttaatatctggattatttcacktattataatgtcattcaagtcatccatgttgccgcaaatggcagtatccttttctttttaaggttgaatatattcatatatataaatccatatgccacaatttctttatccattaatggacacttttgttgtttc

SEQ ID NO: 83212 - DNA, 1413 bp, Homo sapiens
gtgtgtgtttgtgccaggagattgcaaatacaagtgctgaaaggggtgagggagagaatgtaaatgagtgaagtgggatgggagaattagagagtggtggaggcttgttgtattgtaaaacatagcccagtctaaaaggattttagccaactgttttcaagcagaaaggttaatgtaatattgggaggcctttcattatttcacaagaatggggcattcagattcaccataaaattctgatttttaaatgttggaaacaaactcaaaggatttaaaaatattctgagggtcaaacaggttataattataagctggatctgacctgtaggctgtcaattgttggatttgctctaatcacacattctgttgggtaggcaaaaatgatacaacattatttgcaagatgacaacacacaaaaaagccattacttatgaatagcaagatcaaacacataaaaatagatttaccataatgaaaaaaatgaaattccaaaattaatatgaaattgcattaccaagagatttgacccaccattcctttgtggcatcgaggtttgaaactttcttctgatttataaaatgaaaggaatgatgaattagtgaaaggaatgaggaaggccagtttgagtgctgaggaagatcagcacatttattgtggtcatgggatcctggggtcttctctgatgccaggattctgaaagagaattttcctaataagtaaaagacttttaaacagactctcctgcatgtgatcagctccacagggtgtctcttgaaacaggatgtgaacaactggaattgaaatggagagaccttggaagggtaatgaaaaagagacctgagtgcctataaatctaatattcagaataccagagggggctacctcaaccactaaagatgattcttttcaagcaatttattgtactgactcttttaaaaacataaataaactaagagaagacaaacaagataaacagggaacttagaaactctgtagtgaattttttttttaatgagtgatcatcacacagatgtgtgtaataacctctcttcaggagcagctttccacttcctttccatctgtttctgtactagtaacctgttcactccaggaactttgtccctttggaatttggcctatttaggggttgaaaaatagtatagacatttcccatttccagctcctcccctttctataaggcatttcttaaaaaaattctgctttctatatctctacttycagggaagaatcctactagactactaatctgaatttatgttgctcttcctcctggcgtgctttcaagatgattagtggtggttgtacaaaagggttctaaacgttgtatttcaaaatttacattgttgtatgcccaaagaatacatcatcctccttagcaattgttcaggtttt

SEQ ID NO: 83213 - DNA, 528 bp, Homo sapiens
tctctgaggaagatactaacaacaaataccactggtatcatctgtccctawctgcatcaccccacagcctagctgtaggcctaggtgagtgaatctcaaaccttagtgtgcatcagaatcacctggagggcttgttaaactacagatagttctgattcaataggtctgggtgaggcctgagaatgtgcatttctaacaagtgcccaggtaacattgatgctgctgggttacggaccacactttgagaaccgctggcctagacaaaagagcaggtgtctatatagcgtgattttagtcattgaaaagatctctgtccaaaaagtacttcaggaaggaaacagaaataaaactcactttataagaaataaagcccatcactgtgcatttaagcaataaagggaaggctgacaggtgctaaaggatcatcctctatctgccaattctcttcctcaacaaatactcagagtatctaatagacacctgacactattctaggagccaggaacactacagtgaacaaaggtaaag

SEQ ID NO: 83214 - DNA, 589 bp, Homo sapiens
acagaaacagcatgctcaaacagacaaacgcattctcaaatgacagggataagcccacctctaagaatcaccagtatctgagggaaatctgcaccaggaaagygaggcaccaaactcatcagaagaacatgcacataaagaaaaagaagacagaaaaaaaaaaaaacccagtgtttcaaaagatcattatcttcagagggaaagggaggataccacattcacaagcaagaatagactttttcatttcctagaaatgaaaaataatagcaaaaattaaaaaatttagagggataaagaagaattcaccactgaaaagcaaattaccacgctggaagtctgtgctgacaaattcttgcagaactcagaaccacagggcaaagagaggagaactatgaatgggaagttgtaatatttgaaggataggactgcaaggtccagaaataaagaatagatatgttagaggtaagaaaattatttaggaggccgaggtgggaggatcgcctgagcccaggagtttgagaccagtctgagaccccatctctataaaaaattcaaaaaattagccgagtgtggtagcatgcatgtgtaa

SEQ ID NO: 83215 - DNA, 701 bp, Homo sapiens
ttctggccctggttcacagtagcagtgcaggacagttccagttttagcccataactcattggcatatggtcagtttgaagtttcctgcagtacttttctgagctagagagagggaaccaaaaatgctgacatcctcatttgacatcttcactccagcctgtgtaagtgccagcacttcctgtgtaaaacctatcctgactgtagaggacacacccagcccttagctgacctggatgaggatgatggctggaattggtgaggtttggaaagcattagccctcagatggacaccaccacagtatatgaacatactgtgtattactatacctttcacttcataaagatcagcttttaaagtttatgaaaataacatttattgacagcaagtgattgttggaggtaggttactagctctcaaaatcaccactgcattacagtattatactagatgatggtgtgttcaagaaagagttaattatttggatgtataatrccttggaaattacaccaaaaaaaatccgttgggagctctgaagtgtgcatatcttgtctgcctcatatagtatggctttatcttgactgccttgtcagtcttggcctcaattttcttatccatgcaatgggaggatttctaaatgtcttaagactttatgatgttagtgtgtatttctccaagtagttttcttcatgcttccacttgt

SEQ ID NO: 83216 - DNA, 2079 bp, Homo sapiens
gcatccagattatgcctttcattgttcacaactcttaaagagcatctggttctattttgaggaggggagtgtgtggaaggggactctttctctacacttagtagtgtataagacaagctttattttaaaaaaaatacaccgttcactggtaagatcaagatgtataaacacattcacactttcctgtyacacacaaactttgacacaaccaatggtgctggagagtgttactctgttggcaaggaacttaaaatgacttctgtccatctgtgaaatacaccatttaaaatttcttccaatggtgcttactttggcagcacatatactaaaatcggaatgacagagagaatacaaggatgacatgcaaattcgtgaagtgttccatattaaaataaaatttcaacaaactgatatcaagagaggctctttatatggaaaggttttcttgctacctccttccagatcttcaaggtttttttttttttgagacggagtctcactctagtcacctaggctggagtgcagtgcataatctcagctcactacaacttctgccttctgggttcaagcgattctcctgtctcagcctcctgagtagctgggattacaggcacccaccaccacgcccggctaatttttgtacttttagtagagaaagggtttcgccatgttggccaggatggtcctgaactccttacctcaggtgatccgcctgccttggcctcccaaagtgctggaattacaggcatgagccacgcacctggccagatcttcatttttcaagtagtaaacaattacttttcaccaactcataaccttaagccaagagtgtcttttcagtactgttaaagaaaaacagctcacagattacagtggattaatgacagccacaacttctgccactacccccactaagagatggggtctatttctccacctccttgaatctgagctaggtatatgattgctttgtccagcagaaaagaccagaaattccactgtatgccaaatgcgagcttaatctttaagaggccaggcaccttcttttatgtttttttaattagaaacaggttctcactgctacccaggctggcctcaagtgatccatccacttcagcttcctgagtagctggtattacaggcacatagccctgcacctagctagaggcatggcaacttctgcttcctgctttttggaatctagctgccacattgtgagaaggtcaaagcagaacatgcatcagaaagggctgcgtggaggagaattaaggtcccagttgacaattccaactaaaacctcaggtggtaggaccaactcgacagtcatataattaaggtatcttggaaataaatctaatcgagctgtcagcacacagatcagagatgtgccattcctaccaaactctggccaaattgcaagaccatgcgtgagaaaatacttgtttttaagccattaaattttgaaattattaattatgcaacaatagataaccaaaacaaaatttggtatcagaaaggaggctctgctataacaaaaactcaaaatatgtacggtttgggtccaggtggtagacaacagctagaagactgctggtaaagatttgaaaaacagtatagaaatgttactggtggctgaagaaatggagacctaagaaaaagcagcagacccgtttcatacagtaacatggagaacagaaagggtacctaatgaactcatgcacccaactaaggagaattccaagaagaatgtcaaaagtgccaactggcttgtttttagctgcctacaataaaatataggagtagtgacatgaatttaaaaaggaactgtttggttcctttttaagcagaattcagaggaaatataaagaagttggacttcatgggttaaaaaataaaacaattcctcttttcagtaactaagcttaaaaccactcaaaataagaaatggccttagggcaaagatcaaatccagtgctagcagtaaagtagagcctctaggatgtggtggtaagatccttttttgagacctcatgaagatgttaggtggttgctcatggactttctcttagaccagtggtt

SEQ ID NO: 83217 - DNA, 2079 bp, Homo sapiens
gcatccagattatgcctttcattgttcacaactcttaaagagcatctggttctattttgaggaggggagtgtgtggaaggggactctttctctacacttagtagtgtataagacaagctttattttaaaaaaaatacaccgttcactggtaagatcaagatgtataaacacattcacactttcctgtcacacacaaactttgacacaaccaatggtgctggagagtgttactctgttggcaaggaacttaaaatgacttctgtccatctgtgaaatacaccatttaaaatttcttccaatggtgcttactttggcagcacatatactaaaatcggaatgacagagagaatacaaggatgacatgcaaattcgtgaagtgttccatattaaaataaaayttcaacaaactgatatcaagagaggctctttatatggaaaggttttcttgctacctccttccagatcttcaaggtttttttttttttgagacggagtctcactctagtcacctaggctggagtgcagtgcataatctcagctcactacaacttctgccttctgggttcaagcgattctcctgtctcagcctcctgagtagctgggattacaggcacccaccaccacgcccggctaatttttgtacttttagtagagaaagggtttcgccatgttggccaggatggtcctgaactccttacctcaggtgatccgcctgccttggcctcccaaagtgctggaattacaggcatgagccacgcacctggccagatcttcatttttcaagtagtaaacaattacttttcaccaactcataaccttaagccaagagtgtcttttcagtactgttaaagaaaaacagctcacagattacagtggattaatgacagccacaacttctgccactacccccactaagagatggggtctatttctccacctccttgaatctgagctaggtatatgattgctttgtccagcagaaaagaccagaaattccactgtatgccaaatgcgagcttaatctttaagaggccaggcaccttcttttatgtttttttaattagaaacaggttctcactgctacccaggctggcctcaagtgatccatccacttcagcttcctgagtagctggtattacaggcacatagccctgcacctagctagaggcatggcaacttctgcttcctgctttttggaatctagctgccacattgtgagaaggtcaaagcagaacatgcatcagaaagggctgcgtggaggagaattaaggtcccagttgacaattccaactaaaacctcaggtggtaggaccaactcgacagtcatataattaaggtatcttggaaataaatctaatcgagctgtcagcacacagatcagagatgtgccattcctaccaaactctggccaaattgcaagaccatgcgtgagaaaatacttgtttttaagccattaaattttgaaattattaattatgcaacaatagataaccaaaacaaaatttggtatcagaaaggaggctctgctataacaaaaactcaaaatatgtacggtttgggtccaggtggtagacaacagctagaagactgctggtaaagatttgaaaaacagtatagaaatgttactggtggctgaagaaatggagacctaagaaaaagcagcagacccgtttcatacagtaacatggagaacagaaagggtacctaatgaactcatgcacccaactaaggagaattccaagaagaatgtcaaaagtgccaactggcttgtttttagctgcctacaataaaatataggagtagtgacatgaatttaaaaaggaactgtttggttcctttttaagcagaattcagaggaaatataaagaagttggacttcatgggttaaaaaataaaacaattcctcttttcagtaactaagcttaaaaccactcaaaataagaaatggccttagggcaaagatcaaatccagtgctagcagtaaagtagagcctctaggatgtggtggtaagatccttttttgagacctcatgaagatgttaggtggttgctcatggactttctcttagaccagtggtt

SEQ ID NO: 83218 - DNA, 1621 bp, Homo sapiens
cagtagaatcttagctgtctattgcttggtcctttcttttggaggagatgtgcaccaggggcctctagtcagccatcttgctgacatttgcttctgctatatttttccctttgtactctaataagtagaaaacaaaatgagaaagcaacagagatggatggccccttctcagttttgcttctaaaattcttgagaaagggcactgctgtattaacctgggtgaagtgcccaacattggaccaaataactttgattgggaagtggtagctgaagaaagggatataattggaccagctcatgtgagatgctcacgtagaccaatctccctggctgaggaagaaggatgcagtagaggcaggtttatctttttcaaaatatttcaaaacaaggtgtatcacgaaagagaaattattgattacttaaktataattttcaggatattaacacatttagtcccctaatgatggcatgacttctaatttctgttttacaatgatttttgtgtaattttaattatggttaactgattgcctatcatgttggataagactttgtggagggatactggcttccactctgagtacataaaattgatttcatttattcttctctaaatattttctagcttcaagcagtttatgtatggatgaaaaacagattacacagaactactcgaaagtactcgcagaaggtaatatgcttccttactagtggccagcacctagggatggaaagttgaacttccttagaaatattagctaatgacctgactggaagccagccttatgactacttgaagaacttggtgatctgagtactgtggtatgagggatcctgaatgacccaacctctagttgttctccaaacaagccatgttcttgcttgtctctgaacctttgctaaggtggagtggcggaaggagcatggatttaactacctctcagatctatgttaaagtattacctctttcttcatctagttatgtacttattaatttgctgtgaaatgcaagggctagagtacaaaccatgtaagagacaggtgacaccaaaacaggataggaaagatgttaaatgcagggtttagcaaaaacatccttcacccacataaaggtttgcccctctatagctgattctgcttatgctatagtgatgaaatcactgacacttacctttgttagaggtgagtagtgacaaatactttggtggactaatcacctctcagtaaacccttaccaagtcactgacacattgtgtcgatttatgggatgcatgaggttctacgttggaagatgcttgtaggatgcagggcttaatttttcctttaaatgatggacaacagggatcaacttacgcctttagtgttgataattggattgaatatacagaaataaaatctgtgagctaagttcacagctgaactatctgaaagtgtatgtgtgactaaataggaaggaatgaaaactcatccaaaggctacatttgataatgtcataaatttgcaataaaatatttttaataaaaaatgtctaaagggaaataaatcgttttttaaaaattatatatcacactatattttcacaagaaataaatatttctaagcatctcttatcacagggcat

SEQ ID NO: 83219 - DNA, 652 bp, Homo sapiens
tactgaggctgcaggcagggaagaggggaacggagagaattgtctgcaggagatggggtgggactcccatcacagccctcttctcagactgaatgccccacaccagggcaaacagctgcccactgagggcccctctgttgctggtgagtgtaggctgccgtctgcggcctcaagccaagaaagagccttcattaccagctcattttctcagtgaactctacaaatgtggatgctcacagccttcctcttcagacccctgcaccccacagaaactgcattccttcagagcagcttcactcactccatatctgcagtcaccatctgtgaactgccacgtcctcgcacctgctcctcagcccagcccattctcctgtgtgctacaccccaagacccaacagcttattgagcctctctacttagacatcccttaaataccccaaactcctattcaaatccaaacttcatacctccattctcacatgccctctcagtaagtgccaccaacagccccctactcacctgggtcagtaacctgaaagtcaacctcaatttcccttgcaacctccattcartcagtcacaaagtcatatacattttcttcacagttacaaatcaattttcccctcacatttcccactgccactgattaatt

SEQ ID NO: 83220 - DNA, 811 bp, Homo sapiens
cctctacccaatgaaagtaattgagtgaatgatttcacttgtttcttctttgggctgaattaggtcgttgccatctgtggactgtgctaaataccataggggaaggaggctgttttctcatgtcatttatgtaacggctgtgttgtcacttgccacctttgagcaaaatcaatatgtagcaggagttcagccaggtttcctacagttgaaataaagtagggaattggggcaattgttcagttaaaatgagcacattttaaaaagcaacacttgccttcgaattactcaaatgcttcagggaacatttctaattgttctggcttcacactttgtttcagctattgatgtctggccactagcacatgcaagtgggtgaggaatttttagggtgatacattctcttcaaatattggaagggtagtcaggaataaggactggacttttctgcatgaaactgaaagaactaggaggtcactgggtaggatctactgagtcaagtttaagctcagttgaaagagaagctccaattttctgatgataagatgggctttcctgggaagtactgaagtctgtagctggaagcgttmaagagaaggatacaatcagtgtttctcaaactatggctcacaactcactaaagggttatcaagtgaatttacagggttgtaaccagtatttttaaaaatgaaaatggaatgaaattaaatagaaaagaataaaaggtatcagagagcattacaatagatatcaatattgttttgtgaactttatttttaatttgtgtgtgtgtttactaggttacaatgcaaaa

SEQ ID NO: 83221 - DNA, 503 bp, Homo sapiens
agaatgataaatgaaggagagatagaccattttgtgattatcacacactttccataaagaaagacagattcaaaaaggtaatattttagtcaaatctctatgtgagtggctccattcctcactttccatccccaacccccaattcaagcagcagtaatgtctttcaacatgcacttaccttagggaagagacttggggaagagaataaaacattacattcttggctgtttagttctgaaatcaattttttataaatctagagcagagacaacaatcttaaaagctacatcttttcagttgcaagagtcagacacttaaaggagaaaagttttctttttttaattcaaraggttggattcagtataaagcaccaaatcctggaggacccacatgatctaaaccatggagtggatgaatgcagggtaatgtaataccatcacccacccagaggaaaaagagggctccatcccttgtcaaagagaggaaagagagcagcagcacca

SEQ ID NO: 83222 - DNA, 503 bp, Homo sapiens
agaatgataaatgaaggagagatagaccattttgtgattatcacacactttccataaagaaagacagattcaaaaaggtaatattttagtcaaatctctatgtgagtggctccattcctcactttccatccccaacccccaattcaagcagcagtaatgtctttcaacatgcacttaccttagggaagagacttggggaagagaataaaacattacattcttggctgtttagttctgaaatcaattttttataaatctagagcagagacaacaatcttaaaagctacatcttttcagttgcaagagtcagacacttaaaggagaaaagttttctttttttaattcaagaggttggattcagtataaagcaccaaatcctggaggacccacatgatctaaaccatggagtggatgaatgcagggtaatgtaataccatcacccacccagaggaaraagagggctccatcccttgtcaaagagaggaaagagagcagcagcacca

SEQ ID NO: 83223 - DNA, 356 bp, Homo sapiens
agtggagaaccctaaccacaataactgagaatagaagcagtcagcaccaaggttctgagtcaatatccttgcaatatcactgtaggctctgaaccttcttgatgcctagtgtctggcacagcactaggcacaaagcaagtgctcaacacagtgcagtgcagttcagtgaattcacaaatgaatcaacaaatgaggagcaagggacaagtctgcccagcacctgacttaatagagatgtccataccatcaatgtgcagtcttgagcttgtgactgaatcacwatctttctgtggactttaatattgcatgtgactttttacttatagttagggtgacagcccttattaggaaaagtt

SEQ ID NO: 83224 - DNA, 487 bp, Homo sapiens
tttatgtataatgtataataaaataatgagattggcttatgaaatcatatgttctttttatgtcaatgactgtctaagcactggtgtatgagactaagtggtttgtatgtacaaagcttctatttagtgaatgaagattaataaatactattccagaaaaattttattattatcaaaataaactatttctagtactgaatgggaaaagatggaggatcttaatgctcaagttagtgatccacagatttaaaaagtttaagagccagcaatagataaattacataacccataatgtgaatacatctgataaattattattataaaaaactgatgaagcacccaatttttcatttaaacaacagaacctgatttaatgaatcatcaatctaaacaggagcatttagactggaatctgtgaatttgggaactttataaatatrtgtagttgacagaaaacggaaagaatttggcccaatgcacaagagta

SEQ ID NO: 83225 - DNA, 583 bp, Homo sapiens
tgtccttcctgaccagtgggtgcttacttttttcaggtggtgtgacaagaatgactgtctccctggtggttattgtttttgagcttactggaggcttggaatatattgttccccttatggctgcagtcatgaccagtaaatgggttggagatgcctttggcagggaaggcatttatgaagcacacatccgattaaatggataccctttcttggatgcaaaagaagaattcactcataccaccctggctgctgacgttatgagacctcgaaggaatgatcctcccttagctgtcctgacacaggacaatatgacagtggatgatatagaaaacatgattaatgaaaccagctacaatggatttcctgtcataatgtcaaaagaatctcagagattagtgggatttgccctcagaagagacctgacaattgcaataggtaccctttcaaaaatatatatatgtatatatgagatggatttctggaagaaaggaragcaataagcagtaacatttaatgggttggatttgtgggggcaagggacattattttatgtcccttaaaatcttctgttctttaggaaagg

SEQ ID NO: 83226 - DNA, 564 bp, Homo sapiens
tcacctacccatcccagtaccgcsgctgtctcaaccgccacccaacccctcgcctgtgcctgcgcctgcgcctgcgcctgcagcccactggctcctcagggtccggatgggccgcgtcaggagaacccaaggcgcaggcgcggcggggccttaaagggactcggcggcctctactgcacaacaggttcgagcaggttaggggccctgcgggccgagaaaaggagtaacctaggtgatgcaccgagtgcagctgggacggggaatccctctctgccctccgcgtctctctcaaagcaccagccctcgaccctccaaatcgctgatttccccggccacttgaaccgcccctgccaggttaaagaagcagaagacacaccccctcggaggcccggagcgtccccgcgtgcccacacggattttatttttttctgaaaagatggtacatttacatggttcgaaattcaaatagggccaggcgtgagccctggagttcgagaccagcttggacgaaaaagaaagagccctgtatctattaaaaaaaaaaaatcaaatagtacagaaaat

SEQ ID NO: 83227 - DNA, 564 bp, Homo sapiens
tcacctacccatcccagtaccgccgctgtctcaaccgccacccaacccctcgcctgtgcctgcgcctgcgcctgcgcctgcagcccactggctcctcagggtccggatgggccgcgtcaggagaacccaaggcgcaggcgcggcggggccttaaagggactcggcggcctctactgcacaacaggttcgagcaggttaggggccctgcgggccgagaaaaggagtaacctaggkgatgcaccgagtgcagctgggacggggaatccctctctgccctccgcgtctctctcaaagcaccagccctcgaccctccaaatcgctgatttccccggccacttgaaccgcccctgccaggttaaagaagcagaagacacaccccctcggaggcccggagcgtccccgcgtgcccacacggattttatttttttctgaaaagatggtacatttacatggttcgaaattcaaatagggccaggcgtgagccctggagttcgagaccagcttggacgaaaaagaaagagccctgtatctattaaaaaaaaaaaatcaaatagtacagaaaat

SEQ ID NO: 83228 - DNA, 540 bp, Homo sapiens
ttcatataattcaccagtaacaccatgtagtcctggggcttttctttattggaagttttttgactactgattgaatctctttacttgtcataggtctatttagattttttttttctctttttgattcagttttggcagtttgtcttttgagaaatttatccatttcatctatgttatcgaatttgttagtatacaattgttcatagtattctcctataatcctttttatttctgtaaggttggtggtaatgttccygttttcatttctgatttttataatttgagtcttctcccttttttcactggccagtctagctaaaagtttgtcaattctgtcaatcttttcaaagaaacaactttggtttcgttgattttatctattgttaaggtaaggacaaaggctcagaaaggttaagaaggttgaatgggtataagcatcagagctaggcagtctgattccagtattactactatactatactataccatatatactgttactttactaatatatccctaagaggaattccctgagacctg

SEQ ID NO: 83229 - DNA, 504 bp, Homo sapiens
cccagccttagacaatcatgggagacttcctagagttggtggcgcctcaggtaaaatcagatgaggggattgaggcccaccccagcgacttgcccagcctcacacaaatagctgtttgaactgagactaggaactcaacatcctgaggctgctttcgttaacctcaaacttactttgtccattcttctttgtaaatggcagggaatggagaatggcaccctgtgttttggtgtctgcagtggaagggggtgtagacccctctggctggcttgattcaragtatcggttccgtcactggtatgtgctgtcctctgttgctatgaaaatttatggctaaaaccatcttgctttgaaaggttaactttttttttttttgaattggagtttggctcttgttgtccaggctggagtgcaatggcgcgatctcggctcactgcagcctctgcctcctgggttccagcgattctcctgcctcagcctccaaagcagctgggattacaggca

SEQ ID NO: 83230 - DNA, 924 bp, Homo sapiens
tgcatatagaacgatcaattgtgtaattgtatagtaacgtaatggaaaagattcatgctgtattggttgggtatggccacaattctgttgtgtaacaaactcactggtcttgaggaaaataacttactcgtatgaatctctgggtcatggagcagctctaccctgacactgaagcagtgctctggtctgctgcacctgattctcaacctcctgagtcagcaggctggccaggatatgtacttctcacagcggtggcagaggcgcaagggcctggacagaaacatttcagacctcttaaagtcttgaaaggaagaaagaaatatttttccattgcatttaagcagtagtgcattttagctaatttctacaattaccattgatgtagtagatggagaaatctattaagtccttaaattctaataaccttgatgccacaagccacattaacaatattaagattactcctttgaaatgaacaagttaaccagctttgcccttgtagagctcacaaagaccacagattttatccagccaataccactcagtcaaagcattggagttttaaacgtagacaggttcccaacacagccacagtccagcaggtgaggggtttgctggctctctgggacacttccaggacagatgtgtactgtcctacaaaacagctcatgcaattcaaagaaatcgagatggagctgatgtcaaaagcacactaagtacttaataatgagttygtatggttgtatagttaataattactgttaggaaatctacaatggctaaaatacacccttacatttatccagtaagtagtgtttagatacctatctttttgaagtctaaaaataagtatgaacgctaatatcatttgggctccttcttcaaagctgtttccccttgactcttttatgagtaaaaaaatat

SEQ ID NO: 83231 - DNA, 924 bp, Homo sapiens
tgcatatagaacgatcaattgtgtaattgtatagtaacgtaatggaaaagattcatgctgtattggttgggtatggccacaattctgttgtgtaacaaactcactggtcttgaggaaaataacttactcgtatgaatctctgggtcatggagcagctctaccctgacactgaagcagtgctctggtctgctgcacctgattctcaacctcctgagtcagcaggctggccaggatatgtacttctcacagcggtggcagaggcgcaagggcctggacagaaacatttcagacctcttaaagtcttgaaaggaagaaagaaatatttttccattgcatttaagcagtagtgcattttagctaatttctacaattaccattgatgtagtagatggagaaatctattaagtccttaaattctaataaccttgatgccacaagccacattaacaatattaagattactcctttgaaatgaacaagttaaccagctttgcccttgtagagctcacaaagaccacagattttatccagccaataccactcagtcaaagcattggagttttaaacgtagacaggttcccaacacagccacagtccagcaggtgaggggtttgctggctctctgggacacttccaggacagatgtgtactgtcctacaaaacagctcatgcaattcaaagaaatcgagatggagctgatgtcaaaagcacactaagtacttaataatgagttcgtatggttgtatagttaataattactgttaggaaatctacaatggctaaaatacacccttacatttatccagtaagtagkgtttagatacctatctttttgaagtctaaaaataagtatgaacgctaatatcatttgggctccttcttcaaagctgtttccccttgactcttttatgagtaaaaaaatat

SEQ ID NO: 83232 - DNA, 1076 bp, Homo sapiens
aaaaatccccggggctattctaaaatcctaacagatgccttctgctaaaatgcgtacaaaatatatctctttttctatattagactttcatatttatttaatacaggaaacaaatatcttttgtattagaaaaaaacacaaatataagggatctgcaagatcctttagatctacttcttcaatttccagttgaaaagactgagactcactttcttgagtcagtacaggactttatcaatgacaggaaattaataacaggcagttctagaaagcagaaacctactattcaaattactaatatgccaaggtttcaaatagtttagttattgtgccttaaatattgttacaatagtattattttcccattacaggtatgtataccagagaataaaccacagtctacttctaaggaaattaattatataaaaggaaggatcctatggttctttatgaaaacagtatttttttataaaactgatcaattaaagctcattattagcactgaagtagaattactttttctccctaggagaactgagttgtaggaatgctttgtaaatgtgtttttaaattgttgattttatttagaattggcatcttttgctaaagaatcactatgagtcttcaccgaaaggttgaaatgagttgttgctattgttgagcattgtggggtaagagaaatcctgcctcacgcaaatttatttacattgcttcatccctctctgtatcttcaggaagttcaaggacctgcaataaaactgatgctgaatgtatttctccaaagagttggaactttacaatatttgtccttttcctttcttcagatttctttttcttatcctgcttcctattatatgtcttaawcttttgatatgaggccagcatatgtgccattgaaaatggtcttagagtttctcttttagtgaaattgaatattctcccatacatattaatagtgatatggtttagacaataatttagcatgataaagctctagaagcagccttggcttttctagtgaacatcatggcaatccttttaaacttattggtttagtatggtataaaactcacagg

SEQ ID NO: 83233 - DNA, 590 bp, Homo sapiens
taacaggcagatagaggacagacaaattatttaactctggttgtcaggtctgaagacratgatgttacccttgcccaagcagggggctgtggggaatgatcaatagaaggtattagatggcacttgccagacggtgaaagaaagtcagtaattaattaccttggagcagtctcacagaaatattgatgtctgaaagatatatgacatgctcttttccttagagcgtattcactcagaaagagagtccggattctggtagttggggtaaaagatggtagaatgcagaggagaagcaaggaaagataaaggtagactagggtcagtcatgagaattttctttccctgaaatgtggtttgaggctggcatccttggtgtctcaccccaaactttttccttacctctctagtctccagagttcagacctgggtctgattctgactcagccgtaagtcaaagccaaaatccagaagtatatggtcatggacttttaggaaaattgcctaaaattatattttaaggaaaattgcattattttacataaagagtgtgtgtgtgtatacacacatatgtatgtatattatgcatatac

SEQ ID NO: 83234 - DNA, 590 bp, Homo sapiens
taacaggcagatagaggacagacaaattatttaactctggttgtcaggtctgaagacgatgatgttacccttgcccaagcagggggctgtggggaatgatcaatwgaaggtattagatggcacttgccagacggtgaaagaaagtcagtaattaattaccttggagcagtctcacagaaatattgatgtctgaaagatatatgacatgctcttttccttagagcgtattcactcagaaagagagtccggattctggtagttggggtaaaagatggtagaatgcagaggagaagcaaggaaagataaaggtagactagggtcagtcatgagaattttctttccctgaaatgtggtttgaggctggcatccttggtgtctcaccccaaactttttccttacctctctagtctccagagttcagacctgggtctgattctgactcagccgtaagtcaaagccaaaatccagaagtatatggtcatggacttttaggaaaattgcctaaaattatattttaaggaaaattgcattattttacataaagagtgtgtgtgtgtatacacacatatgtatgtatattatgcatatac

SEQ ID NO: 83235 - DNA, 523 bp, Homo sapiens
aaatgagccaggctaaactatttaaatgttcgggtggaacaaatgtccagtcattgattttcttttcctctccattttgaggagggatgtttagtagaaatgtgtcagcattcacactacgcaagggtcagcaccggtttagtgaaatctgtcctgcattttatagtttaaacctaacagtttaaaccaaagatttaaaatcaattgcccatcagcgctccttattgtactcagccgtcggcctccgtgaatcttaatgtgcctgaacagacccacagagacacagcatcagcttcacatttctcggtatccacttagtaatcattaagatcaaktccttgaaatacagatgataattcaccatctttcatcgcagcatgaggtttctgtttagggatttttgtccagttcatttgtttcagcttatcttcctcatgcccgactggatgcaaataaaaagaccttgcttttaattttaagatcaaagtgactgccagtcattcaggggagacaacggaaggaa

SEQ ID NO: 83236 - DNA, 1532 bp, Homo sapiens
gggtaagggacagagatcagcaggttccctgcaattttaagatcgtaactgagaaatgtgcccttgtaagcctgttgatccaagagcctgcctgcctctagaaaagcccacatcagtcctttcctaggaggcagtggccttgttgcctctgttgagacaaagttctttattgacctcacagggagctgggactttctgaatcagaccattcaggtgttctctcagttcctgttgattccttcgcagccctggtgggaacagctgctgctcttgagggaacctaaagtaaactcctggcttgccattttcctgaactcgtagattttggcagaggagaagggtggagagtccaggcctttgttcctgatcctgtcacccttatgagttaagatttggcaacccttctcataactgctgggggcatagggtatcctcaaaagtagagttaaattactggtttaaagagtctgtgctccaaactccagtgaacttcatgatacagaaagcaaagaattgaagggtattagctgtttggggaaaaccactgctcccaccacctggaagccaaataagcagatgtcccctctgggtggagcagggggccaacatcactttcttatgttattataggtcgtcagcctatgtgtaggccatttcagtctcattggaaatacctggaaaaatgcctggacttggaaaaatgcaaacaaaaaacacagcacgtagctctaaaggggttgtttagtcctcccctgaattctgtttctgccttaaaacaccagaagagctttggctgtgtgccatctgcaggaagcaccctaggaaggagaggatccaccctggcttctcccaggctaggtggtccttcgtttttcacctttttaaaaggctcacctgaggctgctgaaaaggtggcaaaagacaggactgcatgcttcattcccagcaagagtgtcaggcaaaattcgaactccttgatcacccattggtttccacattctttccattccggagaccaaggggagatttgcygatgctgatgctccctgggctttgcaaagctttccctaattaaagtcctcccggctgtgtgcatagctcttctgctgcaaatctttgcccttttgtgtttgtgtttaaaattccatctttccaaaatgtttgcccactcagcaagtctccttgaaagccctcacttttgtttgggggaagttttttttttttcctttttggtttttattctgcctatgtgtaggaaatttaagtctcttaggaattgcttgtgaaaatgctctctggtctttttttaaaccatgatgagtgtctctcaccatggcattggaagctggcaagggatgcccctggtgtccgtgctgttagctgccacttgagcttttagatggagctactggagtatcattttggttccattctaaggaaaatgaacaaaagagcttttccctcctgttcaatgtgcaacagtgctacaaggtgagagaagtatgttagcgaggaatctgaaccaggtcagg

SEQ ID NO: 83237 - DNA, 1532 bp, Homo sapiens
gggtaagggacagagatcagcaggttccctgcaattttaagatcgtaactgagaaatgtgcccttgtaagcctgttgatccaagagcctgcctgcctctagaaaagcccacatcagtcctttcctaggaggcagtggccttgttgcctctgttgagacaaagttctttattgacctcacagggagctgggactttctgaatcagaccattcaggtgttctctcagttcctgttgattccttcgcagccctggtgggaacagctgctgctcttgagggaacctaaagtaaactcctggcttgccattttcctgaactcgtagattttggcagaggagaagggtggagagtccaggcctttgttcctgatcctgtcacccttatgagttaagatttggcaacccttctcataactgctgggggcatagggtatcctcaaaagtagagttaaattactggtttaaagagtctgtgctccaaactccagtgaacttcatgatacagaaagcaaagaattgaagggtattagctgtttggggaaaaccactgctcccaccacctggaagccaaataagcagatgtcccctctgggtggagcagggggccaacatcactttcttatgttattataggtcgtcagcctatgtgtaggccatttcagtctcattggaaatacctggaaaaatgcctggacttggaaaaatgcaaacaaaaaacacagcacgtagctctaaaggggttgtttagtcctcccctgaattctgtttctgccttaaaacaccagaagagctttggctgtgtgccatctgcaggaagcaccctaggaaggagaggatccaccctggcttctcccaggctaggtggtccttcgtttttcacctttttaaaaggctcacctgaggctgctgaaaaggtggcaaaagacaggactgcatgcttcattcccagcaagagtgtcaggcaaaattcgaactccttgatcacccattggtttccacattctttccattccggagaccaaggggagatttgccgatgctgatgctccctgggctttgcaaagctttccctaattaaagtcctcccggctgtgtgcatagctcttctgctgcaaatctttgcccttttrtgtttgtgtttaaaattccatctttccaaaatgtttgcccactcagcaagtctccttgaaagccctcacttttgtttgggggaagttttttttttttcctttttggtttttattctgcctatgtgtaggaaatttaagtctcttaggaattgcttgtgaaaatgctctctggtctttttttaaaccatgatgagtgtctctcaccatggcattggaagctggcaagggatgcccctggtgtccgtgctgttagctgccacttgagcttttagatggagctactggagtatcattttggttccattctaaggaaaatgaacaaaagagcttttccctcctgttcaatgtgcaacagtgctacaaggtgagagaagtatgttagcgaggaatctgaaccaggtcagg

SEQ ID NO: 83238 - DNA, 764 bp, Homo sapiens
ctaagagtttaaatttgaacatggcattcaggggagaagattatgggttccaagccttttccttcttccccttcttgtgaataactcactcagctgcttgcatctgtgtcctaaggctgtgaaccgaagagctgggcagtccacagttggtttgagcctcagagtaccttgcttagtaaaggtttgttttaggagggatgacacaaacttttgagtaactctcaagtcttgaactatgaaacttcgtaggatgtcaacactaaaatgaaccttaccgattatctcatctagtggttttcaaacatttggaaaattggtacagccctttttttaagcaaaatcttagaacttgaataaaccaggtagaaggtggtaggcccagacttcctctcccactcttgacaccctgagctcctccctctgtactcacagccctcaaagtgctcctctctcagagaaccatccattgcagagaccagggagcygtggcccatgccccatgtagcaccgtttcatggcagaaccagctctgacttccaggccagtggcaagtccctgcagtaccttggtttattttgatgtaggaaaagctctgggtagtaagagtgaagagtcaaacagctacgactgagagtgaggagaaagacaacactgcccatggttcctgacacccagggtcactttttaccaacctaactctgggtcacatgacgtactcgtattctgaaactgttggtttcctggatgtctacctgtgatgtctt

SEQ ID NO: 83239 - DNA, 639 bp, Homo sapiens
atttactcagagccaccatgtgccagtcaccataaacatataaaaaataaataaataaagggagggggagaggaagggaacwgagcggaggcaaggctggtaaaatgcaaagtaaattcaatgcacagtgggttctaacacagaaggctagacctcaggagatgagacaagaaataaagtgagaaaggtgggccaggtacaagggtgaagacctgtgtatgcaactcttagaagtacaggtgactccaagtaaggcagatggagtccccaacactacccaagcagccactatctgatttgtatctggaatctgctctgctcagaccaatttcaggatttttggaaggcctaaatcaacaagctacagtctcataaaatacacaaagtaatcctcaaaatgccacatttggccttaacgaaatataacttttgaatattaccgtttacactccaggtctgttaaccacaagtaggccgtggggcaaggacccacttcatagtcaccagagacataacacattattaaggagagtcaatttcatttttttaaaaaaagatattgacatggcatatacagccagctgttttaaaaaagaatgaaagaaaagaaaaagcctgtcccttgctcaagatggctat

SEQ ID NO: 83240 - DNA, 1113 bp, Homo sapiens
catcaaacatacttctgaaaattcaataagaaaagacagaactctcagttttagataaatcataatactatgccaatatgcagagaaatcaaaatggaaaagctgtgagcagaacatctactcactgtggtgatggaaggacaagctacagggaggcaggagacagaggattcatctgtgatgtgccactgatcagccactctctcattaacaagttttttttgttgttgttgttactttgttttgagacggagtttcactctggttgctcaggctggagtgcagtggcatgatgttggctcactgcaacctctgcctcgcgggttccagcgattctcctgcctcagcctcctgagtagctgggatgagaggtgcctgtcaccaagcctggctaattttttgtatttttagtagagacagggtttcatcatgttggccaggttggtcttgaactcctgacctcaggtgatccacccgcctcggcctcccaaagtgatgggattacaaggcacgagccacygcgcccagccgagtatttccagcacatctcagctgattctctgtctccagctctccttcatttacttttactttattaggagataactatgatgagatgcaatattcttctggaatgatccaccagaagaagggggaggaaggaaactggccaatctctttctcaaagaaagcaataaatcctatctcctccatgtagcagaggtgaacaaagaagatggagcatatctctttggtgtccccctgctccacttgctttgtagcaactatacatctttgtgtatgcacagaaaagaacccatgagaacaccagtatttcctttaacaagtaatgcagctagcaataagtggctaatgaaaatgccatgacttcctttgtcctacaggcagtcctagtattctttaactatgtataatgtttaccctttccagaaacttgcagaggtgtgaggcagagcgtaagagaagctaatgctttttggaatgcttctggctcatgcttcttgaacagagaagaagttcagtggttcctatagtgccacttcatagttcctagcagacatatatggatctgatgtcattaaataagcaatg

SEQ ID NO: 83241 - DNA, 1469 bp, Homo sapiens
caacactgctacagcaaaaaatttgaactagtctaaatgcctgtcagtaaaagaatgaaaatattgtggtatatttacttaatagaattccatacaatagtgaaatgagtgatctagatctatatagtaacatgagcaaatctcacaaataacaggttgaatgaaaaaggtgaattgcagaacacatttatataaagcttgacatgcacgtattatttagggaggcatacttatgtaataaagaaatacatgataattataaataccaaattaaggatagtaggtatctccaaagggtaagctggggagaaaagaccaagaataatgcaaagaagggcacacacagagcttaaattgaataagtaaatatttttcaactgagttgtggatatataggtatctattaattattctttatgccttttataaatctgaacttttccttttttttttttttttttttttttttagacggagtctcattctgactcccaggctggagtgcagtggtgcgatctcggctcactgcaacctgcacttcctgggttcaagcgattctcctgcctcagccttctgagtagctgggattacagacatgcaccaccacgcctggytaaattttgtatttttagtagagacggggtttcaccatgttggtcaggctggtttcaaactcctgactatgtgatctgcctcggcctcccaaatatatgtatatttttaaagaataaatagcattccactcttgttatgagcataatacagggagggaggggacagcagaagtataaagaaatactaatattagggtgaatcataaaattttttactcaccactaatattagagtgaaccataaaatttctgtttttgtaggtctgaaatgatttaatataggcagattcaagtggcctattcaatctaatgtaactaatgttctggttgaaatatattcaaaatgcattgggcatggtaactcacacctgtaagtccagcactttgggaagccaaggtggtcaaatctcttgagcccaggagtttgagaccagcctgggcaacttggtgaaaccctgtatctgcaaaaaatacaaaaataagcttggcgtggtggaaacatattcaaagtactatgggaacactagggcaggaacaactgatggccaaggcagaaggagggaagtgacatttggaaaggttccagagagagagaatgacttttgaactgaatcttttttattgtttaagtttttttaagagacagagttttgccgggcgccggtggctcatgcctgtaatcccagcattttgggaggccgaggtgggctgatcatgaggtcaggagatcgagaccatcctggttaacacggtgaaaccccgtctctactaaaaatacaaaaaattagccaggtgtggtggcgggtgcctgtagtcccagcaactccggagtctgaggcaggagaatggcttgaa

SEQ ID NO: 83242 - DNA, 771 bp, Homo sapiens
acatgcccagctaatttttatatttttagtaaagatgagattttgcgatgttggccaggctggtctcaaactcctggcctcaagtgatccacctgcctcagcctcccaaagtgctgggatgacaggaatgagccatcatgcccagccttttgcccattttttaattgagctatttgttttcttagtattgagttgagttccttatatattttggatattaatcacttatcaaatgtatggtttacaaatattttctcccattctataggttatttcttcactctaattgtttcctytgctgtgcaggagcctttttagtttgataccatcccgtgtgtctgttttttctcttgctgactgtactttcgcgtttatatgccaaaaaccattactcagaaaaatatgaggatttttccctatgttttcttttagtaattttacagtttcaggttttacattgaaatctttaatatattttgagttttttttatttttaacttggtgtgagatgagggcctagcattgcttgaggcagactttcatcctcacatgacacattaaatatctgtgttttccttttaaggcttgtgctgctctgaacttcccgggttgcatgaagtgtgaactatgtctctcctgtctgttctgagacaggacaacaattctgagtagattcctgagtgaagctgctcttcgtgcttcagcagactgtgtgcttgggatactagtcagaaataacacctctgtagtactttattcagaaaaccaaaa

SEQ ID NO: 83243 - DNA, 738 bp, Homo sapiens
tttaatctacccagcttttcttttgtggcttttgttgtttgtgacacaatggcaagtcctgctcaatgacaagggtatataaaaaaattaactcaggtttctttccggttgttctgtttccttttcacatttaaaaattgagttgattcataaattatggtatattacgtgagacttttatgattataatctttttctgataggcaaaatttagctcaaatattatttattataaagttgacctttcccccatagattggatatggtatttttgtcacgtcttaaatgtccaggcttatttggctctatttctatactttagaaaactttgcttcaattcagtcaattaatagtgaaagggtgctgtgctgttttgcttayggatgcttaatcctatgtttaccattgctgggtggattactagcttgctatcattgaattttcttcaaagttttactgcttgtacttgtcttttgtttttaaatataaattttagaatcacttgtttggctagttctagaaaatgtggagcttcaggtactattttgatactaaaataatgttacaaattaaatgtatgaacatcataaaatatataaatatatattaactaataaaactacaaaataaaattggcaaacccacctgatttaggagttttctttaaatatatacctctcagtggttgataaataacacaaaacaaaaacaaaaccacagtgtaatgatattgaaggt

SEQ ID NO: 83244 - DNA, 707 bp, Homo sapiens
ctctctactcagagggaaccccakgactctgcggttttttaaatgcatgcattctttatctcaggcttggaaacaaacattgagaaattatttgtgaaacgggggtgcagggagttggggggtgcttgaagacataaatctttacattacagtctattaacagacttccttcagcgagacattcatgtgaactgagctgggggcaaaggttttgggggtgcttccccctgccacccacccagtgaaggagcaagaggaatgggaagagccactccctccctccctcctgaggtggccacgcctcccctgccctccccaactcagctgtactcaccaccgacttcattgcagcagcagcagctccaggcgcagcacctctcccatgccacacacggccccccggtccagttgccaccccacccgtcaggtctccagcctccaggaatccccccagtgacagggagcagctccgggctgctggcactgggcgccctgggcagccaggcccatctgacggtgaaggatgagaagaaccaccatgaactcgatcacagaggtgcggctgggctggggcagagggtggggcggggcaggggtgggcatgggcgctcataggcctcacagtgagtggacccagcaagtgctgtcgtcctaagaccaggagttaccaaggatttggagtcatctgttgatacctggtgcaggga

SEQ ID NO: 83245 - DNA, 707 bp, Homo sapiens
ctctctactcagagggaaccccaggactctgcggttttttaaatgcatgcattmtttatctcaggcttggaaacaaacattgagaaattatttgtgaaacgggggtgcagggagttggggggtgcttgaagacataaatctttacattacagtctattaacagacttccttcagcgagacattcatgtgaactgagctgggggcaaaggttttgggggtgcttccccctgccacccacccagtgaaggagcaagaggaatgggaagagccactccctccctccctcctgaggtggccacgcctcccctgccctccccaactcagctgtactcaccaccgacttcattgcagcagcagcagctccaggcgcagcacctctcccatgccacacacggccccccggtccagttgccaccccacccgtcaggtctccagcctccaggaatccccccagtgacagggagcagctccgggctgctggcactgggcgccctgggcagccaggcccatctgacggtgaaggatgagaagaaccaccatgaactcgatcacagaggtgcggctgggctggggcagagggtggggcggggcaggggtgggcatgggcgctcataggcctcacagtgagtggacccagcaagtgctgtcgtcctaagaccaggagttaccaaggatttggagtcatctgttgatacctggtgcaggga

SEQ ID NO: 83246 - DNA, 693 bp, Homo sapiens
tgagatttgttgtaaatctttctgatcacactgaggctccgaggttctgtttcaagtgaataagccttctgaataagcgcagtggagtctggataaaaaaaatcctccagcgattagcaaagctattttattcctcatcgctgtccttgtatctggggccatctaatctgttaggatggctttggttattacctcgtgttaagtaggacttggaaggtcaggcagttaactaaccatctagacagcagcttccttgcgmagctctctccaatccagccctccttcccttcctggccctccccctacccaggctgactttttaaacctcccattagcagtgaggctggcgtccgtggcctcttgacccgcctacatgctcagaaatccaggaccacatttgggctgaggaatggctaggtacctaagagaggagtcattgaagctgaaaatccatgttcactgcctcggtactgatcctctaacagtggcattttttcggagaggcagtttgcctagataggcggaggcctggattggacattttaaggctgaggtctggtcccagctttatgaggccctgtgtagttctcttggcctctctgagcctcagtttccttatccataccatgggaataattcctgcttgaccaacctctcagctttgtttcggaagaccctttataacctgactga

SEQ ID NO: 83247 - DNA, 693 bp, Homo sapiens
tgagatttgttgtaaatctttctgatcacactgaggctccgaggttctgtttcaagtgaataagccttctgaataagcgcagtggagtctggataaaaaaaatcctccagcgattagcaaagctattttattcctcatcgctgtccttgtatctggggccatctaatctgttaggatggctttggttattacctcgtgttaagtaggacttggaaggtcaggcagttaactaaccatctagacagcagcttccttgcgcagctctctccaatccagccctccttcccttcctggccctccccctacccaggctgactttttaaacctcccattagcagtgaggctggcgtccgtggcctcttgacccrcctacatgctcagaaatccaggaccacatttgggctgaggaatggctaggtacctaagagaggagtcattgaagctgaaaatccatgttcactgcctcggtactgatcctctaacagtggcattttttcggagaggcagtttgcctagataggcggaggcctggattggacattttaaggctgaggtctggtcccagctttatgaggccctgtgtagttctcttggcctctctgagcctcagtttccttatccataccatgggaataattcctgcttgaccaacctctcagctttgtttcggaagaccctttataacctgactga

SEQ ID NO: 83248 - DNA, 607 bp, Homo sapiens
ccccctcacccccaccctgggcaaagcagtgggggttggggggtgggagagggggacacagatcctggcacactgtggatrtttcttgcagattgcagtctcttgtggcccaaacaggttaggtagactatcgcctctggcaggtgccaccttttggtaccaacatgttctgaggtgttaggatttgggttgggttttttttgtttgttttttttttccttttggtctttttttttttctccttttaaagaaaagctaaaggccgctgtgagtcctggtggcaggctctccatggatgtagcatatcgaagataatttttatactgcatttttatggattattttgtaatgtgtgattccgtctgctgaggaggtgggaggggctccagggaaagccacccaccttcagtgaggttgctccccagctgagcgcaccgggcatgggatgtggaggctggcgacacaccctgtgcctctccaaggctgggcgcgtggggcgtccagagtctctctgggtctcagatgtccatctgccacctcttgttaaggctctagccagaagggagggtgagggtagaagaaagttattcccgaagaaaaaaagaat

SEQ ID NO: 83249 - DNA, 1012 bp, Homo sapiens
  misc_feature (1)...(1012): n = A,T,C or G
gggcatccgatactcagtaacccgagcccagagaagtgaaatgatgtctggagtgttttcaattctattgtgctgtttttgctcaaagcaagatctgttttttaaaaaatggagggccacagttgtcagaggccaggtttaatgttttagttgccatcaaattataaacaaatgggctgggcatggtggctcattcctgtaatcccagcactttgggaggccaaggtgggcagatcacctgaggtcaggagtttgagaccagcctggccaacgtggtgaaaccccatctctactaaaaataagagaattagctgggcttggtggtgggcgcctgtaatcccagctacttgggaggttgaggcaggagaattgcttgaacccgggagatggatgttgcagtgagcccagatcatgccattgtactccagtctaggcgacagagcgagaccgtctcaaaaaaaaaaaamcaaaaaaaaaagaacaaatatttgggtcatctttggcaatagctgacaaagccaccctttctagcttccctntgagtcgcagcccccaggtggccccaaccccagcatgggcagtaattgtctaacttgtagggtctctgagaaggtatggagacagagatctggacgctggagccagaaggatccttagcaagactgctaaatgttaggtactggccatcaaatggcccataatgatgcaagtgtaattttttttcccaataacttattcagtgtttacaaatgagcatcatttttaatataaagcaaacaaatctgaacttttaaaaaaattgtatgattaatggagcatttttaaacattataccaaagttggaccttttatatttgaagagacatctatactaagcccaattttatagatggggcaattaaggcccagggagggcaagtgacttaacatgactcacagagtccaagccaacattatgatgaaacatccccctcccctaaacccttagcacactcaggatggaaagctagga

SEQ ID NO: 83250 - DNA, 1012 bp, Homo sapiens
  misc_feature (1)...(1012): n = A,T,C or G
gggcatccgatactcagtaacccgagcccagagaagtgaaatgatgtctggagtgttttcaattctattgtgctgtttttgctcaaagcaagatctgttttttaaaaaatggagggccacagttgtcagaggccaggtttaatgttttagttgccatcaaattataaacaaatgggctgggcatggtggctcattcctgtaatcccagcactttgggaggccaaggtgggcagatcacctgaggtcaggagtttgagaccagcctggccaacgtggtgaaaccccatctctactaaaaataagagaattagctgggcttggtggtgggcgcctgtaatcccagctacttgggaggttgaggcaggagaattgcttgaacccgggagatggatgttgcagtgagcccagatcatgccattgtactccagtctaggcgacagagcgagaccgtctcaaaaaaaaaaaaacaaaaaaaaaagaacaaatatttgggtcatctttggcaatagctgacaaagccaccctttctagcttccctntgagtcgcagcccccaggtggccccaaccccagcrtgggcagtaattgtctaacttgtagggtctctgagaaggtatggagacagagatctggacgctggagccagaaggatccttagcaagactgctaaatgttaggtactggccatcaaatggcccataatgatgcaagtgtaattttttttcccaataacttattcagtgtttacaaatgagcatcatttttaatataaagcaaacaaatctgaacttttaaaaaaattgtatgattaatggagcatttttaaacattataccaaagttggaccttttatatttgaagagacatctatactaagcccaattttatagatggggcaattaaggcccagggagggcaagtgacttaacatgactcacagagtccaagccaacattatgatgaaacatccccctcccctaaacccttagcacactcaggatggaaagctagga

SEQ ID NO: 83251 - DNA, 854 bp, Homo sapiens
actattcagcaataagttctggagcaacaggccatcttcatggtgggaaaatggatccctacctcacacagtacacaaaaataaattctcaaaggattaaggtttttaagcttatagtacagaatattggagaacaacctcaggactcagaggatgggaaaaattattgaacaagacagtaagcaaaagctataatgaaataaagatcaatttgatgatattaaattttaaaatacctgtacaacaagagatactataaagtaacaaaacatgaaaaaacataaacwcaatgcctacaactgaccgaaaaaagtggtgtctggaatagataatgaattattccaaatcagtacattgaaagccaacaactcgagaggaaaatgggtagaggacataaataggtgattcacaggagaggaagcagaaatgctcaacaaacacgtgaaaatacctcatctcaccagctatcagggaaatgcaaatttacaaaacaaaatgaaatggaacgacccattcccattagactggcaagttttcgagtttgatcatatgaagcttccatgagggtggtgaatgactagtattgtcaaacactgtgggagcataaattggttcaaccactttgtggttgccaaacaactattactattactaataggttactcttgccaggcagtttggcaatcatgaaggaggaaaagcacaaccctgtgacccactaaatctacttccaggtatgcaccctggagaaactcttcaacaactccatgaagagatatgtacagaatcttcattgcctccttgtttgagcaaaaataattagaaacaacctgtccattaatggatgaatggat

SEQ ID NO: 83252 - DNA, 657 bp, Homo sapiens
tgcatggacactgatgggacatttgcagtctggactcagcctctgcctcagctccacggaagctgcaaacattcacacctctgtgcctttgcacaagcctcttcctctgccaggaatacccttcccttcttttttttgagacagagtcccactctgtygcccaggctggagtgcagtggtgcgatctcagctcactgcaacctcgcctcccaggttcaagtgattctcatgcctcaggttcctgagtagctgggattacaggcacccttcctcctttttggccttcgaggctcagctcaagtgtccccttttcaggaaagcttcctcctttcccatgcagcagagctggtcactttgtcctccaagaccccagggactttgtacttgctacctcctggccacaaggcaggacagaccgctgccacctgtctgttcccttcactgatgggggcttctggaaagagggaccctcagtgctctcctggtgcctggtacatcatgggactttgcaaatatctgttgggtgacagaagctcagtgactgcagaataatgtgatgagtgccactggagaaggagctgagatcatgtgatcgggaaacaagggctgttttcaaggggccacgcctagctggctctgctcaggatgtgtctcatc

SEQ ID NO: 83253 - DNA, 815 bp, Homo sapiens
ccttatagtattttattgttttaacgaaggcccctgaggcagataattatctttttaawgttgccaacgttgattgaatattaagcatcattgatccgcctactctgtgccccacagaataccgggcaggttttctttctgcattcacttatacagtcttcggaatcatatcatgttattgtcgaagaggcattctttccattttgcagataaagaaactgagactcagagaggtgaggtgacatgccccaaatttcacagcaggacggtggcagggaaggggtcccaaccctgcctgacacgaaacactgctgttccttctgggaggtcctttgccacaccccagcaggtcctacctcccatgaccggagcttaggcccctgtgagccattccatcctgggatggctctccctgaggctgtggctcttgctgctgcccctctgagtcccagtccaggctctgtggcatcctgcactgtgctgcttccctaaataccctcccagtcccttctttttttttttttttttttttttttgagacagggtctcactctgtctcccaggctggagtgcagtggtatgattatggctcactgttgcttcgacctcccaggctcaagcgatcgatccttccacctcagcctcccgagtagctgggactataggcacacaccaccacacttggctaatttttgtattttttttatagagacggggtttcaccatgttgccaagcctggtctcgaactcctgagctcaagcgatgctcctgcctctgcctcctaaagtgctgggattacagccactgcccggcc

SEQ ID NO: 83254 - DNA, 815 bp, Homo sapiens
ccttatagtattttattgttttaacgaaggcccctgaggcagataattatctttttaatgttgccaacgttgattgaatattaagcatcattgatccgcctactctgtgccccacagaataccgggcaggttttctttctgcattcacttatacagtcttcggaatcatatcatgttattgtcgaagaggcattctttccattttgcagataaagaaactgagactcagagaggtgaggtgacatgccccaaatttcacagcaggayggtggcagggaaggggtcccaaccctgcctgacacgaaacactgctgttccttctgggaggtcctttgccacaccccagcaggtcctacctcccatgaccggagcttaggcccctgtgagccattccatcctgggatggctctccctgaggctgtggctcttgctgctgcccctctgagtcccagtccaggctctgtggcatcctgcactgtgctgcttccctaaataccctcccagtcccttctttttttttttttttttttttttttgagacagggtctcactctgtctcccaggctggagtgcagtggtatgattatggctcactgttgcttcgacctcccaggctcaagcgatcgatccttccacctcagcctcccgagtagctgggactataggcacacaccaccacacttggctaatttttgtattttttttatagagacggggtttcaccatgttgccaagcctggtctcgaactcctgagctcaagcgatgctcctgcctctgcctcctaaagtgctgggattacagccactgcccggcc

SEQ ID NO: 83255 - DNA, 815 bp, Homo sapiens
ccttatagtattttattgttttaacgaaggcccctgaggcagataattatctttttaatgttgccaacgttgattgaatattaagcatcattgatccgcctactctgtgccccacagaataccgggcaggttttctttctgcattcacttatacagtcttcggaatcatatcatgttattgtcgaagaggcattctttccattttgcagataaagaaactgagactcagagaggtgaggtgacatgccccaaatttcacagcaggacggtggcagggaaggggtcccaaccctgcctgacacgaaacactgctgttccttctgggaggtcctttgccacaccccagcaggtcctacctcccatgaccggagcttaggcccctgtgagccattccatcctgggatggctctccctgaggctgtggctcttgctgctgcccctctgagtcccagtccaggctctgtggcatcctgcactgtgctgcttccctaaataccctcccagtcccttctttttttttttttttttttttttttgagacagggtctcactctgtctcccaggctggagtgcagtggtatgattatggctcactgttgcttcgacctcccaggctcaagcgatcgatccttccacctcagcctcccgagtagctgggactataggcacacaccaccacacttggctaatttttgtattttttttatagagacggggtttcaccatgttgccaagsctggtctcgaactcctgagctcaagcgatgctcctgcctctgcctcctaaagtgctgggattacagccactgcccggcc

SEQ ID NO: 83256 - DNA, 533 bp, Homo sapiens
tgttggaatcctgaagctgcaacttgtaaacctccccctgaaggggcagtgagagtgaccatgacagtgacagtaagagcaactgcccgctgtggtgctgtctccaaaacaccctgagagtagggctggtggctgaagtcgggtggtttacaccccggtcgaccttcatttgcagttgccagataaaacataggattctcagctcaatttgaattttagataagcaacaaataatttattattattattattattttttgaggcagagtctcattcttgttgcccaggctggagtgcaatggcacgatctcggctcactgcaacctctgcctcccgggatcaagagattctcctgcctcagcctcccgagtagctgggattacaggcttgtgccaccatgccyggctaaattttttttgtatttttagtagagacagggtttcaccatgttggccaggctggtttcgaactcttgacctcacatgatctgcctgccttggcctcccaaagtgctgggattacaggcatgagcc

SEQ ID NO: 83257 - DNA, 1123 bp, Homo sapiens
ctttttaaaatcttattttcatttttttkgtagagacaaagtcttgctattttgcccaggctggtgttgaactccttgtctcaagggatacaccctcctcggcctcccaaagtgctgggattacaggcatgggccaccatgcctggcccttcctgtctttttaaaaaagagtacactgaatatcattcaggatctccacaccaccaactcaaccatctgtaagaacaaggaaaataacataaaagaaagaggcagggtggggggaatcattaaggattagaggagcctgcagaaaagcagagtacaggccccggccaaggtgggcagccacttgtccataaaagccaactgctaacatgtgtaacacagaaccaccagtgacagcaaaacttctatatttttaaagaagccattccagattttaggttaaatgtcatgtgttttttgtttttttagaggtggggtcttactttgttgcccagactggagtacagtggcatgatcatagttcactgcagcctcaatcttctggactcaagggatcctcctgcctcagcctccagagtagctaggaccacaagcatgcaccactatgcctaagttttttgttttttgtctttttttaatgtagagataggatctcactatgttgtccagactggtctcaaactcctggtctcaagcaattttcccaccttggcctccccaagtgctaggattacaggtgtgagccaccatgcccagcctcatgcttttatgtgatggaaaatgccatgtaagtcagacgagacaagtcggagggtccaatttgttccttaggcaacaaaagccaaacccagctcgattcatgattagaaggactgaacttgccacactcagagcctgatgaaagaggaagccggcccatttccaggcataatattatttatagctcttctatacacaatgtccaacaatcaaccaaaaattacaagacatgttaaaaaaaaatacacctcatttataatcaccaaaaactggaaacagcctaaatgctgaatatgaaaatacaaactgtggtttattcatacaatggaatactgctcctcagtaaaaaagaacaaactactgacccacactacaa

SEQ ID NO: 83258 - DNA, 1123 bp, Homo sapiens
ctttttaaaatcttattttcattttttttgtagagacaaagtcttgctattttgcccaggctggtgttgaactccttgtctcaagggatacaccctcctcggcctcccaaagtgctgggattacaggcatgggccaccatgcctggcccttcctgtctttttaaaaaagagtacactgaatatcattcaggatctccacaccaccaactcaaccatctgtaagaacaaggaaaataacataaaagaaagaggcagggtggggggaatcattaaggattagaggagcctgcagaaaagcaragtacaggccccggccaaggtgggcagccacttgtccataaaagccaactgctaacatgtgtaacacagaaccaccagtgacagcaaaacttctatatttttaaagaagccattccagattttaggttaaatgtcatgtgttttttgtttttttagaggtggggtcttactttgttgcccagactggagtacagtggcatgatcatagttcactgcagcctcaatcttctggactcaagggatcctcctgcctcagcctccagagtagctaggaccacaagcatgcaccactatgcctaagttttttgttttttgtctttttttaatgtagagataggatctcactatgttgtccagactggtctcaaactcctggtctcaagcaattttcccaccttggcctccccaagtgctaggattacaggtgtgagccaccatgcccagcctcatgcttttatgtgatggaaaatgccatgtaagtcagacgagacaagtcggagggtccaatttgttccttaggcaacaaaagccaaacccagctcgattcatgattagaaggactgaacttgccacactcagagcctgatgaaagaggaagccggcccatttccaggcataatattatttatagctcttctatacacaatgtccaacaatcaaccaaaaattacaagacatgttaaaaaaaaatacacctcatttataatcaccaaaaactggaaacagcctaaatgctgaatatgaaaatacaaactgtggtttattcatacaatggaatactgctcctcagtaaaaaagaacaaactactgacccacactacaa

SEQ ID NO: 83259 - DNA, 1123 bp, Homo sapiens
ctttttaaaatcttattttcattttttttgtagagacaaagtcttgctattttgcccaggctggtgttgaactccttgtctcaagggatacaccctcctcggcctcccaaagtgctgggattacaggcatgggccaccatgcctggcccttcctgtctttttaaaaaagagtacactgaatatcattcaggatctccacaccaccaactcaaccatctgtaagaacaaggaaaataacataaaagaaagaggcagggtggggggaatcattaaggattagaggagcctgcagaaaagcagagtacaggccccggccaaggtgggcagccacttgtccataaaagccaactgctaacatgtgtaacacagaaccaccagtgacagmaaaacttctatatttttaaagaagccattccagattttaggttaaatgtcatgtgttttttgtttttttagaggtggggtcttactttgttgcccagactggagtacagtggcatgatcatagttcactgcagcctcaatcttctggactcaagggatcctcctgcctcagcctccagagtagctaggaccacaagcatgcaccactatgcctaagttttttgttttttgtctttttttaatgtagagataggatctcactatgttgtccagactggtctcaaactcctggtctcaagcaattttcccaccttggcctccccaagtgctaggattacaggtgtgagccaccatgcccagcctcatgcttttatgtgatggaaaatgccatgtaagtcagacgagacaagtcggagggtccaatttgttccttaggcaacaaaagccaaacccagctcgattcatgattagaaggactgaacttgccacactcagagcctgatgaaagaggaagccggcccatttccaggcataatattatttatagctcttctatacacaatgtccaacaatcaaccaaaaattacaagacatgttaaaaaaaaatacacctcatttataatcaccaaaaactggaaacagcctaaatgctgaatatgaaaatacaaactgtggtttattcatacaatggaatactgctcctcagtaaaaaagaacaaactactgacccacactacaa

SEQ ID NO: 83260 - DNA, 560 bp, Homo sapiens
atacccagctattttttgtgtttttagtagtgttggggtttcaccacgttggccaggctggtctcgaacttctgacctgaagtgatctgcctgcctcagcctcccaaaatgttgggattacaggtgtgagccaccacctgtaatcagacatraggagtccaaaaataactttagattttattttttttctttgttttaagtggaaatattttatccagctgtgtggacataaaaggctgtctcaatttatttatagttgggttgaggaagacgaacgttttgtatgaaagaaagctaaaggtttcccatcattcctaattctccaaaacgaaggaattggtgacttctaaattttattatctttaagataacttctatgatttgttttgttgaatcatagtttggtgtatctgaagtctttaaagtactattcccagggataataggtgtatttgcaaatggtatagataatatttgcaatctttgagaaatcatagttatcagaagaaagaaatattgcatcaccaaaaattctgtttgatatctaatcttttcacttt

SEQ ID NO: 83261 - DNA, 1785 bp, Homo sapiens
acatccaagtatgtctacatgatatagaaaaatccagaaaaggtagaaattttaggtacaagaaagaaaaaaatgggctgatgaaattaagacttgatttatatttagccacagcagctaaaaatagaagataaaattacagagaggaaaatgctctgatgaaacataatctgaaagtgtgacagctttttgcccttcaaatatatgcctacctgtaacctactaatatgctagatgaaacaccaagaatttcagtaaataraggtagctgcggtgctaaatgctatgcaaaaaagcttggtgaatccagactggtaatgtaagacaataaagcttgtaaaaataaaaataaaacaatatctttttaagcatgagtaacatgaggtaaagtttttttaaatagaaggtaaatagtatcagatataaaagatatacatttgattacattaaaattaagaacttttgtttgctaaaggaagacctacctaagagagtgaataaaggaattcataagtactcttaagtctttttgaaaaaaatcatgctttgttttgtaacactcatatctaatgctgtgtaaaaatctgtaaaaaaatctaacgttcataaaaaagacaaagatcaaaatgaaaataggaaaggagggaattcacacacatgaaactaaatacaatttcaaggtccaataaacacataaacttcttttcaataaaattattttttagcaaccaacgtgatatacctccacgcaagtacacaattggttaacattcaaaagaaagaatattctaactttagatataaatatggaaaaacttaatgtaggtatggaataactgaactctcatacattcatggtaaaattttaaattcgtataaacaaccataaaaacttttgtcagaaaaagctttttcagtgaacagtctcatgacctgtgacccacaattttgcatcagtgaacacacaacagatgtcaatgcgatgcatgtgcccatcaaaagacacagacacacatactcttagaagctttatttccagtaccgcaaaactggatccaattctaacggcatttatcaactgagtagagaaataagttcgatttctttccttcttctacaatagttttgcctttgtagaattcttcttttaatttgttttaaattttggctttgaaacttctatccttttttttaattgacaagtgaaaattgtagatatttatggtgcacaacataatgcattgattccacatgtacactttgtggaatggctaaaacaaactatttaacatatattacctcctatgattatcattttcatggtaagaacacataacattttcatattatttaaaatttgaattttatttttgaaaaatagtggtgtaactgaatttatactgttttaagcaattttttcttattttcaatactatttcctactttccattgttctcccttggcaaagaaataataaaaaagggtgagagaagaaaaaagaagaagaaggaaaacataggagggagagagggaggaaaaaaagaaggaaggaaggaaggaacgaaggaaggaaggaacgaaggaaggaaggaacgaaggaaggaagggaggaaggaaggaacgaaggaaggaaggaacgaaggaaggaagggaggaaggaaggaacgaaggaaggaaggaacgaaggaaggaaggaacgaaggaaggaaggaacgaaggaaggaagggaggaaggaaggaacgaaggaaggaaggaacgaaggaaggaagggaggaaggaaggaa

SEQ ID NO: 83262 - DNA, 1785 bp, Homo sapiens
acatccaagtatgtctacatgatatagaaaaatccagaaaaggtagaaattttaggtacaagaaagaaaaaaatgggctgatgaaattaagacttgatttatatttagccacagcagctaaaaatagaagataaaattacagagaggaaaatgctctgatgaaacataatctgaaagtgtgacagctttttgcccttcaaatatatgcctacctgtaacctactaatatgctagatgaaacaccaagaatttcagtaaatagaggtagctgcggtgctaaatrctatgcaaaaaagcttggtgaatccagactggtaatgtaagacaataaagcttgtaaaaataaaaataaaacaatatctttttaagcatgagtaacatgaggtaaagtttttttaaatagaaggtaaatagtatcagatataaaagatatacatttgattacattaaaattaagaacttttgtttgctaaaggaagacctacctaagagagtgaataaaggaattcataagtactcttaagtctttttgaaaaaaatcatgctttgttttgtaacactcatatctaatgctgtgtaaaaatctgtaaaaaaatctaacgttcataaaaaagacaaagatcaaaatgaaaataggaaaggagggaattcacacacatgaaactaaatacaatttcaaggtccaataaacacataaacttcttttcaataaaattattttttagcaaccaacgtgatatacctccacgcaagtacacaattggttaacattcaaaagaaagaatattctaactttagatataaatatggaaaaacttaatgtaggtatggaataactgaactctcatacattcatggtaaaattttaaattcgtataaacaaccataaaaacttttgtcagaaaaagctttttcagtgaacagtctcatgacctgtgacccacaattttgcatcagtgaacacacaacagatgtcaatgcgatgcatgtgcccatcaaaagacacagacacacatactcttagaagctttatttccagtaccgcaaaactggatccaattctaacggcatttatcaactgagtagagaaataagttcgatttctttccttcttctacaatagttttgcctttgtagaattcttcttttaatttgttttaaattttggctttgaaacttctatccttttttttaattgacaagtgaaaattgtagatatttatggtgcacaacataatgcattgattccacatgtacactttgtggaatggctaaaacaaactatttaacatatattacctcctatgattatcattttcatggtaagaacacataacattttcatattatttaaaatttgaattttatttttgaaaaatagtggtgtaactgaatttatactgttttaagcaattttttcttattttcaatactatttcctactttccattgttctcccttggcaaagaaataataaaaaagggtgagagaagaaaaaagaagaagaaggaaaacataggagggagagagggaggaaaaaaagaaggaaggaaggaaggaacgaaggaaggaaggaacgaaggaaggaaggaacgaaggaaggaagggaggaaggaaggaacgaaggaaggaaggaacgaaggaaggaagggaggaaggaaggaacgaaggaaggaaggaacgaaggaaggaaggaacgaaggaaggaaggaacgaaggaaggaagggaggaaggaaggaacgaaggaaggaaggaacgaaggaaggaagggaggaaggaaggaa

SEQ ID NO: 83263 - DNA, 506 bp, Homo sapiens
gtttgaagggagcagaaaggatattctgacttccatattctggattccctaatattgaaccctgcaamaatctggttcttagaaaacaatgtacttgacattagcttattatccacaaataacatttcttattatacatttagactatgtcttactcagttcaggctgctatcacagagtgtcatagactggatggcttataaacaacaaaaatttatttctcccagctttggagtctggagttccaagatcagggtgccagcatggttgggttctggtgaggactctcttctgggttgggcaggcttccaatttattggctttttattggttcattgtgctgtggtaagatagagagttatctggggtccctgttataaagggcattaattccattcatgagggctccattctcatgacctaattacatttcaaaggcctcacatcccaataccatcacattgatggttaggatttcagcatttaagtttagtggggggacaaaa

SEQ ID NO: 83264 - DNA, 767 bp, Homo sapiens
cctgagatctgagtagtgtgggctctctgtctcctcacctagaaagcctgctcagaccctgctacagtcatggccttccccataggagaagaattcacactgcccacatgacatacatgctcctcttagaaacctcgctgcagatgtttaggatcctggacaccccctgcccagtcagcttctaagatctgtgtggaggtggccaagggacagctgtttttcctaagggtgatgatggtgggtggtttggagcttgattgggtgggttgggttgtgtactgacttgcacttgaggcccctcatggcacagaatgggttatggggtgggaacagaaygggtgggcaggacaggggctgggggctaggcactaagggccgatcactccacacctccatatttaagtatgaaactccacaaggtcttagaattctacattttgattttccagctccaagctcttaaagaacctaaggaaacaatgctgtcaggagtgaggaccttgggcctctgtgaagatagaggttgcctgtctgtgatttagtggggtgacaaaaagcttcacgacacatggaattaggaacttcatctagattttcgctctgagctatgggaatattagagacagacccacttaaatgtttctctccttcctaggttctactgtataaagtccaaactctcagtagttttcagggtccatcactgcctaacctcaacctctttacactcttgcaatatcctttcatgcaccttgtgtctcatacta

SEQ ID NO: 83265 - DNA, 767 bp, Homo sapiens
cctgagatctgagtagtgtgggctctctgtctcctcacctagaaagcctgctcagaccctgctacagtcatggccttccccataggagaagaattcacactgcccacatgacatacatgctcctcttagaaacctcgctgcagatgtttaggatcctggacaccccctgcccagtcagcttctaagatctgtgtggaggtggccaagggacagctgtttttcctaagggtgatgatggtgggtggtttggagcttgattgggtgggttgggttgtgtactgacttgcacttgaggcccctcatggcacagaatgggttatggggtgggaacagaatgggtgggcaggacaggggctgggggctaggcactaagggccratcactccacacctccatatttaagtatgaaactccacaaggtcttagaattctacattttgattttccagctccaagctcttaaagaacctaaggaaacaatgctgtcaggagtgaggaccttgggcctctgtgaagatagaggttgcctgtctgtgatttagtggggtgacaaaaagcttcacgacacatggaattaggaacttcatctagattttcgctctgagctatgggaatattagagacagacccacttaaatgtttctctccttcctaggttctactgtataaagtccaaactctcagtagttttcagggtccatcactgcctaacctcaacctctttacactcttgcaatatcctttcatgcaccttgtgtctcatacta

SEQ ID NO: 83266 - DNA, 767 bp, Homo sapiens
cctgagatctgagtagtgtgggctctctgtctcctcacctagaaagcctgctcagaccctgctacagtcatggccttccccataggagaagaattcacactgcccacatgacatacatgctcctcttagaaacctcgctgcagatgtttaggatcctggacaccccctgcccagtcagcttctaagatctgtgtggaggtggccaagggacagctgtttttcctaagggtgatgatggtgggtggtttggagcttgattgggtgggttgggttgtgtactgacttgcacttgaggcccctcatggcacagaatgggttatggggtgggaacagaatgggtgggcaggacaggggctgggggctaggcactaagggccgatcactccacacctccatatttaagtatgaaactccacaaggtcttagaattctacattttgattttccagctccaagctcttaaagaacctaaggaaacaatgctgtcaggagtgaggaccttgggcctctgtgaagatagagrttgcctgtctgtgatttagtggggtgacaaaaagcttcacgacacatggaattaggaacttcatctagattttcgctctgagctatgggaatattagagacagacccacttaaatgtttctctccttcctaggttctactgtataaagtccaaactctcagtagttttcagggtccatcactgcctaacctcaacctctttacactcttgcaatatcctttcatgcaccttgtgtctcatacta

SEQ ID NO: 83267 - DNA, 1277 bp, Homo sapiens
ttcatatttattgagtatttactatgggccagctatgggccaggcactgcactaaatactttaaatgcactatcttatatagtcctcattgactattaatatccacattctactggtgaagaaactgaggtaccgagaagtttaattaacttgtctgagtttgtataaggtcagaaatggaggagtgggatttgaacccagattctagagcccagccttctagccactatacaaaaaaatcacagttagcttatttcatctctagttccaggtccagactggtatggctagttgttcactgggtgtgtcatttaggttctctgggaagagattctgagacagaattagtagtgcaagtggtttatttgagagtaaagacaaatggggaaggaagcaaaattgggcagggagagccttctgaccacacaatgcagatmtgacaaaatctcacccaacccaatggcaacctctggagggaagattgcccattaaaggagtctcacagtgggcagaaatgaccaggcctagtacccctgctatgctcaatcactggctgggggctccccgaaagagcatggctgtggcttaaaagttgaggaagatcctgaaagtcctgtagctggatgttgtcagctaactgcacttcttgcagctgaatagcaagttctttcttgaaggaagatctgagcagtgtacctccctggctgccaaggtgatatctctacaaaatgtatcataggaacttagcggtaaggtgagctaggtgcctagggtgaagaatttaaggaagtacctatgctttgggtcattcaagtgctgagtgggcacctcagagtaagtgtctccttaagttttgcactctcaggcattttgcctgtctcacccagtccccagaacctcccattcaacacacttagaattgatctcatcatagtccctccaaatgtactctttcagtcttatctctcaggaaaatccaagaactgctcagtgcatcctcccactagtctctttgctcccatccaattcagtctctccactgccacagcatcatctatgttaaataccactctgatttataattccaatgcataatactcttcattggttccctgtagcctaaagaatgaattccaaggttctttctgtggcatgtaaagaccctgtgtgatctgactgcatggacaatctcgactgagggctgaagcaatttcaatgcttatatgtaaggaacattagaattgtttatttttaaatatagaataggtcatatttaa

SEQ ID NO: 83268 - DNA, 652 bp, Homo sapiens
aaatttctaacacaagatctagaatgtaataagtggtagctattattattttttgaaatctgaatttaaaaaattttaagtttatttttaatttttgtgggtgcatagtaggtgtatatacttaggaggtaatttgtgtgctacatatacactatactatagatagtgtacatatagtgtgtatgtgtatatatatatactatatatagtgtagtgtatatgtagcacacagttaatattggattttttggagtattgtttaaaatttactttgattattgaacatatacctccttacagagtcttgtgaagatagggatcatgttcccaaccaatttagaaatctcactttcagaactacctcttcaaaaacaaaaatgtggttggcctgggatccactctctccaagamcttgcttatcatacgtattttctattatctttgtgggccttctagaaaatataaaaagagatgcaggtaattccaggaccataaacaattcttaacaattggctccagatggactgttttgggtttggctaggcttatcacttgatagaaacataggtgcgtagagaaaccaagaagagtctgggtgcagtggtgcatgcatgtagtcccactactcagcaggctgaggtgggagaatctc

SEQ ID NO: 83269 - DNA, 1284 bp, Homo sapiens
ctgactgttcttcatatcatgttggcctttaatattggctttctggagtaaaaatcagatatagtwtagaaaaaattccaattataaagtacagttaatgtttatgaatgcttaactttgttaaaatgagttagtcttcttaataaagtgaatattgaaaacaatttcttattaacatgatgtgggtttgatgaaaaaagcactgcttccctatatagtagcaccttgaaaaacaattgtctaacctatttactcgtctactttgtgtaggaattgtaccatataaattattcctaccaaggatgtactgttttatgtgacttcattgttagtcttctactttagatctcttctaccactaatttagcaaaactgcatttaaatcagtccccaatgagaagacctggagttcacatttttgcttttaatagacacattagtcttcctacatggtaagatttcataaatggcttcttgttcttttcttgggagatagctattatatatcactcagtgcatttctggtcttcccttagggaatttacaggggttgtcattgctttggcttcagcagaaacacaagatgttttaaattgaatcttgtatttgtgcttgggatcgataaaagtctttgtgtacattttaacaagagtcctgtaaaggttatattggctaaactaatttgaatcaccaaatattactttaatacctagttatttgcactttgctttctcctcagccccagtaaggagatcaggggagggattagaggaagggatgaggtgagactattggaaggattatttacatgttggcactggggcataaaggccatgggagtccatgagtcaggtattatccttccaggtgagaagctatggtttcagttaaccttttgtcttattttgaaacattatataatgtaattcgtgttcatattagaaaactaggtaatatgaattaataaaaataaaaaaaaatccataatttcaccatccagagatatttactcttaaaattttggttataaccttttatacttttatatttatgtttgcctttgttgaaaaacaatacatcctttatcaactgcttaactgtccttgacttatgctacgtaatacagaaaagaagaatggcactaccatcccagatcatcaactcccccaagtgactggtctgagataaattagaagaacacatagaagccccagagagccttcagaagagaaaataatatgcataagctgcctcagtgaagtctttagttgaaacaaaacaaaa

SEQ ID NO: 83270 - DNA, 1284 bp, Homo sapiens
ctgactgttcttcatatcatgttggcctttaatattggctttctggagtaaaaatcagatatagtttagaaaaaattccaattataaagtacagttaatgtttrtgaatgcttaactttgttaaaatgagttagtcttcttaataaagtgaatattgaaaacaatttcttattaacatgatgtgggtttgatgaaaaaagcactgcttccctatatagtagcaccttgaaaaacaattgtctaacctatttactcgtctactttgtgtaggaattgtaccatataaattattcctaccaaggatgtactgttttatgtgacttcattgttagtcttctactttagatctcttctaccactaatttagcaaaactgcatttaaatcagtccccaatgagaagacctggagttcacatttttgcttttaatagacacattagtcttcctacatggtaagatttcataaatggcttcttgttcttttcttgggagatagctattatatatcactcagtgcatttctggtcttcccttagggaatttacaggggttgtcattgctttggcttcagcagaaacacaagatgttttaaattgaatcttgtatttgtgcttgggatcgataaaagtctttgtgtacattttaacaagagtcctgtaaaggttatattggctaaactaatttgaatcaccaaatattactttaatacctagttatttgcactttgctttctcctcagccccagtaaggagatcaggggagggattagaggaagggatgaggtgagactattggaaggattatttacatgttggcactggggcataaaggccatgggagtccatgagtcaggtattatccttccaggtgagaagctatggtttcagttaaccttttgtcttattttgaaacattatataatgtaattcgtgttcatattagaaaactaggtaatatgaattaataaaaataaaaaaaaatccataatttcaccatccagagatatttactcttaaaattttggttataaccttttatacttttatatttatgtttgcctttgttgaaaaacaatacatcctttatcaactgcttaactgtccttgacttatgctacgtaatacagaaaagaagaatggcactaccatcccagatcatcaactcccccaagtgactggtctgagataaattagaagaacacatagaagccccagagagccttcagaagagaaaataatatgcataagctgcctcagtgaagtctttagttgaaacaaaacaaaa

SEQ ID NO: 83271 - DNA, 2430 bp, Homo sapiens
acactgtactactgtaataatttcatagacacctcctgttgctattgtggtaagctcaagtgttttgagtatccgcttaaaatgccatgtaatgctactcatcaccacacgacctgtgctctctccagtaaattgtgtatcacaataaaaagtgatctcacagtgttaaaaaaaaaaaaaaaatccaagattggcagtacctcctggttttcagcagatgcaaactcaaatttctctccagagaaataataaaatttatgccctcagttcttccacagaacagtcagtcatacatgagctcacaatcaaaacccaccaagcacacaagaaaataaaccttcaggaataagaatgaatagattttttcagtctccaaaagcttccaaagtgggagatatcagacactaaatacaaaatacctgcgtataaaaatgctttaaaaattagtataaaaaatgagcacaggacaaaagactataaaaaatgaccaaggaaatttgaaaatagaactctaagtaataaaaaacatacttttgaaattaaaagctcagttgaggagctatatagtatatatgatacagctgaaactaatgacttataattgatcaattgtcattacagaatgcaacttggagatagtgatgaaaaacataaaaaggacataatggacagattgagattacatagaatatgtttagttggaatccctaagaaagacaatgaagaggatgtagaagtaatttttcaagaaataacagttgagagttttccataattgatcagagacattgtataagttatcttttgctgcataaaaaaaaagtcctgggaaggaaggtctaagatgcaagaaggaatgtttagcataacaagtggaaacagaaatcaaaatccaaaccgatattgtagtaacaaaaacatgaaaataaagtccagctttaacaacaaaaatgaaagaactctataacagacaatgtttgcatgtgaaccagtcaggaaaagagtgaccacactgtgagtatttttagataactgtatgcacgtgcatgtctgtgtatgtgtgtgttttatttttgtcagaggcttgacatactaataaacctcagactttgttggattgttaaacatgcatggtaagatttcaagaaaaaacattaaaatagtagaatatactatttccccctcaaactcatggagggggaaaattataaaagaaaaacaaactaagcagtttaaaaagaggtagaaggaaaaaatagcatagacaaagtagaagctatacacatataaactctaagatggttgaaagagtttcaggtattatcagtaataaaataatataaataaaattaacttgctggttacaaaacagaagttgtctaattgcgacagaaaaattaatctattaatatatcttgttaacaagatacatacctaaaagataaggctacagaaagattgaaataaaagtatggaataagatatgtcatgtaagtactaaccaagagaaagctgaggtagctatattaattcagtaaaaaaagagagagagactttaagacaaagcatttacagcaaattatcttctagacagacaaagcctcacctaaggaaaaattgctggaataaaattaacaaatttggtaggcaggacactagtgataatgtagaaagaagtttcaaacacacagtgagggagaattcagaggaagcagaacccgagaagtactacaacagcaaaaatactacatgtaaaggtaagagcacttactttgaagacaagatgtctacagcgctaggaaaaacagggctggaaatggaaaaacttcttctttcaaaactagggtttgccctgagactgggaaatattaacagagaarccaagtattaagtgtctcacattaacaacacaagaaggagtctttaatctctgaagggatgaaagctactttgggcaatttctacctcctcctcagaaatcttctcctcatagcccaagaaaacccatctcacttaaacacgatggggggaaaaaggaatatattctataatttcgagcaaaatcattgccaaaaaaacagaaaaataaacttcaaaatatcttaacagacaataagaacaaaccagaaaaatgtaatatttgaaaatgagctaaaagaaataaaaaaaatagttttggaaaaatgtcacaagtcagaaatgagatgataaataaatggtaaaacgaggtgaataagatttaaaatttgtcagaactcagaaagaattggaaaataaataaacgaaaggaacagaagaaaatagatcccctaaaaattcagggagcaaaatatgcaataaaaaggaaaatgtaaaataaaacaaacagaattagaaaaagcaattttaaaagaacctgtgaaaaagaaaatataggcaaaaacatattcc

SEQ ID NO: 83272 - DNA, 842 bp, Homo sapiens
ctggagtcaaaggagatcattttggagctttaaaatttgagtgccctgctggatttcagacttgcatgggccctgtaacccctttgttttggccaatttctcccatttggaatggctttatttacccaatacctgtacccccattgtatctagcttgctttcgttttacaggttcataggtggaagggagttgcctcagatgagactttggactatgaacttttgggttaatgctgaaatgagttaagaccttgggggactgttgggaaggcatgattggttttgaaatgtgaggacatgagatttggaggaatcaggagcagaatgatatggttggactgtgtcaccacccaaatcttaacttgaattctatctcccagaattcccatgtgttgtgggagggacccagggagaggtaattgaattatgggggmcagtctttcccgtgctattctcatgatagtgaataagtctcacgagatctgatgaatttatcaggggtttctgcttttgcttcttcctcatttttctcttgctgccaccatgtaagaagtgcctttcacctcctgccatgattctgagacctccccagccatgtggaactgtaagtccaattaaacctctttttgttcccagtttcaggtatgtctttatcagcagcaagaaaacgaactaatacacctgggcaacatagtgagaccccatctctaaatatttcaaccaactaaccaaacaaacaaaacaaccaagaagaggaaaaaaccagtatggctattctgactcagttttggctttaaattcaggattctttttgggttcagaaacatccatataagaagcaa

SEQ ID NO: 83273 - DNA, 842 bp, Homo sapiens
ctggagtcaaaggagatcattttggagctttaaaatttgagtgccctgctggatttcagacttgcatgggccctgtaacccctttgttttggccaatttctcccatttggaatggctttatttacccaatacctgtacccccattgtatctagcttgctttcgttttacaggttcataggtggaagggagttgcctcagatgagactttggactatgaacttttgggttaatgctgaaatgagttaagaccttgggggactgttgggaaggcatgattggttttgaaatgtgaggacatgagatttggaggaatcaggagcagaatgatatggttggactgtgtcaccacccaaatcttaacttgaattctatctcccagaattcccatgtgttgtgggagggacccagggagaggtaattgaattatgggggacagtctttcccgtgctattctcatgatagtgaataagtctcacgagatctgatgaatttatcaggggtttctgcttttgcttcttcctcatttttctcttgctgycaccatgtaagaagtgcctttcacctcctgccatgattctgagacctccccagccatgtggaactgtaagtccaattaaacctctttttgttcccagtttcaggtatgtctttatcagcagcaagaaaacgaactaatacacctgggcaacatagtgagaccccatctctaaatatttcaaccaactaaccaaacaaacaaaacaaccaagaagaggaaaaaaccagtatggctattctgactcagttttggctttaaattcaggattctttttgggttcagaaacatccatataagaagcaa

SEQ ID NO: 83274 - DNA, 842 bp, Homo sapiens
ctggagtcaaaggagatcattttggagctttaaaatttgagtgccctgctggatttcagacttgcatgggccctgtaacccctttgttttggccaatttctcccatttggaatggctttatttacccaatacctgtacccccattgtatctagcttgctttcgttttacaggttcataggtggaagggagttgcctcagatgagactttggactatgaacttttgggttaatgctgaaatgagttaagaccttgggggactgttgggaaggcatgattggttttgaaatgtgaggacatgagatttggaggaatcaggagcagaatgatatggttggactgtgtcaccacccaaatcttaacttgaattctatctcccagaattcccatgtgttgtgggagggacccagggagaggtaattgaattatgggggacagtctttcccgtgctattctcatgatagtgaataagtctcacgagatctgatgaatttatcaggggtttctgcttttgcttcttcctcatttttctcttgctgcyaccatgtaagaagtgcctttcacctcctgccatgattctgagacctccccagccatgtggaactgtaagtccaattaaacctctttttgttcccagtttcaggtatgtctttatcagcagcaagaaaacgaactaatacacctgggcaacatagtgagaccccatctctaaatatttcaaccaactaaccaaacaaacaaaacaaccaagaagaggaaaaaaccagtatggctattctgactcagttttggctttaaattcaggattctttttgggttcagaaacatccatataagaagcaa

SEQ ID NO: 83275 - DNA, 842 bp, Homo sapiens
ctggagtcaaaggagatcattttggagctttaaaatttgagtgccctgctggatttcagacttgcatgggccctgtaacccctttgttttggccaatttctcccatttggaatggctttatttacccaatacctgtacccccattgtatctagcttgctttcgttttacaggttcataggtggaagggagttgcctcagatgagactttggactatgaacttttgggttaatgctgaaatgagttaagaccttgggggactgttgggaaggcatgattggttttgaaatgtgaggacatgagatttggaggaatcaggagcagaatgatatggttggactgtgtcaccacccaaatcttaacttgaattctatctcccagaattcccatgtgttgtgggagggacccagggagaggtaattgaattatgggggacagtctttcccgtgctattctcatgatagtgaataagtctcacgagatctgatgaatttatcaggggtttctgcttttgcttcttcctcatttttctcttgctgccrccatgtaagaagtgcctttcacctcctgccatgattctgagacctccccagccatgtggaactgtaagtccaattaaacctctttttgttcccagtttcaggtatgtctttatcagcagcaagaaaacgaactaatacacctgggcaacatagtgagaccccatctctaaatatttcaaccaactaaccaaacaaacaaaacaaccaagaagaggaaaaaaccagtatggctattctgactcagttttggctttaaattcaggattctttttgggttcagaaacatccatataagaagcaa

SEQ ID NO: 83276 - DNA, 723 bp, Homo sapiens
agatgatccagatagtaattgcattattctgctcaggctgacttaacatagtaccatagactgggtgatgacagaaatttattttctcctagttctgaaaattsgaagctctagatcagggtgctagcatggttggtttctggtaagagttctctttcctgcttctatatagctgtcttctcactgtataattacatggcagagaaaaagaccaagtgtctcttcctacaaggacactaattccatcatgaaggtcgtatcctcatgacctcatctaaacttaatcactgcccacaggccccatctccatccaacattatattggaagttagggcttcaacacataaattttgaggagacccaattcagtttatctcagtaattaaagaagaaaaaaattaaaatcagtaataacaataaattcaagaaaattggtaagtttaatcctaaaataccttaaaaatattattgaaaataatgaatacctaataaatacaagcattttagttctagtataaatatgataaatacctaattaccttaagactacattgcatttgctgacgttgatataattatgtatttagccaaacaaaaggtttaattcaccttcaaagaatatcctgaaaatttattcaaaagaaaactctcaaagtcatgggctatttattaatcctaaattttctgtgtaattcaagcgattttcaaacaattcatttactt

SEQ ID NO: 83277 - DNA, 723 bp, Homo sapiens
agatgatccagatagtaattgcattattctgctcaggctgacttaacatagtaccatagactgggtgatgacagaaatttattttctcctagttctgaaaattggaagctctagatcagggtgctagcayggttggtttctggtaagagttctctttcctgcttctatatagctgtcttctcactgtataattacatggcagagaaaaagaccaagtgtctcttcctacaaggacactaattccatcatgaaggtcgtatcctcatgacctcatctaaacttaatcactgcccacaggccccatctccatccaacattatattggaagttagggcttcaacacataaattttgaggagacccaattcagtttatctcagtaattaaagaagaaaaaaattaaaatcagtaataacaataaattcaagaaaattggtaagtttaatcctaaaataccttaaaaatattattgaaaataatgaatacctaataaatacaagcattttagttctagtataaatatgataaatacctaattaccttaagactacattgcatttgctgacgttgatataattatgtatttagccaaacaaaaggtttaattcaccttcaaagaatatcctgaaaatttattcaaaagaaaactctcaaagtcatgggctatttattaatcctaaattttctgtgtaattcaagcgattttcaaacaattcatttactt

SEQ ID NO: 83278 - DNA, 723 bp, Homo sapiens
agatgatccagatagtaattgcattattctgctcaggctgacttaacatagtaccatagactgggtgatgacagaaatttattttctcctagttctgaaaattggaagctctagatcagggtgctagcatggttggtttctggtaagagttctctttcctgcttctatatagctgtcttctcactgtataattacatggcagagaaaaagaccaagtgtctcttcctacaaggacactaattccatcatgaaggtcgtatcctcaygacctcatctaaacttaatcactgcccacaggccccatctccatccaacattatattggaagttagggcttcaacacataaattttgaggagacccaattcagtttatctcagtaattaaagaagaaaaaaattaaaatcagtaataacaataaattcaagaaaattggtaagtttaatcctaaaataccttaaaaatattattgaaaataatgaatacctaataaatacaagcattttagttctagtataaatatgataaatacctaattaccttaagactacattgcatttgctgacgttgatataattatgtatttagccaaacaaaaggtttaattcaccttcaaagaatatcctgaaaatttattcaaaagaaaactctcaaagtcatgggctatttattaatcctaaattttctgtgtaattcaagcgattttcaaacaattcatttactt

SEQ ID NO: 83279 - DNA, 654 bp, Homo sapiens
tgccatttgcccaacatagaagtctggacacattctttcatcattgggctttcaggttctgccactttgtacaacttcttcacgagacttccatgtagacgtgatggccatggcactcctgggttgctcagtgtacaacctgcacagctatgtgaggtgcactggtcttctcctccttcaccaccaacatttgaacagtcaccaaatatatttagctttgcttctggaatatctcttgcatatatttatttttatcattcagttcctagtagagcctgtgatcatctttttcctggaytgtggattcagatctctgacttgtctcctgcctcctgtgttatgcctccagtctctatagttggagtgacgtttataaacacgattatgttttttaaactcttaaatacgcccctccacactgatcgtagatgaacaaaccttcaggctttcaaggcctccagatttggccccacttcctcattctcagcactcttcctccagggtccacacttgctgatggcagtcatttgtcccaagggcaccaatgatgtgtctcacctgcaggcctgtgccatgtcctctgcccagcacagtcttcccctgccctcatccttcacccatggtctgttctcagcttaaatatccctttattag

SEQ ID NO: 83280 - DNA, 1162 bp, Homo sapiens
tgcatgaagatccacagagagaaggtgatcacctgcaggccaaggagagaggtctggagcagatcctcccctcattgccctcaggaggagccaaccctgctggcaccttgattttgaacttctagcctccagaactgtgasataatatattattgtcattaagccactcagtttgcaacactttgcttcagtaaactaacacagaatgcaatatattctaatgatatttgtgtgtttaattctaccaagaagtattgaaggtgacttatcatgttttcctcatttatgggcgacatccccaaagctcataagtaaagggcttgaccaaggtcaagtagagccacaaattgtctccatgttctctttctaaatctgggttccccagaaacaattctccacctaaatccttagaaggatgtcacaaatggtaaagtcatttattcctagcaaaccaaacctttgctgaggatgcagactttgttacccattaatagcagaaaggatgctagatcaattattaaaagtaccagccgggcgcagtggctcaagcctgtaatcccagcactttgggaggctgaggtgggtggatcacgaggtcaagagattgagaccatgaccatactggccaacatggtgaaaccccgtctctatgaaaaatacaaaaattagctgggcatggtggtgtgcacctgtagtctcagctacttgggaggctgaggcaggagaatcacttgaacccgggaggcagaggttgcagtgagccaagattgagccactgcactccagcctggcaacacagcaagactctgtccaaaaaaaaaaaaaaaagtaccatgaaaaatttaaggaggaatttgtgcttgctgagttttctccaaaagaagaaaatcatcatttaacatgaaaagccgtaagcatccctgagtagtggcaggtatcagtggattgatactcagggtggcaggaggggaaaagacataatagcaaaatacacaaaataaataaccaggcaggggaggcaactgacctcagtattgagaccatgttattccccctgttagcttccttcaaagttcttaaaatccttcttatggcccttaggatcaaatcacactccagccctgacctccaaggcctgccctccagctcgtctcatctcatt

SEQ ID NO: 83281 - DNA, 1162 bp, Homo sapiens
tgcatgaagatccacagagagaaggtgatcacctgcaggccaaggagagaggtctggagcagatcctcccctcattgccctcaggaggagccaaccctgctggcaccttgattttgaacttctagcctccagaactgtgacataatatattattgtcattaagccactcagtttgcaacactttgcttcagtaaactaacacagaatgcaatatattctaatgatatttgtgtgtttaattctaccaagaagtattgaaggtgacttaycatgttttcctcatttatgggcgacatccccaaagctcataagtaaagggcttgaccaaggtcaagtagagccacaaattgtctccatgttctctttctaaatctgggttccccagaaacaattctccacctaaatccttagaaggatgtcacaaatggtaaagtcatttattcctagcaaaccaaacctttgctgaggatgcagactttgttacccattaatagcagaaaggatgctagatcaattattaaaagtaccagccgggcgcagtggctcaagcctgtaatcccagcactttgggaggctgaggtgggtggatcacgaggtcaagagattgagaccatgaccatactggccaacatggtgaaaccccgtctctatgaaaaatacaaaaattagctgggcatggtggtgtgcacctgtagtctcagctacttgggaggctgaggcaggagaatcacttgaacccgggaggcagaggttgcagtgagccaagattgagccactgcactccagcctggcaacacagcaagactctgtccaaaaaaaaaaaaaaaagtaccatgaaaaatttaaggaggaatttgtgcttgctgagttttctccaaaagaagaaaatcatcatttaacatgaaaagccgtaagcatccctgagtagtggcaggtatcagtggattgatactcagggtggcaggaggggaaaagacataatagcaaaatacacaaaataaataaccaggcaggggaggcaactgacctcagtattgagaccatgttattccccctgttagcttccttcaaagttcttaaaatccttcttatggcccttaggatcaaatcacactccagccctgacctccaaggcctgccctccagctcgtctcatctcatt

SEQ ID NO: 83282 - DNA, 916 bp, Homo sapiens
aaaaacatgaaagtagcatatgcctcaaggcattcttagtggatttttattatttaattcaatttaatttaatttttttttgagatggagtctcgctctgtcacccaggctggagtgcaatggcgcaatctcggctcagtgcaagctccgcctcctgggttcatgccattctcctgcctcagcctcccgagtagctgggagtacaggtgcccgccaccacgcccggctaattttttgtatttttagtagagacggggtttcaccgtgttagccaggatggtctcgatctcctgacctcgtgatccacccacctctgcctcccaaagtgctgggattacaggcktgagccactgcgcccagccaaatgaaaataaaaggaacacatactttataggattgctgtgaatagaaaatggaaagtacttagcaaaatgcctgccatataaaagtgccaagtaaatgttagccattgttactgctaagaaagtggctcagagaggaacttacctgtcacccttctccctggtgtgctaacttcaccccctgcacagctctttgatgttggctttggcagaagagggtgagaggacccagaagagacagggaagtggcaagagggcccagagagaagactagaagaccttagcaataaggaaggagaaaatggggcgaggcgggtggtgggaagcagatgagcatataactaatgacattcactgaattcattgaaaggatcttttctttttttaatttcttttttatttaaaaagctttttcacttcatactggatacccctgatgtggcataatctaccttgcacaggaaaagcaggagaagaataggaaggaagaatagagggtgggagagaggaaggacacgtattgaagctgtctttcagtttattataattaatgc

SEQ ID NO: 83283 - DNA, 1043 bp, Homo sapiens
ggaatagtttctatctatagtaatcattcaaaaagtaatagtgactactctattatgaagttcagtactattagtatacatgagagctgagtgrttggaaggagatatttctggcccagtgttatcttaggatgatatcagagagtgaatcggtatttgatcttttcaggatgaataaatataacacagtgtttgttcttttttattttttatttttgtcatttgagacagaatctcactgtgtcacccaggctggagtgcagtggcatgatcacagctcactgcagcctcacctcccaagctcaaacaatcctcccacctccacctcccaggtagctgggactataggtgtaccatcacgcccagctaatttttatttttacttcagtagagacagggtcttgttatgttgtggagactactcctgaactcctggcctcaattgatcctcccaccttggcctcccaaagtgttgtgattataggtgtcagccactgcacccagctaattttttgtattttttgtagaggtggggttttgccatgtttcccaggctggtctcaaactcctgaactcaagaaatccacctgcctcagcctcccaaagtgctgggattataggcatgagccaccacacccagctatcacagtgttctttctgtatccatcaaagacttgaagggacattaaactctgcccttgagacctttctaggatacacagagtcaccaggcagacagagattccttgcgattctaaccacgtgacatttaaacctgtagatccaaaactactgccttgcacctttataaggaactgaaaacagacaggatttgttattcaccctgcctcctcatactaagagtacaaactaaagcaggggtggagtggtcatgattgggaaagtgacatggttgatgtggcacagcataatctcacgaagcagtccctgcatccctgcccagcttcttatttaaagaatgataggccatgccagtctgagggctgacccatttgcatagcaacccctgcccctcgcccctc

SEQ ID NO: 83284 - DNA, 675 bp, Homo sapiens
ctctgtcgcccaggctggagtgtagtggcgcaatcttggctcactgcaacctctgcctcccgggttcaagcgattctcctgcctcagcctcctgacctcgagtgatctgcctgcctcagtctcccgaagtgctgggattacaggcatgagccaccatgcctggcctataatttttttttaaccatgcctggcctataattattttttaaagtgaatcaggtagcctccttgaaccagaataggttcggagagactccctcaactatatatttatctatctatttattttctttattttatttattattattattttttgagttggagtctcactctgtcacccaggctggagtgcagtggcttgatcttggctcactgcaacctccacctcctggactcaagtgatcctcccacctcagcctccccagtagctgggattacaggcacccaccaccatgcccggctaawttttttttattttttgtagagacggagcttcaccatgttggccaggttcgtctcgaactcctgaccccaggtgatccgtctaccttggcctcccaaagtgctaggattacaggcatgagccaccatgcccagaatttacttaagatatattatttactggaaaaagtgcaagagtacaatcccatgtgtaatttcaaaggatatgca

SEQ ID NO: 83285 - DNA, 675 bp, Homo sapiens
ctctgtcgcccaggctggagtgtagtggcgcaatcttggctcactgcaacctctgcctcccgggttcaagcgattctcctgcctcagcctcctgacctcgagtgatctgcctgcctcagtctcccgaagtgctgggattacaggcatgagccaccatgcctggcctataatttttttttaaccatgcctggcctataattattttttaaagtgaatcaggtagcctccttgaaccagaataggttcggagagactccctcaactatatatttatctatctatttattttctttattttatttattattattattttttgagttggagtctcactctgtcacccaggctggagtgcagtggcttgatcttggctcactgcaacctccacctcctggactcaagtgatcctcccacctcagcctccccagtagctgggattacaggcacccaccaccatgcccggctaaattttttttattttttgtagagacggagcttcaccatgttggccaggytcgtctcgaactcctgaccccaggtgatccgtctaccttggcctcccaaagtgctaggattacaggcatgagccaccatgcccagaatttacttaagatatattatttactggaaaaagtgcaagagtacaatcccatgtgtaatttcaaaggatatgca

SEQ ID NO: 83286 - DNA, 559 bp, Homo sapiens
ccttccctgtgaataaagatcgtttgttggtttggattctaaacaattgttgttgtggttactactgtattttaagtatatacgtaagcttcaaattagcatatttttattttttataatttatcctttcacaaacattaaattctatgtaggagctatttgaagaattcctcagttacacacttagtctcctatgcacatgaagagtcaaatggatgttttcattttgagcggagtgttgaaatgttttgagcttcttttggtgcagttcatctctttatagattcttgagtctaaataatgaacgatggtatgacttttatttttgtgtgtgtgactagaatcaagggaatgcaaattgcacctataaagagacaacagtaaatcccatcagaatagcaagaatttaaaataactgataatgccaagtgttgacaaggatgcagaccactatttgtgatttacaatctcyttgggaaaaccgttctgcatctataaaatttgaacaagttcatactctatgacccagcaattacattcctaggcaaatatccaacat

SEQ ID NO: 83287 - DNA, 541 bp, Homo sapiens
aacatgaaccatatgaatagaataattaaagtcagaatttaagtgtcagtgaaggatatacaaaaattggtcctatatcaggtgaaaaaataattcaaatttaaaagaaagaaaatgtcacaggtttcatgtattcatcgctcagtcattatctctggttttaaccatctaagaatagacccaagtcgccaatatggagagcaaagcttcagctgtattattgaggccccagggagcatcactactaacaaatagggctcccttctaaggttaggttggagagtgcctgggaagtcagtccacagtggttgcctcctattgtttctttccatrtgtggaccttggacctgcctgtaggtcctgaattggatttgcaaatctgcatggcaggttgcagcctgcctagcaaaactgggtatttataaatgaaaagccacagagataagggtatcctgacttaacatctggaagtaaggctctgtgtgccgttctgggtgtgctgaaacaccggaagccaggaggaggcctgaatctttttagg

SEQ ID NO: 83288 - DNA, 541 bp, Homo sapiens
aacatgaaccatatgaatagaataattaaagtcagaatttaagtgtcagtgaaggatatacaaaaattggtcctatatcaggtgaaaaaataattcaaatttaaaagaaagaaaatgtcacaggtttcatgtattcatcgctcagtcattatctctggttttaaccatctaagaatagacccaagtcgccaatatggagagcaaagcttcagctgtattattgaggccccagggagcatcactactaacaaatagggctcccttctaaggttaggttggagagtgcctgggaagtcagtccacagtggttgcctcctattgtttctttccatatgtrgaccttggacctgcctgtaggtcctgaattggatttgcaaatctgcatggcaggttgcagcctgcctagcaaaactgggtatttataaatgaaaagccacagagataagggtatcctgacttaacatctggaagtaaggctctgtgtgccgttctgggtgtgctgaaacaccggaagccaggaggaggcctgaatctttttagg

SEQ ID NO: 83289 - DNA, 541 bp, Homo sapiens
aacatgaaccatatgaatagaataattaaagtcagaatttaagtgtcagtgaaggatatacaaaaattggtcctatatcaggtgaaaaaataattcaaatttaaaagaaagaaaatgtcacaggtttcatgtattcatcgctcagtcattatctctggttttaaccatctaagaatagacccaagtcgccaatatggagagcaaagcttcagctgtattattgaggccccagggagcatcactactaacaaatagggctcccttctaaggttaggttggagagtgcctgggaagtcagtccacagtggttgcctcctattgtttctttccatatgtggaccttggacctgcctgtaggtcctgaattggatttgcaaatctgcatggcaggttgcwgcctgcctagcaaaactgggtatttataaatgaaaagccacagagataagggtatcctgacttaacatctggaagtaaggctctgtgtgccgttctgggtgtgctgaaacaccggaagccaggaggaggcctgaatctttttagg

SEQ ID NO: 83290 - DNA, 1435 bp, Homo sapiens
gtatatatatagttcacttggaagaacttaagaaatcattttcaaaataagcttccacaaaaattttaccacagaccaggactgacaagggagccactgcctctgccataatcagaaaattgcaacagagctgtagactccagaatcactcgtctcttccaaggtcaagaagctgccaagttaggaaaccagcttgcaaatcaagatgccgcctaacaacttctagctccaatctcttgttgcctctattatgttccatgcaagcaaaataaatgttgtgccttgactctctccttatgtagctctcttctgaatcaaagtatcatgtgaatacacatagtaggtgaaacctaaattgtatgtggaacctttctgcaagagcatgggaaattccctattagcttttcagcttctatagtgtaagaagacactaaattgttatgagacacttaattgctgtgcttccaccacatagggatagaccattatttattgattgtttttgtaaacaccattacagaggaaacagtttttgggggtttttttgtttttagttttttgagacagagccttgttctgtcacccaggctggagtgcagtggcaggatcttggctcactgcaagctccgcctcccaggttcacgccatttccctgcctcagcctcctgagtagctgggactrcagggtacccgccaccacgcctggctaatttttttgtatttttagtagagacggggtttcaccgtgttagtcaggatggtctcgatctcctgactttgggatccgcctgccttggcctcccaaagtgctgagattacaggcgtgagccactgtgcccggcccagtttttggttttttagtaaagctctagaatttagaaattgtgagtttattagaggtctctgattaaaacgcagttataacacaaaatttttttaaggttaatctttcagtttattttttgcacaggcgacatcattgtccacgtggaaccacaaggatttatgaaaattctggggtgttttgccctacaactgaatatttggaaaaatatcctatgtatgacaatgttcttccacctcagagtcttaaagccaagcaagaaattcgagcatgccatggtaaaatggaaggaataactacatttaagtaaatatttagtaactatttgctttacttatttttctctcaactcttctggtgtcaataaagttttctagctatttaaattgaactgttcagttgatttaagttgaaccaatctaatagtcaagagactagttaagtcacaacttgaaaaaaaaaaacagaaaaatgagaattaagttaggttgacaaagtgtgagaagaaaaaagggatataaaaagttctatttttttttaacttcttaaaatatctcatatttatctactttccactgtcaccaccaccta

SEQ ID NO: 83291 - DNA, 1435 bp, Homo sapiens
gtatatatatagttcacttggaagaacttaagaaatcattttcaaaataagcttccacaaaaattttaccacagaccaggactgacaagggagccactgcctctgccataatcagaaaattgcaacagagctgtagactccagaatcactcgtctcttccaaggtcaagaagctgccaagttaggaaaccagcttgcaaatcaagatgccgcctaacaacttctagctccaatctcttgttgcctctattatgttccatgcaagcaaaataaatgttgtgccttgactctctccttatgtagctctcttctgaatcaaagtatcatgtgaatacacatagtaggtgaaacctaaattgtatgtggaacctttctgcaagagcatgggaaattccctattagcttttcagcttctatagtgtaagaagacactaaattgttatgagacacttaattgctgtgcttccaccacatagggatagaccattatttattgattgtttttgtaaacaccattacagaggaaacagtttttgggggtttttttgtttttagttttttgagacagagccttgttctgtcacccaggctggagtgcagtggcaggatcttggctcactgcaagctccgcctcccaggttcacgccatttccctgcctcagcctcctgagtagctgggactacagggtacccgccaccacgcctggctaatttttttgtatttttagtagagacggggtttcaccgtgttagtcaggatggtctcgatctcctgactttgggatccgcctgccttggcctcccaaagtgctgagattacaggcgtgagccactgtgcccggcccagtttttggttttttagtaaagctctagaatttagaaattgtgagtttattagaggtctctgattaaaacgcagttataacacaaaatttttttaaggttaatctttcagtttattttttgcacaggcgacatcattgtccacgtggaaccacaaggatttatgaaaattctggggtgttttgccctacaactgaatatttggaaaaatatcctatgtatgacaatgttcttccacctcagagtcttaaasccaagcaagaaattcgagcatgccatggtaaaatggaaggaataactacatttaagtaaatatttagtaactatttgctttacttatttttctctcaactcttctggtgtcaataaagttttctagctatttaaattgaactgttcagttgatttaagttgaaccaatctaatagtcaagagactagttaagtcacaacttgaaaaaaaaaaacagaaaaatgagaattaagttaggttgacaaagtgtgagaagaaaaaagggatataaaaagttctatttttttttaacttcttaaaatatctcatatttatctactttccactgtcaccaccaccta

SEQ ID NO: 83292 - DNA, 652 bp, Homo sapiens
gtaaaaaaaatgaggtagcagatatgtgaaaaataatataacacacatacatatatacacatacatattttatatgcatatattttacatatacgtctatgtattgagaaaaaggatgtgctaggtgctgagtttgaaacaatgtgcaggagaaagacctggagatctgtagatgcctgcaacaaggtggagtaataaaaggttcaatataacagcttgaacttaaagctgggtatttttaaggagaattgtcygaaaggtgccaagacagtatatgcttatctccaggcccagtagcagaagaatgcagaaggaaaaaaaaaaaaaaaccttcttaagagggcttcatgggaagccatttccttagagagagtcaagtttcatagagtgagaagaatgtttggtaaataggttaggaatgcagagttttgctgataacagacactgagtcccacacacttgtggggatgaaggataaatttggatgatgaagaatgacttggaagtcttagagatcatagagtaactgacaaaatcaaagataaagtggaaaatgggattagtcttgggtccttaagcaggatacattagggatacagcatgtgttggtaaaaagagaaagggggtcttgataaaagtgtttagagtctaa

SEQ ID NO: 83293 - DNA, 652 bp, Homo sapiens
gtaaaaaaaatgaggtagcagatatgtgaaaaataatataacacacatacatatatacacatacatattttatatgcatatattttacatatacgtctatgtattgagaaaaaggatgtgctaggtgctgagtttgaaacaatgtgcaggagaaagacctggagatctgtagatgcctgcaacaaggtggagtaataaaaggttcaatataacagcttgaacttaaagctgggtatttttaaggagaattgtctgaaaggtgccaagacagtatatgcttatctccaggcccagtagcagaagaatgcagaaggaaaaaaaaaaaaaaaccttcttaagagggcttcatgggaagccatttccttagagagagtcaagtttcatagagtgagaagaatgtttggtaaataggttaggaatgcagagttttgctgataacagacactgagtcccacacacttgtggggatgaaggataaatttggatgatgaagaatgacttggaagtcttagagatcatagagtaactgacaaaatcaaagataaagtggaaaatgggattagtctygggtccttaagcaggatacattagggatacagcatgtgttggtaaaaagagaaagggggtcttgataaaagtgtttagagtctaa

SEQ ID NO: 83294 - DNA, 1171 bp, Homo sapiens
attattgcatcatacaaatgtatcataacttatttaaccaatttcctattactggacattgtggtcattttaaaacctggtattattttaatatatgaagttggtatatacattttggtccttggaatgaattcccaagagtgggattgatggatcaaagattaacatattgctacatattgccaatttgaatcacataactttaaggtcttgtaaaactagtttttataagacttacgtgagaaaacatgaaagggcactatctaaaccaaggtagtcctcatttaattatttgagcaattgtacttgttgggacagagtaggactatgatagatatttaaaaactatgcgaagcaccaaagagaaatgccaaataatgggaggcaaacagatgttcaacgctgatagtttgactcaaagaatggtagaaactaaatggtaagagagatgagtgtggagttggctgtagtaacccttttctaatcttggttttgtaataaaacatctgtgctatatttaatataagccacacttaattgagcacacgtgaacacaaargcatatagcaactgttctttagcaaatgatggtggctctgtggggttgtccacagagaaaatacgtctatcctttcagtttatggagaaaatacagtaaaaagttacccttaggcaccaagttaactggaaagggagtcaaacaaaaactttttttttggcaaagatgtgtgaaacaggagaaaatgctcatacaaaagacagtaacttaaccattaagcattgcttcaagtcctttcaaagaagcaaaacctaaaatttgaaggagaacataccttagatctcaacactattgcgatatttcttaaagatctgcataagctgattcagaagaagggatatagcaaaaacattaaactctgtcaatattttgttttgaaagtgggttgtcttcacaaatctatgtttgtctcacatatgtgaatgcgtatattcaatgccacttttattgcttactttttcttaaccactatgctatgagaacttaaatttatcagacatggcttttctacctttgtccgtttttagaaatataatttccttgtttgaaggagtgtgcagttggagaagccttcccagggacgggaaggacataagttgattttaaggatgc

SEQ ID NO: 83295 - DNA, 1171 bp, Homo sapiens
attattgcatcatacaaatgtatcataacttatttaaccaatttcctattactggacattgtggtcattttaaaacctggtattattttaatatatgaagttggtatatacattttggtccttggaatgaattcccaagagtgggattgatggatcaaagattaacatattgctacatattgccaatttgaatcacataactttaaggtcttgtaaaactagtttttataagacttacgtgagaaaacatgaaagggcactatctaaaccaaggtagtcctcatttaattatttgagcaattgtacttgttgggacagagtaggactatgatagatatttaaaaactatgcgaagcaccaaagagaaatgccaaataatgggaggcaaacagatgttcaacgctgatagtttgactcaaagaatggtagaaactaaatggtaagagagatgagtgtggagttggctgtagtaacccttttctaatcttggttttgtaataaaacatctgtgctatatttaatataagccacacttaattgagcacacgtgaacacaaaagcatatagcaactgttctttagcaaatgatggtggctctgtggggttgtccacagagaaaatacgtctatcctttcagtttatggagaaaatacagtaaaaagttacccttaggcaccaagttaactggaaagggagtcaaacaaaaactttttttttggcaaagatgtgtgaaacaggagaaaatgctcatacaaaagacagtaacttaaccattaagcattgcttcaagtcctttcaaagaagcaaaacctaaaatttgaaggagaacataccttagatctcaacactattgcratatttcttaaagatctgcataagctgattcagaagaagggatatagcaaaaacattaaactctgtcaatattttgttttgaaagtgggttgtcttcacaaatctatgtttgtctcacatatgtgaatgcgtatattcaatgccacttttattgcttactttttcttaaccactatgctatgagaacttaaatttatcagacatggcttttctacctttgtccgtttttagaaatataatttccttgtttgaaggagtgtgcagttggagaagccttcccagggacgggaaggacataagttgattttaaggatgc

SEQ ID NO: 83296 - DNA, 1171 bp, Homo sapiens
attattgcatcatacaaatgtatcataacttatttaaccaatttcctattactggacattgtggtcattttaaaacctggtattattttaatatatgaagttggtatatacattttggtccttggaatgaattcccaagagtgggattgatggatcaaagattaacatattgctacatattgccaatttgaatcacataactttaaggtcttgtaaaactagtttttataagacttacgtgagaaaacatgaaagggcactatctaaaccaaggtagtcctcatttaattatttgagcaattgtacttgttgggacagagtaggactatgatagatatttaaaaactatgcgaagcaccaaagagaaatgccaaataatgggaggcaaacagatgttcaacgctgatagtttgactcaaagaatggtagaaactaaatggtaagagagatgagtgtggagttggctgtagtaacccttttctaatcttggttttgtaataaaacatctgtgctatatttaatataagccacacttaattgagcacacgtgaacacaaaagcatatagcaactgttctttagcaaatgatggtggctctgtggggttgtccacagagaaaatacgtctatcctttcagtttatggagaaaatacagtaaaaagttacccttaggcaccaagttaactggaaagggagtcaaacaaaaactttttttttggcaaagatgtgtgaaacaggagaaaatgctcatacaaaagacagtaacttaaccattaagcattgcttcaagtcctttcaaagaagcaaaacctaaaatttgaaggagaacataccttagatctcaacactattgcgatatttcttaaagatctgcataagctgattcagaagaagggatatagcaaaaacattaaactctgtcartattttgttttgaaagtgggttgtcttcacaaatctatgtttgtctcacatatgtgaatgcgtatattcaatgccacttttattgcttactttttcttaaccactatgctatgagaacttaaatttatcagacatggcttttctacctttgtccgtttttagaaatataatttccttgtttgaaggagtgtgcagttggagaagccttcccagggacgggaaggacataagttgattttaaggatgc

SEQ ID NO: 83297 - DNA, 1171 bp, Homo sapiens
attattgcatcatacaaatgtatcataacttatttaaccaatttcctattactggacattgtggtcattttaaaacctggtattattttaatatatgaagttggtatatacattttggtccttggaatgaattcccaagagtgggattgatggatcaaagattaacatattgctacatattgccaatttgaatcacataactttaaggtcttgtaaaactagtttttataagacttacgtgagaaaacatgaaagggcactatctaaaccaaggtagtcctcatttaattatttgagcaattgtacttgttgggacagagtaggactatgatagatatttaaaaactatgcgaagcaccaaagagaaatgccaaataatgggaggcaaacagatgttcaacgctgatagtttgactcaaagaatggtagaaactaaatggtaagagagatgagtgtggagttggctgtagtaacccttttctaatcttggttttgtaataaaacatctgtgctatatttaatataagccacacttaattgagcacacgtgaacacaaaagcatatagcaactgttctttagcaaatgatggtggctctgtggggttgtccacagagaaaatacgtctatcctttcagtttatggagaaaatacagtaaaaagttacccttaggcaccaagttaactggaaagggagtcaaacaaaaactttttttttggcaaagatgtgtgaaacaggagaaaatgctcatacaaaagacagtaacttaaccattaagcattgcttcaagtcctttcaaagaagcaaaacctaaaatttgaaggagaacataccttagatctcaacactattgcgatatttcttaaagatctgcataagctgattcagaagaagggatatagcaaaaacattaaactctgtcaatattttgttttgaaagtgggttgtcttcacaaatctatgtttgtctcacatatgtgaatgcgtatattcaatgccacttttattgcttactttttcttaaccactatgctatgagaacttaaatttatcagacatggcttttctacctttgtccgtttttagaaatataatttccttgtttgaaggagtgtgcagttggagaagscttcccagggacgggaaggacataagttgattttaaggatgc
